United States Patent Application Publication US 2014/0259212 A1 - sequence listing, part 23

SEQ ID NO: 74370 - protein, 453 aa, Oceanicola batsensis HTCC2597; identical to SEQ ID NO: 32222

SEQ ID NO: 74371 - DNA, 1422 bp, Synechococcus sp. WH 7805
  CDS (1)..(1422): transl_table=11
atggctacgaccgcccaggatgtgctccgtcagatcaaggatgaaggcattgaactcattgatctcaagttcaccgacctccacggcaagtggcagcacctgaccatctgttccgatcttctggaagctgagtccttcaacgagggacttgcctttgacggatcctcaattcgcggatggaagagcattgacgcgtccgacatggcgatggtgccagacccatcaacggcctggatcgatccgttttacagccacaagactctcagcttgatctgttcgattcaggatccgcgaaccggcgacgcttacgatcgctgcccgcgtgctctcgctcagaaggcactggcctacttatcaggcagcggtctcgctgacacggcctttttcggacctgagcctgaattcttcctgttcgatgacgtgcgatacagctccagcgaaggaggaagcttttacagcgttgacaccatcgaagccgcctggaactccggacggctcgaagaaggcggaaaccttggctacaagatccagttaaaagagggatatttccccgtttcacccaacgacacagcgcaggacatccgttctgaaatgctgctcgtgatggcccaacttgggatccccatcgaaaagcatcaccatgaagttgccggtgcagggcagcacgaactaggcatgaaattcgccgagctgatccaggcggcggacaacaccatgacctacaaatatgtcgttcgcaatgtggcgaagaagtacggcaaaaccgccacattcatgcccaagccagtgttcaacgacaacggcagtggcatgcacgtgcaccagagcctctggaaaggaggccaaccgctgttcttcggcgaaggcactgaggccaacctgtcccaaaccgcccgctggtatatcggcgggatcctcaaacacgcgccttcattcctcgcattcaccaaccccaccaccaacagctacaagcgcctggtgccgggcttcgaagcaccagtcaatctcgtgtactccgaaggcaatcgctcagctgcggtgcgtatccctctgactggacccaatcccaaggccaagcgccttgagttccgctccggagacgcactggccaacccttatctggctttcgccgccatgatgatggccggcattgatggcatcaaaaatcagattgatccgggcgctcccacgaatgtggacctcttcgagctgtccgcagaacgcctgagtgagattgacacggttccagcctcactgaatggtgctttggaagcgctcaatgctgatcatcactacctcatggaaggtggtgtgttcaccaaagacttcattgataactggatcgatttgaagtacgaggaggtgcagcagcttcgccagcgtccgcacccccacgaattcaccatgtactacgacgcctga

SEQ ID NO: 74372 - protein, 473 aa, Synechococcus sp. WH 7805
MATTAQDVLRQIKDEGIELIDLKFTDLHGKWQHLTICSDLLEAESFNEGLAFDGSSIRGWKSIDASDMAMVPDPSTAWIDPFYSHKTLSLICSIQDPRTGDAYDRCPRALAQKALAYLSGSGLADTAFFGPEPEFFLFDDVRYSSSEGGSFYSVDTIEAAWNSGRLEEGGNLGYKIQLKEGYFPVSPNDTAQDIRSEMLLVMAQLGIPIEKHHHEVAGAGQHELGMKFAELIQAADNTMTYKYVVRNVAKKYGKTATFMPKPVFNDNGSGMHVHQSLWKGGQPLFFGEGTEANLSQTARWYIGGILKHAPSFLAFTNPTTNSYKRLVPGFEAPVNLVYSEGNRSAAVRIPLTGPNPKAKRLEFRSGDALANPYLAFAAMMMAGIDGIKNQIDPGAPTNVDLFELSAERLSEIDTVPASLNGALEALNADHHYLMEGGVFTKDFIDNWIDLKYEEVQQLRQRPHPHEFTMYYDA

SEQ ID NO: 74373 - DNA, 1347 bp, Oceanospirillum sp. MED92; identical to SEQ ID NO: 32223
  CDS (1)..(1347): transl_table=11

SEQ ID NO: 74374 - protein, 448 aa, Oceanospirillum sp. MED92; identical to SEQ ID NO: 32224

SEQ ID NO: 74375 - DNA, 1353 bp, Oceanobacter sp. RED65; identical to SEQ ID NO: 32225
  CDS (1)..(1353): transl_table=11

SEQ ID NO: 74376 - protein, 450 aa, Oceanobacter sp. RED65; identical to SEQ ID NO: 32226

SEQ ID NO: 74377 - DNA, 1386 bp, marine gamma proteobacterium HTCC2143; identical to SEQ ID NO: 32227
  CDS (1)..(1386): transl_table=11

SEQ ID NO: 74378 - protein, 461 aa, marine gamma proteobacterium HTCC2143; identical to SEQ ID NO: 32228

SEQ ID NO: 74379 - DNA, 1380 bp, marine gamma proteobacterium HTCC2080
  CDS (1)..(1380): transl_table=11
gtgctaacacctcaagacataaacagcgttgacgatgccaagcgtattgtcagcgagcgcaacctaagccacgtcaaaattggcttgttcgacattgacggcgtcatgcggggcaaatacctgcgtaaagaaaagttctttgccgccctcgataaaggcctggccttttgcgacgtggtgctgggctgggactctggcgatcagctctatgagggtgttggcgtggagtacaccggctggcacacgggttaccccgatgccccggtgcaagtggtgcccggtagctgccgagacattccttttgaaccgggcatgctgctgtttttatgtgagtttgccggcgacgccgcagcactttgcccccgcaacgtgttggcccgcaccctagagcgcgccgccgacatgggctataccgcccacgccgcttttgaatacgagttctttttgtttaacgaaactccccattcggtgcgacaaaaaaattatcaaaacttacagcccataacgccggggttttttggttactccatgctgcgcaactcggtgtacgccgagctgtatcaagagttattagatatgggtgaggccatgggctttcccattgaggggctgcataccgagaccggccccggagtcattgaagccgcactggtcgtagatgaggccggcaacgctgccgacaaagcagcactgtttaaaaccttcaccaaagtctgggcccagcgccgtgatcttatggccacctttatggccaaatggtccaacgactacccaggacagtcggggcacattcatgtgtcactgcgccacaaagacgacggccgttcagcattctttgacgccgaccaacccctcaccatgagcgacacccagcggcattttattggcgggcaacagcgctacatgcccgagctgctggccatggtggcctctaccgtgaacgcctatacccgcctggtgccggggttctgggcacccaccgatgccacctggggctgcgaaaatcgcaccaccgccctgcggttaataccgggtagcgacagctctcagcgggtggaatatcgcgtagggccggccgacgccaacccttacttggccctgagcgcggccttggcctcggggcttcaaggtattgccgagggcctcgagcccgagcccatggtagaaggcaacgcctacgaccaaacacaccccgggcacctcgccctgccccaatcgctaagcgatgccaccgcgttatttaagcattcccgcacggcgcgcagcctgtttggtgatgcctttgtcgaccactttgccgctagccggcagtgggaagcctcggagcatcgcaagcacgtgagcgactgggaactgcaacgttatttcgaaattatttga

SEQ ID NO: 74380 - protein, 459 aa, marine gamma proteobacterium HTCC2080
MLTPQDINSVDDAKRIVSERNLSHVKIGLFDIDGVMRGKYLRKEKFFAALDKGLAFCDVVLGWDSGDQLYEGVGVEYTGWHTGYPDAPVQVVPGSCRDIPFEPGMLLFLCEFAGDAAALCPRNVLARTLERAADMGYTAHAAFEYEFFLFNETPHSVRQKNYQNLQPITPGFFGYSMLRNSVYAELYQELLDMGEAMGFPIEGLHTETGPGVIEAALVVDEAGNAADKAALFKTFTKVWAQRRDLMATFMAKWSNDYPGQSGHIHVSLRHKDDGRSAFFDADQPLTMSDTQRHFIGGQQRYMPELLAMVASTVNAYTRLVPGFWAPTDATWGCENRTTALRLIPGSDSSQRVEYRVGPADANPYLALSAALASGLQGIAEGLEPEPMVEGNAYDQTHPGHLALPQSLSDATALFKHSRTARSLFGDAFVDHFAASRQWEASEHRKHVSDWELQRYFEII

SEQ ID NO: 74381 - DNA, 1344 bp, marine gamma proteobacterium HTCC2080; identical to SEQ ID NO: 37772
  CDS (1)..(1344): transl_table=11

SEQ ID NO: 74382 - protein, 447 aa, marine gamma proteobacterium HTCC2080; identical to SEQ ID NO: 37773

SEQ ID NO: 74383 - DNA, 1383 bp, marine gamma proteobacterium HTCC2080
  CDS (1)..(1383): transl_table=11
atggaatatgcggatcaagctgaactcgatcgctttatgcagatgcacccgaatattgaggtgatcgagctcatcatgcctgatttctcaggtattcctcggtgtaaacgtatacagcgatctgagttcaagcggctctttagcggcacatttttgtcaccccagtcagcaccgcttttgggggtgcgcggcaacttctatgaaactacgccctacccggaactgggaggcgatcccgatcaaatcatacgtcccgttgctggaacactggcagttgtgccgtggtacgagtcaccggtggctcaagtcctggtggcttacaccgatgaaagcggtgagcttgattgggttgatacccgctgcccgctggtgtcggtacttaacaaatttgcggcctcagggcttcaccctaccgtggccaccgagcttgagttctacttactaggccattctgagggcgagcgcccggcaccgctcaaaggaaatattccgggcacccaatgggttcaggagggaattcagtactgcatgtctgacgatctctttgattgtgatgcttttttaaatgacgtacgtattgccagtgagcttcaggatgttcccctaacggctattcatagcgagttttcaccaggtcagtgggaaataaatacgcaccaccaaaccgatgtgctgttggcagcgcagcatgggttgctgctgcggcgcattgtaaagggggttgcacggaaacacgggtttggcgcgacattcatggctaagccttttgcggacattcctggcagtggcatgcacattcatgccagcgtctatgacgcggctggtgccaatatttttgctgctcctgaggcaaccgaccctccacacctgatgccacgattgcgtcatgccgtggcgggcttagggaccctgctcgatgcctcgatgttgtgctttgcgccgaatcccaactcttatcggcgtgtgcaggcgggtgcactggcgccttcaggaaagaattggggctatgatcaccgtgacgtggcacttcgcatcccgcgctccaacgaacagagtcgtcgtattgagcaccgtgtagccggtgccgatgctaatccctatttagtgctggcagcggttttagccggtattcattgggggctcggtcagcagggcgatccgggtgcaccagtgccccgagaggcagatctttcagaagatgaaacgtctttaccgattcgcctagatgaagcgatacgatttttttcggacagtcagatcatgcaagattatttaggcgaaaagtttacccgggtttatggcgctattcgtcggggcgagagcaatgactactacagtcagatcccggacttagactatcagtggtatctgagagcgttgtaa

SEQ ID NO: 74384 - protein, 460 aa, marine gamma proteobacterium HTCC2080
MEYADQAELDRFMQMHPNIEVIELIMPDFSGIPRCKRIQRSEFKRLFSGTFLSPQSAPLLGVRGNFYETTPYPELGGDPDQIIRPVAGTLAVVPWYESPVAQVLVAYTDESGELDWVDTRCPLVSVLNKFAASGLHPTVATELEFYLLGHSEGERPAPLKGNIPGTQWVQEGIQYCMSDDLFDCDAFLNDVRIASELQDVPLTAIHSEFSPGQWEINTHHQTDVLLAAQHGLLLRRIVKGVARKHGFGATFMAKPFADIPGSGMHIHASVYDAAGANIFAAPEATDPPHLMPRLRHAVAGLGTLLDASMLCFAPNPNSYRRVQAGALAPSGKNWGYDHRDVALRIPRSNEQSRRIEHRVAGADANPYLVLAAVLAGIHWGLGQQGDPGAPVPREADLSEDETSLPIRLDEAIRFFSDSQIMQDYLGEKFTRVYGAIRRGESNDYYSQIPDLDYQWYLRAL

SEQ ID NO: 74385 - DNA, 1431 bp, marine gamma proteobacterium HTCC2080; identical to SEQ ID NO: 32229
  CDS (1)..(1431): transl_table=11

SEQ ID NO: 74386 - protein, 476 aa, marine gamma proteobacterium HTCC2080; identical to SEQ ID NO: 32230

SEQ ID NO: 74387 - DNA, 1359 bp, Pseudomonas putida GB-1; identical to SEQ ID NO: 32231
  CDS (1)..(1359): transl_table=11

SEQ ID NO: 74388 - protein, 452 aa, Pseudomonas putida GB-1; identical to SEQ ID NO: 32232

SEQ ID NO: 74389 - DNA, 1383 bp, Pseudomonas putida GB-1; identical to SEQ ID NO: 32235
  CDS (1)..(1383): transl_table=11

SEQ ID NO: 74390 - protein, 460 aa, Pseudomonas putida GB-1; identical to SEQ ID NO: 32236

SEQ ID NO: 74391 - DNA, 1377 bp, Pseudomonas putida GB-1; identical to SEQ ID NO: 32237
  CDS (1)..(1377): transl_table=11

SEQ ID NO: 74392 - protein, 458 aa, Pseudomonas putida GB-1; identical to SEQ ID NO: 32238

SEQ ID NO: 74393 - DNA, 1359 bp, Pseudomonas putida GB-1; identical to SEQ ID NO: 32239
  CDS (1)..(1359): transl_table=11

SEQ ID NO: 74394 - protein, 452 aa, Pseudomonas putida GB-1; identical to SEQ ID NO: 32240

SEQ ID NO: 74395 - DNA, 1407 bp, Pseudomonas putida GB-1
  CDS (1)..(1407): transl_table=11
atgtcgaagtcggttcaactcatcaaagatcatgacgtcaagtggattgatctgcgtttcacggacaccaaaggcattcagcaccacgtgaccatgccgtcgcgtgatgcgctggacgaagacttcttcgaagtcggcaagatgttcgacggttcctccatcgctggctggaaaggcatcgaagcctccgacatgatcctgatgccggtcgacgacactgccgtcctggacccgttcaccgaagagccaaccctgatcatcacctgcgacatcgtcgacccgtcgagcatgcagggctacgatcgcgacccacgcgccatcgccaagcgtgccgaagagtacctgaagagcaccggcatcggtgacaccgtcttcgccggcccagagcctgagttcttcatcttcgacgaagtgaagttcaagtcggacatttccggctcgatgttcaagatcttctccgagcaaggctcgtggatgaccgacgctgacgtggaaggcggcaacaaaggccaccgtccaggcgtgaagggcggctacttcccggttccgccgttcgaccacgaccacgaaatccgtactgccatgtgcaacgcactggaagaaatgggccagaccgttgaagttcaccaccacgaagtggcgactgccggccagaacgaaatcggcgtcaagttcaacaccctggtgaaaaaggctgacgaagtacaggcgctgaaatacgtcgtgcacaacgttgccgacgcctacggccgtaccgccaccttcatgcctaagcctctgtacggcgacaacggctcgggcatgcacgtacacatgtcgatctggaaagacggcaagaacaccttctcgggtgaaggctatgccggcctgtccgacaccgccctgtacttcatcggcggtatcatcaagcacggtaaggccctgaacggcttcaccaacccgtcgaccaactcctacaagcgtctggtcccaggcttcgaagccccggtaatgctggcctactcggctcgcaaccgttccgcctcgatccgtattccttacgtcggcagcccgaaagcccgccgtatcgaagcccgcttcccggacccatcggccaacccgtacctggccttcgcggccctgctgatggctggcctggatggcatccagaacaagatccacccaggcgacgcggccgacaagaacctgtacgacctgccaccagaagaagccaagaacatcccgcaagtgtgcggcagcctgaaagaggctctggaagagctggacaaaggccgcgcgttcctgaccaagggcggcgtgttctccgacgacttcatcgatgccttcatcgagctgaagagcgaagaagaaatcaaggtccgcaccttcgtacacccgctggaatacgagctgtactacagctgctga

SEQ ID NO: 74396 - protein, 468 aa, Pseudomonas putida GB-1
MSKSVQLIKDHDVKWIDLRFTDTKGIQHHVTMPSRDALDEDFFEVGKMFDGSSIAGWKGIEASDMILMPVDDTAVLDPFTEEPTLIITCDIVDPSSMQGYDRDPRAIAKRAEEYLKSTGIGDTVFAGPEPEFFIFDEVKFKSDISGSMFKIFSEQGSWMTDADVEGGNKGHRPGVKGGYFPVPPFDHDHEIRTAMCNALEEMGQTVEVHHHEVATAGQNEIGVKFNTLVKKADEVQALKYVVHNVADAYGRTATFMPKPLYGDNGSGMHVHMSIWKDGKNTFSGEGYAGLSDTALYFIGGIIKHGKALNGFTNPSTNSYKRLVPGFEAPVMLAYSARNRSASIRIPYVGSPKARRIEARFPDPSANPYLAFAALLMAGLDGIQNKIHPGDAADKNLYDLPPEEAKNIPQVCGSLKEALEELDKGRAFLTKGGVFSDDFIDAFIELKSEEEIKVRTFVHPLEYELYYSC

SEQ ID NO: 74397 - DNA, 1323 bp, Pseudomonas putida GB-1; identical to SEQ ID NO: 32241
  CDS (1)..(1323): transl_table=11

SEQ ID NO: 74398 - protein, 440 aa, Pseudomonas putida GB-1; identical to SEQ ID NO: 32242

SEQ ID NO: 74399 - DNA, 1365 bp, Pseudomonas putida GB-1; identical to SEQ ID NO: 32243
  CDS (1)..(1365): transl_table=11

SEQ ID NO: 74400 - protein, 454 aa, Pseudomonas putida GB-1; identical to SEQ ID NO: 32244

SEQ ID NO: 74401 - DNA, 1347 bp, Pseudomonas putida GB-1; identical to SEQ ID NO: 32245
  CDS (1)..(1347): transl_table=11

SEQ ID NO: 74402 - protein, 448 aa, Pseudomonas putida GB-1; identical to SEQ ID NO: 32246

SEQ ID NO: 74403 - DNA, 1350 bp, Marinobacter sp. ELB17; identical to SEQ ID NO: 32247
  CDS (1)..(1350): transl_table=11

SEQ ID NO: 74404 - protein, 449 aa, Marinobacter sp. ELB17; identical to SEQ ID NO: 32248

SEQ ID NO: 74405 - DNA, 1410 bp, Moritella sp. PE36
  CDS (1)..(1410): transl_table=11
atgtcagcagaaagcgtattagctctaattaaagaacaagacgttaaatttgtagatttacgttttacagatacgaaaggtaaagagcagcacgtttctctaccacatcatcaagttaatgccggcttctttgaagaaggtaaaatgtttgatggttcatcaattgaaggttggaaaggcatcaacgaatctgacatgattttaatgccagacccggcaacagccgtacttgacccgttcacagaagcaacaacactgaatcttcgttgtgacgtactagaacctgcaacaatgcaaggttatagccgtgacccacgttcagtagcaaaacgtgcacttgcatatttacgctcaaccggtatcgctgatgatgtattcttcggtccggaaccagaatttttcctatttgatgatgttaagtataaaactgacatgtcaggtagtatgtacaaaattgacgctgaagaagcttcttggaactctgataaagagtacgaaggcggcaacatgggtcaccgtccaagcgttaaagggggttacttcccagtatcaccagttgactctgcacaagacatccgtagcgcaatgtgcctaataatggaagaaatgggcttaacagttgaagcacatcaccatgaagtagcaacagcgggtcaaaacgagatcgcagcactatacaactcaatcgttgaaaaagcggatgaagttcaaattaccaaatacgtgatccataatgtggcacacgcttacggcaaaacagcaacgtttatgcctaagccactggtaggcgataacggttcaggtatgcattgtcaccaatcactacagaaaaatggcgaaaacattttttctggtgatctgtatggcggtctatctgaaactgcactttattacattggtggtatcatcaagcacgcaaaagcaattaacgcatttgctaacccaacaactaactcgtacaaacgtttagttccaggttttgaagcaccagtaatgctagcttattcagcgcgtaaccgttcagcatcaattcgtatcccaatcgtaccatcgccaaaagcgacacgtattgaagtacgtttcccagatccagcagcaaatccatatttagcattctctgcaatgttaatggcgggtattgacggtattaaaaaccgcatccaccctggtgatgcaatggataaagatttatacaacctaccagcagaagaagcagcagaaattccacaggttgcctcttcactagaagaagcactatcagcactcgatactgaccgtgatttcttaacggctggcgatgtaatggctgacgatactatcgatgcttacattgcaataaaagaacaagaagttgaaagactgaacatgacgactcacccaattgagtttgaaatgtattacagcgtataa

SEQ ID NO: 74406 - protein, 469 aa, Moritella sp. PE36
MSAESVLALIKEQDVKFVDLRFTDTKGKEQHVSLPHHQVNAGFFEEGKMFDGSSIEGWKGINESDMILMPDPATAVLDPFTEATTLNLRCDVLEPATMQGYSRDPRSVAKRALAYLRSTGIADDVFFGPEPEFFLFDDVKYKTDMSGSMYKIDAEEASWNSDKEYEGGNMGHRPSVKGGYFPVSPVDSAQDIRSAMCLIMEEMGLTVEAHHHEVATAGQNEIAALYNSIVEKADEVQITKYVIHNVAHAYGKTATFMPKPLVGDNGSGMHCHQSLQKNGENIFSGDLYGGLSETALYYIGGIIKHAKAINAFANPTTNSYKRLVPGFEAPVMLAYSARNRSASIRIPIVPSPKATRIEVRFPDPAANPYLAFSAMLMAGIDGIKNRIHPGDAMDKDLYNLPAEEAAEIPQVASSLEEALSALDTDRDFLTAGDVMADDTIDAYIAIKEQEVERLNMTTHPIEFEMYYSV

SEQ ID NO: 74407 - DNA, 1479 bp, Pseudomonas putida
  CDS (1)..(1479): transl_table=11
atgagcgggaaattcattgaaaagcacggcatctggtcggatacccagaaagccgcagcagcagacgtcctgaataaaattgagaaagcggggctgcagatggttcggttgtcttggccggatcagtacggactgctgcgcggaaaaatgctgtcggtcgccgcgctcaggtcggcattcgccagcggctcagagatcacgatggcgccgttcttcttcgataccgccagcgccatcgttttcaaccctttctccgcagacggcggcctcggcagcgccgaactggccggtagccccaatgtcgtgatggttccggaccccaccacctttcgcatcctgccctgggcggaccgcaccggctggatgctggccgacctttacatgaccagcgggcgcccgttcgcgttgagtccgcgcgccatcctgaaaaaggcgctggtcgagatgcaggacctgggctacgactaccaggccggcctcgaggtcgagtggtatctgacgcgcatcgtcgatccctgcctggagcccgaaacccttggcggccccggaacgcctgcggcgcctcccaaggtgatgccggtggccaaagggtattcgtacctgctggagaaccacctggacgaggtcgagcccatcatggccgaggtgcgccagcacctgttggccctggggatgcccctgcgcagcatcgaggacgagtgggcgccgagccagatggagaccaccttcgacgtgatgcccggcctggacgtggcggacacgatggtgctgttccgcaacgcggtcaagcaggtctgccgtcggcgaggctatctcgcgagcttcatgtgcaagcccgccatccaaggctttttagcctccggctggcacctccaccagtcactcacggcgcgggactcgggcgccaacgccttcattccgcagccgggcgaggcgctctcggcgctggggcgctcctacgtcggcgggctgctcgagcatgcctgcgcagcgtcgagcttcaccacgccgacgatcaacggttaccgccgtcgccgcccgtattcgctggcgccagatcgcgtgacctgggccaaggacaaccgcgccgcgatggcgcgtgtcatctccgcacccggcgacccggccagccgggtggagaaccggatcggcgagccggcggccaacccctatctctacctggcttcccaggtgttttccgggatcgacggcatccgccgccaactcgatccggggccgctgcaggaaacaccctatgcgggggacgtcaccatcctgcctcataacctgtccgaggcgctggaggttctggaaacctcgaaattcttccgtgaggcattcggcgaggaattcatccgttattggatgcatttgcggcgcagcgaatggaaaaggtttgttgacgccgaagggcaggttgatttctcgggtgatccggttaccaactgggagcatcgtgaatatttcgagcttttctga

SEQ ID NO: 74408 - protein, 492 aa, Pseudomonas putida
MSGKFIEKHGIWSDTQKAAAADVLNKIEKAGLQMVRLSWPDQYGLLRGKMLSVAALRSAFASGSEITMAPFFFDTASAIVFNPFSADGGLGSAELAGSPNVVMVPDPTTFRILPWADRTGWMLADLYMTSGRPFALSPRAILKKALVEMQDLGYDYQAGLEVEWYLTRIVDPCLEPETLGGPGTPAAPPKVMPVAKGYSYLLENHLDEVEPIMAEVRQHLLALGMPLRSIEDEWAPSQMETTFDVMPGLDVADTMVLFRNAVKQVCRRRGYLASFMCKPAIQGFLASGWHLHQSLTARDSGANAFIPQPGEALSALGRSYVGGLLEHACAASSFTTPTINGYRRRRPYSLAPDRVTWAKDNRAAMARVISAPGDPASRVENRIGEPAANPYLYLASQVFSGIDGIRRQLDPGPLQETPYAGDVTILPHNLSEALEVLETSKFFREAFGEEFIRYWMHLRRSEWKRFVDAEGQVDFSGDPVTNWEHREYFELF

SEQ ID NO: 74409 - DNA, 1506 bp, Delftia sp
  CDS (1)..(1506): transl_table=11
atgccggaaaacccggagacaaaaatgagccagaaattcattgatcggcacggcttgtggtccgacgcccagaaggcggcggccgttgaagtgctgaagaaaatcgagcaggacggcattcagatgattcgcctctcatggccggatcaatatggtctgctgcgcgggaaaatgctgtcggtggcagccttgcgctccgcattcggcagcggctcggaaatcaccatggcgccctttttcttcgacacggtcagcaccttcgtgttcaatcccttttcctcggatggcgggtttggcaacccggagttggcgggcagccctaacgtggtgatggtgcccgaccccaccaccttccgcgtgctgccctgggctgatcgcacgggctggatgctggccgatctgtacatgcgtagcggtcggcccttcccgctgagcccgcgtgccctgttgaagaaagcgctggggcagttggcggatctgggctatgacttccatggtggcctggaggtggagtggtacttgacgcgcatcgtcgacccctgcctggagcccgagacgctgggtggccccggcacaccggcggcaccgcccaaggtgatgccggtcgccaagggctactcctatctgctcgaaaatcacttggacgaggtcgaacccatcatggccgaggtgcgccagcacctgctgacgctgggcatgccgttgcgcagcatcgaggatgaattggggcccagccagatggagaccaccttcgacgtcatgtccggcctggacatggccgacaccatggtgttgttccgcaacgcagtcaagcaaatctgtcggcggcgcggttaccttgccagtttcatgtgcaaacccaagattgagggtttcattgcctcgggctggcatctgcaccagtcgctggcggcgcgcgactccggcgtcaatgccttcgttccgcagacgggcgagccgctgtcggcgctgggccgggcctatgtcggtggcctgctcaaacatgcctgtgcggcctccagcttcaccacccccacggttaacggctaccgacgccgacgcccgttctctctggccccggatcgggtgacctgggccgaggacaaccgcgccgccatggcgcgcgtgatcgccgccccagaagactcagccagccgtgtggaaaaccgggtcggcgagccggcggccaacccctacctgtatctggcctcgcagctcttctcggggatcgatggcattcgtcgccaactcgatcccggccctctgcaggaaacgccctatgccgccgacgttccgatcctgccgcgcaacctggccgaggcgctggacgtgctggagggctccagcttcttccgcgaagccttcggcgaagagttcatccactactggctgcacctgcggcgcagcgaatgggcgcgcttcgtggccgccgaaggcgccgacgtggacatggcgggcgaccccgtcaccgactgggagcatcgcgagtacttcgaactgttctga

SEQ ID NO: 74410 - protein, 501 aa, Delftia sp
MPENPETKMSQKFIDRHGLWSDAQKAAAVEVLKKIEQDGIQMIRLSWPDQYGLLRGKMLSVAALRSAFGSGSEITMAPFFFDTVSTFVFNPFSSDGGFGNPELAGSPNVVMVPDPTTFRVLPWADRTGWMLADLYMRSGRPFPLSPRALLKKALGQLADLGYDFHGGLEVEWYLTRIVDPCLEPETLGGPGTPAAPPKVMPVAKGYSYLLENHLDEVEPIMAEVRQHLLTLGMPLRSIEDELGPSQMETTFDVMSGLDMADTMVLFRNAVKQICRRRGYLASFMCKPKIEGFIASGWHLHQSLAARDSGVNAFVPQTGEPLSALGRAYVGGLLKHACAASSFTTPTVNGYRRRRPFSLAPDRVTWAEDNRAAMARVIAAPEDSASRVENRVGEPAANPYLYLASQLFSGIDGIRRQLDPGPLQETPYAADVPILPRNLAEALDVLEGSSFFREAFGEEFIHYWLHLRRSEWARFVAAEGADVDMAGDPVTDWEHREYFELF

SEQ ID NO: 74411 - DNA, 1512 bp, Streptomyces ambofaciens; identical to SEQ ID NO: 32251
  CDS (1)..(1512): transl_table=11

SEQ ID NO: 74412 - protein, 503 aa, Streptomyces ambofaciens; identical to SEQ ID NO: 32252

SEQ ID NO: 74413 - DNA, 1440 bp, Aspergillus oryzae; identical to SEQ ID NO: 32253
  CDS (1)..(1440)

SEQ ID NO: 74414 - protein, 479 aa, Aspergillus oryzae; identical to SEQ ID NO: 32254

SEQ ID NO: 74415 - DNA, 1416 bp, Aspergillus oryzae
  CDS (1)..(1416)
atgtcgttccccgaggtcaccgccgcgaatgtggccgaggtgctccacaatgatcgtatggtcatcgccggcgtggacgtagacggccagctgcgcggcaaactcatgaagaagagcaagttcttatctatcgccaccggtgggttcggtttctgctccattatctttggctgggaccaacaagacacgggctatcctaaggagctcgctatatgcaacgaagagaatggctatagagatctaattgcagtcccggatctgagcagctttcggcgtatccggtgggagaataaagtgcctttcttccttctcagcttcttagacccggacacacaagagccagtctgcgcgtgcccacgagggctgttgaaaaatgcgactgcgaaagttgaggctgccggacccccggctgatatgtttgcagccgagtatgagttcggccattttcggataccgggtgatagttttagcccggaacgcgctgcatctggcatcacatccttcatacaaaacaattcggttgactcgctaccatcactaacagagggtatgtttgggtactccatgactcgctcgttgcacagtgagaattatcatgacggaattctcgatgcatgtgaacagttccgttgtaatattgaggaatggcgtgcgaagagcggtcccggtgcttttgaagcttgcagcgaggccaaggatatggcagataaggctagcttatgcaaatacgttgtcaaggcctacggtatcaaacacggcatcacaccttgtttcatggcaaagccgcgccacgagctacctgggaatggtgggcacatgaatatttctctcattaccgccgatggcaaaagtgctttcactcgcgacactcccgatccgtctcctccttacccagatgtggcacatttgtcggatctcggtcgccaattcctcaccggtctattggtaggcttaccggacatcatgccgctgtttgcaccaactattaattcttataagcgtctggtggaggacctctgggctcctaacactgtatcctggggtctggagcaccgcgcagcgttcattcgactgattacacccccaactgctaacgcgaatgccacccgctttgaaatccgtgttcctggtgcagatgccaatccgcacttcgtgtttgccgcaataatagccctcggctggcgtggcgtagagaaaaagctcgaaattcctgtgccaccgttgcccaagggcgaggatatgagtagctctagcgataagagtatgcccttggccaaggcattgaaagaggcagtggccacgttcacacggctagatagtgtggctcgagaggtgtttggagacagcttcgttgaacactttggtggcacgagggagtataaaatccaactgtgggagcaagccgtgactgactga

SEQ ID NO: 74416 - protein, 471 aa, Aspergillus oryzae
MSFPEVTAANVAEVLHNDRMVIAGVDVDGQLRGKLMKKSKFLSIATGGFGFCSIIFGWDQQDTGYPKELAICNEENGYRDLIAVPDLSSFRRIRWENKVPFFLLSFLDPDTQEPVCACPRGLLKNATAKVEAAGPPADMFAAEYEFGHFRIPGDSFSPERAASGITSFIQNNSVDSLPSLTEGMFGYSMTRSLHSENYHDGILDACEQFRCNIEEWRAKSGPGAFEACSEAKDMADKASLCKYVVKAYGIKHGITPCFMAKPRHELPGNGGHMNISLITADGKSAFTRDTPDPSPPYPDVAHLSDLGRQFLTGLLVGLPDIMPLFAPTINSYKRLVEDLWAPNTVSWGLEHRAAFIRLITPPTANANATRFEIRVPGADANPHFVFAAIIALGWRGVEKKLEIPVPPLPKGEDMSSSSDKSMPLAKALKEAVATFTRLDSVAREVFGDSFVEHFGGTREYKIQLWEQAVTD

SEQ ID NO: 74417 - DNA, 1503 bp, Acinetobacter sp
  CDS (1)..(1503): transl_table=11
atgagtgagaaattagattttataacgaaaaataatctttggacagataagcagcgagatgcagccgacaaagttctcgcagaaattgattctttagggcttgagatgattcggctctcctgggctgatcagtatggtctcttgcgaggtaaggcgctgtcggtagcagccctcaaggcggcattctcagaagggtcagaagttacgatggcacctttctctttcaacctagtcagcgaatgggttttcaacccatttactgctggtggtggcttcggaattgatgagtttgatgagttgggtggtgtcccgagtgtggtgatggttccagatcctacgacgttcaaggtcttaccttgggcagataaaaccggctggatgctggcagatctgcattggaaatctggtgaaccattcccattatgtccccgcggtatcatgaagaaggctgtcaaatcgttaagcgatgaaggttacttatttaaatgcggtattgagcttgaatggtacttgacgaaaattgttgatcgctcactttctccagagagtttaggtgcgccaggtgtacagcctgatgccattcaagttcaacccgtggcgcaagggtactcctatctacttgaatatcacttagatcaggtggacgatattatgtccaaggttcgaaaaggtcttctcgagctcaatctgcctttgcgctcaatagaagatgagttggcaccaagccaaatggaaaccacgtttgatgtaatggaaggtttagaagcagccgatgcagcgctacttataaaatcggccatcaaacaaatatgttcacgacatggttatcacgcaacatttatgtgcaagccggcaattaacgggttctctgttgcttcaggctggcatatgcatcaatcactagtggataaagatacccgaaagaatctttttataccctcagaaggggaagtggtatccccgctaggtcgagcttatgctggtggattacttgcaaatggtagtgccgcctcgagtttcacaacaccaactgtgaatgggtatcgaagacgtcagccgcactcgcttgcaccagaccgaagagcttgggcgaaagaaaacaaggcagcgatggtccgtgtaatttctgcaacaggcgatccggctagccggatcgaaaatcgtattggtgagcccggcgccaacccttatttatatatggcatcacaaattgtctctgggcttgatggcattaaaatcaaaagggatcccggcgggttgcaaggggctccttatggtgcacaagtaccaatgctgccaacggctttggctgaggctctggatgctcttgagcacgattcggagttgtttagaagctgctttggcgacacctttattaaatattggctgcaattaagaagatccgagtgggcaagatttctcgatgctgaaggtgctgaggctgctgagcctacaggtgctgtcacgcagtgggaacaaaaagaatacttcaacttactgtga

SEQ ID NO: 74418 - protein, 500 aa, Acinetobacter sp
MSEKLDFITKNNLWTDKQRDAADKVLAEIDSLGLEMIRLSWADQYGLLRGKALSVAALKAAFSEGSEVTMAPFSFNLVSEWVFNPFTAGGGFGIDEFDELGGVPSVVMVPDPTTFKVLPWADKTGWMLADLHWKSGEPFPLCPRGIMKKAVKSLSDEGYLFKCGIELEWYLTKIVDRSLSPESLGAPGVQPDAIQVQPVAQGYSYLLEYHLDQVDDIMSKVRKGLLELNLPLRSIEDELAPSQMETTFDVMEGLEAADAALLIKSAIKQICSRHGYHATFMCKPAINGFSVASGWHMHQSLVDKDTRKNLFIPSEGEVVSPLGRAYAGGLLANGSAASSFTTPTVNGYRRRQPHSLAPDRRAWAKENKAAMVRVISATGDPASRIENRIGEPGANPYLYMASQIVSGLDGIKIKRDPGGLQGAPYGAQVPMLPTALAEALDALEHDSELFRSCFGDTFIKYWLQLRRSEWARFLDAEGAEAAEPTGAVTQWEQKEYFNLL

SEQ ID NO: 74419 - DNA, 1482 bp, Comamonas acidovorans; identical to SEQ ID NO: 32259
  CDS (1)..(1482): transl_table=11

SEQ ID NO: 74420 - protein, 493 aa, Comamonas acidovorans; identical to SEQ ID NO: 32260

SEQ ID NO: 74421 - DNA, 1482 bp, Frateuria sp
  CDS (1)..(1482): transl_table=11
atgagcaagaagttcatagagcagcacggattgtggacggatgtccaaaaggccgcagctgtcgaggtactgaagcaggcggaccaagcgggcctgcagatgattcgcctttcgtggccggaccaatatgggctactgcgcggaaagatgctctcgatcgcagctttgcgatccgctttcggtagtggctcagaaatcacgatggcaccgttcttcttcgataccgccagcgccatcgtattcaatccgttctctgccgacggtggttttggtagtgcagagttggccggaagccctaacgttgtgatggtgcctgatcctacgacgtttcacatcctgccgtgggcggatcgcaccggctggatgctggctgatctctacatgaccagtgggcgaccgttcccgctgagtcctcgcgccatcctcaaaaagggactgcgggaactggaggcactgggctatgacttccaagccgggttggaagtcgagtggtatttgacccgtattgtcgatccgtgcctggatccggagaccattggaagccccggtacccctgcggcgccgccgaaggtaatgcccgtggccaagggatattcttacctgctggagaatcatctggacgaggtcgagcctatcatggccgaagtgcgtcaccacctcctggccttggggctgccgctgcgcagtatcgaggacgagtgggcgccaagccagatggaaacgaccttcgacgtcatgcccggtctggatgtggcagactcgatggtgctgttccgcaatgcggtcaagcagatctgtcgtcggcgcggttatctggccagcttcatgtgcaagcctgccatcaacggcttctacgcgtctggctggcacttgcatcaatcgcttaccgcacgtgacacgggcttcaacgccttcatcccgcagcagggtgagcctttgtcccaactgggccaagcttacgtgggcgggttgctcgagcatgcctgcgccgcgtcgagtttcactacccctacgatcaacggctaccgccgcaggcgcccgtattcgctggcgccagaccgcgtcacgtgggccaaggacaatcgcgcggcgatggcccgcgtcatttcagcgcctggtgatccggccagccgtgtcgagaaccggatcggtgaaccagctgcgaatccctatctctatctggcatcgcaggtattttccggcatcgacggtatccgccgccaacgcgatccgggaccgctgcaggaaacgccctatgcgagccgatgtgacgattttgaccgcacaacctgtccgagagcgctcgaggcgttggagtcttcaagcttctttcgagaagcatttggcgacgagtttatccattattggctgcatttgcgtcgaagcgagtggaagcgctttacagaggctgagggtgaagtggatatggcggccgacccggtgacccattgggaacatcgggaatatttcgagttgttctga

SEQ ID NO: 74422 - protein, 493 aa, Frateuria sp
MSKKFIEQHGLWTDVQKAAAVEVLKQADQAGLQMIRLSWPDQYGLLRGKMLSIAALRSAFGSGSEITMAPFFFDTASAIVFNPFSADGGFGSAELAGSPNVVMVPDPTTFHILPWADRTGWMLADLYMTSGRPFPLSPRAILKKGLRELEALGYDFQAGLEVEWYLTRIVDPCLDPETIGSPGTPAAPPKVMPVAKGYSYLLENHLDEVEPIMAEVRHHLLALGLPLRSIEDEWAPSQMETTFDVMPGLDVADSMVLFRNAVKQICRRRGYLASFMCKPAINGFYASGWHLHQSLTARDTGFNAFIPQQGEPLSQLGQAYVGGLLEHACAASSFTTPTINGYRRRRPYSLAPDRVTWAKDNRAAMARVISAPGDPASRVENRIGEPAANPYLYLASQVFSGIDGIRRQRDPGPLQETPYASRCDDFDRTTCPRALEALESSSFFREAFGDEFIHYWLHLRRSEWKRFTEAEGEVDMAADPVTHWEHREYFELF

SEQ ID NO: 74423 - DNA, 1482 bp, Comamonas acidovorans; identical to SEQ ID NO: 32261
  CDS (1)..(1482): transl_table=11

SEQ ID NO: 74424 - protein, 493 aa, Comamonas acidovorans; identical to SEQ ID NO: 32262

SEQ ID NO: 74425 - DNA, 1410 bp, Enterobacter agglomerans; identical to SEQ ID NO: 32263
  CDS (1)..(1410): transl_table=11

SEQ ID NO: 74426 - protein, 469 aa, Enterobacter agglomerans; identical to SEQ ID NO: 32264

SEQ ID NO: 74427 - DNA, 1284 bp, Corynebacterium glutamicum
  CDS (1)..(1284): transl_table=11
gtgcgtctatggttcactgacattcttggccacttgaagtcagtggttgtggctcctgcagaactagagtctgcgttggaagaaggcatcggattcgatggctcagccattgagggctacgcgcgtatctcggaagcggacaccattgcccgcccagatccatcgacattccaggtcctcccactagaagcgggcatctcaaaactgcaggcagcacgcctgttttgcgatgtcacgatgccagacggacagccatctttttctgacccgcgccaagtgctgcgcaggcaggtccaactagctgcagatgaaggcttgacctgcatgatctcaccagagattgagttctatttggtgcaaagccttcgcaccaacggactgccacctgtgcccactgacaacggcggatatttcgaccaagccacattcaatgaggcgccgaatttccgtcgaaacgcgatggtagcgctggaggaactcggcatccctgtcgagttctcccaccatgaaactgcacctggccagcaagaaatcgatttacgccatgcggatgcgctcaccatggccgacaacatcatgaccttccgctacatcatgaaacaggtggcaagggaccaaggcgtcggggcatcatttatgcccaagccattccaagaacatgcaggctccgccatgcacacgcacatgtccttatttgagggcgataccaacgcgttccacgatccagacgattcttacatgctgtccaaaaccgcaaaacagttcatcgctggaatcttgcatcacgctccagaattcaccgctgtgaccaaccagtgggtcaattcctacaaacgcatcgtgtacggaaacgaagctccaactgcggcaacctggggtgtatctaatcgttctgcgctggttcgtgttcctacctaccgtttgaataaggaggagtcgcgccgggtggaggtgcgtcttcctgataccgcttgtaacccatatttggcgttttcagtgatgctcggcgctggtttgaaaggcattaaagaaggttatgagctcgacgagccagctgaggacgatatctccaacttgagcttccgggaacgtcgcgccatgggctacaacgatctgccaagcagccttgatcaggcactgcgccaaatggaaaagtcagagcttgttgctgacatcctcggtgagcacgtttttgagtttttcttgcgcaataagtggcgtgaatggcgtgactaccaagagcagatcactccgtgggagctccgaaacaatcttgattactag

SEQ ID NO: 74428 - protein, 427 aa, Corynebacterium glutamicum
MRLWFTDILGHLKSVVVAPAELESALEEGIGFDGSAIEGYARISEADTIARPDPSTFQVLPLEAGISKLQAARLFCDVTMPDGQPSFSDPRQVLRRQVQLAADEGLTCMISPEIEFYLVQSLRTNGLPPVPTDNGGYFDQATFNEAPNFRRNAMVALEELGIPVEFSHHETAPGQQEIDLRHADALTMADNIMTFRYIMKQVARDQGVGASFMPKPFQEHAGSAMHTHMSLFEGDTNAFHDPDDSYMLSKTAKQFIAGILHHAPEFTAVTNQWVNSYKRIVYGNEAPTAATWGVSNRSALVRVPTYRLNKEESRRVEVRLPDTACNPYLAFSVMLGAGLKGIKEGYELDEPAEDDISNLSFRERRAMGYNDLPSSLDQALRQMEKSELVADILGEHVFEFFLRNKWREWRDYQEQITPWELRNNLDY

SEQ ID NO: 74429 - DNA, 1410 bp, Bradyrhizobium japonicum; identical to SEQ ID NO: 32271
  CDS (1)..(1410): transl_table=11

SEQ ID NO: 74430 - protein, 469 aa, Bradyrhizobium japonicum; identical to SEQ ID NO: 32272

SEQ ID NO: 74431 - DNA, 1410 bp, Rhizobium leguminosarum bv
  CDS (1)..(1410): transl_table=11
atggcgaccgcaagcgaaattctgaagcagatcaaggagaacgacgtaaagttcgtcgatctgcgtttcaccgaccgaagggcaagcctgcagcatgtgacgatggacgttgtctgcgtcgatgaggacatgttcgctgacggcgtgatgttcgacggcttctcgatcggcggctggaaggccatcaacgagtccgacatggtgctgatgcccgacaccgaaacggtgcatatggacccgttcttcgcacagtcgaccatggtcatcgtctgcgacatcctcgatccggtctccggcgaggcctataaccgcgatcggcgcggcaccgccaagaaggccgaagcctacctcaaggcatccggcatcggcgatacggttttcgtcggccgggaagccgaattcttcgtcttcgacgacgtcaagtacaaggccgatccttacaataccggcttcaagctcgattcgaccgaactgccgtcgaacgacgacacggattacgagaccggcaacctcggccatcgcccgcgcgtcaagggcggctacttcccggttccccccgtcgacagcgcccaggacatgcgttcggaaatgctgacggtgctctccgagatgggcgtcgtcgtcgaaaagcatcaccatgaagtcgcggccgcccagcacgatacgctggtgcgcaacgccgacgaactcggtatcaagttcaagatgcagatctacaaatacgtcgtgcaccaggtggccaacgcctatggcaagacggcgaccttcatgccgaagccgatcttcggcgacaacggctcgggcatgcacgtgcaccagtcgatctggaagggcggcaagccgacctttgccggcgacgaatatgccggtctttccgagagctgcctgttttatatcggcggcatcatcaagcatgccaaggcgatcaacgctttcaccaatccgtcgacgaactcctacaagcgtttcgtcccgggttacgaagcacctgtgctgctcgcctattcggcccgcaaccgctcggcctcctgccgcattccgttcggctccaacccgaaggccaaacgcgtcgaggtccgcttcccggatccgaccgccaatccctatctcgccttcgccgccatgctgatggccggcctcgacggcatcaagaacaagatccatcccggcaaggccatggacaaggatctctacgatctgccgccgaaggaattgaagaagatcccgaccgtctgcggcagcttgcggcaagcactcgaaagcctcgacaaggaccgcaagttcctgacggccggcggcgtcttcgacgacgatcagatcgatgccttcatcgagctgaagatggctgaggtgatgcgtttcgaaatgacgccgcatccggtcgaatacgacatgtactattcggcctaa

SEQ ID NO: 74432 - protein, 469 aa, Rhizobium leguminosarum bv
MATASEILKQIKENDVKFVDLRFTDRRASLQHVTMDVVCVDEDMFADGVMFDGFSIGGWKAINESDMVLMPDTETVHMDPFFAQSTMVIVCDILDPVSGEAYNRDRRGTAKKAEAYLKASGIGDTVFVGREAEFFVFDDVKYKADPYNTGFKLDSTELPSNDDTDYETGNLGHRPRVKGGYFPVPPVDSAQDMRSEMLTVLSEMGVVVEKHHHEVAAAQHDTLVRNADELGIKFKMQIYKYVVHQVANAYGKTATFMPKPIFGDNGSGMHVHQSIWKGGKPTFAGDEYAGLSESCLFYIGGIIKHAKAINAFTNPSTNSYKRFVPGYEAPVLLAYSARNRSASCRIPFGSNPKAKRVEVRFPDPTANPYLAFAAMLMAGLDGIKNKIHPGKAMDKDLYDLPPKELKKIPTVCGSLRQALESLDKDRKFLTAGGVFDDDQIDAFIELKMAEVMRFEMTPHPVEYDMYYSA

SEQ ID NO: 74433 - DNA, 1410 bp, Rhizobium meliloti
  CDS (1)..(1410): transl_table=11
atgacgactgcgaatgaagttctgaagcagatcaaggaaaacgacgtcaagttcgtagacctgcgctttaccgaccccaagggcaagctgcagcacgtgacgatggatgtcgtctgcgtcgacgaagacatgttcgccgacggcgtcatgttcgacggttcctcgatcggcggctggaaggctatcaacgaatccgacatggtgctgatgcccgatccggaaacggcgcatatggacccgttcttcgcccagtccacgatggtcatcttctgcgacattctcgatccggtttcgggcgaagcctataaccgcgacccgcgcggcacggccaagaaggcagaagcctacctcaaggcctccggcatcggcgacacggtcttcgtaggtccggaagcggaattcttcgtcttcgacgacgtcaagtacaaggccgatccgtacaacaccggtttcaagctcgacagctccgaactgccctccaacgacgacacggactacgagaccggcaacctcggtcaccgcccccgtgtcaagggcggctatttcccggttccgccggttgacagcagccaggacatgcgctccgaaatgctgaccgtgctgtccgaaatgggcgtgacggttgaaaagcatcaccacgaagtggcagcggcgcagcacgagctgggcgtcaagttcgatgccctcgtgcgcaatgccgacaagatgcagatctacaagtatgtcgtgcaccaggtcgccaatgcctatggcaagaccgcgaccttcatgccgaagccgatcttcggcgacaacggctcgggcatgcacgtgcatttgtcgatctggaaggacggcaagccgacctttgccggcgacgagtatgccgggctttccgaatcctgcctctacttcatcggtggcatcatcaagcatgccaaggcgctgaatgccttcaccaacccgtcgacgaactcctacaagcgcctcgtcccgggttatgaagcaccggtcctgctcgcctattcggcccgcaaccgctcggcctcctgccgcatccccttcggcaccaacccgaaggcgaagcgcgtcgaagtccgcttccccgatccgacggcgaacccctacctcgccttcgccgcgatgctgatggccggtctcgacggcatcaagaacaagctccaccccggcaaggccatggacaaggacctctacgacctgccgccgaaggaactgaagaagatcccgaccgtctgcggcagcctgcgcgaagcgctcgaaagcctcgacaaggaccgcaagttcctgaccgctggcggcgttttcgacgacgaccagatcgactccttcatcgaactgaagatgcaggaagtcatgcgcttcgaaatgacgccgcacccggtcgagttcgacatgtactattccgtctga

SEQ ID NO: 74434 - protein, 469 aa, Rhizobium meliloti
MTTANEVLKQIKENDVKFVDLRFTDPKGKLQHVTMDVVCVDEDMFADGVMFDGSSIGGWKAINESDMVLMPDPETAHMDPFFAQSTMVIFCDILDPVSGEAYNRDPRGTAKKAEAYLKASGIGDTVFVGPEAEFFVFDDVKYKADPYNTGFKLDSSELPSNDDTDYETGNLGHRPRVKGGYFPVPPVDSSQDMRSEMLTVLSEMGVTVEKHHHEVAAAQHELGVKFDALVRNADKMQIYKYVVHQVANAYGKTATFMPKPIFGDNGSGMHVHLSIWKDGKPTFAGDEYAGLSESCLYFIGGIIKHAKALNAFTNPSTNSYKRLVPGYEAPVLLAYSARNRSASCRIPFGTNPKAKRVEVRFPDPTANPYLAFAAMLMAGLDGIKNKLHPGKAMDKDLYDLPPKELKKIPTVCGSLREALESLDKDRKFLTAGGVFDDDQIDSFIELKMQEVMRFEMTPHPVEFDMYYSV

SEQ ID NO: 74435 - DNA, 1476 bp, Archaeoglobus fulgidus
  CDS (1)..(1476): transl_table=11
atggtaaggcggctgagaggtgattgtatggaggaggttgagagagctaaggcggtgttgaaggaaaataacgtcagacaggtactctgtgcatttgcggatgttaggggataccttcagatgttctcaattcccgcgagggagtttgttgacggcagcgccttcgagaacggaatcggttttgacggttcctcagtcagagggttcagaacgatagagaagagcgacatggtctggatgcctgatgcatcatcgcttaaaatcattccgtggatagatgaccctattcagaagtccgcgataatgttcggcaacgtttacgaggcgtggggcactgagattgctgactgtgatccaagaggttacgtggccaagaggtacgaggacatgctgaagagcgagggaatgtcagccatattcgggccagaaattgagttcttccttttcgagggtgttgacttcacaaggctgagctgggacatgtgggtctcgcccaacggcggtgcgggagacagctggggtccgccgagaatcatgcccatcagctctgaacttgagagtgggtacatgataaggcccaaggagggttacttcagacctccacctgaagatacaacggttgaatatagaaacgagctggtttactatttggagcagctcggaatagacattgagtaccaccaccatgaggttgccacagcagggcaggtggagctggatttcaagccaaaacagcttgtggatgttggtgatgctttctacctctacaagttcgcagcgaagaacattgcagcgatgcacgggttgtatgcgaccttcatgccaaagccgctttacctcgacaacgcgagcggaatgcacacccaccagagcctctggaagggagagcccttcagcggcgaggctgtttttgcagatcctgatgatgagtacatgctgagccagaaggcccgctactacataggtgggttgctggagcatgcaaaggctctgacagcactctgcgctccgacagtgaacagctacaagcgccttgtgccgggctttgaagctcccatctacatctgctggagcccgaggaacaggtccgctttagtgagggtgccgatgtatgtcaagaagccctcagcaataagggtggagtacaggggtgttgacccgagctgcaatccttatcttgccatcacagcccagcttgctgccggcttagacggaataaagaagaagatagaccccggtgacccgctgcttgaggacgtttacgagctgacaccagcacagaagagagagcttggagtgggagagctgcctacaacgcttagagatgcgatagaccatctggcaagcgatgagcttatgcaggaagtgctgggcagccacatcttcgacgccttcatggagctgaagattgacgagtggaaccagtactgtctctacatcactccgtgggaattcatgaagtattttgatatctga

SEQ ID NO: 74436 - protein, 491 aa, Archaeoglobus fulgidus
MVRRLRGDCMEEVERAKAVLKENNVRQVLCAFADVRGYLQMFSIPAREFVDGSAFENGIGFDGSSVRGFRTIEKSDMVWMPDASSLKIIPWIDDPIQKSAIMFGNVYEAWGTEIADCDPRGYVAKRYEDMLKSEGMSAIFGPEIEFFLFEGVDFTRLSWDMWVSPNGGAGDSWGPPRIMPISSELESGYMIRPKEGYFRPPPEDTTVEYRNELVYYLEQLGIDIEYHHHEVATAGQVELDFKPKQLVDVGDAFYLYKFAAKNIAAMHGLYATFMPKPLYLDNASGMHTHQSLWKGEPFSGEAVFADPDDEYMLSQKARYYIGGLLEHAKALTALCAPTVNSYKRLVPGFEAPIYICWSPRNRSALVRVPMYVKKPSAIRVEYRGVDPSCNPYLAITAQLAAGLDGIKKKIDPGDPLLEDVYELTPAQKRELGVGELPTTLRDAIDHLASDELMQEVLGSHIFDAFMELKIDEWNQYCLYITPWEFMKYFDI

SEQ ID NO: 74437 - DNA, 1404 bp, Azotobacter vinelandii
  CDS (1)..(1404): transl_table=11
atgtcgaagtcgcttcaactgatcaaagaacatgacgtgaagtggattgatctccgcttcaccgacaccaaaggcaagcagcaacacgtaaccatgccggcgcgtgacgtggacgacgacttcttcgaatacggcaagatgttcgacggctcctccatcgccggctggaagggcatcgaagcctccgacatgatcctgatgccggacgacagcaccgccgtgctggatccgttcaccgaagagccgaccctgatcatcgtctgcgacatcatcgagccctcgaccatgcagggctacgatcgcgacccgcgcgccatcgcccgccgcgccgaggaatacctgaagtccaccggcatcggcgacaccgccttcttcggtccggagcccgagttcttcatcttcgacgaagtgaagtacaagtccgacatctccggctccatgttcaagatcttctccgaacaggctgcctggaacaccgacgccgacttcgaaggcggcaacaagggccatcgtccgggcgtcaagggcggctacttcccggttccgccggtcgaccacgaccacgaaatccgcaccgccatgtgcaacgccctggaagagatgggcctgaaggtcgaggttcaccaccacgaagtggccaccgccggccagaacgagatcggcgtcagcttcaacaccctggtggccaaggccgacgaagtgcagaccctgaagtactgcgtgcacaacgtcgccgacgcctacggcaagaccgtgaccttcatgccgaagccgctgtacggcgacaacggctcgggcatgcacgtgcacatgtccatcgccaaagacggcaagaacaccttcgccggcgaaggctatgccggcctgtccgacaccgccctgtacttcatcggcggcatcatcaagcacggcaaggcgctgaacggcttcaccaacccgtcgaccaactcctacaagcgtctggtccccggtttcgaagctccggtcatgctggcctactcggcccgcaaccgttccgcctccatccgcatcccctacgtcaacagcccgaaagcccgccgcatcgaagcgcgcttcccggacccgtcggccaacccctacctggccttcgccgcgctgctgatggccggcctggacggcatccagaacaagatccatcccggcgatgccgccgacaagaacctgtacgacttgccgccggaagaagccaaggaaatcccgcaggtgtgcggcagcctgaaggaggccctggaagaactggacaagggccgcgccttcctgaccaagggcggcgtcttctccgacgacttcatcgatgcctacctcgagctgaagagcgaagaggaaatcaaggtgcgcaccttcgtgcacccgctggaatacgacctgtactacagcgtctga

SEQ ID NO: 74438 - protein, 467 aa, Azotobacter vinelandii
MSKSLQLIKEHDVKWIDLRFTDTKGKQQHVTMPARDVDDDFFEYGKMFDGSSIAGWKGIEASDMILMPDDSTAVLDPFTEEPTLIIVCDIIEPSTMQGYDRDPRAIARRAEEYLKSTGIGDTAFFGPEPEFFIFDEVKYKSDISGSMFKIFSEQAAWNTDADFEGGNKGHRPGVKGGYFPVPPVDHDHEIRTAMCNALEEMGLKVEVHHHEVATAGQNEIGVSFNTLVAKADEVQTLKYCVHNVADAYGKTVTFMPKPLYGDNGSGMHVHMSIAKDGKNTFAGEGYAGLSDTALYFIGGIIKHGKALNGFTNPSTNSYKRLVPGFEAPVMLAYSARNRSASIRIPYVNSPKARRIEARFPDPSANPYLAFAALLMAGLDGIQNKIHPGDAADKNLYDLPPEEAKEIPQVCGSLKEALEELDKGRAFLTKGGVFSDDFIDAYLELKSEEEIKVRTFVHPLEYDLYYSV

SEQ ID NO: 74439 - DNA, 1335 bp, Bacillus cereus; identical to SEQ ID NO: 32283
  CDS (1)..(1335): transl_table=11

SEQ ID NO: 74440 - protein, 444 aa, Bacillus cereus; identical to SEQ ID NO: 32284

SEQ ID NO: 74441 - DNA, 1335 bp, Bacillus subtilis; identical to SEQ ID NO: 32285
  CDS (1)..(1335): transl_table=11

SEQ ID NO: 74442 - protein, 444 aa, Bacillus subtilis; identical to SEQ ID NO: 32286

SEQ ID NO: 74443 - DNA, 1320 bp, Pyrococcus furiosus
  CDS (1)..(1320): transl_table=11
atgaacattagtgtaagcatgaacaaatttgactcaaagatcaaatttgtacagttagtatttgtggatataaacggaatgcccaaagggatggaaattccagcaagcaggttagaagaagcagtcactgatgggatatcctttgacggctcctcagtcccaggttttcaaggcattgaagacagtgacttagtgtttaaggcagatccagatacttacgttgaggtcccctgggataatgtagctagggtgtatgggttcatttacaaagataacaagccatatggagcagatcctaggggaatcttgaagagagctcttgaagaactagaaaaagaaggctacaaagcgtacattggaccagaacctgaattctatttattcaagaaaaatggtacctgggaattagaaattcctgacgtcgggggttattttgatatcctcactttggacaaagcaagagacattagaagggaaatagctgaatacatgccatcatttggtctaatcccagaggttcttcaccacgaagtaggtaaggcccaacatgaaatagactttagatacgatgaagccctaaaaactgcagacaacatagtgagctttaagtacataacaaaggcagtggcagaaatgcacggtctatatgctacatttatgccaaagcccctcttcggattcccaggaaacggaatgcacctccacataagcttgtggaaagatggagaaaacgttttcatgggagaagaggggctaagtgaaatagcactacacttcataggtggaatactaaagcacgcaaaagcactaactgcggttacaaacccaacagtgaacagttacaagaggctcgtcccaagttacgaagctccagtgtacatcagctggggttatagaaataggagtgctctaatcagggttccagcattctggggtaagggagctagaattgaatatcgctgcccagaccccagtgcaaacccatactttgcctttgcagctgtactaaaagctggtcttgatggaattaagcacaaaattgatccatttgcatacgtagaggagaatgtctatgaaatgagcgaagaaaagaggaaagaacttggaattgaaacactcccaggaagcctgggtgaagctctggaagaacttgaaaaagacaaagttgtaaaggaggcccttggagatgcatacaagaacttcattaactacaagtggaaagagtgggaatcctacttagaatacctagaagaaaagcacatgccaaaagacacaaagaaggttacagaatgggagcttgagaggtatttcttcctctaa

SEQ ID NO: 74444 - protein, 439 aa, Pyrococcus furiosus
MNISVSMNKFDSKIKFVQLVFVDINGMPKGMEIPASRLEEAVTDGISFDGSSVPGFQGIEDSDLVFKADPDTYVEVPWDNVARVYGFIYKDNKPYGADPRGILKRALEELEKEGYKAYIGPEPEFYLFKKNGTWELEIPDVGGYFDILTLDKARDIRREIAEYMPSFGLIPEVLHHEVGKAQHEIDFRYDEALKTADNIVSFKYITKAVAEMHGLYATFMPKPLFGFPGNGMHLHISLWKDGENVFMGEEGLSEIALHFIGGILKHAKALTAVTNPTVNSYKRLVPSYEAPVYISWGYRNRSALIRVPAFWGKGARIEYRCPDPSANPYFAFAAVLKAGLDGIKHKIDPFAYVEENVYEMSEEKRKELGIETLPGSLGEALEELEKDKVVKEALGDAYKNFINYKWKEWESYLEYLEEKHMPKDTKKVTEWELERYFFL

SEQ ID NO: 74445 - DNA, 1419 bp, Escherichia coli; identical to SEQ ID NO: 32297
  CDS (1)..(1419): transl_table=11

SEQ ID NO: 74446 - protein, 472 aa, Escherichia coli; identical to SEQ ID NO: 32298

SEQ ID NO: 74447 - DNA, 21 bp, Artificial sequence
  primer
atgctcaagcctcagcaactg

SEQ ID NO: 74448 - DNA, 22 bp, Artificial sequence
  primer
tcagacctggcctgccagaatg

SEQ ID NO: 74449 - protein, 526 aa, Artificial sequence
  consensus sequence
  Variant (2)..(3): Xaa in position 2 to 3 is any amino acid
  Variant (5)..(40): Xaa in position 5 to 40 is any amino acid
  Variant (41)..(62): Xaa in position 41 to 62 is any or no amino acid
  Variant (64)..(67): Xaa in position 64 to 67 is any amino acid
  Variant (69)..(74): Xaa in position 69 to 74 is any amino acid
  Variant (75)..(76): Xaa in position 75 to 76 is any or no amino acid
  Variant (78)..(97): Xaa in position 78 to 97 is any amino acid
  Variant (98)..(107): Xaa in position 98 to 107 is any or no amino acid
  Variant (110)..(111): Xaa in position 110 to 111 is any amino acid
  Variant (112)..(112): Xaa in position 112 is any or no amino acid
  Variant (114)..(122): Xaa in position 114 to 122 is any amino acid
  Variant (123)..(123): Xaa in position 123 is any or no amino acid
  Variant (125)..(131): Xaa in position 125 to 131 is any amino acid
  Variant (132)..(133): Xaa in position 132 to 133 is any or no amino acid
  Variant (135)..(135): Xaa in position 135 is any amino acid
  Variant (138)..(176): Xaa in position 138 to 176 is any amino acid
  Variant (177)..(211): Xaa in position 177 to 211 is any or no amino acid
  Variant (213)..(220): Xaa in position 213 to 220 is any amino acid
  Variant (222)..(225): Xaa in position 222 to 225 is any amino acid
  Variant (226)..(226): Xaa in position 226 is any or no amino acid
  Variant (228)..(228): Xaa in position 228 is any amino acid
  Variant (230)..(238): Xaa in position 230 to 238 is any amino acid
  Variant (239)..(242): Xaa in position 239 to 242 is any or no amino acid
  Variant (244)..(248): Xaa in position 244 to 248 is any amino acid
  Variant (250)..(255): Xaa in position 250 to 255 is any amino acid
  Variant (257)..(264): Xaa in position 257 to 264 is any amino acid
  Variant (267)..(267): Xaa in position 267 is any amino acid
  Variant (270)..(273): Xaa in position 270 to 273 is any amino acid
  Variant (274)..(276): Xaa in position 274 to 276 is any or no amino acid
  Variant (278)..(280): Xaa in position 278 to 280 is any amino acid
  Variant (282)..(282): Xaa in position 282 is any amino acid
  Variant (284)..(284): Xaa in position 284 is any amino acid
  Variant (286)..(289): Xaa in position 286 to 289 is any amino acid
  Variant (290)..(293): Xaa in position 290 to 293 is any or no amino acid
  Variant (295)..(295): Xaa in position 295 is any amino acid
  Variant (296)..(297): Xaa in position 296 to 297 is any or no amino acid
  Variant (299)..(311): Xaa in position 299 to 311 is any amino acid
  Variant (312)..(345): Xaa in position 312 to 345 is any or no amino acid
  Variant (347)..(359): Xaa in position 347 to 359 is any amino acid
  Variant (361)..(362): Xaa in position 361 to 362 is any amino acid
  Variant (366)..(366): Xaa in position 366 is any amino acid
  Variant (368)..(374): Xaa in position 368 to 374 is any amino acid
  Variant (375)..(380): Xaa in position 375 to 380 is any or no amino acid
  Variant (382)..(385): Xaa in position 382 to 385 is any amino acid
  Variant (387)..(389): Xaa in position 387 to 389 is any amino acid
  Variant (392)..(395): Xaa in position 392 to 395 is any amino acid
  Variant (397)..(401): Xaa in position 397 to 401 is any amino acid
  Variant (402)..(408): Xaa in position 402 to 408 is any or no amino acid
  Variant (410)..(410): Xaa in position 410 is any amino acid
  Variant (412)..(412): Xaa in position 412 is any amino acid
  Variant (414)..(419): Xaa in position 414 to 419 is any amino acid
  Variant (424)..(425): Xaa in position 424 to 425 is any amino acid
  Variant (427)..(431): Xaa in position 427 to 431 is any amino acid
  Variant (433)..(434): Xaa in position 433 to 434 is any amino acid
  Variant (436)..(460): Xaa in position 436 to 460 is any amino acid
  Variant (461)..(472): Xaa in position 461 to 472 is any or no amino acid
  Variant (474)..(512): Xaa in position 474 to 512 is any amino acid
  Variant (513)..(525): Xaa in position 513 to 525 is any or no amino acid
DXXGXXXXXXXXXXXXXXXXXXXXXXXXXXXXXXXXXXXXXXXXXXXXXXXXXXXXXXXXXXDXXXXPXXXXXXXXPXXXXXXXXXXXXXXXXXXXXXXXXXXXXXXPRXXXLXXXXXXXXXXGXXXXXXXXXEXEFXXXXXXXXXXXXXXXXXXXXXXXXXXXXXXXXXXXXXXXXXXXXXXXXXXXXXXXXXXXXXXXXXXXXXXXXXXGXXXXXXXXEXXXXXQXEXXXXXXXXXXXXXDXXXXXKXXXXXXAXXXXXXXXFMXKPXXXXXXXGXXXHXHXSXXXXXXXXGXXXFXXXXXXXXXXXXXXXXXXXXXXXXXXXXXXXXXXXXXXXXXXXXXXXGXXXXXXXXXXXXXPXXNSYXRXXXXXXXXXXXXXPXXXXWXXXNRXXXXRXXXXXXXXXXXXRXEXRXXXXXXNPYLXXAXXXXXGXXGXXXXXXXXXXXXXXXXXXXXXXXXXXXXXXXXXXXXXAXXXXXXXXXXXXXXXXXXXXXXXXXXXXXXXXXXXXXXXXXXXXXXXXXXXXE

SEQ ID NO: 74450 - protein, 16 aa, Artificial sequence
  protein pattern
  Variant (2)..(2): Xaa in position 2 is any amino acid
  Variant (4)..(4): Xaa in position 4 is any amino acid
  Variant (5)..(5): Xaa in position 5 is Ala, Cys, Gly, Pro or Val
  Variant (6)..(6): Xaa in position 6 is Asp, Glu, Gly or Ser
  Variant (7)..(9): Xaa in position 7 to 9 is any amino acid
  Variant (14)..(15): Xaa in position 14 to 15 is any or no amino acid
EXRXXXXXXNPYLXXA

SEQ ID NO: 74451 - protein, 17 aa, Artificial sequence
  protein pattern
  Variant (2)..(5): Xaa in position 2 to 5 is any amino acid
  Variant (6)..(6): Xaa in position 6 is Trp or Tyr
  Variant (7)..(7): Xaa in position 7 is Gly or Ser
  Variant (8)..(9): Xaa in position 8 to 9 is any amino acid
  Variant (12)..(12): Xaa in position 12 is Ala, Gly, Ser or Thr
  Variant (13)..(15): Xaa in position 13 to 15 is any amino acid
  Variant (17)..(17): Xaa in position 17 is Ile, Leu or Val
PXXXXXXXXNRXXXXRX

SEQ ID NO: 74452 - DNA, 1863 bp, Azotobacter vinelandii
  CDS (1)..(1863): transl_table=11
atgtccgtaaaagctcaacagcagtctcgcatcaaagagttgatcgctcgcggccgcgaacagggttacctgacctatgccgaggtcaacgaccacctgcccgaggatatttccgatccggaacaggtggaagacatcatccgcatgatcaacgacatggggatcaacgtattcgaaagtgccccggatacggatgccctgttgttggccgaagccgacaccgacgaagctgccgccgaggaagccgccgcggccctggccgccgtggaaaccgacatcggtcgtaccaccgacccggtgcgcatgtacatgcgcgaaatgggtaccgtggaactgctcacccgcgaaggcgaaatcgagatcgccaagcgcatcgaggaaggcatccgcgaggtgatgagcgccatcgcccacttcccgggcaccgtggacggcatcctcgcggaataccagcgcgtcaccagcgaaggcggccgcctgtccgacatcctcagcggctacatcgatcccgacgacgattcggcggtgcctgccgaggccgaggttcccgtcgatctcaagagcaagagcgccgcgacccccgccgcatccgaggacgaggacgaggacgagagcgaggaaagcgacagcgacgacgaggaaggcgacggtggtcccgacccggagatcgcccgccagcgcttcggcgctgtcgccgagcagttgggcaggacccgtgtggctctcgaacggcacgggcgccacagcgtcgagggccttgaggcgctgcaggcgctggccagcctgttcatgccgatcaagctggtgcccaaacagtacgacaccctggtcgagcaggtgcgtgacgccctgacccgcgtgcgcgcccaggaacgcgcgatcatgcagttgtgcgtgcgcgatgcgcgcatgccgcgcgccgacttcctgcgccagtttcccggcaacgagaccgatcaggactgggtcgacctcctcgccaagggcaaggccaagtacgccgaagccctgggcaatctggccgacgacatcaagcagtgccagcagaagctgatcgacctcgagcagaaggtcggcctgaccatcgccgaaatcaaggacatcaaccgccagatgtccatcggcgaagccaaggcccgccgcgccaagaaggaaatggtcgaggccaacctgcgcctggtgatctccatcgccaagaaatacaccaaccgcggcctgcagttcctcgatctgatccaggaaggcaacatcggcctgatgaaggcggtggacaagttcgaataccgccgcggctacaagttctcgacctacgccacctggtggatccgccaggcgatcacccgctcgatcgccgaccaggcgcgcaccatccgcatcccggtgcacatgatcgagaccatcaacaagctcaaccgcatctcccgccagatgctccaggagatgggccgcgaacccacgccggaagaactcggcgagcgcatggacatgcccgaggacaagatccgcaaggtgctgaagatcgccaaggaaccgatctccatggaaaccccgatcggcgacgacgaggactcgcatctgggcgacttcatcgaggactcgaccatgcagtcgccgatcgaggtggcgaccgtggaaagcctcaaggaggccacccgcgaagtcctcgccggcctcaccgcccgggaagccaaggtgctgcgcatgcgcttcggcatcgacatgaacaccgaccacaccctcgaggaggtcggcaagcagttcgacgtgacccgcgagcgcatccgtcagatcgaggccaaggccctgcgcaagctgcgccacccctcgcgaagcgagcacctgcgctccttccttgacgagtga

SEQ ID NO: 74453 - protein, 620 aa, Azotobacter vinelandii
MSVKAQQQSRIKELIARGREQGYLTYAEVNDHLPEDISDPEQVEDIIRMINDMGINVFESAPDTDALLLAEADTDEAAAEEAAAALAAVETDIGRTTDPVRMYMREMGTVELLTREGEIEIAKRIEEGIREVMSAIAHFPGTVDGILAEYQRVTSEGGRLSDILSGYIDPDDDSAVPAEAEVPVDLKSKSAATPAASEDEDEDESEESDSDDEEGDGGPDPEIARQRFGAVAEQLGRTRVALERHGRHSVEGLEALQALASLFMPIKLVPKQYDTLVEQVRDALTRVRAQERAIMQLCVRDARMPRADFLRQFPGNETDQDWVDLLAKGKAKYAEALGNLADDIKQCQQKLIDLEQKVGLTIAEIKDINRQMSIGEAKARRAKKEMVEANLRLVISIAKKYTNRGLQFLDLIQEGNIGLMKAVDKFEYRRGYKFSTYATWWIRQAITRSIADQARTIRIPVHMIETINKLNRISRQMLQEMGREPTPEELGERMDMPEDKIRKVLKIAKEPISMETPIGDDEDSHLGDFIEDSTMQSPIEVATVESLKEATREVLAGLTAREAKVLRMRFGIDMNTDHTLEEVGKQFDVTRERIRQIEAKALRKLRHPSRSEHLRSFLDE

SEQ ID NO: 74454 - DNA, 1854 bp, Pseudomonas aeruginosa
  CDS (1)..(1854): transl_table=11
atgtccggaaaagcgcaacagcaatctcgtctgaaagagttgatcgcccgaggccgtgagcagggatacctgacttacgcggaggtcaacgaccacctgccggaggatatttccgatccggaacaggtggaagacatcatccgcatgatcaacgacatggggatcaacgtattcgagacagccccggatgcggatgccctgttgctggccgaggcggataccgacgaagccgcagcggaagaagccgcagcggccctggccgcggtggaaagcgacatcggtcgcaccaccgacccggtgcgcatgtacatgcgtgaaatgggtaccgtggaactgctgacccgcgaaggcgagatcgaaatcgccaagcgcatcgaggaaggcatccgcgaagtgatgagcgccatcgcccagttcccgggcacggtggacagcatcctggccgactacaatcgcatcgtcgccgaaggcggtcgcctctccgacgtcctcagcggctatatcgatcccgatgacggcagcctgcccgccgaagaggtggagccggtcaacctgaaggacgattccgccgactcgaaagagaaggacgacgaggaagaagaaagcgacgacagcagcgacagcgacgacgaaggcgacggcggtccggatccggaagaagcccgcctgcgtttcaccgcggtctccgagcagctcgacaaggccaagaaggccctgaagaagcacggtcgcggcagcaagcaggccaccgccgaactcaccggcctggccgagctgttcatgccgatcaagctggtgcccaagcagttcgacgccctggtcgcccgcgtgcgctccgccctggaaggcgtgcgcgcccaggaacgcgccatcatgcagctctgcgtgcgtgacgcgcgcatgccgcgtgccgacttcctgcgcctgttcccgaaccacgagaccgacgagaagtgggtcgacagcgtcctgaagagcaagccgaagtacgccgaggccatcgagcgcctgcgcgacgacatcctgcgcaaccagcagaagctggcggccctggaaagcgaggtcgagctgaccgtcgccgagatcaaggaaatcaaccgcgcgatgtcgatcggcgaagccaaggctcgccgggcgaagaaggaaatggtcgaggccaacctgcgcctggtgatttccatcgccaagaagtacaccaaccgcggcctgcaattcctcgacctgatccaggaaggcaacatcggcctgatgaaggcggtggacaagttcgaataccgtcgcggctacaagttctccacctacgccacctggtggattcgccaggcgatcacccgttcgatcgccgaccaggcacgcaccatccgcatcccggtgcacatgatcgagacgatcaacaagctcaaccgcatctcccgccagatgctccaggaaatgggtcgcgagcccaccccggaagagcttggcgagcgcatggacatgcctgaggacaagatccgcaaggtactgaagatcgccaaagagccgatctccatggaaaccccgatcggtgacgacgaagattcgcacctgggcgatttcatcgaggactccaccatgcagtcgccgatcgagatggcgaccagcgagagcctcaaggaatccacccgcgaagtcctcgccggcctcactgcccgggaagccaaggtgctgcgcatgcgcttcggcatcgacatgaacaccgaccacaccctcgaggaagtcggcaagcagttcgatgtgacccgcgagcggatccgccagatcgaagccaaggcgctgcgcaagctgcgccatccgtcgcgaagcgagcaccttcgctccttcctcgacgagtga

SEQ ID NO: 74455 - protein, 617 aa, Pseudomonas aeruginosa
MSGKAQQQSRLKELIARGREQGYLTYAEVNDHLPEDISDPEQVEDIIRMINDMGINVFETAPDADALLLAEADTDEAAAEEAAAALAAVESDIGRTTDPVRMYMREMGTVELLTREGEIEIAKRIEEGIREVMSAIAQFPGTVDSILADYNRIVAEGGRLSDVLSGYIDPDDGSLPAEEVEPVNLKDDSADSKEKDDEEEESDDSSDSDDEGDGGPDPEEARLRFTAVSEQLDKAKKALKKHGRGSKQATAELTGLAELFMPIKLVPKQFDALVARVRSALEGVRAQERAIMQLCVRDARMPRADFLRLFPNHETDEKWVDSVLKSKPKYAEAIERLRDDILRNQQKLAALESEVELTVAEIKEINRAMSIGEAKARRAKKEMVEANLRLVISIAKKYTNRGLQFLDLIQEGNIGLMKAVDKFEYRRGYKFSTYATWWIRQAITRSIADQARTIRIPVHMIETINKLNRISRQMLQEMGREPTPEELGERMDMPEDKIRKVLKIAKEPISMETPIGDDEDSHLGDFIEDSTMQSPIEMATSESLKESTREVLAGLTAREAKVLRMRFGIDMNTDHTLEEVGKQFDVTRERIRQIEAKALRKLRHPSRSEHLRSFLDE

SEQ ID NO: 74456 - DNA, 2025 bp, Mesorhizobium loti MAFF303099
  CDS (1)..(2025): transl_table=11
atggcgactaaggaaaaggaagaggtcgagaccgaacgcgaaggcgccaccgatggccctctgctcgacctttccgatgatgctgtcaagaagatgatcaaggccgccaagaagcgcggctatgtcacgatggacgagctgaattcggtactgccttccgaggaagtgacctccgagcagatcgaggacacgatggcgatgctgtccgacatgggcatcaacgtcgtcgaggatgacgagcagggcgaagaggccgaggctggcgacaccgcggccgacgccgaggaagacgccaacgagctggccgaacagaccggcacggcggtcgccgccaccaccaccaagaaagagccgactgaccgcaccgacgatccggtgcgcatgtatctgcgcgagatgggctcggtggagcttctgtcgcgcgagggcgaaatcgccattgccaagcgcatcgaggccggccgcgagacgatgatcgcgggcctatgcgaaagcccgcttaccttccaggccatcatcatctggcgcgacgagctcaacgaatccaagatcctgctgcgcgagatcatcgacctcgaagccacctatgccggcccggaagccaagcaggcgccagtggtcgagcgcatcgaggaagcgcccaaggccgaggaaaagccgcggcgcgggcgcgacgatgaagacgacgtcaccaatgtcggcgccgatacgcgcggcatcggggacgacgacgaggaagacgaggacgaggcgagcctgtcgctggcggcgatggaagccgaactgcgcccgcaggtgatggagacgctcgacgtcatcgccgacacctacaagaagctgcgcaagctgcaggaccagcaggtcgagaaccgtctggccgccgccggcacgctgtcgcccagccaggaccgccggctgaaggagctgaaggaccagctgatcaaggcggtgaagtcgctgtcgctcaacacggcgcgcatcgaggcgctggtcgagcagctttacgacatcaacaagcgcctggtgcagaacgagggcaagctgttgcgcctcgccgaaagctatggcgtgcgccgcgaggagttcctgaaggaatatcagggttccgaactcgaccccaactggacgcgtgcgatcggcaacctgacctcgcgcggctggaaggaattcaccaagaacgagaaggacgcgatcaaggacctgcgcgccgagattcagcacctggccaccgaaacggcgatctcgatcctggaattccgcaagatcgtcaaccaggtgcagaagggcgagcgcgaagccgcgatcgccaagaaggaaatggtcgaggccaatctgcgcctcgtcatctccatcgccaagaaatacaccaatcgcggcttgcagttcctcgacctgatccaggaaggcaatatcggcctgatgaaggcggtcgataagttcgaataccgccgcggctacaagttctcgacctacgcgacatggtggatccggcaggcgatcacgcgttcgatcgccgaccaggcgcgcaccatccgcattccggtgcacatgatcgagacgatcaacaagatcgtgcgcacctcgcgccagatgctgcacgagatcggccgcgagccgacgccggaagaactggccgaaaagctcgccatgccgctcgaaaaagtgcgcaaggtcttgaagatcgccaaggagccgatctcgctcgaaacgccggtcggcgacgaggaggattcgcatctgggcgatttcatcgaggacaagatggcgatcctgccgatcgacgcggcgatccaggccaatctgcgcgagaccacgacgcgggttctcgcctcgctgacgccgcgcgaggagcgtgtgctgcgcatgcgcttcggcatcggcatgaacaccgaccacacgctggaagaagtcggccagcagttctcggtcacccgcgagcgtatccgccagatcgaagccaaggcgctgcgcaagctcaagcacccgagcagatcgcgcaagctgcgcagcttcctcgacagctga

SEQ ID NO: 74457 - protein, 674 aa, Mesorhizobium loti MAFF303099
MATKEKEEVETEREGATDGPLLDLSDDAVKKMIKAAKKRGYVTMDELNSVLPSEEVTSEQIEDTMAMLSDMGINVVEDDEQGEEAEAGDTAADAEEDANELAEQTGTAVAATTTKKEPTDRTDDPVRMYLREMGSVELLSREGEIAIAKRIEAGRETMIAGLCESPLTFQAIIIWRDELNESKILLREIIDLEATYAGPEAKQAPVVERIEEAPKAEEKPRRGRDDEDDVTNVGADTRGIGDDDEEDEDEASLSLAAMEAELRPQVMETLDVIADTYKKLRKLQDQQVENRLAAAGTLSPSQDRRLKELKDQLIKAVKSLSLNTARIEALVEQLYDINKRLVQNEGKLLRLAESYGVRREEFLKEYQGSELDPNWTRAIGNLTSRGWKEFTKNEKDAIKDLRAEIQHLATETAISILEFRKIVNQVQKGEREAAIAKKEMVEANLRLVISIAKKYTNRGLQFLDLIQEGNIGLMKAVDKFEYRRGYKFSTYATWWIRQAITRSIADQARTIRIPVHMIETINKIVRTSRQMLHEIGREPTPEELAEKLAMPLEKVRKVLKIAKEPISLETPVGDEEDSHLGDFIEDKMAILPIDAAIQANLRETTTRVLASLTPREERVLRMRFGIGMNTDHTLEEVGQQFSVTRERIRQIEAKALRKLKHPSRSRKLRSFLDS

SEQ ID NO: 74458 - DNA, 1728 bp, Aquifex aeolicus VF5
  CDS (1)..(1728): transl_table=11
atgctaggaagggaaagcgtgaaggctctaatcgaaatgggaaaggaaaagggttacgtgacctacgacgagataaacgaagtgctcgaggaagacgtgacctcttccgaactctttgaggagttaatagacattctccacagaatgaacattcaggtagtagagagtaaagaggaatacgaggaagagtccgaggagacacaggaagaagaagaggaagtggtagtttctggttcccttacctccagctccagagacggagatcccgtaaagctctacctcagggaaatgggcaaaatcccccttctcaagagggaggaagagatatactacgcacgccagatagaaatcggaagaaagataatgagaaggggtcttatgagaacttccttcctcgttgagaagatactcgacgactgggcaaagctctgtaacggaaagttaaaaatacaggaagttatggatctcgttgagtacgaaaacgacgatgactttgaagacaggtttgacgaattcaagaggtttttcatagaaaagggatacgaactcgcaaaagcttacagaaacctcttggacgtgagagaagagtacataaagaacccgagtgaggaaagcagaaagaagtacctgtacgctcacgctaggatgaacaagataatcaaggaaatgaagataaagtacgcaaaattcgaaagagttacggaagagataataaagatatacaaggagtacgcaagaaagagaaaggacctcaacgctcgcataaggaaattaaaggctctctacaaagacccagattactttgctcagaacttcttaaccgatgaaaacctccagaagatagttcaggaaaagaacatccccacggaaaaggttctcaacttaataaacgagtacaactccctcaaaagagaagtccagaggatacaaaacctcataggcgtatttcccgaagaagaacttcctaaagttatgaagataatagaacagggaaggaaaaaggtagttcaggcaaagcaggtaatgatacagtcaaacctcagacttgtcgtatccatagcgaagaagtacgtaaacaggggactccacttcctcgacctcattcaggaaggaaacattggtctaatgaaagcagttgacaagtacgactatagaaaaggttacaagttctctacatacgcaacctggtggatcaggcaggccataacgagggctatagccgatcaggcaagaaccataaggatacccgttcacatgatagaaacgataaacaagataattaaagcctctaagaaactcttccaggaaaatggaagagaacccacccccgaggaaatagcggaatacttggatatccctgtagaaaaagtcaagaaagttatgaagttctcccaagagcccatttcccttgaaacgcccatcggtgacgacgacgacaccttcctcaaggacttcatagaggacaagtccataccaaaccccgaggagcaggtcacgagaaagctcctcagggaacaactccagaaggttctgagcacgctttccgaaaaggaaagggaaatactcatgtacaggtacggactcgttgatggaactgagtacaccctggaacaggtaggaaagatgtttaacgtaacgagggaaaggataagacagatagaaaacaaagccctcaggaagttaagacaccccgcaagggcaaaatatctgaaagactttgagttctaa

SEQ ID NO: 74459 - protein, 575 aa, Aquifex aeolicus VF5
MLGRESVKALIEMGKEKGYVTYDEINEVLEEDVTSSELFEELIDILHRMNIQVVESKEEYEEESEETQEEEEEVVVSGSLTSSSRDGDPVKLYLREMGKIPLLKREEEIYYARQIEIGRKIMRRGLMRTSFLVEKILDDWAKLCNGKLKIQEVMDLVEYENDDDFEDRFDEFKRFFIEKGYELAKAYRNLLDVREEYIKNPSEESRKKYLYAHARMNKIIKEMKIKYAKFERVTEEIIKIYKEYARKRKDLNARIRKLKALYKDPDYFAQNFLTDENLQKIVQEKNIPTEKVLNLINEYNSLKREVQRIQNLIGVFPEEELPKVMKIIEQGRKKVVQAKQVMIQSNLRLVVSIAKKYVNRGLHFLDLIQEGNIGLMKAVDKYDYRKGYKFSTYATWWIRQAITRAIADQARTIRIPVHMIETINKIIKASKKLFQENGREPTPEEIAEYLDIPVEKVKKVMKFSQEPISLETPIGDDDDTFLKDFIEDKSIPNPEEQVTRKLLREQLQKVLSTLSEKEREILMYRYGLVDGTEYTLEQVGKMFNVTRERIRQIENKALRKLRHPARAKYLKDFEF

SEQ ID NO: 74460 - DNA, 1878 bp, Vibrio cholerae O1 biovar eltor str. N16961
  CDS (1)..(1878): transl_table=11
atggatcaaaatccgcagtcacagcttaaacaacttgtccttcgcggcaaggaacagggctatctgacctacgccgaagtaaatgaccacttgcctgctgaaatcgttgattcagagcaggtggaagatattattcagatgattaatgacatgggcattaaggtggtggaaaccgcacctgatgccgatgatcttgccctcagcgatgatactaccatcactgacgaagatgctgctgaagcagccgccgcggcactttctagcgtagagagtgagattggccgcaccaccgatccagtacgtatgtatatgcgtgaaatgggtacggttgagcttttgacacgtgaaggtgaaatcgatattgccaagcgcattgaagatggtattaaccaagttcaaagtgcgattgctgagtatcctggaaccatcccttatattcttgagcagtttgatcgtgttcaggccgaagagctacgtctcactgacctgatttcaggtttcgttgaccctaacgacatggaaaccgaagcgccaaccgcgactcacatcggttctgagctttctgaagcggatctcgcggatgaagatgatgctgtcgtcgaagatgaagacgaagatgaagacgaagatggcgacggtgaaagcagcgacagcgaagaagaagtcggtatcgaccctgaactggctcgtgagaaattcaatgaactgcgcggtaagttccaaaacctgcaattagcggttaatgaatttggtcgtgacagtcatcaagcttctgaagcgtcagacttagtgctggatatcttccgtgaattccgcctaacaccaaagcaattcgaccacttggttgaaactctgcgcacttcaatggatcgtgttcgcacccaagaacgtttggtaatgaaagcggtagttgaagtcgcgaagatgccgaagaaatcgttcatcgccctatttacaggcaatgaatcgaatgaagagtggctggataaagtccttgcttctgacaagccttacgtagcgaaagtccgtgagcaagaagaagagatccgccgttcaattcagaaactacaaatgatcgagcaagagacatcactgtctgttgaacgcatcaaagacatcagccgtcgtatgtcaatcggtgaggcgaaagctcgccgtgcgaagaaagagatggttgaagcaaacttacgtctggtaatttcgattgctaagaaatacaccaaccgtggtctgcaattcttggatctgatccaagaaggtaacatcggtttgatgaaagccgtcgataagtttgaataccgtcgtggttataaattctcaacttatgcgacttggtggatccgtcaggcaatcactcgttctattgctgaccaagcacgtacgattcgtattccagtacacatgatcgagacgatcaataaactgaatcgaatttcgcgccaaatgctgcaagagatgggtcgtgagccactgcctgaagaattggcagaacgcatgcaaatgccagaagacaaaatccgcaaagtgctgaaaattgccaaagaacccatctccatggaaacaccgattggtgatgatgaagattcgcatctgggtgattttatcgaggataccaccctcgagctgccactggattctgcgaccgcaaccagccttaaagctgccactcgcgatgtattagcaggcctaacacctcgtgaagcgaaagtgctacgtatgcgtttcggtatcgatatgaataccgaccatactctggaagaagtgggcaagcagtttgatgtaactcgtgaacgtattcgtcagattgaagcaaaagcactgcgtaaactgcgtcatccaagccgctcagaagttctgcgcagcttcttggatgaataa

SEQ ID NO: 74461 - protein, 625 aa, Vibrio cholerae O1 biovar eltor str. N16961
MDQNPQSQLKQLVLRGKEQGYLTYAEVNDHLPAEIVDSEQVEDIIQMINDMGIKVVETAPDADDLALSDDTTITDEDAAEAAAAALSSVESEIGRTTDPVRMYMREMGTVELLTREGEIDIAKRIEDGINQVQSAIAEYPGTIPYILEQFDRVQAEELRLTDLISGFVDPNDMETEAPTATHIGSELSEADLADEDDAVVEDEDEDEDEDGDGESSDSEEEVGIDPELAREKFNELRGKFQNLQLAVNEFGRDSHQASEASDLVLDIFREFRLTPKQFDHLVETLRTSMDRVRTQERLVMKAVVEVAKMPKKSFIALFTGNESNEEWLDKVLASDKPYVAKVREQEEEIRRSIQKLQMIEQETSLSVERIKDISRRMSIGEAKARRAKKEMVEANLRLVISIAKKYTNRGLQFLDLIQEGNIGLMKAVDKFEYRRGYKFSTYATWWIRQAITRSIADQARTIRIPVHMIETINKLNRISRQMLQEMGREPLPEELAERMQMPEDKIRKVLKIAKEPISMETPIGDDEDSHLGDFIEDTTLELPLDSATATSLKAATRDVLAGLTPREAKVLRMRFGIDMNTDHTLEEVGKQFDVTRERIRQIEAKALRKLRHPSRSEVLRSFLDE

SEQ ID NO: 74462 - DNA, 1869 bp, Pasteurella multocida subsp. multocida str. Pm70
  CDS (1)..(1869): transl_table=11
atggatcaaaatccacaatctcaattgaaattgttaatcgcacaaggcaaagaacaaggttatcttacttacgcagaggtcaatgaccacttgccagaagaacttgttgatgctgaacaaattgaagatattattcagatgatcaatgacatggggattcaagtacttgaaagtgcacctgatgctgatgatctgatgttaaatgaaacgattgctgatgaagatgcggttgaagaagcgacgcaagtattatcaagcgttgaagcagaaattggacgtacaaccgatcctgtgcgcatgtatatgcgtgaaatgggcagtgttgaactacttacccgcgaaggcgaaatcgacattgcaaaacgcattgaagaagggattaatgaagttcaaagtgcgattgccttttacccagaagcaatttcttatctacttgatcaatacgcattagtcgaagaaggtggcgtccgtttagctgacttaatcactggctttgttgatccaaatgcgatgacagaaagcgatgttgcagaaattgaagacacttttgatgaagacgaagacagcgattctgtaagtgctacgctcaatgaagaagaggaagaggaagaagaaagcgaagaagaaagcacgacagacgatagcgattcagacaattccatcgatccagaagtggcgcgtgagaagtttctagaactcaagacacaacacgccaaagcggttgcgatgatcgaaaaacacggtcgcaccagcaaaaaatcaaaagatcaaatccaagccttagcagatgtctttacccaattccgtttagtgccaaaacaatttgatacgctagtcaatttaatgagcaatatgatgaaatcggttcgtttacaagagcgtagcattcaaaaaattgtggtagataaggccaaaatgccaaaagagcaattccaaaaagtctttattgggcatgaaaacaaagatacttggttagttaaagcactatcatcaggcaaaacttggtctgaaaaattagcgaaacatgaagaagaaattcgttattacattgataatattctggaaattgaacgtcaaaccaatttaaccgtttcgcaaatccgcgaagtctgtgaacggatttctgccggcgaactcaaagcgcgccgtgcgaaaaaagaaatggtggaagccaacttacgtcttgtgatttctatcgctaaaaaatacacgaaccgaggcttacaattcttagacttaatccaagaaggaaacattggtcttatgaaagcagtggataaattcgaataccgtcgtggttacaaattctccacttatgcgacttggtggatccgccaagcgatcacacgctctattgcagaccaagcaagaacgattcgtatccctgtacatatgattgaaacgattaataaattaaatcgcatttcacgtcaaatgctacaagaaatggggcgtgaggcatctccagaagagttagcagaacgtatgggaatgccagaagataaaatccgtaaggtcttgaaaattgccaaagagccgatttctatggaaacgcctattggtgatgacgatgattcacatttaggtgattttatcgaagactcaactcttgagttaccattagactctgccacagcacaaagcttgaaagtggcgacacacgaagtattagaagggctaaccccacgtgaagcgaaagtactccgtatgcgctttggtattgatatgaacacagatcatactttagaagaagtaggtaaacaatttgatgtcacacgtgaacgtattcgtcaaatcgaagcaaaagccttacgtaaattacgtcaccctagccgctctgaaactttgcgtagtttcttagacgaataa

SEQ ID NO: 74463 - protein, 622 aa, Pasteurella multocida subsp. multocida str. Pm70
MDQNPQSQLKLLIAQGKEQGYLTYAEVNDHLPEELVDAEQIEDIIQMINDMGIQVLESAPDADDLMLNETIADEDAVEEATQVLSSVEAEIGRTTDPVRMYMREMGSVELLTREGEIDIAKRIEEGINEVQSAIAFYPEAISYLLDQYALVEEGGVRLADLITGFVDPNAMTESDVAEIEDTFDEDEDSDSVSATLNEEEEEEEESEEESTTDDSDSDNSIDPEVAREKFLELKTQHAKAVAMIEKHGRTSKKSKDQIQALADVFTQFRLVPKQFDTLVNLMSNMMKSVRLQERSIQKIVVDKAKMPKEQFQKVFIGHENKDTWLVKALSSGKTWSEKLAKHEEEIRYYIDNILEIERQTNLTVSQIREVCERISAGELKARRAKKEMVEANLRLVISIAKKYTNRGLQFLDLIQEGNIGLMKAVDKFEYRRGYKFSTYATWWIRQAITRSIADQARTIRIPVHMIETINKLNRISRQMLQEMGREASPEELAERMGMPEDKIRKVLKIAKEPISMETPIGDDDDSHLGDFIEDSTLELPLDSATAQSLKVATHEVLEGLTPREAKVLRMRFGIDMNTDHTLEEVGKQFDVTRERIRQIEAKALRKLRHPSRSETLRSFLDE

SEQ ID NO: 74464 - DNA, 1869 bp, Campylobacter jejuni subsp. jejuni NCTC 11168
  CDS (1)..(1869): transl_table=11
atgaacgccaaaactcaagaagctgaattagaagaattatttcaagaaaatgcaaaagattatatcacatatgaaaaattggtaaaatatcttacaaaacaaccaagtgcatcaaccactaaaaaagtgcaagcattaatgaaaaaacacaaagtgcaacttttttcagcagctgaaattgcacaaatgaaaaacatagaagatgcaaaaagacttcaagaagaaaaacaaaaactccaagatacaagccttgagaacgaatttgatttagccaatgaaaacgatttattagaatggagcagatcagactctcctgttcgtatgtatttaagagaaatgggacaaattgctttattaaacaaagatgaagaaattgaaatttccaaaaaaatagaacttggcgaagatattatcattgatgctttttgttctgtaccttatttgatagattttattttagattataaagaacctttaataaacagagaaagaagggtaaaagaactatttaaaagctttgacgatgaagaaaaaagtgatgacaaacttgatgaacttgatatagatgaagatgaagaaaacgaaacagaattagaatcagatgaagaaaatactaaaaaaaacagcaaaaaagaagatgaaagaactttaaaagttatagaaaaatttaaagctctagaaaaagctaaaaaagattggctaaaaacatccaaagacaaagaaagcggagatgaacttttagataaattaagcattgcgttcaaaaaaaatattttaaaagaaaaattaatggatctaggccctacttcaaaacttattagcgaaatcgtaaaatcaatggaaactgcactaaaaagtgatgaagaatttgacaaagaacttaagcgtttagaataccgcttacctatgttttctgatgaacttaaaaaacgccatgcagatattttaaaagatattacaaaattgagcaaagaagaaatcacagagcgagctttagaaacaaccatggtaagcacttatatggaaattaaaaaactatttcaaactaaagaagccagtgaaaaaagctttgatcttgaaaaatcacgcttaaaagaaattttggagcaaattaaacgcggtaaaaaaatctctgatgaagcaaaaggaagaatggcaaaatcaaacttgcgccttgttgtaagcatagctaaacgctacacaaatcgtggtctgcctttcttagaccttatccaagaaggaaatataggtttgatgaaagctgtggataaatttgaatacaaaaggggttataaattttccacttatgcaacttggtggatcaggcaagctatttcaagggctatagctgatcaagcaagaaccataagaattccaatccatatgatagaaaccatcaatcaaattaacaaaattatccgcgaacatctacaaaaagatggaaaagaacctgatgtcagtgttatagctaaagaagtaggtttaagcgtagataaggttaaacaagttattaaaatcacaaaagaaccaatttctcttgaagctccaataggaaatgaagatgatggtaaatttggagattttgttgaagatagaaattcactttctccaatggatcatatcttaaaggatgatttaaaagaacaaattgatgaagttttagatcaattaaacgatagagaaaaagcggtaattcgtatgcgttttggtttaatggatgatgaaagtgatagaactttagaggaaattggaaaggaacttaatgtcactcgagaaagagtgagacaaatagaaagctcagctataaaaaaactcaaacaccctaaagtaggaagaaaactaaaaaattatatagaaggttggaagtaa

SEQ ID NO: 74465 - protein, 622 aa, Campylobacter jejuni subsp. jejuni NCTC 11168
MNAKTQEAELEELFQENAKDYITYEKLVKYLTKQPSASTTKKVQALMKKHKVQLFSAAEIAQMKNIEDAKRLQEEKQKLQDTSLENEFDLANENDLLEWSRSDSPVRMYLREMGQIALLNKDEEIEISKKIELGEDIIIDAFCSVPYLIDFILDYKEPLINRERRVKELFKSFDDEEKSDDKLDELDIDEDEENETELESDEENTKKNSKKEDERTLKVIEKFKALEKAKKDWLKTSKDKESGDELLDKLSIAFKKNILKEKLMDLGPTSKLISEIVKSMETALKSDEEFDKELKRLEYRLPMFSDELKKRHADILKDITKLSKEEITERALETTMVSTYMEIKKLFQTKEASEKSFDLEKSRLKEILEQIKRGKKISDEAKGRMAKSNLRLVVSIAKRYTNRGLPFLDLIQEGNIGLMKAVDKFEYKRGYKFSTYATWWIRQAISRAIADQARTIRIPIHMIETINQINKIIREHLQKDGKEPDVSVIAKEVGLSVDKVKQVIKITKEPISLEAPIGNEDDGKFGDFVEDRNSLSPMDHILKDDLKEQIDEVLDQLNDREKAVIRMRFGLMDDESDRTLEEIGKELNVTRERVRQIESSAIKKLKHPKVGRKLKNYIEGWK

SEQ ID NO: 74466 - DNA, 1983 bp, Salmonella enterica subsp. enterica serovar Typhi str. CT18
  CDS (1)..(1983): transl_table=11
atgccgcatatcgttcgggaagcccccgacagccgcagtgagaggcagcggccaaaatataagtatgccctcgctttaaatgtcgacagctataccgtcgacaccaatcaaacgaataagtgtggataccgtcttatggagcaaaacccgcagtcacagctgaaacttcttgtcacccgtggtaaggagcaaggctatctgacctatgctgaggtcaatgaccatctgccggaagatatcgtcgattcagatcaaattgaagatatcatccaaatgatcaacgacatgggtattcaggtaatggaagaagcgcctgatgccgatgatctgctgctggctgaaaataccaccagcaccgatgaagatgcggaagaagctgctgcacaagttctgtccagtgttgagtctgaaatcggtcgtacgactgacccggtacgcatgtatatgcgtgaaatgggcactgttgaactgttgacccgggaaggcgaaatcgacatcgctaaacgtatcgaagacgggatcaaccaggttcaatgctccgttgccgaatacccggaagccattacctatctgctggaacagtacgatcgcgttgaggctgaagaggctcgtttgtccgatcttatcaccggctttgtcgatccgaacgcggaagaagagatggcgccgaccgcaactcacgtcggttctgaactctcccaggaggacctggatgatgacgaagacgaagatgaagaagacggcgacgatgacgccgccgatgacgacaacagcattgaccctgaactggcacgcgaaaaattcgctgaactgcgcgcgcaatacgtcgttacgcgcgacaccatcaaagcgaaaggccgcagccatgctgccgcgcaggaagagattctgaagctgtctgaagtgttcaaacagttccgtctggtaccgaagcaattcgactatctggtcaacagtatgcgcgtgatgatggatcgcgtgcgtactcaggaacgtctgatcatgaagctctgcgtcgagcagtgcaaaatgccgaagaagaactttatcacgctgtttaccggtaacgaaaccagcgaaacctggttcaatgccgctatcgcgatgaacaaaccgtggtcggaaaaactgcacgatgtcgcggaagaagtgcaacgctgcctgcaaaaactgcggcagatagaagaagagaccggtctgaccatcgaacaggtgaaagacatcaaccgtcgcatgtccatcggggaagcgaaagcccgccgtgcgaaaaaagagatggttgaagcgaacttgcgtctggttatttctatcgccaagaaatacaccaaccgaggtctgcagttcctcgatctgattcaggaaggcaacatcggtctgatgaaagcggtagataagttcgaataccgtcgtggttacaagttctccacctacgctacctggtggattcgtcaggcgatcacccgctctatcgccgaccaggcgcgcaccatccgtattccggtgcatatgattgagaccatcaacaagctcaaccgtatttctcgccagatgctgcaagagatgggccgcgagccaacgccggaagagctggctgaacggatgctgatgccggaagataaaattcgtaaggtgctgaaaatcgccaaagagcctatctccatggaaacgccgatcggcgacgatgaagattcgcatctgggtgatttcatcgaggatactaccctcgagctgccgctggactctgccaccaccgagagcctgcgcgccgccactcacgacgttttggctggcctgaccgctcgtgaagcgaaagtcctgcgtatgcgtttcggtatcgatatgaacaccgaccacacgctggaagaagtgggtaaacagttcgacgttacccgcgaacgtatccgtcagatcgaagcgaaggcgctgcgtaaactgcgccaccctagccgttctgaagtgctgcgcagcttcctcgacgattaa

SEQ ID NO: 74467 - protein, 660 aa, Salmonella enterica subsp. enterica serovar Typhi str. CT18
MPHIVREAPDSRSERQRPKYKYALALNVDSYTVDTNQTNKCGYRLMEQNPQSQLKLLVTRGKEQGYLTYAEVNDHLPEDIVDSDQIEDIIQMINDMGIQVMEEAPDADDLLLAENTTSTDEDAEEAAAQVLSSVESEIGRTTDPVRMYMREMGTVELLTREGEIDIAKRIEDGINQVQCSVAEYPEAITYLLEQYDRVEAEEARLSDLITGFVDPNAEEEMAPTATHVGSELSQEDLDDDEDEDEEDGDDDAADDDNSIDPELAREKFAELRAQYVVTRDTIKAKGRSHAAAQEEILKLSEVFKQFRLVPKQFDYLVNSMRVMMDRVRTQERLIMKLCVEQCKMPKKNFITLFTGNETSETWFNAAIAMNKPWSEKLHDVAEEVQRCLQKLRQIEEETGLTIEQVKDINRRMSIGEAKARRAKKEMVEANLRLVISIAKKYTNRGLQFLDLIQEGNIGLMKAVDKFEYRRGYKFSTYATWWIRQAITRSIADQARTIRIPVHMIETINKLNRISRQMLQEMGREPTPEELAERMLMPEDKIRKVLKIAKEPISMETPIGDDEDSHLGDFIEDTTLELPLDSATTESLRAATHDVLAGLTAREAKVLRMRFGIDMNTDHTLEEVGKQFDVTRERIRQIEAKALRKLRHPSRSEVLRSFLDD

SEQ ID NO: 74468 - DNA, 2268 bp, Ralstonia solanacearum GMI1000
  CDS (1)..(2268): transl_table=11
gtggcgaaatcgaagatcaccgaagtcgagagcaaagagtccgctgccagcgcacgcgcagccaagaccggtaccgctcgtaccagcaccgcaaagccgaacaaggccgcggatgcagacaccaagcgcaccgttcgcgaggcagaggccatccccaccccaacttctcctgcaccccgcgccgaggccgcggccgagcccaagaagcgcggccgcaagccccgtgccggggcgcaggcagacgacgaaagcagcacggacgtgactgaagaatttgacgaagcacccgccgctccggcacccaaatccgacaagcagaaggcccgcgaccgcaaggccaaggaaaaagccctgctgaaggagtttgccgcaacgcagcaaggcgggtcggaagaagagctcgaggcacgccgccagaagctcaaggcgctgatcaagctgggcaaatcgcgcggctacctgacctacgccgaaatcaacgaccatctgcccgacgacatggtcgacgcagagtcgatggacacgctggtcgccacgctcaacgacatcggcatcgccgtgtacgagcaggccccggacgccgagaccctgctgcttaacgacaacgcgccttccgtgaccacggaagaagaggcggaagaggaagccgaagccgcgctgtccacggtcgactccgaattcggccgcacgaccgacccggtgcgcatgtacatgcgcgagatgggcacggtcgagctgctcacccgcgaaggcgaaatcgagatcgccaagcgcatcgaggccggcctgaaggacatggtcatggccatctcggcctgcccggtcaccatctccgagatcctcgccatgggcgagcgcgtggccaacgatgaggccaagatcgacgagtacatcgacggcctgatcgacccgaacgccgacgccgccgaagccgcgcaggccggcgacgaggacgaagacttcgaggacgaagacgccgacgagagcggcgacgaagaggaagacgaggacgacgacggctcgggcagctcggccgcatccgcgcgccagctcgaagagctcaagcaggccgcgctggcgaagttcgccatcatcggcgaccagttcgagaagatgcgccgcgccttcgagaaggaaggctacaagtccaagccgtacctgaaggcgcaggaagccatccagaacgagctgatgacgatccgcttcacggcacgcaatgtcgagcgcctgtgcgacacgctgcgcggccaggtcgacgaggtgcgcaagctcgagcgcgcgatcctgaacatcgtggtcgacaagtgcggcatgtcgcgtggcgatttcgtctcgcgtttccctggcaacgaaaccaacctcggctggatcaacacggtggtcgccgacggcaagccgtacagcgccatcgtcgagcgcaacatcccggccgtgcacgagctgcagcagaagctgatcgacctgcaggcgcgcgtggtgctgccgctggccgagctcaaggacgtcaacaagaagatgtccgaaggcgagcgccgcgcccgcgaggccaagcgcgagatgaccgaggccaacctccgtctggtgatctccattgccaagaagtacaccaaccgcggcctgcagttcctcgacctgatccaggaaggcaacatcggcctgatgaaggcggtggacaagttcgaataccgccgcggctacaagttctcgacgtacgccacgtggtggatccgccaggccatcacgcgctcgatcgccgaccaggcgcgcaccatccggattccggtgcacatgatcgagacgatcaacaagatgaaccgcatctcgcgccagatcctgcaggaaaccggcaacgagccggatccggcgacgctggccgagaagatggagatgccggaagacaagatccgcaagatcatgaagatcgccaaggagccgatctccatggaaacgccgatcggtgacgacgacgactcccatctgggcgacttcatcgaggacaccaacacgctggcaccggccgaagcggcgctgcatggctccatgcgcggcgtggtgaaggacgtgctcgactcgctgacgccgcgcgaagccaaggtgctgcgcatgcgcttcggcatcgagatgagcacggaccacacgctggaagaggtcggcaagcagttcgacgtgacccgcgagcgtatccgccagatcgaagcgaaggcgctgcgcaaactgcgccacccgagccgttcggacaagctgaagagcttcctcgaggggagctga

SEQ ID NO: 74469 - protein, 755 aa, Ralstonia solanacearum GMI1000
MAKSKITEVESKESAASARAAKTGTARTSTAKPNKAADADTKRTVREAEAIPTPTSPAPRAEAAAEPKKRGRKPRAGAQADDESSTDVTEEFDEAPAAPAPKSDKQKARDRKAKEKALLKEFAATQQGGSEEELEARRQKLKALIKLGKSRGYLTYAEINDHLPDDMVDAESMDTLVATLNDIGIAVYEQAPDAETLLLNDNAPSVTTEEEAEEEAEAALSTVDSEFGRTTDPVRMYMREMGTVELLTREGEIEIAKRIEAGLKDMVMAISACPVTISEILAMGERVANDEAKIDEYIDGLIDPNADAAEAAQAGDEDEDFEDEDADESGDEEEDEDDDGSGSSAASARQLEELKQAALAKFAIIGDQFEKMRRAFEKEGYKSKPYLKAQEAIQNELMTIRFTARNVERLCDTLRGQVDEVRKLERAILNIVVDKCGMSRGDFVSRFPGNETNLGWINTVVADGKPYSAIVERNIPAVHELQQKLIDLQARVVLPLAELKDVNKKMSEGERRAREAKREMTEANLRLVISIAKKYTNRGLQFLDLIQEGNIGLMKAVDKFEYRRGYKFSTYATWWIRQAITRSIADQARTIRIPVHMIETINKMNRISRQILQETGNEPDPATLAEKMEMPEDKIRKIMKIAKEPISMETPIGDDDDSHLGDFIEDTNTLAPAEAALHGSMRGVVKDVLDSLTPREAKVLRMRFGIEMSTDHTLEEVGKQFDVTRERIRQIEAKALRKLRHPSRSDKLKSFLEGS

SEQ ID NO: 74470 - DNA, 1899 bp, Yersinia pestis KIM
  CDS (1)..(1899): transl_table=11
ttgttggcggtttcgccgaccgacaccaacccaaatactctgaagtgtggataccgtcttatggagcaaaacccgcagtcacagctgaagctacttgtcacccgaggtaaggagcaaggctatctgacctatgctgaggtcaatgaccatctgccggaagatatcgtcgattccgatcagatcgaagacatcatccagatgattaatgacatgggcatacaggtactagaagaagcacctgatgctgatgatttgatgctggccgaaaacaccacggataccgatgatgatgcggctgaagctgctgcacaggtgctttccagtgttgaatcagaaatcgggcgaaccaccgacccggtgcgtatgtatatgcgcgaaatgggtaccgttgagctgttgacacgcgaaggcgagattgatattgccaaacgtatcgaagacggtatcaatcaggttcagtgttctgttgctgaataccctgaagcgatcacttatctgttggaacaatatgatcgtgttgaagcgggcgaatctcgtttatctgacctgatcactggctttgttgatccaaacgccgaagaagatattgccccaacagcgacccacgttggttctgaattatccactgaagagatggatgacgaagatgaagacgaggatgaagacgacgacgcagaagacgataacagcatcgatccagagttggcgcgccagaaattcagcgatttgcgtgagcagtatgaaaacgcgcgtatggaaatcaagaaaaatggccgcaatcacgcgaatgctgccgctgaaattctgaagctttctgaggtgttcaagcagttccgtctagtgccgaagcagttcgattatctggtcaataacatgcgtgccatgatggatcgcgttcgtactcaagaacgtatcatcatgaagctgtgtgttgagcagtgcaaaatgccgaagaaaaatttcgttacgttgttttccagcaatgaaaccagcgacacctggtttaatgcggcagtggcgatgggtaaaccttggtctgaaaaactgaaagatgtctcggaagatgttcaacgcagcttgcagaaactgcgccagatcgaagaagaaaccggtctgaccatcgagcaagtaaaagacatcaaccgccgtatgtctatcggtgaagcgaaagcgcgtcgtgccaagaaagaaatggttgaggctaacctgcgtttggttatctctattgccaaaaaatacaccaaccgtggtttgcagttccttgatttgatccaggaaggcaacattggtctgatgaaagcagtagataagttcgaataccgtcgcggttataagttctcaacttacgcaacctggtggattcgtcaggctattactcgttcgattgcagaccaggcgcgcactatccgtattccagtgcatatgattgagaccattaacaaactcaaccgtatctcacgccagatgttgcaagagatgggccgtgagccaacgccagaagagttggcggaacggatgttgatgccggaagataagatccgtaaagtgctgaagatagctaaagagcctatctccatggaaaccccgattggtgatgacgaagattcacatctgggcgatttcattgaagataccactctggagctaccgctggactctgcaacttctgagagcctgcgctctgccacgcacgatgtgttagctggcctaacagcccgtgaagcgaaagttctgcgtatgcgtttcggtatcgatatgaacactgaccacacgttggaagaagtgggcaaacagttcgacgtcacccgtgaacgtattcgtcagatcgaggcgaaggcattacgtaaactgcgtcacccaagccgttctgaagtgctgcgtagcttcctcgacgattaa

SEQ ID NO: 74471 - protein, 632 aa, Yersinia pestis KIM
MLAVSPTDTNPNTLKCGYRLMEQNPQSQLKLLVTRGKEQGYLTYAEVNDHLPEDIVDSDQIEDIIQMINDMGIQVLEEAPDADDLMLAENTTDTDDDAAEAAAQVLSSVESEIGRTTDPVRMYMREMGTVELLTREGEIDIAKRIEDGINQVQCSVAEYPEAITYLLEQYDRVEAGESRLSDLITGFVDPNAEEDIAPTATHVGSELSTEEMDDEDEDEDEDDDAEDDNSIDPELARQKFSDLREQYENARMEIKKNGRNHANAAAEILKLSEVFKQFRLVPKQFDYLVNNMRAMMDRVRTQERIIMKLCVEQCKMPKKNFVTLFSSNETSDTWFNAAVAMGKPWSEKLKDVSEDVQRSLQKLRQIEEETGLTIEQVKDINRRMSIGEAKARRAKKEMVEANLRLVISIAKKYTNRGLQFLDLIQEGNIGLMKAVDKFEYRRGYKFSTYATWWIRQAITRSIADQARTIRIPVHMIETINKLNRISRQMLQEMGREPTPEELAERMLMPEDKIRKVLKIAKEPISMETPIGDDEDSHLGDFIEDTTLELPLDSATSESLRSATHDVLAGLTAREAKVLRMRFGIDMNTDHTLEEVGKQFDVTRERIRQIEAKALRKLRHPSRSEVLRSFLDD

SEQ ID NO: 74472 - DNA, 1851 bp, Shewanella oneidensis MR-1
  CDS (1)..(1851): transl_table=11
atggatcatactccgcagtcgcaactcaagctgttgcttgccaaaggtaaagagcaaggttacttaacctatgcagaagtgaacgaccacttacctgcagacatggtcgattctgaccagatcgaagatattatccagatgataaatgacatgggtattcgggtattcgaagaggctcccgacgccgatgacatgatgatgtcggaagacaacacagacgaagatgcagcagaagaagccgcagcagcccttgccacggtagaaagtgagcttggccgcaccacagaccctgtgcgtatgtacatgcgcgaaatgggtaccgttgaactgctgactcgcgaaggcgaaattgttatcgccaagcgcatcgaagaaggcattaacacagttcaaagctctgtcgccgagtacccacaagcgatcgccatgatccttgagcagtacgaccagtacgaagccgacgaactgcgcctgtctgatattatctctggatttgttaaccctgacgaagaagacctcggtccaaccgcaacccacatcggttctgaattatcagaagaagatcttgaagatgaagatgacgaggaagacgatgaagacgaagacggtgatggcgacggtgatgatgatggcaataaaggccccgatcctgaagaggctcgtgagcgttttagccaactaagaactgcctacgaaagcgcgcttaaaattattgacgccaaaggccgtgaacatcctgagtcgattcaagcactgtttgaaatcggcgagattttcaaagagttccgcttagtacctaagcagttcgatcgcttagtgaaaagcatgcgttctatgatggaccgtgttcgcgtacaagagcgtctactaatgaagctttgtgtcgaacaggccaaaatgccgaagaaaaattttgttaagttcttcacaggtaatgagaccaacctcgattggttcgaggccgaaaaaacctcaaacaaaccttatgccgaaggcttaagaatggttgaggaagacgtacaacgttgccgtagcaagctggccgccatcgaagaagaaaccggtttagtcattgccgcgattaaagatattaaccgccgtatgtcaatcggtgaagccaaggctcgccgtgcgaagaaagaaatggttgaggcaaacttacgtttggttatttctatcgccaagaaatacaccaaccgtggcctgcaattcttggacttgatccaagaaggtaatatcggtctgatgaaggccgttgataaatttgaatatcgccgtggttataagttctcgacctatgcaacttggtggatccgtcaggcaatcacccgctcaatcgcggaccaagcccgtacgatccgtattccagtacatatgatcgaaacgatcaacaagctgaaccgtatctctcgccaaatgctacaggaaatgggccgtgaaccctcacctgaagaactggcagagcgtatgatgatgccggaagataagatccgtaaggtactgaaaatcgctaaagaacctatctccatggaaaccccaatcggtgacgatgaagattcgcatttaggcgattttatcgaggatactaccctcgaattaccactggacagcgccaccagcgaaagcctgaagagcgccacccatgaggtattagcaggcctaacagcccgtgaagcaaaagtgctgcgcatgcgttttggtatcgatatgaataccgaccacacacttgaagaagtgggtaagcaatttgacgtgacccgtgaacgtattcgtcaaattgaagcaaaagcactacgtaaactgcgccacccttcacgctcagaaatcttaaagtccttcttagacgaatag

SEQ ID NO: 74473 - protein, 616 aa, Shewanella oneidensis MR-1
MDHTPQSQLKLLLAKGKEQGYLTYAEVNDHLPADMVDSDQIEDIIQMINDMGIRVFEEAPDADDMMMSEDNTDEDAAEEAAAALATVESELGRTTDPVRMYMREMGTVELLTREGEIVIAKRIEEGINTVQSSVAEYPQAIAMILEQYDQYEADELRLSDIISGFVNPDEEDLGPTATHIGSELSEEDLEDEDDEEDDEDEDGDGDGDDDGNKGPDPEEARERFSQLRTAYESALKIIDAKGREHPESIQALFEIGEIFKEFRLVPKQFDRLVKSMRSMMDRVRVQERLLMKLCVEQAKMPKKNFVKFFTGNETNLDWFEAEKTSNKPYAEGLRMVEEDVQRCRSKLAAIEEETGLVIAAIKDINRRMSIGEAKARRAKKEMVEANLRLVISIAKKYTNRGLQFLDLIQEGNIGLMKAVDKFEYRRGYKFSTYATWWIRQAITRSIADQARTIRIPVHMIETINKLNRISRQMLQEMGREPSPEELAERMMMPEDKIRKVLKIAKEPISMETPIGDDEDSHLGDFIEDTTLELPLDSATSESLKSATHEVLAGLTAREAKVLRMRFGIDMNTDHTLEEVGKQFDVTRERIRQIEAKALRKLRHPSRSEILKSFLDE

SEQ ID NO: 74474 - DNA, 1851 bp, Pseudomonas putida KT2440
  CDS (1)..(1851): transl_table=11
atgtccggaaaagcgcaacagcagtctcgtatcaaagagttgatcacccgcggtcgtgagcagggctacctgacttacgcggaggtcaacgaccacctgcctgaggatatttcagatccggaacaggtggaagacatcatccgcatgatcaacgacatggggatcaacgtattcgagagtgctccggatgcggatgcccttctgttggcggaagccgacaccgatgaagccgcggccgaagaagccgctgctgcattggcggcagttgaaaccgatatcggccgcacgaccgacccggtgcgcatgtatatgcgcgaaatgggtactgtcgagctgctgacccgcgaaggcgagatcgaaatcgccaagcgtatcgaggaaggcattcgtgaagtcatgggcgccatcgcccacttcccgggcactgtcgactacattctcggcgaatatgaccgcgtcaccaccgagggtggccgcctgtcggacgttctcagcggttacatcgaccctgacgacaacattgccgcgccaaccgaagaagtgccgatcccaggtgccaaggccgctgcggcgaaggaagagtccgacgacgacgaagaagaatccgaaagcggtgacgacgaggaagaggccgagagcggcccggatccggtcgtcgcagcccaacgcttcggtgcggtatccgatcagcttcaggcaacctccaaggtcctgaagaaaaatggtcgcaaccacaaggaaagcatcgaggccctgcaggccctggctgacctgttcatgccgatcaagctggtaccgaagcagttcgaggtactggtcgagcgtgtccgtgacgccctgaaccgtctgcgacagcaagaacgcgccatcatgcagctgtgcgtacgtgacgcccgcatgccgcgagccgacttcctgcgcatgttcccaagcaacgaaaccgaccagacctggagcggtgacctggccaagcgcaacaccaagtgggctgccgccctgggtgaaaagaacgctgccatcgtcgcttgccaacagaagctgatcgaccttgagaccgaaaccggcctgaccgttgccgagatcaaggaaatcaaccgtcgcatgtcgatcggtgaagccaaggcccgccgcgccaagaaagaaatggtcgaggcgaacctgcgtctggtgatttccatcgccaagaagtacaccaaccgtggcctgcagttcctcgacctgatccaggaaggcaacatcggtctgatgaaagcggtggacaagttcgaataccgtcgcggctacaagttctcgacctatgccacctggtggatccgtcaggcgatcacccgttcgatcgccgaccaggcacgcaccatccgcattccggtgcacatgatcgagacgatcaacaagctcaaccgtatttcccgccagatgctgcaggaaatgggtcgcgaaccgactccggaagagctgggcgagcgcatggaaatgcctgaggacaaaatccgcaaggtattgaagatcgccaaagagccgatctccatggaaaccccgatcggtgacgacgaagattcgcacctgggcgacttcatcgaggactcgaccatgcagtccccgatcgacgtggccacggtcgaaagcctcaaggaagccacccgtgacgtgctctcgggcctgaccgcacgtgaagccaaggtgctgcgcatgcgtttcggtatcgacatgaacaccgaccacaccctcgaagaggtgggcaagcagtttgacgtaacgcgtgagcggatccgtcagatcgaagcgaaggcgttgcgcaagctgcgccacccgactcgcagcgagcacctgcgctccttcctcgacgagtga

SEQ ID NO: 74475 - protein, 616 aa, Pseudomonas putida KT2440
MSGKAQQQSRIKELITRGREQGYLTYAEVNDHLPEDISDPEQVEDIIRMINDMGINVFESAPDADALLLAEADTDEAAAEEAAAALAAVETDIGRTTDPVRMYMREMGTVELLTREGEIEIAKRIEEGIREVMGAIAHFPGTVDYILGEYDRVTTEGGRLSDVLSGYIDPDDNIAAPTEEVPIPGAKAAAAKEESDDDEEESESGDDEEEAESGPDPVVAAQRFGAVSDQLQATSKVLKKNGRNHKESIEALQALADLFMPIKLVPKQFEVLVERVRDALNRLRQQERAIMQLCVRDARMPRADFLRMFPSNETDQTWSGDLAKRNTKWAAALGEKNAAIVACQQKLIDLETETGLTVAEIKEINRRMSIGEAKARRAKKEMVEANLRLVISIAKKYTNRGLQFLDLIQEGNIGLMKAVDKFEYRRGYKFSTYATWWIRQAITRSIADQARTIRIPVHMIETINKLNRISRQMLQEMGREPTPEELGERMEMPEDKIRKVLKIAKEPISMETPIGDDEDSHLGDFIEDSTMQSPIDVATVESLKEATRDVLSGLTAREAKVLRMRFGIDMNTDHTLEEVGKQFDVTRERIRQIEAKALRKLRHPTRSEHLRSFLDE

SEQ ID NO: 74476 - DNA, 1875 bp, Vibrio vulnificus CMCP6
  CDS (1)..(1875): transl_table=11
atggatcataatccgcagtcacagctaaaactacttgtcatccgtggcaaagagcaaggctatctgacctacgccgaagtaaatgaccacctacctgctgaaatcgtagattcagaacaggtggaagatatcattcagatgattaacgacatgggtatcaaggtagtagaaactgctcctgatgccgatgacctagcactgagtgatgaaacaaacattaccgacgaagatgctgccgaagcagccgctgctgcgctttcaagcgtagaaagcgaaattggtcgcactacagacccagtgcgcatgtacatgcgtgaaatgggtaccgttgaacttctaactcgtgaaggcgaaatcgacatcgctaaacgaattgaagatggtatcaaccaagtacagtcgtctgttgctgaatacccaggaaccattccttatattcttgaacagttcgacaaagtacaagcggaagaacttcgcctaactgatcttatcagtggttttgttgatccaaatgcagatgaaacggcagctccaaccgcaacacacatcggttcagagcttgcagaatctgatttggaagatgaagacaacaccgacatcgacgatgaagacgaagatgaagacgaagatggcgattcaagcagtgattcagaggaagatgtcggcatcgaccctgaaatggcgctagagaagttcactcagcttcgtaacagctaccagaatctgcaacttgccgtgaatgaacatggtcgagagagtgctcaaacagctcaagcccatgaactgatgctcgatgtgtttaaagagtttcgtctaacaccgaagcagtttgaccatttggttaacgaacttcgcaccgccatggatcgcgttcgtacgcaagagcgcttgatcatgaagtctgcggtagaaatcgcgaaaatgccgaagaagtcgttcattgcactctttactggcaacgaatctaacgaagaatggttagatcagatcctcgcttctgacaagccatacgtagaaaagatcaagctgcacgaagaagacattcgtcgttcaatcgccaagctaagagcaattgaagaagaaacgtcgctttcagtgaacaacatcaaagacatcagccgtcgtatgtctatcggtgaagcaaaagctcgccgtgcgaagaaagagatggttgaggcgaacttacgtctcgttatctctatcgcgaagaagtacacaaaccgtggtttacagttcttggatctaatccaagaaggtaacatcggtctgatgaaagcggttgataaatttgaataccgtcgtggttacaagttctcgacctacgcaacttggtggattcgtcaggcaatcacgcgttcaatcgcagaccaagcacgtacgattcgtattccggtacacatgatcgaaacgatcaacaagctaaaccgtatctctcgtcaaatgctacaagagatgggtcgagagccgttaccggaagaactggcagagcgtatgcaaatgccagaagataagatccgtaaagtactgaaaattgctaaagagccaatctcaatggagacgccaatcggtgacgatgaagattcgcatctaggtgatttcatcgaagataccacgctagagctacctcttgattctgcaacggcgaccagcctaaaagcagcgacaaaagatgttcttgcaggtctaacacctcgtgaagcaaaagtactgcgtatgcgttttggtatcgacatgaacaccgaccacactctagaagaagtgggcaaacagttcgacgtaacgcgtgagcgtattcgtcagatcgaagcaaaagcactgcgtaaactgcgtcatccaagccgctcagaaactctgcgtagcttccttgacgagtaa

SEQ ID NO: 74477 - protein, 624 aa, Vibrio vulnificus CMCP6
MDHNPQSQLKLLVIRGKEQGYLTYAEVNDHLPAEIVDSEQVEDIIQMINDMGIKVVETAPDADDLALSDETNITDEDAAEAAAAALSSVESEIGRTTDPVRMYMREMGTVELLTREGEIDIAKRIEDGINQVQSSVAEYPGTIPYILEQFDKVQAEELRLTDLISGFVDPNADETAAPTATHIGSELAESDLEDEDNTDIDDEDEDEDEDGDSSSDSEEDVGIDPEMALEKFTQLRNSYQNLQLAVNEHGRESAQTAQAHELMLDVFKEFRLTPKQFDHLVNELRTAMDRVRTQERLIMKSAVEIAKMPKKSFIALFTGNESNEEWLDQILASDKPYVEKIKLHEEDIRRSIAKLRAIEEETSLSVNNIKDISRRMSIGEAKARRAKKEMVEANLRLVISIAKKYTNRGLQFLDLIQEGNIGLMKAVDKFEYRRGYKFSTYATWWIRQAITRSIADQARTIRIPVHMIETINKLNRISRQMLQEMGREPLPEELAERMQMPEDKIRKVLKIAKEPISMETPIGDDEDSHLGDFIEDTTLELPLDSATATSLKAATKDVLAGLTPREAKVLRMRFGIDMNTDHTLEEVGKQFDVTRERIRQIEAKALRKLRHPSRSETLRSFLDE

SEQ ID NO: 74478 - DNA, 2160 bp, Bradyrhizobium japonicum USDA 110
  CDS (1)..(2160): transl_table=11
atggccaccaaggcaaagacgctgcaggcgaaggacaaggaaaaagacgacaaggcagcggatgctcccgagaaggattcccaggacgcgccctcgccgttgctcgatctgtccgacgcggccgtgaagaagatgatcaagcaggccaagaagcgcggcttcgtgaccttcgatcagctcaatgaagtgttgccgtccgaccagacctcgcccgagcagatcgaggacatcatgtccatgctctcggacatgggcatcaacgtcaccgaagccgacgatagcgaaggcgaggaagacaaggacgagggcggcgaggacgagaccgacaacgagctcgtcgaggtcacccagaaggccgtcaccgaggtcaagaagagcgagccgggcgagcgcaccgacgatcccgtgcgcatgtatctgcgcgagatgggcaccgtcgagctgctctcccgcgaaggcgaaatcgcgatcgccaagcgcatcgaggccggccgcgaggcgatgatcgcagggctgtgcgaaagcccgctgagcttccaggccatcatcatctggcgcgacgagctcaacgaaggcaagatcttcctccgcgacatcatcgatctcgaagcgacctatgccggccccgaagccaagggcggcatgaacaccgcaatgatcggcggccccaccggtgagaacggcgaagccacggccgagggcggcgaagcggttgcagtgaccggggctgcgcccgcgcatgtcgccccgcccgccgcgccgccggcgccgaccccgttccgcgccgcgcctgccgccggcaacggcgccgaggccgagaaggatccaggcgaggccgccgccgaagccgacatggacgaggacgacgagttcgagaaccagatgtcgcttgccgcgatcgaggccgagctcaagcccaaggtcgtcgagatcttcgacaagatcgccgagagctacaagaagctgcgcaagcttcaggagcaggacatccagaaccagctcgagagcacctcgcatgggccctcgctctcgccgcaccaggagcgcaagtaccgcaagctcaaggacgagatcatcgtcgaggtgaagtcgctgcgcctcaaccaggcgcgtatcgacagtctcgtcgagcagctctacgacatcaacaagcgcctcgtctcgcatgagggccgcctgatgcgtctcgccgacagccacggcgtcgcgcgcgaggatttcctgcgcaactacaccggctcggagctcgatccgcgctggctcaaccgcgtctcgaagctgtcggccaagggctggaagaacttcgtccaccacgagaaggaccgcatcaaggacctccgccacgaggtgcatcagctcgctgcgctcaccggcctggagatcgtcgagttccgcaagatcgtgcactccgtgcagaagggcgagcgcgaagcccgccaggccaagaaggagatggtggaagccaacctccgtctcgtgatctcgatcgcgaagaagtacaccaaccgcggcctgcagttcctcgacctgatccaggaaggcaacatcggcctgatgaaggccgtcgacaagttcgagtatcgccgcggctacaagttctcgacctacgccacgtggtggatccggcaggcgatcacccgctcgatcgccgaccaggcgcgcaccatccgcatccccgtgcacatgatcgagacgatcaacaagatcgtgcgcacgagccgccagatgctcaacgagatcggccgcgagccgacccctgaagagctcgccgagaagctcggcatgcccttggagaaggtccgcaaggtcctcaagatcgccaaggagccgttgtcgctcgaaacccccgtcggtgacgaggaggattcgcatctcggcgatttcatcgaggacaagaacgcgatcttgccgatcgacgccgcgatccagtcgaacctgcgcgagaccaccacgcgcgtgctcgcctcgctcactccgcgcgaagagcgcgtgctgcgcatgcgcttcggcatcggcatgaacaccgaccacacgctggaagaagtcggccagcagttctcggtgacccgcgagcgtattcgccagatcgaggccaaggcgctgcgcaagctgaagcatccgtcgaggagccggaagctgcggagcttcctggataactaa

SEQ ID NO: 74479 - protein, 719 aa, Bradyrhizobium japonicum USDA 110
MATKAKTLQAKDKEKDDKAADAPEKDSQDAPSPLLDLSDAAVKKMIKQAKKRGFVTFDQLNEVLPSDQTSPEQIEDIMSMLSDMGINVTEADDSEGEEDKDEGGEDETDNELVEVTQKAVTEVKKSEPGERTDDPVRMYLREMGTVELLSREGEIAIAKRIEAGREAMIAGLCESPLSFQAIIIWRDELNEGKIFLRDIIDLEATYAGPEAKGGMNTAMIGGPTGENGEATAEGGEAVAVTGAAPAHVAPPAAPPAPTPFRAAPAAGNGAEAEKDPGEAAAEADMDEDDEFENQMSLAAIEAELKPKVVEIFDKIAESYKKLRKLQEQDIQNQLESTSHGPSLSPHQERKYRKLKDEIIVEVKSLRLNQARIDSLVEQLYDINKRLVSHEGRLMRLADSHGVAREDFLRNYTGSELDPRWLNRVSKLSAKGWKNFVHHEKDRIKDLRHEVHQLAALTGLEIVEFRKIVHSVQKGEREARQAKKEMVEANLRLVISIAKKYTNRGLQFLDLIQEGNIGLMKAVDKFEYRRGYKFSTYATWWIRQAITRSIADQARTIRIPVHMIETINKIVRTSRQMLNEIGREPTPEELAEKLGMPLEKVRKVLKIAKEPLSLETPVGDEEDSHLGDFIEDKNAILPIDAAIQSNLRETTTRVLASLTPREERVLRMRFGIGMNTDHTLEEVGQQFSVTRERIRQIEAKALRKLKHPSRSRKLRSFLDN

SEQ ID NO: 74480 - DNA, 1851 bp, Pseudomonas syringae pv. tomato str. DC3000
  CDS (1)..(1851): transl_table=11
atgtccggaaaagcgcaacagcagtctcgtatcaaagagttgatcaccctgggtcgtgagcagaagtatctgacttacgcagaggtcaacgaccacctgcctgaggatatttcagatcccgagcaggtggaagacatcatccgcatgatcaacgacatggggatcccggtacacgagagtgctccggatgcggacgccttgatgctggccgacgccgataccgacgaggcagccgcagaagaagcggctgcagcgttggcagcggtcgagaccgatatcgggcgtaccaccgatcccgttcgtatgtacatgcgtgaaatgggcaccgttgaacttctgacccgtgaaggcgaaatcgaaatcgccaaacgtatcgaagaaggcatccgtgaagtgatgggcgcaattgcgcacttcccaggcacggttgaccatattctctccgaatacacacgtgtcaccagcgaaggcggtcgtctctccgacgttctcagcggttatatcgacccggacgacggcatcgcgccgcctgccgaagtccctccgcccgtcgaccccaaagccgtcaaggccgaaggcgctgacgatgatgaggaagagtcggcagactcgagcgacgaagaagacgaagtcgaaagcggtccggatccggtcatcgcccagcagcgtttcggtgcggtttccgatcaaatggaaatcacccgcaaggcgctgaagaagttcggtcgcgacgacaagcacgccatcgccgaactggttgcccttgccgaattgttcatgccgatcaaactggttccaaaacagtttgaaggtctggtagagcgtgtccgtggtgccctcgagcgtcttcgtgctcaggaacgcgccatcatgcagttgtgcgtacgtgatgcacgtatgccgcgcgccgacttcctgcgccagttccccggccacgaagttgacgaaagctggaccgatgggctcgccaaaggtaaaggcaaatacgctgaagccattggtcgcctgcagcctgacatccagcgttgccagcagaagctgtctgcgctggaagaagaaaccggcctgaaaatcgccgagatcaaggacatcaaccgtcgcatgtcgatcggtgaggccaaggcccgccgcgcgaagaaagagatggttgaagccaacttgcgtctggtgatctccatcgccaagaagtacaccaaccgtggcctgcaattcctcgatctgatccaggaaggcaacatcggcttgatgaaggctgtggacaagttcgaataccgtcgtggctacaagttctcgacgtatgcgacctggtggatccgtcaggcgatcactcgctcgattgccgaccaggcccgcaccattcgtattccggtgcacatgatcgagacgatcaacaagctcaaccgtatttcccggcagatgctgcaggaaatgggtcgcgaaccgaccccggaagagctgggcgaacgcatggaaatgcctgaggataaaatccgcaaggtattgaagatcgccaaagagccgatctccatggaaaccccgatcggtgacgacgaagattcgcacctgggtgacttcatcgaagactcgaccatgcagtcgccaatcgatgtcgccaccgttgaaagcctgaaagaagcgacacgcgaagtgctatcgggccttaccgcccgtgaagccaaggttctgcgcatgcgtttcggcatcgacatgaataccgaccacacgcttgaagaagtcggtaaacagtttgacgtaacccgcgagcggattcgtcagatcgaagccaaggcactgcgcaagctgcgtcacccgacaagaagcgagcacttgcgctcgttcctcgacgagtaa

SEQ ID NO: 74481 - protein, 616 aa, Pseudomonas syringae pv. tomato str. DC3000
MSGKAQQQSRIKELITLGREQKYLTYAEVNDHLPEDISDPEQVEDIIRMINDMGIPVHESAPDADALMLADADTDEAAAEEAAAALAAVETDIGRTTDPVRMYMREMGTVELLTREGEIEIAKRIEEGIREVMGAIAHFPGTVDHILSEYTRVTSEGGRLSDVLSGYIDPDDGIAPPAEVPPPVDPKAVKAEGADDDEEESADSSDEEDEVESGPDPVIAQQRFGAVSDQMEITRKALKKFGRDDKHAIAELVALAELFMPIKLVPKQFEGLVERVRGALERLRAQERAIMQLCVRDARMPRADFLRQFPGHEVDESWTDGLAKGKGKYAEAIGRLQPDIQRCQQKLSALEEETGLKIAEIKDINRRMSIGEAKARRAKKEMVEANLRLVISIAKKYTNRGLQFLDLIQEGNIGLMKAVDKFEYRRGYKFSTYATWWIRQAITRSIADQARTIRIPVHMIETINKLNRISRQMLQEMGREPTPEELGERMEMPEDKIRKVLKIAKEPISMETPIGDDEDSHLGDFIEDSTMQSPIDVATVESLKEATREVLSGLTAREAKVLRMRFGIDMNTDHTLEEVGKQFDVTRERIRQIEAKALRKLRHPTRSEHLRSFLDE

SEQ ID NO: 74482 - DNA, 2097 bp, Coxiella burnetii RSA 493
  CDS (1)..(2097): transl_table=11
atgccaagccgtaaaaagaaatccagcgttaccaaaactaagaaaaaaacaactggtaaaaaagcccgtgtaactgctaaagctaaaccttccgtaaagtcaaaacttaaaacggtaaagcgcgcgccggcaaaaccgaaatcggtgacagtggctaaaactaagtctaaaaaagaaaaggctaaagtcgtgtcacagccattacctaaaactgctgagaaaaaaccttctgcgccgccttcagaaactcaacaacccaagataggagaaaacgcagcagaaagccaacgtttaggctttggcgcactcctagaagaagccaaaaataagggctacctggtacacgaagatttaattaaccttctccctaacgattacgcagatccttcccaaatggaaggcattatcggtcgtttaaccgaaatgggtattaaagttttcgaaattcctcctgacgccgattccctgcttttggaggaagatacccaatccgacgatgacgagatcaacgaggacgtggccgaagtattagcgacagaaacccgaactactgatcccgttcgcatgtacatgcgtgaaatggggagcgtggagttgctaacacgggaaggcgaaattgtcatcgccaaacgcattgaagaaggcatccgccaagtcatgggcgccgtggtccaataccctgaacttattgaaaaatttattaaagaatatgacaccatcgtcgctactgaaggccgcttaagtgatctgcttatcggtttttttgacgaagaagaatcgacagcctcccctgttgctccggaagcccgtgataaagaagctgaaacttcggatgaggatgacggaggagaaggtggcagtgatgaattcggcgagagcgggcctgaccccctcattactcaacaacacatggaagagcttaaaaagttgtacggccgctatcaaaacgccattaaacgttatggcaaaaaagcgccggcaacgctcaaacatcaaaaagcgttggctgagttgttttcaacctttaagctttctatcaagcaatttaatcggctcaccggtcaattacgtcgaatgctaagagccgcgcgcgctcaagaacgtttaatcatgagttattgcgtggtcaaagcgaaaacgccacgtaaaaaatttattgcttcctttccgcataatgaaaccaacatgaaatggttggaacaatacaaaaatgaaaacaaagaacaagcgaaacgactggaaaaatacagcaaagaaatctaccgcgctcaacgaaacctggcgcaactggaagaacaaaacaatttaaacattcaagaaatcaaagaaattaatcgtcgcgttgccatcggcgaggcaaaatcacgccgtgctaaaaaagaaatgatcgaagctaatttacgtctggttatttcgatcgcaaaaaaatacaccaatcgggggctgcaatttctggatctcatccaggaaggaaacattggcttaatgaaagccgttgacaaatttgaataccgccggggttataaattttcaacctatgccacgtggtggattcgccaagcaattacgcgttcgatcgccgaccaagcccggactatccgcattcctgtgcacatgattgaaacgatcaataaactcaatcgcatcagtcgacaaatcctgcaagaaaccggaatagaagccacgcccgaagaactgggccgacggatggatatgccggaagaaaaagtcaggaaagttttaaagatcgcaaaagaacctatttccatggaaacgcctattggcgaagatgaagattctaacctcggtgattttattgaagacatcaacatggaatcacccgtggatttcgccacttcggccggcctcatggaagccacgcgagaaattttgtctacgcttaccccgcgcgaagccaaagtattgcggatgcgtttcggtatcgacatgaatactgatcacacgctggaagaagtaggcaaacaattcgacgtcacgcgagagcggattcgccaaattgaagccaaagccttacgcaaactgcgccaccccagccgcgctgaaaaattacacagtttcatagaagttgaggaataa

SEQ ID NO: 74483 - protein, 698 aa, Coxiella burnetii RSA 493
MPSRKKKSSVTKTKKKTTGKKARVTAKAKPSVKSKLKTVKRAPAKPKSVTVAKTKSKKEKAKVVSQPLPKTAEKKPSAPPSETQQPKIGENAAESQRLGFGALLEEAKNKGYLVHEDLINLLPNDYADPSQMEGIIGRLTEMGIKVFEIPPDADSLLLEEDTQSDDDEINEDVAEVLATETRTTDPVRMYMREMGSVELLTREGEIVIAKRIEEGIRQVMGAVVQYPELIEKFIKEYDTIVATEGRLSDLLIGFFDEEESTASPVAPEARDKEAETSDEDDGGEGGSDEFGESGPDPLITQQHMEELKKLYGRYQNAIKRYGKKAPATLKHQKALAELFSTFKLSIKQFNRLTGQLRRMLRAARAQERLIMSYCVVKAKTPRKKFIASFPHNETNMKWLEQYKNENKEQAKRLEKYSKEIYRAQRNLAQLEEQNNLNIQEIKEINRRVAIGEAKSRRAKKEMIEANLRLVISIAKKYTNRGLQFLDLIQEGNIGLMKAVDKFEYRRGYKFSTYATWWIRQAITRSIADQARTIRIPVHMIETINKLNRISRQILQETGIEATPEELGRRMDMPEEKVRKVLKIAKEPISMETPIGEDEDSNLGDFIEDINMESPVDFATSAGLMEATREILSTLTPREAKVLRMRFGIDMNTDHTLEEVGKQFDVTRERIRQIEAKALRKLRHPSRAEKLHSFIEVEE

SEQ ID NO: 74484 - DNA, 1806 bp, Wigglesworthia glossinidia endosymbiont of Glossina brevipalpis
  CDS (1)..(1806): transl_table=11
atggaaaaaaatcaacagtcacaacttaaactactagtaactcgtggtaaagaacagggctacttgactttttccgaagtaaatgattttttaccagaaaatattattgattcccatcaaatagaagatatcattcaaatgataaatgatatgggaatacaagttatggatgaagctccaaattcagaaaacttattgcttccagattctaataataattcagacgaagatgtagctgaagcagccgctcaggttttatcaaatgtagaatcagaatttggaaaaactacagatccggttagaatgtacatgagagaaatgggaagtgtacagctattgacaagagaaggcgaaatagatcttgctaaacgcatagaatatggaataaatcaaattcaatgtgcgattgtagaatatccaaaagcaattatttatcttttagatcaatacaaaaaaaccactacaggtgaatcaaaattatcagaattaattactggttttgttgatccgaacatagtagttgactcttccaatattgatttaaatacggaagatatttctagcgaagaggaaaacaacacttcagaagaaattgatatagataaagaattggctaataaaagatttattgaattacaagaacaatataaaatatcgtttaatactataaaagaatatggaagaatgcatgaattttctattaaagaaataatttatcttgcagatatatttaaacaatttagattagttccaaaacaatttgattatttagtatttataataaggtcagaaatagaaaaaattaggttttatgaaagaagaatcatgagaatatgcgttaatatatgcaaaatgcctaaaaaattttttatttctttgttttctggaaatgaaacaaatgatgtttggttgaaaaaagctttatctttagataaaccttggtctagaaaactttataaattgaataaacctatatgtctgatattaaataaattaaaaataatagaaattaattcaggaataactatagaacaagcaaaagatataaataaaagaatgtctattggagaggcaaaagctaaaagagctaaaaaagaaatggttgaagcaaatttaagattagtaatatctatagctaaaaaatacaccaatagaggattgcagtttttagatttaatacaagaaggaaatataggtctaatgaaagctgtagataaattcgaatacagaaggggttataaattttctacatatgcaacatggtggattagacaagcaattaccagatctattgcagatcaagctagaactatcagaataccagttcatatgattgaaacaataaataaattaaatagaatatctaggcaaatgctacaagaaataggaagagaacctactccagaagaactgtcagaaaaaatgttaataccagaagataaaataagaaaagttcttaaaatagcaaaagaaccaatatctatggaaactccaataggagatgacgaagattcacatttaggagattttttagaagatacatctttagatttacctcttgattctgctacatcagaaagtttgcgatccgctactcatgatgtattgtctggtttaacagcaagagaagcaaaagtattgaaaatgagatttggaattgatatgagcactgatcatactttagaagaagtaggaaaacaatttgatgtaacaagagaaagaattagacaaattgaagcaaaagctttaagaaaattacgtcatccaagtcgttctgaaattttgcgtagctttttagacgattaa

SEQ ID NO: 74485 - protein, 601 aa, Wigglesworthia glossinidia endosymbiont of Glossina brevipalpis
MEKNQQSQLKLLVTRGKEQGYLTFSEVNDFLPENIIDSHQIEDIIQMINDMGIQVMDEAPNSENLLLPDSNNNSDEDVAEAAAQVLSNVESEFGKTTDPVRMYMREMGSVQLLTREGEIDLAKRIEYGINQIQCAIVEYPKAIIYLLDQYKKTTTGESKLSELITGFVDPNIVVDSSNIDLNTEDISSEEENNTSEEIDIDKELANKRFIELQEQYKISFNTIKEYGRMHEFSIKEIIYLADIFKQFRLVPKQFDYLVFIIRSEIEKIRFYERRIMRICVNICKMPKKFFISLFSGNETNDVWLKKALSLDKPWSRKLYKLNKPICLILNKLKIIEINSGITIEQAKDINKRMSIGEAKAKRAKKEMVEANLRLVISIAKKYTNRGLQFLDLIQEGNIGLMKAVDKFEYRRGYKFSTYATWWIRQAITRSIADQARTIRIPVHMIETINKLNRISRQMLQEIGREPTPEELSEKMLIPEDKIRKVLKIAKEPISMETPIGDDEDSHLGDFLEDTSLDLPLDSATSESLRSATHDVLSGLTAREAKVLKMRFGIDMSTDHTLEEVGKQFDVTRERIRQIEAKALRKLRHPSRSEILRSFLDD

SEQ ID NO: 74486 - DNA, 1854 bp, Candidatus Blochmannia floridanus
  CDS (1)..(1854): transl_table=11
atggatcataacccacaatcacaacttaaattacttgtaacacgtggtaaagaacaaggttatctaaccttttctgaagtaaatgaccatttaccagaagatataatcgattctgatcaactcaataatattattcaaatgatgaatgatatgggtattcaagtgatggaagaagctcctgattccgacgactttttattaacagaaaattgcggtacttccaacaatgatgaagaagatgctacagaagcagctgtacaagcactatctcatgtagatacagatcttggaagaacaactgatccagtacgcatgtatatgaaagagatgggtgcagtggaattattaactagagaaggagaaatagatatcgctaaaagaattgaagatggaattcatcaagttcaatgttcagttgcagagtatccagaagcaattacttatttattagaacaatacaaacgtgtaaaaaccggtgaagtgcgtttatcagatttagtcactggatttgtagaactcaatttagaacacgataccttatctacaaaaacaattcatgatggttatatcacaccagaaattattaattctccaatcataattgatgatgaagaaaatacagaaaatgatgatgataataatgtagatccagaattagcacgaaaaaaatttacagatttgcaaaaacaatacgaaaaaacccgaatcacaattaaatataatggaagagatcatcatcaatcattattagaaattttaaaactttctgaagtatttaaacaatttagattagttcctaaacaatttgattacttagttaataatatgcgttctatgatggatcgcattcgtttacaagaacgattaattatgaaactatgtgtagacgtcagccaaatgcctaaaaaaaaatttattaatttattttctggtaatgaaactagtaaagattggctaaataaagctttatctttaaatacatcatggtcccaaaaactacacaatgttgactcaaaaatacaacaaagtttataccaacttcatcaaattgaaaaagaaacaggattaacaatagagcaaataaaaaatattaataaacgtatggctattggagaagctaaagctaaaagagctaaaaaagaaatggttgaagctaaccttcgtttagtcatatctatcgccaagaaatatacaaatagaggattgcaatttttagatttaattcaagaaggtaatataggtcttatgaaagcagtagataaatttgaatatcgtcgtggttataaattttctacctatgccacttggtggattcgccaagctattacacgatctatagcagatcaagcacgcactattcgcattccagtacacatgattgaaacaatcaataagctaaaccgagtttcacgtcaaattttacaagaaacaggttgtgaaccgacaccagaagaattagcagaacgtatgtttatgtcagaagataaaattagaaaagtattaaaaattgctaaagaacctgtttctatggaaactcctataggagacgatgaagattcacatcttggagattttattgaagatacaaatcttgatttacctttagattctgcaacatcagacaatttaagagctgctaccaatgacgtactttctggattaactccaagagaagcaaaagtattacgtatgagatttggaatagatatgaataccgatcacactttagaagaggtaggaaaacaatttgatgtgacccgagaacgtattagacaaatagaagctaaagcattaagaaaactcagacaccctagtcgatcagaaatattaaaaagttttttagatgatgattga

SEQ ID NO: 74487 - protein, 617 aa, Candidatus Blochmannia floridanus
MDHNPQSQLKLLVTRGKEQGYLTFSEVNDHLPEDIIDSDQLNNIIQMMNDMGIQVMEEAPDSDDFLLTENCGTSNNDEEDATEAAVQALSHVDTDLGRTTDPVRMYMKEMGAVELLTREGEIDIAKRIEDGIHQVQCSVAEYPEAITYLLEQYKRVKTGEVRLSDLVTGFVELNLEHDTLSTKTIHDGYITPEIINSPIIIDDEENTENDDDNNVDPELARKKFTDLQKQYEKTRITIKYNGRDHHQSLLEILKLSEVFKQFRLVPKQFDYLVNNMRSMMDRIRLQERLIMKLCVDVSQMPKKKFINLFSGNETSKDWLNKALSLNTSWSQKLHNVDSKIQQSLYQLHQIEKETGLTIEQIKNINKRMAIGEAKAKRAKKEMVEANLRLVISIAKKYTNRGLQFLDLIQEGNIGLMKAVDKFEYRRGYKFSTYATWWIRQAITRSIADQARTIRIPVHMIETINKLNRVSRQILQETGCEPTPEELAERMFMSEDKIRKVLKIAKEPVSMETPIGDDEDSHLGDFIEDTNLDLPLDSATSDNLRAATNDVLSGLTPREAKVLRMRFGIDMNTDHTLEEVGKQFDVTRERIRQIEAKALRKLRHPSRSEILKSFLDDD

SEQ ID NO: 74488 - DNA, 1932 bp, Chromobacterium violaceum ATCC 12472
  CDS (1)..(1932): transl_table=11
atggcggcctctcccgaaaaccagaaagatgtgaaggacagccaacaggaggtgatgagcctggaagagcagcggaaacgcttgcgccagctgatcgccctgggcaaggagcgtgggtacctgacctacgccgaaatcaacgaccacctgccggaagacgtatccgacgccgagcagatcgagaacatcgtcacgatgatcgccggtctgggcatccaggtatgcgaggaagcgccggacgccgaaaccttgctgatgtccgacgccaccccgtccgtggcggacgaggacgccgtggaggaggccgaggcggccctgtcctcggtggactccgaattcggccgcaccaccgacccggtgcgcatgtacatgcgcgaaatgggttcggtcgagctgttgacccgcgagggcgaaatcgagatcgccaagcggatcgaggacggcctcaagtacatgatccaggccatctccgcctgccccggcaccatcgccgaggtgctggagctgatggaacgcgtggcgcgcgatgaaatccgcgtcgacgaagtcgtcgacggcttcatcgatctcaacgccccgaccgaggacgaggcgcaattcgccgaaccggaggacagcgacgatctgctggacgaggaagaggaagaggaagaggacgaagacggcgctccggtcgacgccgacgccgacgccgcggccaatctggaagagctgaagcaacaggcgctggagcacttcgccggcgtgcgcatgctgttcgacaagatggtcaaggcgctgaacgccaagggccagcagagcaaggaatacctggagctgcaggacgcgatcaccaccgagttcatgctggtgcgcttcgcgacccgccaggtggaaagcctttgcgagtcgctgcgcggccgcgtcaacgagatccgcacctacgagcgcgatatccaggacatctgcgtcagccgcgtgcgcatggaccgcgcccacttcatcaaggtgttcccgggcaacgagaccaatcttgactgggtggaaaacgagatcgattccggcaaggcctggagcgaggcgttgacccgcttcaagcacgcgatcatcgagaagcagacccgcctgtccgatctgcaagacaaggcgatgctgtcgatcaaggcgctgaaggaaatcaaccgccagatgtcggccggcgagtccaaggcgcgccgcgccaagaaggaaatgatcgaggccaacctgcgtctggtgatctccatcgccaagaagtacaccaaccgcggcctgcagttcctcgacctgatccaggaaggcaacatcggcctgatgaaggcggtggacaagttcgaataccgccgcggctacaagttctcgacctacgccacctggtggatccggcaggccatcacccgctcgatcgctgaccaggcccgcaccatccgcattccggtgcacatgatcgagaccatcaacaagatgaaccgcatctcgcggcagatcctgcaggaaagcggccgcgagccggatccggcggagctggccgagaagatggagatgccggaagagaagattcgcaagatcatgaagatttccaaggagcccatctccatggaaaccccgatcggcgacgacgacgattcccatctcggcgatttcatcgaggaccagaacaacctggccccgtccgacgcggcgatgtactccagcctgaaggacgcgaccaaggaagtgctggacacgctgacgccgcgcgaggcgaaagtcctgcgcatgcgtttcggcatcgacatgaataccgaccacacgctggaagaagtgggcaagcagttcgacgtgacccgagagcggattcgccagatcgaggccaaggcgctgcgcaagctgcgccacccgacccgttccgagcgtctgcgcagcttcctggacagcgagccgggcggtcagtaa

SEQ ID NO: 74489 - protein, 643 aa, Chromobacterium violaceum ATCC 12472
MAASPENQKDVKDSQQEVMSLEEQRKRLRQLIALGKERGYLTYAEINDHLPEDVSDAEQIENIVTMIAGLGIQVCEEAPDAETLLMSDATPSVADEDAVEEAEAALSSVDSEFGRTTDPVRMYMREMGSVELLTREGEIEIAKRIEDGLKYMIQAISACPGTIAEVLELMERVARDEIRVDEVVDGFIDLNAPTEDEAQFAEPEDSDDLLDEEEEEEEDEDGAPVDADADAAANLEELKQQALEHFAGVRMLFDKMVKALNAKGQQSKEYLELQDAITTEFMLVRFATRQVESLCESLRGRVNEIRTYERDIQDICVSRVRMDRAHFIKVFPGNETNLDWVENEIDSGKAWSEALTRFKHAIIEKQTRLSDLQDKAMLSIKALKEINRQMSAGESKARRAKKEMIEANLRLVISIAKKYTNRGLQFLDLIQEGNIGLMKAVDKFEYRRGYKFSTYATWWIRQAITRSIADQARTIRIPVHMIETINKMNRISRQILQESGREPDPAELAEKMEMPEEKIRKIMKISKEPISMETPIGDDDDSHLGDFIEDQNNLAPSDAAMYSSLKDATKEVLDTLTPREAKVLRMRFGIDMNTDHTLEEVGKQFDVTRERIRQIEAKALRKLRHPTRSERLRSFLDSEPGGQ

SEQ ID NO: 74490 - DNA, 1845 bp, Photorhabdus luminescens subsp. laumondii TTO1
  CDS (1)..(1845): transl_table=11
atggagcaaaacccgcagtcacagctaaagctacttgtcacccgtggtaaggagcaaggctatctgacctatgctgaggtcaatgaccatctgccggaagatatcgtcgattccgatcagatcgaagatatcatccagatgatcaatgacatgggcattcaggtaatggaagaagcacctgatgccgatgatctgatgctagcagaaaccgctaacgacacagatgaagacgctgtggaagctgctgcgcaagtactgtctagtgttgaatctgaaatcggtcgcaccaccgacccggtacgtatgtacatgcgtgaaatgggtaccgttgagttattgacccgggaaggtgaaattgacattgctaaacgcattgaagatggcatcaatcaggtacagtgttccgttgctgaataccctgaagcaatcacctacttactggaacaatatgaccgagtggaagcgggtgaggctcgcctgtcagatctcatcactggtttcgttgacccgaacgcagaagaagaacttgcacctactgccacccacgttggttctgaacttccacaggaagagctcgatgatgatgaagacgacgatgatgaagacagcgatgacgatagtgatgatgacaacagcatcgatccagaattagctcgccagaaattccaagaactgcgacaacagtatgacatcacccgtcaggaaattaaggaaaacggtcgcaatcatccaaatactgcggccgaaatcttaaaactttcagaagttttcaaacagttccgtctggtgccaaagcagtttgactatctggtcaacaacatgcgttctatgatggatcgcgttcgccttcaagaacgccaaatcatgaaaatgtgtgttgagcagtgcaaaatgccgaagaagaacttcatcactttgttctccggtaatgaaaccagtgacatttggtttactgctgcaaaagcaatgaacaaaccgtggtctgaaaaactccttgaagtggaagacgaagtacagcgtagcctgcaaaaacttcgtcaaattgaggaagaaaccggtttaaccattgaacaggtgaaagatatcaaccgtcgtatgtccatcggtgaagcaaaagcccgccgagcaaaaaaagagatggttgaagccaacttacgtttggttatttcaattgccaaaaaatataccaaccgtggcctgcaattcttggatctgatccaagaaggcaacattggcctgatgaaagcggttgataaatttgaatatcgtcgtggttacaaattctcaacttacgccacatggtggatccgtcaggcaattacacgctcaattgccgaccaagctcgtaccattcgtatacccgttcatatgattgagacaatcaacaaactcaatcgtatttcccgccaaatgttgcaggaaatggggcgtgaaccaacgccggaagagctggcagaacgtatgttgatgccggaagacaagatccgtaaggtactgaaaattgccaaagaacctatctcaatggaaacgccaattggtgatgatgaagattcacatttaggtgatttcattgaagatacaacgctggaactgccgctggattctgcaacctcagaaagcctgcgctcagcaacccacgatgtcttggctggtctgaccgctcgtgaagcaaaagtactgcgtatgcgtttcggtattgatatgaatactgaccatacattggaagaagtcggtaaacagtttgacgttacccgtgaacgtatccgccagatcgaggcgaaagcactacgtaaactacgtcatccaagccgttctgaggttctgcgtagcttccttgatgaataa

SEQ ID NO: 74491 - protein, 614 aa, Photorhabdus luminescens subsp. laumondii TTO1
MEQNPQSQLKLLVTRGKEQGYLTYAEVNDHLPEDIVDSDQIEDIIQMINDMGIQVMEEAPDADDLMLAETANDTDEDAVEAAAQVLSSVESEIGRTTDPVRMYMREMGTVELLTREGEIDIAKRIEDGINQVQCSVAEYPEAITYLLEQYDRVEAGEARLSDLITGFVDPNAEEELAPTATHVGSELPQEELDDDEDDDDEDSDDDSDDDNSIDPELARQKFQELRQQYDITRQEIKENGRNHPNTAAEILKLSEVFKQFRLVPKQFDYLVNNMRSMMDRVRLQERQIMKMCVEQCKMPKKNFITLFSGNETSDIWFTAAKAMNKPWSEKLLEVEDEVQRSLQKLRQIEEETGLTIEQVKDINRRMSIGEAKARRAKKEMVEANLRLVISIAKKYTNRGLQFLDLIQEGNIGLMKAVDKFEYRRGYKFSTYATWWIRQAITRSIADQARTIRIPVHMIETINKLNRISRQMLQEMGREPTPEELAERMLMPEDKIRKVLKIAKEPISMETPIGDDEDSHLGDFIEDTTLELPLDSATSESLRSATHDVLAGLTAREAKVLRMRFGIDMNTDHTLEEVGKQFDVTRERIRQIEAKALRKLRHPSRSEVLRSFLDE

SEQ ID NO: 74492 - DNA, 1932 bp, Vibrio vulnificus YJ016
  CDS (1)..(1932): transl_table=11
gtggtttgcatttcgcatactaattccttcaccagattacgaagttggataccgtctatggatcataatccgcagtcacagctaaaactacttgtcatccgtggcaaagagcaaggctatctgacctacgccgaagtaaatgaccacctacctgctgaaatcgtagattcagaacaggtggaagatatcattcagatgattaacgacatgggtatcaaggtagtagaaactgctcctgatgccgatgacctagcactgagtgatgaaacaaacattaccgacgaagatgctgccgaagcagccgctgctgcgctttcaagcgtagaaagcgaaattggtcgcactacagacccagtgcgcatgtacatgcgtgaaatgggtaccgttgaacttctaactcgtgaaggcgaaatcgacatcgctaaacgaattgaagatggtatcaaccaagtacagtcgtctgttgctgaatacccaggaaccattccttatattcttgaacagttcgacaaagtacaagcggaagaacttcgcctcactgatcttatcagtggttttgttgatccaaatgcagatgaaacggcagctccaaccgcaacacacatcggttcagagcttgcagaatctgatttggaagatgaagacaacaccgacatcgacgatgaagacgaagatgaagacgaagatggcgattcaagcagtgattcagaggaagatgtcggcatcgaccctgaaatggcgctagagaagttcactcagcttcgtaacagctaccagaatctgcaacttgccgtgaatgaacatggtcgagagagtgctcaaacagctcaagcccatgaactgatgctcgatgtgtttaaagagtttcgtctaacaccgaagcagtttgaccatttggttaacgaacttcgcaccgccatggatcgcgttcgtacgcaagagcgcttgatcatgaagtctgcggtagaaatcgcgaaaatgccgaagaagtcgttcattgcactctttactggcaacgaatctaacgaagaatggttagatcagatcctcgcttctgacaagccatacgtagaaaagatcaagctgcacgaagaagacattcgtcgttcaatcgccaagctaagagcaattgaagaagaaacgtcgctttcagtgaacaacatcaaagacatcagccgtcgtatgtctatcggtgaagcaaaagctcgccgtgcgaagaaagagatggttgaggcgaacttacgtctcgttatctctatcgcgaagaagtacacaaaccgtggtctacagttcttggatctaatccaagaaggtaacatcggtctgatgaaagcggttgataaatttgaataccgtcgtggttacaagttttcgacctacgcaacttggtggattcgtcaggcaatcacgcgttcaatcgcagaccaagcacgtacgattcgtattccggtacacatgatcgaaacgatcaacaagctaaaccgtatctctcgtcaaatgctacaagagatgggtcgagagccgttaccggaagaactggcagagcgtatgcaaatgccagaagataagatccgtaaagtactgaaaattgctaaagagccaatctcaatggagacgccaatcggtgacgatgaagattcgcatctaggtgatttcatcgaagataccacgctagagctacctcttgattctgcaacggcgaccagcctaaaagcagcgacaaaagatgttcttgctggcctaacacctcgtgaagcaaaagtactgcgtatgcgttttggtatcgacatgaacaccgaccacactctagaagaagtgggcaaacagttcgacgtaacgcgtgagcgtattcgtcagatcgaagcaaaagcactgcgtaaactgcgtcatccaagccgctcagaaactctgcgcagcttccttgacgagtaa

SEQ ID NO: 74493 - protein, 643 aa, Vibrio vulnificus YJ016
MVCISHTNSFTRLRSWIPSMDHNPQSQLKLLVIRGKEQGYLTYAEVNDHLPAEIVDSEQVEDIIQMINDMGIKVVETAPDADDLALSDETNITDEDAAEAAAAALSSVESEIGRTTDPVRMYMREMGTVELLTREGEIDIAKRIEDGINQVQSSVAEYPGTIPYILEQFDKVQAEELRLTDLISGFVDPNADETAAPTATHIGSELAESDLEDEDNTDIDDEDEDEDEDGDSSSDSEEDVGIDPEMALEKFTQLRNSYQNLQLAVNEHGRESAQTAQAHELMLDVFKEFRLTPKQFDHLVNELRTAMDRVRTQERLIMKSAVEIAKMPKKSFIALFTGNESNEEWLDQILASDKPYVEKIKLHEEDIRRSIAKLRAIEEETSLSVNNIKDISRRMSIGEAKARRAKKEMVEANLRLVISIAKKYTNRGLQFLDLIQEGNIGLMKAVDKFEYRRGYKFSTYATWWIRQAITRSIADQARTIRIPVHMIETINKLNRISRQMLQEMGREPLPEELAERMQMPEDKIRKVLKIAKEPISMETPIGDDEDSHLGDFIEDTTLELPLDSATATSLKAATKDVLAGLTPREAKVLRMRFGIDMNTDHTLEEVGKQFDVTRERIRQIEAKALRKLRHPSRSETLRSFLDE

SEQ ID NO: 74494 - DNA, 2097 bp, Rhodopseudomonas palustris CGA009
  CDS (1)..(2097): transl_table=11
atggccagcaaggcgaagacggttcaggtgcaggacaaggacaaggacgacaaggtagacgcgccggagaaggactccgtcgacgctccctcgccgctcctcgacctgtcggatgcggccgtcaagaagatgatcaagcaggcgaagaagcgcggcttcgtcaccttcgatcagctcaatgaagtgctgccctccgacaccacgtcgccggagcagatcgaagacatcatgtcgatgctgtccgacatgggcatcaatgtgtccgaggcggaagacaccgaggccgaagaggaagaggccaaggaagaggccgacgaggagctcgacaacgatctggtcgaagtcaccgccaaggccgtcaccgagaccaagaagtccgagcccggcgagcgcaccgacgatcccgtccgcatgtacttgcgcgagatgggcaccgtcgagctgttgtcgcgcgagggcgaaatcgccatcgccaagcgaatcgaagccggccgcgaggcgatgatcgccgggctgtgcgaaagcccgctgaccttccaggcgatcatcatctggcgcgacgaactcaacgaaggaaagatcttccttcgcgacatcatcgatctcgaagcgacctacgccggccccgagggcaaaaacaacatcggcgagcccggtgaggaagccgcggccgaaggcgagggcggtgcgcccgcgcacgtcgcgccgccggcggctccgccgtccgccaccccgttccgtcccgcgcagcagcgcggcgccgcgccggccgaagccgagggcgaaggcgcgcccgagggcgatggcgacgacgacgagttcgagaaccagatgtcgctcgccgcgatcgaggccgagctgaagccgaaggtggtcgagactttcgacaagatcgccgacaactacaagaagctgcgtaagctgcaggagcaggacatcgccaaccagctgcagaacgagcagctgtcgccgtcgcaggagcgcaagtacaagaagctgaaggacgagatcatcgtcgaggtgaagtcgctgcgcctcaaccaggcccgtatcgacagcctggtcgagcagctctacgacatcaacaagaagctggtgtcgttcgagagccgcttgatgcggctcgccgacagccacggcgtcgcccgtgacgacttcctgcgcaactatcagggctcggagctcgatccgcgctggctcaaccgggtgtcgaagctctcggccaagggctggaagaactttgtccaccacgagaaggaccggatcaaggacctgcgccaggaagtgcagtcgatggcggcgctcaccggcctcgagatcggcgaattccgcaagatcgtccactcggtgcagaagggcgagcgcgaagcccgtcaggccaagaaggaaatggtcgaggccaacctccgcctcgtgatctcgatcgccaagaagtacaccaaccgcggcctgcagttcctcgatctcattcaggaaggcaacatcggcctgatgaaggcggtcgacaagttcgagtatcgccgcggctacaagttctcgacctacgccacctggtggatccggcaggcgatcacccgctcgatcgccgaccaggcccgcaccatccgcatcccggtgcacatgatcgagacgatcaacaagatcgtccgcacctctcggcagatgctcaacgagatcggccgcgagccgaccccggaagagctcgccgagaagctcggcatgccgctggagaaggtccgcaaggtcctgaagatcgccaaggagccgctgtcgctcgaaaccccggtgggtgacgaggaggacagccatctcggcgacttcatcgaggacaagaacgcggtgctgccgatcgacgccgcgatccagtcgaacctgcgcgagaccaccacgcgcgtgctcgcctcgctcaccccgcgcgaagaacgcgtgctgcgcatgcgcttcggcatcggcatgaacaccgaccacacgctggaagaagtcggccagcagttctcggtgacccgcgagcgcatccgccagatcgaagcgaaagcgctgcgcaagctgaagcatccgtcccgcagccgcaagctgcggagcttcctggataactaa

SEQ ID NO: 74495 - protein, 698 aa, Rhodopseudomonas palustris CGA009
MASKAKTVQVQDKDKDDKVDAPEKDSVDAPSPLLDLSDAAVKKMIKQAKKRGFVTFDQLNEVLPSDTTSPEQIEDIMSMLSDMGINVSEAEDTEAEEEEAKEEADEELDNDLVEVTAKAVTETKKSEPGERTDDPVRMYLREMGTVELLSREGEIAIAKRIEAGREAMIAGLCESPLTFQAIIIWRDELNEGKIFLRDIIDLEATYAGPEGKNNIGEPGEEAAAEGEGGAPAHVAPPAAPPSATPFRPAQQRGAAPAEAEGEGAPEGDGDDDEFENQMSLAAIEAELKPKVVETFDKIADNYKKLRKLQEQDIANQLQNEQLSPSQERKYKKLKDEIIVEVKSLRLNQARIDSLVEQLYDINKKLVSFESRLMRLADSHGVARDDFLRNYQGSELDPRWLNRVSKLSAKGWKNFVHHEKDRIKDLRQEVQSMAALTGLEIGEFRKIVHSVQKGEREARQAKKEMVEANLRLVISIAKKYTNRGLQFLDLIQEGNIGLMKAVDKFEYRRGYKFSTYATWWIRQAITRSIADQARTIRIPVHMIETINKIVRTSRQMLNEIGREPTPEELAEKLGMPLEKVRKVLKIAKEPLSLETPVGDEEDSHLGDFIEDKNAVLPIDAAIQSNLRETTTRVLASLTPREERVLRMRFGIGMNTDHTLEEVGQQFSVTRERIRQIEAKALRKLKHPSRSRKLRSFLDN

SEQ ID NO: 74496 - DNA, 1929 bp, Wolbachia endosymbiont of Drosophila melanogaster
  CDS (1)..(1929): transl_table=11
atgatgtcaactattaatgatgcagaagataagaaaaaaattatcaaagatctggtaactaagagtataaaaaagggtggttttatcacctttgatgatataaatgataaattatcagatgaaaatttttcatctgactttatagatgatgctatatctttattgcaggattccggaattaatgtgcttgaaagtagcgaagatgaagaagatattccttccaacagtgatgatagtaaacttgatgatgatgacacatcgccaaatgttactgcaactttagtacaaaatgatgatccagtgaggatttatttacaagacatgagctccgtaaagcttttatcaagggcagatgaaatcgagatagcaaaaaaaattgaatctggaaagcataacatgttacgtgcaataattgaaacatcagtaacattaaaggtgataaaagtatggcgtgatgatttaagtaatggagctctcttactgagagaaattatagatctggatgcaatgtataactctgattttaatgtggtacccaaagaagaaagtgaagagagtgaagaaagtgctgaagatgttgaggattctgaggatgtttctgaagatgctgagtactgtagtgatgatgagaaagacggtaataatgaagatataagttcagtcaatttaaatgtttctattcttgaaatggaaagtgacttattgccaaaggtcatagttgcattggatgagataattactttaacaaatgaagcgttgatattaagaaaaaattctaaaaatttctctaatgagctagaaaatttgtataatcaaatatggtctatagcattacaaattaagttaagtgatgctgctgttgccagaattacacaagaactttataagatcaatagatccattacgcttgaagaggctaatcttattgctgaggctagaaaatacgatatcgatagagaaagtttctataaagtttatgatgacgtgcttttaaagcacgaattgaaaaagataagtcttttaaagatcaatgaaaatcagtcctcttttacaggtgaattaaaaaacaaatttttaaggtttatagacgataaatctgaacatatagctagtaccttgaacggtattaagcagcatatacaggaagataacgtacaagaatttaaggagctaatcaagagaatacaaaaacacgaacgagaagtctctgaagcaaagcaagaaatgattaaggctaacttaaggctagtagtttccattgctaagaagtattcaaaaagaggccttgatctgcttgatttgatacaagaaggcaatattggtcttatgaaggccgtggataagtttgattacaaacgtggatataaattttcaacttatggcacttggtgggtaagacaatcaatcactagagcaatacctgagcagtccaaagtagttagaataccagttcatatggtggaaattatcagtaaaatcaacagagcattaagaaagatgactcatgagatgggaagagagccgacgttagaggaattgagtgtagaactgacaatgccactggaaagaatacgcaaagttatgaaaatagcaagggatccagtaagtcttgaagctccaacaggaaaagatgatagtagtacctttggtgattgtatagaagacaagcgagtctccaggccagaggatgctgcaatacttgctgacttgcgtggcattacaaccaatgttcttgcaactttaacaccaaaggaagaaagaattttaagaatgcgttttggccttggtaaagatgggaaggaacatactttagaagaagtaggaaaaatttttaatgtaacacgtgagagaattaggcaaatagaggcaaaagcactgcgcaagttgaaacatccaagccgtgctagaaaacttagagggttcttttaa

SEQ ID NO: 74497 - protein, 642 aa, Wolbachia endosymbiont of Drosophila melanogaster
MMSTINDAEDKKKIIKDLVTKSIKKGGFITFDDINDKLSDENFSSDFIDDAISLLQDSGINVLESSEDEEDIPSNSDDSKLDDDDTSPNVTATLVQNDDPVRIYLQDMSSVKLLSRADEIEIAKKIESGKHNMLRAIIETSVTLKVIKVWRDDLSNGALLLREIIDLDAMYNSDFNVVPKEESEESEESAEDVEDSEDVSEDAEYCSDDEKDGNNEDISSVNLNVSILEMESDLLPKVIVALDEIITLTNEALILRKNSKNFSNELENLYNQIWSIALQIKLSDAAVARITQELYKINRSITLEEANLIAEARKYDIDRESFYKVYDDVLLKHELKKISLLKINENQSSFTGELKNKFLRFIDDKSEHIASTLNGIKQHIQEDNVQEFKELIKRIQKHEREVSEAKQEMIKANLRLVVSIAKKYSKRGLDLLDLIQEGNIGLMKAVDKFDYKRGYKFSTYGTWWVRQSITRAIPEQSKVVRIPVHMVEIISKINRALRKMTHEMGREPTLEELSVELTMPLERIRKVMKIARDPVSLEAPTGKDDSSTFGDCIEDKRVSRPEDAAILADLRGITTNVLATLTPKEERILRMRFGLGKDGKEHTLEEVGKIFNVTRERIRQIEAKALRKLKHPSRARKLRGFF

SEQ ID NO: 74498 - DNA, 1830 bp, Bdellovibrio bacteriovorus HD100
  CDS (1)..(1830): transl_table=11
atgaaaccgaacctaccaaataaacaagagaaagagcctgtgaaggttctttctttgcaggaacaggaaactctgattaaagaagaaatccagagattcctgaagcttgcaaaggagaagggtgcactgaccattgaggaaatcaatgagctccttccccctgaaattgtcgctccatctgtgctggactcgttcatgcagggccttgaggccggtggtgtagtaatttcagacttgtctgaaagttcgaaagaggaagagggcgaaggcgccttcctggaaaacgtcgattctgaagacgaagaaattgatgatgaagaaaaagcggaaagtgaagacgttaagggtaacgaccctgtacgcctttacctgcgcaaaatgggaagcgtttccctgctgacccgtgaaggggaagtggaaattgcccgtcgtattgaaaaaggggagcgcgagatcgttcgtgcgatccttttgtcccctctgggtacctacgagatcatccagcttggtaagcgccttgatgaaggccgtatcaaagttaaatcgatcttccgcggtcttgaggacgaggacacccagtacgatgaaaaggaatacatcgataagatccatgagcttatcggtcgtgtgactgagtaccagaaagcggcggaaaaactgtttatgactcttcgtaaagaagagacaaacactccggctcgtcaggctgctatgaaagagcttgttgccatgaatgacaagttgatggcgaacttcgagtccgtgaatttcaaccgtaaaactatcaaccgcgttgtgatcaagttcaaaaacctggtgaaccgtatcggaactcttcgtcgtcgtatcaaagacggtgtggagcgtacgttctctaaagacgtcacagcgatggctgaacgtatgaagttgatcgatgcgaatgaaaaagaactgacccgtatgacccgcgatactggtttgaactatcagaagttcaaatcctacgtattgcaggctcaggaagcggaaaagcgtatcagccgtttggattcagaaactgaaatgaatcacaactgggtgaaagaaacctacacggccatctggaaaggtgagcgtgaggccgatgcggcgaaatctgagttggttgaagccaatcttcgtttggttgtatccatcgcgaagaagtacaccaaccgcggtctgcaattcctggatctgatccaggaaggtaacatcggtttgatgaaagccgttgataagttcgaataccgtcgtggttacaaattctcgacttatgcgacttggtggatccgtcaggcgatcactcgtgctattgccgatcaggcgcgcacgatccgtatccctgtacatatgatcgaaaccatcaacaaacttgttcgtacatcccgttacttgatccaggaacttggccgtgagccgaccccggaagagatcgcggataaaatggacatgccagttgataaggttcgtaaagttctgaaaattgcgaaagaacctatctctctggaaactccagtgggtgaagaggaagattcgcacctgggcgactttatcgaggacaaaaaggttatcaatcctgcagaagcgattgtgaacctgaatcttgctgaacaaacccgccgtgtgctgtcgaccttgactccaagagaagaaaaagtcctgcgcatgcgtttcggtatcggggaagagtcagatcatactttggaagaagtgggtcaggacttcaacgtcacccgtgagcgtatccgtcagatcgaggcgaaagctctaagaaagcttcgtcatccttctcgcagcaacaaactgaaagcgtttgttgattcctag

SEQ ID NO: 74499 - protein, 609 aa, Bdellovibrio bacteriovorus HD100
MKPNLPNKQEKEPVKVLSLQEQETLIKEEIQRFLKLAKEKGALTIEEINELLPPEIVAPSVLDSFMQGLEAGGVVISDLSESSKEEEGEGAFLENVDSEDEEIDDEEKAESEDVKGNDPVRLYLRKMGSVSLLTREGEVEIARRIEKGEREIVRAILLSPLGTYEIIQLGKRLDEGRIKVKSIFRGLEDEDTQYDEKEYIDKIHELIGRVTEYQKAAEKLFMTLRKEETNTPARQAAMKELVAMNDKLMANFESVNFNRKTINRVVIKFKNLVNRIGTLRRRIKDGVERTFSKDVTAMAERMKLIDANEKELTRMTRDTGLNYQKFKSYVLQAQEAEKRISRLDSETEMNHNWVKETYTAIWKGEREADAAKSELVEANLRLVVSIAKKYTNRGLQFLDLIQEGNIGLMKAVDKFEYRRGYKFSTYATWWIRQAITRAIADQARTIRIPVHMIETINKLVRTSRYLIQELGREPTPEEIADKMDMPVDKVRKVLKIAKEPISLETPVGEEEDSHLGDFIEDKKVINPAEAIVNLNLAEQTRRVLSTLTPREEKVLRMRFGIGEESDHTLEEVGQDFNVTRERIRQIEAKALRKLRHPSRSNKLKAFVDS

SEQ ID NO: 74500 - DNA, 1860 bp, Treponema denticola ATCC 35405
  CDS (1)..(1860): transl_table=11
atgactgatctcgaaaagaatcctgcgattattaaacttttggaatatgccaaaaggaagcgcacaataggattgggtgatcttgatgatctactgcccgaagacttaatgtctccggaaactatacctgatattctggatattttggaaggtgccggcgttcaaataaaaaatgaaggaatatccgaatccaattcggaatccgactccgattctcagagcggcaatgatgaagactaccgattattggatgatacatacgaagaagaggatgacgatataaaaagtccttattccgatgaaatcgagactccatatatcgaaaaagaaaagcctaggcatgaaacggcaaaaaaactggttagaacttctcacgaagccggagttgacgatccgattaagctttatcttcaagagataggcaaggaagatcttttaactgccgatgaagaagtatctctttcaaaaagtatggaagacggggaagctatcataaaaaaggttataaaaaattccggtatattgattccagagttttttgtaatcggacaaaaggctttttcaaaactagatcccgctgagtccaataagccgcgcaaagagttaagtgaagaaatggccgaaaaaaagcgtctcaagcaggtttatggggacagtctacggaacatatattccgaaattaaacaatatatgtccttaaaaaagcactgttatgatagagaaagcttggaaagctttttggagagccctgaacttcaagctttgcgaaagaagatgtttaacagtcttaaacgtattcacattgaatcggaagaaatagaaaaaatttcggaccgctttattgaagctaccgaaaaagtgcaggactaccaacacaaaaaagaaagaaaagaaaaacagcttggtattaaaagctatgccgatttaagaaaactgggtaaacggcttgcaattccgagagaaagagaaaaactggaaaaagagcttaatatttcggctaatgaagtaaaggatatatacactcaaattcaggtcttgacccgaaaaatccgaaagatcgaatatgattttgaagctactgtagatgaagttattgatctcacttcagagataaagaacggccagagaatgcttaaaaatgcaaaagataagctgataaatgcaaacttgcgccttgttgtttctattgctaagaagtacatcaacaggggattacagttctttgatcttgtgcaagagggaaatatcgggcttataaaagctgttgaaaagtttgagtacaggaagggatataaattttctacctatgctacctggtggataaggcaggctattacgcgttcaatatcggatcaggcacgtacgataagggttcctgtccacatgatagaacaaataaacaaggtaaacagggaatcccgccagcttatgcaaaaactcggccgtgaacccaatgatgatgagatagccttgcagcttggctggtcgatcgaaaaggttaagcaggttaaaaatgttgcaagggagcctatctctcttgaaacgcccataggtgaagaagaagatacgctcttgggagatttaatcgaagataagggtgttgaaaatccttcaaacagaacggagcttactcttttgcaggagcagcttgaaatggtgctttcgagtttgcctgagcgtgagcaggaagttttaaaaatgcgcttcggtattgagggcggctatcctcttacccttgaagaagtaggcttatatttcgacgtaacgcgtgaaagaataaggcaaatagaagcaaagggattaagacggctgcgccatcctaaacgtagtagaaaattaaaagattatcttgataattga

SEQ ID NO: 74501 - protein, 619 aa, Treponema denticola ATCC 35405
MTDLEKNPAIIKLLEYAKRKRTIGLGDLDDLLPEDLMSPETIPDILDILEGAGVQIKNEGISESNSESDSDSQSGNDEDYRLLDDTYEEEDDDIKSPYSDEIETPYIEKEKPRHETAKKLVRTSHEAGVDDPIKLYLQEIGKEDLLTADEEVSLSKSMEDGEAIIKKVIKNSGILIPEFFVIGQKAFSKLDPAESNKPRKELSEEMAEKKRLKQVYGDSLRNIYSEIKQYMSLKKHCYDRESLESFLESPELQALRKKMFNSLKRIHIESEEIEKISDRFIEATEKVQDYQHKKERKEKQLGIKSYADLRKLGKRLAIPREREKLEKELNISANEVKDIYTQIQVLTRKIRKIEYDFEATVDEVIDLTSEIKNGQRMLKNAKDKLINANLRLVVSIAKKYINRGLQFFDLVQEGNIGLIKAVEKFEYRKGYKFSTYATWWIRQAITRSISDQARTIRVPVHMIEQINKVNRESRQLMQKLGREPNDDEIALQLGWSIEKVKQVKNVAREPISLETPIGEEEDTLLGDLIEDKGVENPSNRTELTLLQEQLEMVLSSLPEREQEVLKMRFGIEGGYPLTLEEVGLYFDVTRERIRQIEAKGLRRLRHPKRSRKLKDYLDN

SEQ ID NO: 74502 - DNA, 1896 bp, Yersinia pestis biovar Microtus str. 91001
  CDS (1)..(1896): transl_table=11
ttggcggtttcgccgaccgacaccaacccaaatactctgaagtgtggatactgtcttatggagcaaaacccgcagtcacagctgaagctacttgtcacccgaggtaaggagcaaggctatctgacctatgctgaggtcaatgaccatctgccggaagatatcgtcgattccgatcagatcgaagacatcatccagatgattaatgacatgggcatacaggtactagaagaagcacctgatgctgatgatttgatgctggccgaaaacaccacggataccgatgatgatgcggctgaagctgctgcacaggtgctttccagtgttgaatcagaaatcgggcgaaccaccgacccggtgcgtatgtatatgcgcgaaatgggtaccgttgagctgttgacacgcgaaggcgagattgatattgccaaacgtatcgaagacggtatcaatcaggttcagtgttctgttgctgaataccctgaagcgatcacttatctgttggaacaatatgatcgtgttgaagcgggcgaatctcgtttatctgacctgatcactggctttgttgatccaaacgccgaagaagatattgccccaacagcgacccacgttggttctgaattatccactgaagagatggatgacgaagatgaagacgaggatgaagacgacgacgcagaagacgataacagcatcgatccagagttggcgcgccagaaattcagcgatttgcgtgagcagtatgaaaacgcgcgtatggaaatcaagaaaaatggccgcaatcacgcgaatgctgccgctgaaattctgaagctttctgaggtgttcaagcagttccgtctagtgccgaagcagttcgattatctggtcaataacatgcgtgccatgatggatcgcgttcgtactcaagaacgtatcatcatgaagctgtgtgttgagcagtgcaaaatgccgaagaaaaatttcgttacgttgttttccagcaatgaaaccagcgacacctggtttaatgcggcagtggcgatgggtaaaccttggtctgaaaaactgaaagatgtctcggaagatgttcaacgcagcttgcagaaactgcgccagatcgaagaagaaaccggtctgaccatcgagcaagtaaaagacatcaaccgccgtatgtctatcggtgaagcgaaagcgcgtcgtgccaagaaagaaatggttgaggctaacctgcgtttggttatctctattgccaaaaaatacaccaaccgtggtttgcagttccttgatttgatccaggaaggcaacattggtctgatgaaagcagtagataagttcgaataccgtcgcggttataagttctcaacttacgcaacctggtggattcgtcaggctattactcgttcgattgcagaccaggcgcgcactatccgtattccagtgcatatgattgagaccattaacaaactcaacggtatctcacgccagatgttgcaagagatgggccgtgagccaacgccagaagagttggcggaacggatgttgatgccggaagataagatccgtaaagtgctgaagatagctaaagagcctatctccatggaaaccccgattggtgatgacgaagattcacatctgggcgatttcattgaagataccactctggagctaccgctggactctgcaacttctgagagcctgcgctctgccacgcacgatgtgttagctggcctaacagcccgtgaagcgaaagttctgcgtatgcgtttcggtatcgatatgaacactgaccacacgttggaagaagtgggcaaacagttcgacgtcacccgtgaacgtattcgtcagatcgaggcgaaggcattacgtaaactgcgtcacccaagccgttctgaagtgctgcgtagcttcctcgacgattaa

SEQ ID NO: 74503 - protein, 631 aa, Yersinia pestis biovar Microtus str. 91001
MAVSPTDTNPNTLKCGYCLMEQNPQSQLKLLVTRGKEQGYLTYAEVNDHLPEDIVDSDQIEDIIQMINDMGIQVLEEAPDADDLMLAENTTDTDDDAAEAAAQVLSSVESEIGRTTDPVRMYMREMGTVELLTREGEIDIAKRIEDGINQVQCSVAEYPEAITYLLEQYDRVEAGESRLSDLITGFVDPNAEEDIAPTATHVGSELSTEEMDDEDEDEDEDDDAEDDNSIDPELARQKFSDLREQYENARMEIKKNGRNHANAAAEILKLSEVFKQFRLVPKQFDYLVNNMRAMMDRVRTQERIIMKLCVEQCKMPKKNFVTLFSSNETSDTWFNAAVAMGKPWSEKLKDVSEDVQRSLQKLRQIEEETGLTIEQVKDINRRMSIGEAKARRAKKEMVEANLRLVISIAKKYTNRGLQFLDLIQEGNIGLMKAVDKFEYRRGYKFSTYATWWIRQAITRSIADQARTIRIPVHMIETINKLNGISRQMLQEMGREPTPEELAERMLMPEDKIRKVLKIAKEPISMETPIGDDEDSHLGDFIEDTTLELPLDSATSESLRSATHDVLAGLTAREAKVLRMRFGIDMNTDHTLEEVGKQFDVTRERIRQIEAKALRKLRHPSRSEVLRSFLDD

SEQ ID NO: 74504 - DNA, 2577 bp, Herminiimonas arsenicoxydans
  CDS (1)..(2577): transl_table=11
gtgaatgcgcacatctgctcattgagcgcggcttcagctgcgtttcagagcataacccagttggtagttgatccaatggcgaatgcaatgaagaaacccgcgaaaaatcagatacttgctgcgagtaaagccgaaacggctgcggcaaaatcgactaaacctgtggcaaaaaaagtggccagccagtctgctggcaaagctgtatcgtcctccaatgtaaaggcagtaaagtcgccaaccaaggcaccaacgaaaaccgctaccctggtagcgaaatctgcggcggccaaaccttcatccaaagttgctgcaaagccggtatcagtgcaatcgaaagcccctgtgacaaataagaaatctgaagtgaagtccactagcaaatcagctaaagtcgaaccaaaagtcgagtcgcgtcctggcgtcaatgtcatgatcacaccgaccgtcagtcaaactactgatgcggccacactagctgcaattgatacgtccggctatatcctgccgtcgatcaaggtacctggtcgtcgcggtcgcaagccaaaagaattccagccggagaacgacgaagttgcagcattgaatgccgtcgaacgtgcagaattgaaagctgtcgacaaggccaaggccaaagaccgcaaagccaaagaaaaagcattgctgaaagatgcgttctcgaacgacaccgaagccagcgaagaagaacttgaagcccgccgtcaaaagctgaaaacgctgatcaagttcggcaaggaacgcggcttcctcacgtacgcagaaatcaacgatcatctgccggaaaacatcatcgatccggaagcgatcgaaggcatcatcggtaccttcaatgacatgggtatcgctgtctacgaacaggcgcctgatgcggaaacgctgctcctgtcggacaacgtcgcaaccgttgccagcgacgatgaagccgaagctgcggctgaagctgcgctgtcaaccgtcgattccgatttcggccgcaccaccgatccggtacgtatgtacatgcgcgaaatgggttcggttgagctgctgacacgcgaaggcgaaatcgatattgcgaagcgtatcgaagacggcctgcgcgacatgattcaggccatctcggcgtgcccgaccacgattgctgaaatcatggctgctgccgaacgcatttccaaagatgaagccaagattgacgaaatcgttgatggcctggtcgacatgaatgcatccgagccggtcattgcgccacctgcacctgccgctgcttccgatgaggaagaagaggaagaggaagaggaagaagccgaggaagaagaagaaacgccagctgcttcgggcgcggccggcttctcctccgagcaactggaacaactgaagcgtgattcgctcgccaagttctcaacgatcgccatgcaattcgacaagatgcgcaaggctttcgagaaggaaggctacaactccaagccttacgtgaaggcgcaggaaattatttccaacgagttgctgggcatacgttttaccgccaaggttgtcgaaaaactgtgcgataccttgcgtggccaggtagatgaagtgcgccaaatcgaaaaacagattctagacattgccgtgaatcgttgtgaaatgcctcgcaatcatttcatcaaggtttttccgggcaatgaaaccaatctggattgggttgatggcgaggtcgaaggcaatcatccgtacagcatcgtacttgcgcgtaacgtgccggccgtcaaagagctgcagcaaaaactaatcgatttgcaggcacgagtcgtattgccattgccagatttgcgtgcgattaaccgcaagatggctgccggcgaaatgaaggcacgcaaagcgaaacgcgaaatgaccgaggctaacctgcgtctggtgatttcgatcgcgaaaaaatacaccaaccgcggtttgcaattcctggatctgatccaggagggcaatatcggtttgatgaaggcagtcgacaagtttgaataccgtcgcggctttaaattctcgacctacgcaacatggtggattcgccaggccattactcgttcgatcgccgatcaggcgcgcaccatccgtattcctgtgcacatgatcgaaacgatcaacaagatgaatcgcatctcgcgtcagatcttgcaggaaaccggtgcagaaccggatccggcaaccttggcgatcaagatggaaatgccggaagacaaaatccgcaagatcatgaagatcgcgaaagaaccgatttcgatggaaacaccgatcggcgacgacgacgattcgcatctgggcgatttcatcgaagacaacaacacattggcgccagccgatgcagcgttgcacgcttcgatgcgcggcgtggtcaaggatgtactcgattctctgacgccacgcgaagccaaggtattgcgcatgcgtttcggtattgaaatgtcgaccgaccacacgctggaagaagttggcaaacagttcgacgtaacacgcgaacgcattcgccaaattgaagcaaaagcattgcggaaattgcgtcatccttcacgttcggataaactgaagagcttcctggaaggtaattaa

SEQ ID NO: 74505 - protein, 858 aa, Herminiimonas arsenicoxydans
MNAHICSLSAASAAFQSITQLVVDPMANAMKKPAKNQILAASKAETAAAKSTKPVAKKVASQSAGKAVSSSNVKAVKSPTKAPTKTATLVAKSAAAKPSSKVAAKPVSVQSKAPVTNKKSEVKSTSKSAKVEPKVESRPGVNVMITPTVSQTTDAATLAAIDTSGYILPSIKVPGRRGRKPKEFQPENDEVAALNAVERAELKAVDKAKAKDRKAKEKALLKDAFSNDTEASEEELEARRQKLKTLIKFGKERGFLTYAEINDHLPENIIDPEAIEGIIGTFNDMGIAVYEQAPDAETLLLSDNVATVASDDEAEAAAEAALSTVDSDFGRTTDPVRMYMREMGSVELLTREGEIDIAKRIEDGLRDMIQAISACPTTIAEIMAAAERISKDEAKIDEIVDGLVDMNASEPVIAPPAPAAASDEEEEEEEEEEAEEEEETPAASGAAGFSSEQLEQLKRDSLAKFSTIAMQFDKMRKAFEKEGYNSKPYVKAQEIISNELLGIRFTAKVVEKLCDTLRGQVDEVRQIEKQILDIAVNRCEMPRNHFIKVFPGNETNLDWVDGEVEGNHPYSIVLARNVPAVKELQQKLIDLQARVVLPLPDLRAINRKMAAGEMKARKAKREMTEANLRLVISIAKKYTNRGLQFLDLIQEGNIGLMKAVDKFEYRRGFKFSTYATWWIRQAITRSIADQARTIRIPVHMIETINKMNRISRQILQETGAEPDPATLAIKMEMPEDKIRKIMKIAKEPISMETPIGDDDDSHLGDFIEDNNTLAPADAALHASMRGVVKDVLDSLTPREAKVLRMRFGIEMSTDHTLEEVGKQFDVTRERIRQIEAKALRKLRHPSRSDKLKSFLEGN

SEQ ID NO: 74506 - DNA, 1887 bp, Burkholderia vietnamiensis G4
  CDS (1)..(1887): transl_table=11
ttgccggcgcgcccggcgccacggcgcgcgccggtgccggtgcgcgccgccggccacgacggcgacgcgccgcctcacgcggcgcacctgcacgcactgatttcgacggggctcacacgcggcttcgtcacgcacggcgacatcatcgacgcgttgccggacgacgacgcccatcagggcggcgtcgacgcgacggctgcgatgctgcgcgagctgggcatcgcggtgtcggacggcgcgcacgccgcgggctggacgctcgaccgttacttccagcccacgccgagcgcgcgtgcgtgggccgaaggggccggcgcgctcgccgcggccgagctgagcgcaccgcgcacgaccgaccccgtacgcctctacctgcgcgagatgggcatgacgccgctgctcacgcgcgacgaggagatcatgcacgcgcaacggatcgagcgcggccgcgcggcgtcggtcgcggtgctgtgcggcgatccgcaggcactcgacgcactggtcgcgatgcgcatcgagatcgccgaaggccggacggccgcgtccgcttacgtgctgtccatcgcggatatctcggacatggcgcccgccggcggcgccgccgccgccagcccgcatgcgggcgatacgccggccgacgcgggcgcgagcacgcgcgacgacgacgctccggccgacgatgggctctgccgtcataccgtgctcgcgcgactggcgccgatcgacgcgctcacggccgcgatgcgcgccgcactggaaaccgacggcgcgcacggtctcgcctaccgcgcctgcgtgcgcgaagcggccgccctgctcggcacgctgcgcatgtcgatgcgcgcactcgagcgcatgagcgagccgctgcgcacgcacgcgcgccggcagcgcacgctgcacggccggctcgcacgcacgctcgccgaagcgggcgtgccgcacggcgcggcggcggcgtgcgtgcagcgcgacggcgatcatgcccgctggctcgcgtcgtgcatcgccgcgcatcccgaatgcgagccggcgctgacgcgccgcgcggccgagctggtcgacgcgcgcgacgcgatcgcgcgggccgcccgcacatcgccgctgccgcccgacacgatcgcgttgctcgatgcgcggctcgacacgatcgagcgcgcgatgcagccggcgcggatgggcctcttcgacgcgaacctgcggctcgtcgtatcgatcgcgaagcgctacccggaccgcgggctgccgttcgcggacctgatccaggaaggcaacatcgggctgttgaaggcgatcgaccgctacgaccatcggcgcggcttccgcttctcgacctacgcgacctggtggatcaggcaggcgatcacgcacgcgctcgccgatctcggccgcacgatccgcgtgccgacgcacaccgtcgacgcgatcaacaaactgacacggatcgcgcgcgaacaccggcagcgttccggcgctgccgcgacgccgcacgaactggccgtgcaaatgggcgagccgctcgacaaggtgcgcgacctgatgtcgatcgtgaaggagccgatgtcggccgacgcgcccgtctcgccggaaggcgagatgaccttcgtcgacgtcgcgcccgacgtatcgacgccgtcgcccgaagacgccgccggcgccgcgcagttgcgcgacacgatcgcggcgatgatcggccgcctgcccgcgcgcgaggcgacggtcctgcggctgcgctacgggctgcacgcggacgaaggctgctcgctgcgcgacatcggccgacagctgaacctgtccgccgaacgcgtgcggcagatcgaggcgtcggcgctcgcgcggctgcgcgcgtccgacgggctcgacgtgctgcgcgcgttcatcgcatag

SEQ ID NO: 74507 - protein, 628 aa, Burkholderia vietnamiensis G4
MPARPAPRRAPVPVRAAGHDGDAPPHAAHLHALISTGLTRGFVTHGDIIDALPDDDAHQGGVDATAAMLRELGIAVSDGAHAAGWTLDRYFQPTPSARAWAEGAGALAAAELSAPRTTDPVRLYLREMGMTPLLTRDEEIMHAQRIERGRAASVAVLCGDPQALDALVAMRIEIAEGRTAASAYVLSIADISDMAPAGGAAAASPHAGDTPADAGASTRDDDAPADDGLCRHTVLARLAPIDALTAAMRAALETDGAHGLAYRACVREAAALLGTLRMSMRALERMSEPLRTHARRQRTLHGRLARTLAEAGVPHGAAAACVQRDGDHARWLASCIAAHPECEPALTRRAAELVDARDAIARAARTSPLPPDTIALLDARLDTIERAMQPARMGLFDANLRLVVSIAKRYPDRGLPFADLIQEGNIGLLKAIDRYDHRRGFRFSTYATWWIRQAITHALADLGRTIRVPTHTVDAINKLTRIAREHRQRSGAAATPHELAVQMGEPLDKVRDLMSIVKEPMSADAPVSPEGEMTFVDVAPDVSTPSPEDAAGAAQLRDTIAAMIGRLPAREATVLRLRYGLHADEGCSLRDIGRQLNLSAERVRQIEASALARLRASDGLDVLRAFIA

SEQ ID NO: 74508 - DNA, 2430 bp, Burkholderia vietnamiensis G4
  CDS (1)..(2430): transl_table=11
atggcaaagacgacaggcggaaagaaagcaacgggcaagtgctcgacggagccgaccaaaaaggtcacagcggccaagtctgcttcttccaccaggacaacgtcttcggccacgtcggcccctgcaggaaagaaaaccgcggccggcactgctcaggctgcgccggcgccggcagccggatcacgagctgccgcgagacccgactccgggccggccaagccggcggcgaagcgggcaagtgcgaaaagcgcaagggacacgactgccgccgcggacgaaacggcagtacgtactactcatgcacccacggttcaaccggctgtcgtccagcagccgcgagtcgatatagccggtacggcgaactccatgaccaaaaagctgaacgaagtatccgtcgatgacgacgcaaatcagagcgacgagcagcagcccgcagcagcagcggcggccgcggctccgggcaaatccaaggtgcgcgaccgtcgcgccaaggaaaaggcgctgctgaaggaagcgttcgcgacgagcacgcccggcacggccgaggagctcgaagagcgccgcgtgaagctgcgcgcgctgatcaagctcggcaaggagcgcggcttcctcacgtatggcgaaatcaacgaccacctgccggacaacttcaccgagacggaagccctggaagggatcatcggcacgttcaacgacatgggcgtggcggtttacgagcaggcgccggacgcggaaacgctgctcctgaacgacaacgcgccggccgcgtcgtcggacgacgaagtcgaggaagaagcggaagtcgcgctgtcgacggtcgattcggaattcggtcgcacgaccgatccggtccggatgtacatgcgcgagatgggcacggtcgagctgctcacgcgtgaaggcgaaatcgagatcgcgaagcggatcgaggacggcctgcgccacatggtgatggcgatttccgcgtgcccgacgacgatcgccgacatcctcgcgatggccgagcgcgtcgcgaacgaagagatccgcgtcgacgagctcgtcgacggcctgctcgatccgaacgccgcagacgccgccgataccgacggtttctccgcgaaggaagcggaagcgatcgagaacgaggacgaagaagccgaagaggaagaggaagaagaggaagaggaggacgatgacggcgccgctcaggcaaccgccaacgccgcccagctcgaagccttgaagcgcgcgtcgctcgagaagttctcgcagatcagcgagtggttcgacaagatgcgccgtgcgttcgaaaaggaaggctacaagtcgaagtcctacctgaaggcgcaggagacgatccagaccgagctgatgacgatccgcttcaccgcgcgtaccgtcgagcgtctgtgcgacacgttgcgtgcgcaagtggacgaagtgcgtcaggtcgagcgtcagatcctgcacatcgtcgtcgacaagtgcgggatgccgcgctcggaattcatcgcgcgcttccccggcagcgagacggacctcgactgggccgagaagatcgcggccgaaggtcattcgtacagcgcggtgctgtcgcgcaacatcccggcgatccgcgaacagcagcagcgtctgctcgacctgcaggcgcgcgtcgtgctgccgctgaaggacctgaaggaaaccaaccgtcagatggcggccggcgaactgaaggcgcgtcaggcgaagcgcgaaatgaccgaggcgaacctgcgtctcgtgatctcgatcgcgaagaagtacacgaaccgcggcctgcagttcctcgatctgatccaggaaggcaacatcggcctgatgaaggcggtggacaagttcgaataccgtcgtggctacaagttctcgacctatgcgacgtggtggatccgtcaggccatcacgcgctcgatcgcggaccaggcgcgcacgatccgtattccggttcacatgatcgagacgatcaacaagatgaaccgcatctcgcggcagatcctgcaggaaaccggtctcgagccggatccggcaacgctcgccgaaaagatggagatgccggaagacaagatccgcaagatcatgaagatcgcgaaggagccgatctcgatggaaacgccgatcggcgacgacgacgattcccatctcggcgacttcatcgaggacaacaacacggtcgcgccggcggacgccgcgctgcatgccagcatgcgcgacgtcgtgaaggacgtgctcgattcgctgacgccgcgcgaggcgaaggtgctgcggatgcgcttcggcatcgagatgagcaccgaccatacgctcgaggaagtcggcaagcagttcgacgtcacgcgtgagcggatccgtcagatcgaagccaaggcgctgcgcaagctgcgtcatccgagccgttccgacaagctgaagtcgttcctcgaagggaactga

SEQ ID NO: 74509 - protein, 809 aa, Burkholderia vietnamiensis G4
MAKTTGGKKATGKCSTEPTKKVTAAKSASSTRTTSSATSAPAGKKTAAGTAQAAPAPAAGSRAAARPDSGPAKPAAKRASAKSARDTTAAADETAVRTTHAPTVQPAVVQQPRVDIAGTANSMTKKLNEVSVDDDANQSDEQQPAAAAAAAAPGKSKVRDRRAKEKALLKEAFATSTPGTAEELEERRVKLRALIKLGKERGFLTYGEINDHLPDNFTETEALEGIIGTFNDMGVAVYEQAPDAETLLLNDNAPAASSDDEVEEEAEVALSTVDSEFGRTTDPVRMYMREMGTVELLTREGEIEIAKRIEDGLRHMVMAISACPTTIADILAMAERVANEEIRVDELVDGLLDPNAADAADTDGFSAKEAEAIENEDEEAEEEEEEEEEEDDDGAAQATANAAQLEALKRASLEKFSQISEWFDKMRRAFEKEGYKSKSYLKAQETIQTELMTIRFTARTVERLCDTLRAQVDEVRQVERQILHIVVDKCGMPRSEFIARFPGSETDLDWAEKIAAEGHSYSAVLSRNIPAIREQQQRLLDLQARVVLPLKDLKETNRQMAAGELKARQAKREMTEANLRLVISIAKKYTNRGLQFLDLIQEGNIGLMKAVDKFEYRRGYKFSTYATWWIRQAITRSIADQARTIRIPVHMIETINKMNRISRQILQETGLEPDPATLAEKMEMPEDKIRKIMKIAKEPISMETPIGDDDDSHLGDFIEDNNTVAPADAALHASMRDVVKDVLDSLTPREAKVLRMRFGIEMSTDHTLEEVGKQFDVTRERIRQIEAKALRKLRHPSRSDKLKSFLEGN

SEQ ID NO: 74510 - DNA, 1872 bp, Dichelobacter nodosus VCS1703A
  CDS (1)..(1872): transl_table=11
atgactgattttgagcgcaatccggaagatgatgatgttcatgaagaatacaaagaattatttgaacaaggacgtgagcagggttttttaacctacgaagaaatcaacgaaacattgccagaaagtgcggtagaaggcgaaaaatttgatgaattaatcgcttttttaaacgaaaacggtattgatgttgttgaaacgccaccggaagaagaggaagcggttaccgatgatgaagaatcgcttgctaataatgttttgtcgagcgctgatgcagaagtcggtagaacaacggatccggtaagaatgtatatgcgcgaaatgggagcggtggatttattaacgcgggaaggagaaatcgccatcgcaaaacgcattgaaagcggtttggatttagtgcaacaaactttagcagaatttcctttagcaattgccgctttggttgcggaatttgaacgcgttgaagcgggggaaggtcgtctaagtgatttggtcaacggttacggcgatccgtttgcacaaaaaacggaagaagcaaccgatgacgaagaaacagaaagcgcagtttcatcagaagatgaagacgatgaacttttaacgcaagcaggcgatgatgacgacgaagacggcgacgaaagcacggaagcagaaattaccgtcaacgatagtttggaagaagcgcgggagaaattattagaactttcgcaagtttttaaaaaattaaaaacggctttggataaagggcaaagtttagcgacaaagaaaaatcagaagttgcatgacgaagtaaaacaatattttgtggctttttcttttccgcaaaaaacaatggatttgatggaagcgcaattagaagagccgatggaaatgattcatgccattgagcggcgattaatgcgtttggtgattgaaaaatccggcatgccgcgcaagagttttatcagcgattttccagggcatgaaacggatttggaatgggtggttaaacaatcaacattgcggcgtaaatatgccgaaaaattgaaattaatgattgaagacgtgcaagccgagcagcaaaaatttttagaagtagaaaaaacttacggcatgtccattcaacaaatcaaggatatttatcgccaattggcagtgggtaaagaacgcgccaaacgggcaaaagaagaaatggttgaggcgaatttgcgcttggtgatttcaattgcgaaaaaatacaccaaccgcggcttgcaatttttggatttaattcaagaaggtaatattggtttgatgaaagcggtggataaatttgaatatcgccgcggttttaagttttcaacgtatgccacttggtggattcggcaggcgattacgcgttctatcgccgatcaggcgagaactattcggattcctgtgcatatgattgagacaattaataaattgaaccgaatttcgcgtatgttgcaacaaaaaaatggacgcgatccaacgccagaagagttatcagttgccatggatatgcctgaagataaaattcggaaagtgtggaaaattgccaaagaaccgatttctatggaaacaccgattggagatgatgaagattcgcatcttggtgatttccttgaagatagcaatgtgatttctcctctggaagcagcgacaacgcgcggtttatcggaagcgacgaatgaagttttggcatcgttgacgccgcgtgaagaacgggttttacgcatgcgttttggtattgatatgaatacggatcacactttggaagaagtgggacggcagtttgatgtgacgcgcgaacgcattcggcaaattgaagccaaagcgttacgtaaattgcgtcaccccaatcgttcagaattattgaaaagctttttaagcgattga

SEQ ID NO: 74511 - protein, 623 aa, Dichelobacter nodosus VCS1703A
MTDFERNPEDDDVHEEYKELFEQGREQGFLTYEEINETLPESAVEGEKFDELIAFLNENGIDVVETPPEEEEAVTDDEESLANNVLSSADAEVGRTTDPVRMYMREMGAVDLLTREGEIAIAKRIESGLDLVQQTLAEFPLAIAALVAEFERVEAGEGRLSDLVNGYGDPFAQKTEEATDDEETESAVSSEDEDDELLTQAGDDDDEDGDESTEAEITVNDSLEEAREKLLELSQVFKKLKTALDKGQSLATKKNQKLHDEVKQYFVAFSFPQKTMDLMEAQLEEPMEMIHAIERRLMRLVIEKSGMPRKSFISDFPGHETDLEWVVKQSTLRRKYAEKLKLMIEDVQAEQQKFLEVEKTYGMSIQQIKDIYRQLAVGKERAKRAKEEMVEANLRLVISIAKKYTNRGLQFLDLIQEGNIGLMKAVDKFEYRRGFKFSTYATWWIRQAITRSIADQARTIRIPVHMIETINKLNRISRMLQQKNGRDPTPEELSVAMDMPEDKIRKVWKIAKEPISMETPIGDDEDSHLGDFLEDSNVISPLEAATTRGLSEATNEVLASLTPREERVLRMRFGIDMNTDHTLEEVGRQFDVTRERIRQIEAKALRKLRHPNRSELLKSFLSD

SEQ ID NO: 74512 - DNA, 1665 bp, Candidatus Protochlamydia amoebophila UWE25
  CDS (1)..(1665): transl_table=11
atgaacaaaacgaacttcaaaaatcatttttctcaacaacatcagcaaaaaattgatgagcttgtcgctatttcaaaagaccaaggttttattacttatgaggagatcaatgaaattctccctatgtcttttgattccgctgatcaaattgatcagatcctgattttccttagcggaatggacattcaagttcttaaccaatctgaggtagatcgtcaaaaagagcgcaagaaagaagcgaaagaattagaaagcatgccaaaaagatcagaaggatctcctgatgacccggtgcgcatgtatcttaaagaaatgggttcggtccctcttttaagccgggaagaagaagttgaaatttctaaacgcattgaaaaagctcaagtccaaattgaacgcattattttacgctttcggtacgcaacctctgaagccattgctatagctaactatcttcttactggtaaagaacgatttgataaatctattaccgaaaaagaagtcgtgaataaacaagaattcatgaatctgcttcctagaatatgtcagttattaaaagaagaagatctcattttagaaagattattagagcaaattaatgatcctaatatcaaaaagaatgaccgcttaaagctaattgaagacattgaaaaatgtcgtatccgcatgcaagcctacctacgccgactgcatttaagacacaatatcatcgacgatttcgtcgaagttattctacgtgcttatgatcgcttccttttcctagaaaaggaaattcaggaacttacacctcgtgcggaaagaaataagtttgctggtgcaaagcttgccgctgctcaacgaaaactcaacaaacgagaacttgcagcagggcgatctttagatgatttcaaaaaagatgtgaaaatgcttcaacgctggatggataaaagccaagaagctaaacgggaaatggtagaatctaacttaaggctcgttatttctattgctaagaaatatacaaatcgaggcctttctttcttggatctcattcaagaaggaaatatggggctcatgaaagccgtcgaaaaatttgaatatcgtcgcggatacaagttttctacttatgcaacatggtggatcagacaagctgtcacaagggctattgccgatcaagcccgtaccatccgtattcctgttcatatgattgaaacaattaataaagtcttacgcggcgcaaagaaattaatgatggaaactggtcgcgagccaagtcctgaagaattagctaaagaactaggaattactgccgaaagggtgagagaaatctataaaattgctcaacatcctatttcacttcaagccgaagtgggtgatggaggtgaaagtcaattcggagacttcttagaagacacgggagctgattctcctgcagaagcaacgggttattcaattttgaaagataagatgggagaagtcctctcaacacttagtgatcgagaacgaaaagtccttattcaacgatttggtttattagatggtaaacctaaaacactggaagaagtaggtgtagagtttaatgttactcgtgaacgtatccgccagattgaagcaaaagctctacgcaaaatgcgacaccctatccgttctaaacaactcaaagccttccttgatttattagaagcagaataa

SEQ ID NO: 74513 - protein, 554 aa, Candidatus Protochlamydia amoebophila UWE25
MNKTNFKNHFSQQHQQKIDELVAISKDQGFITYEEINEILPMSFDSADQIDQILIFLSGMDIQVLNQSEVDRQKERKKEAKELESMPKRSEGSPDDPVRMYLKEMGSVPLLSREEEVEISKRIEKAQVQIERIILRFRYATSEAIAIANYLLTGKERFDKSITEKEVVNKQEFMNLLPRICQLLKEEDLILERLLEQINDPNIKKNDRLKLIEDIEKCRIRMQAYLRRLHLRHNIIDDFVEVILRAYDRFLFLEKEIQELTPRAERNKFAGAKLAAAQRKLNKRELAAGRSLDDFKKDVKMLQRWMDKSQEAKREMVESNLRLVISIAKKYTNRGLSFLDLIQEGNMGLMKAVEKFEYRRGYKFSTYATWWIRQAVTRAIADQARTIRIPVHMIETINKVLRGAKKLMMETGREPSPEELAKELGITAERVREIYKIAQHPISLQAEVGDGGESQFGDFLEDTGADSPAEATGYSILKDKMGEVLSTLSDRERKVLIQRFGLLDGKPKTLEEVGVEFNVTRERIRQIEAKALRKMRHPIRSKQLKAFLDLLEAE

SEQ ID NO: 74514 - DNA, 2013 bp, Bartonella quintana str. Toulouse
  CDS (1)..(2013): transl_table=11
atggcaacaaaggttaaacagaaagacaacacagaagtaaagggccaagcgagtgtagatagtcctcttctcgatttttctgatgatgccatcaaaaaaatggttaaactcgccaaaaaaaatggttacgtgacgatggatgaattgaatgcagttcttcctcctgatgaagttacatctgaacaaattgaggataccttggcgatgttctcagagatgggcattaatgtcgtggacgatgaggatgaaggtgagtctgaacattatgaagaagaggttacggtagaagggggcgatttagtagaggttactcgcaatgcgattgcaacgacaactaagcgtgaggtgacagatcgcaccgatgatccagtgcgcatgtatttgcgtgagatgggggctgttgagctcctttcgcgggaaggcgaaattgctattgctaagcgtattgaagctgggcgtgaaacaatgattgccggcctttgtgagagccctttgacttttcaggctctcattatttggcgtgaagaattaaaagagcagcgtattcttcttcgtgaaattattgatcttgaaatgacttatgcaggtccagaagctaagcaggctcctgttattgaacgaagtgaaatcggcaagataaaagaagaaaagtccttttctggcacgcgtgacatggaggagaatattacacgagatataggtgttgaggatgatgaagaagaggatgatgacgttaatttgtcgcttgctgcaatggaaaatgaactctgtcctcaggtcatggaaacattggatttcattgctgaagcctatataaaattgcgaaaattacaagatcagcatgtggaaagcagtttggcagagcgtaaagagggaacactttcgctttctcagaagaagaaatatattcaattgaagagcgagttaattcaagcggtaaaatctctttctttgaaccaaaatcgtattgaagccttggttgagcagctttatgacatcaataaaagattaattcataatgagggtaagctgaagcggattgccaataattatggtgttagtcatgaagagtttttaaaagaataccaaggtcgtgaattggatgcagattggattaattatattgcaactttgtcagggcgcggttggaaagaattttcaatgcgtgaagtgaaagaaattcaaagtttgcgcagtgaaatacagaatcttgcacaagaaactgctatttcgattggcgaattccgtcggattgtgacgcaggtacagaaaggtgagcgcgaatcaacaattgctaaaaaagaaatggtggaagctaatttgcgtcttgtaatctcaattgcaaaaaaatataccaatcgtggtttgcaatttcttgatcttatccaagaaggcaatatcggtttgatgaaggcagtggataaatttgaatatcggcgaggatataagttttcaacttatgcaacatggtggattcgtcaggcaattacgcgctcaattgctgatcaggcacgcactattcgtatccctgttcatatgattgaaacaattaacaagattgttcgcacatcgcgccagattttacatgaaattgggcgtgaacccacaccagaagaattgtctagtaaactttctatgccgctagaaaaagtgcgaaaagtgcttaaaattgccaaggaaccaatttcacttgaaacgcccgttggtgatgaagatgattctcatttgggtgattttattgaggataggaatgcattattgccgattgatgcggctattcaagctaatctgcgtgatacaacgactcgtgtgcttgcttccttaacaccacgtgaagaacgtgttttgcgaatgcgttttggtatagggatgaatactgatcacacgttagaagaagttggtcaacaattttcagtaacgcgtgagcgcattcgccagattgaagcaaaggcgctccgtaaattaaagcatcctagccgttcacggaaattgcgtagttttctcgattcttaa

SEQ ID NO: 74515 - protein, 670 aa, Bartonella quintana str. Toulouse
MATKVKQKDNTEVKGQASVDSPLLDFSDDAIKKMVKLAKKNGYVTMDELNAVLPPDEVTSEQIEDTLAMFSEMGINVVDDEDEGESEHYEEEVTVEGGDLVEVTRNAIATTTKREVTDRTDDPVRMYLREMGAVELLSREGEIAIAKRIEAGRETMIAGLCESPLTFQALIIWREELKEQRILLREIIDLEMTYAGPEAKQAPVIERSEIGKIKEEKSFSGTRDMEENITRDIGVEDDEEEDDDVNLSLAAMENELCPQVMETLDFIAEAYIKLRKLQDQHVESSLAERKEGTLSLSQKKKYIQLKSELIQAVKSLSLNQNRIEALVEQLYDINKRLIHNEGKLKRIANNYGVSHEEFLKEYQGRELDADWINYIATLSGRGWKEFSMREVKEIQSLRSEIQNLAQETAISIGEFRRIVTQVQKGERESTIAKKEMVEANLRLVISIAKKYTNRGLQFLDLIQEGNIGLMKAVDKFEYRRGYKFSTYATWWIRQAITRSIADQARTIRIPVHMIETINKIVRTSRQILHEIGREPTPEELSSKLSMPLEKVRKVLKIAKEPISLETPVGDEDDSHLGDFIEDRNALLPIDAAIQANLRDTTTRVLASLTPREERVLRMRFGIGMNTDHTLEEVGQQFSVTRERIRQIEAKALRKLKHPSRSRKLRSFLDS

SEQ ID NO: 74516 - DNA, 1890 bp, Acinetobacter sp. ADP1
  CDS (1)..(1890): transl_table=11
atgagcgatatgcattcccctacttctcaagtagcggctctgattagccgaggcaaagaacaaggttacttaacctacgctgaggttaacgatcatctcccagactcgatcacggaaagcgagcaaattgaagacatcattcagatgcttcaggacgttggtattcctgtgcatgaacgcgcacctgaatctgatgatacgatgtttggtgattccacagaagccgatgaagttgctgaagaagaagcagcagcagtacttgcatctgtagaaaatgagccaggtcgtactacagatcctgtacgcatgtatatgcgtgaaatgggaacggttgagctcttaacgcgcgaaggcgaaatcagcattgcaaaacgtatcgaagaaggtattcgtgatgttttgcattcgattgcttactggccgaatgccgttgaagttgtattacaagaatataatgattatgtaacaggcgaacgtcgtctggccgatattctttcaggttatctcgatccagaaacagatgatgatattccagaagtactggaagaagaggctgaactggaagaagatgatgaatctacatctaaaaccaccaccaaagacgtcaaacttgatgatgatgacgaagaagaggaagagtctgaaggtgatgacgattctgaaggtgattctggtccagaccctgaaatcgcaaaagtacgttttgaagaattagaagctgcctggaaaaacaccaagactgtcattgaaaaacacggccgcaatagcgaagaagcaaatgctgcgctagagtcgctcgcaactgtgtttatgatgtttaaatttaccccacgtttgtttgatatcatttcagaaatgattcgtggtacacatgaaaacatccgttctaacgaacgtgaagtgatgcgctacgcagtacgtcgtggtcgtatggatcgtacccagttccgtaccagtttcccaggtcaagaatcaaatccggcttggttggaagaacaaattgcgaaagcgccaaatgaaagtaaggcctatcttgaaaaagtacgtcctgacattcaggcattccagcaaaaaattgcagagattgagcaagacttaaacctaaatgtacgtgaaattaaagaaattgcaaaacgtatggctgtaggcgaagccaaagctcgccgtgccaaaaaagagatggtcgaagccaacttgcgtctcgttatttcgattgcgaaaaagtatactaaccgtggtttgcaattccttgatttgattcaggaaggtaacatcggcttgatgaaagcagttgataaatttgaataccgtcgtggttataaattttcgacctacgcaacgtggtggattcgtcaggcgattacccgctcaattgcggatcaggcacgtaccatccgtattccggtccacatgattgaaacgattaacaagatcaatcgcgtatcacgtcaattgttacaagaaatggggcgtgaaccaacaccagaagagcttggtgaacgtctggaaatggatgaagtcaaagttcgtaaagtgttgaaaattgccaaagagccaatttcaatggaaacaccaattggtgatgatgaagattctcatcttggtgattttattgaggattcaaacatcacttcgccagtggatgcagcaacctcagaaggcttgaaagaagcaacacgtgaagtgcttgaaaatctgaccgaacgtgaagcgaaagtcttgaaaatgcgttttggtatcgatatgccaaccgaccatactttggaagaagtcggtaaacagtttgatgtaacacgcgaacgtattcgtcagatcgaagccaaagccttacgcaaattacgtcatccttcgcgttctgaacacttacgttcattcctcgaaaacgactaa

SEQ ID NO: 74517 - protein, 629 aa, Acinetobacter sp. ADP1
MSDMHSPTSQVAALISRGKEQGYLTYAEVNDHLPDSITESEQIEDIIQMLQDVGIPVHERAPESDDTMFGDSTEADEVAEEEAAAVLASVENEPGRTTDPVRMYMREMGTVELLTREGEISIAKRIEEGIRDVLHSIAYWPNAVEVVLQEYNDYVTGERRLADILSGYLDPETDDDIPEVLEEEAELEEDDESTSKTTTKDVKLDDDDEEEEESEGDDDSEGDSGPDPEIAKVRFEELEAAWKNTKTVIEKHGRNSEEANAALESLATVFMMFKFTPRLFDIISEMIRGTHENIRSNEREVMRYAVRRGRMDRTQFRTSFPGQESNPAWLEEQIAKAPNESKAYLEKVRPDIQAFQQKIAEIEQDLNLNVREIKEIAKRMAVGEAKARRAKKEMVEANLRLVISIAKKYTNRGLQFLDLIQEGNIGLMKAVDKFEYRRGYKFSTYATWWIRQAITRSIADQARTIRIPVHMIETINKINRVSRQLLQEMGREPTPEELGERLEMDEVKVRKVLKIAKEPISMETPIGDDEDSHLGDFIEDSNITSPVDAATSEGLKEATREVLENLTEREAKVLKMRFGIDMPTDHTLEEVGKQFDVTRERIRQIEAKALRKLRHPSRSEHLRSFLEND

SEQ ID NO: 74518 - DNA, 1836 bp, Erwinia carotovora subsp. atroseptica SCRI1043
  CDS (1)..(1836): transl_table=11
atggagcaaaacccgcagtcacagctgaagctgcttgttacccgtggtaaggagcaaggctacctgacctatgctgaggtcaatgaccatctgccggaagatatcatcgactcggatcagatcgaagatatcatccagatgattaacgacatgggcatccaggtgatggaagaagcaccggatgcagacgatctgttgctggccgaaaacaccaatgatgccgatgaagatgcggcagaggctgctgcgcaggttctatccagtgttgaatcggaaattggtcgcaccaccgatccagttcgcatgtacatgcgtgaaatgggtaccgttgagctgttgacgcgtgaaggcgagatcgatatcgctaagcgtattgaagacggtatcaatcaggttcagtgctctgtcgcggagtatcctgaagccattacctatctgctggaacaatacgatcgtgtcgaagcgggcgaaagccgcctgtccgacctgatcatcggtttcgtcgatcctaatgcggaagaggacattgcccctaccgcgactcacgttggttccgagctttcgagcgaagaaataagcgataacgacgaggaagaagacgaagacgaggaagaagacgacaacagcatcgatcctgaactggcgcgtgagaagttcactgaactgcgtgagcaatatgaaacgacccgtaaggtgatcaaggcccatggtcgtagccatgcgctagcagcacaggaaatcctgaacctgtctgaagtcttcaagcagttccgtctggtgccgaaacagtttgatttcctggttaacagcatgcgcaccatgatggatcgcgtccgtactcaggaacgtttgatcatcaagttgtgtgttgaacagtgcaaaatgccgaagaaaaacttcgtcaccatgttcaccagcaatgaaaccaacaacagctggtttgcagcagcagtggcgatgggcaagccctggtctgaaaaactgaatgatgttgcagaagatgtcactcgcagcctgcaaaagctaaaacagatcgaagaagaaaccggtctgacgatcgagcaggttaaagacatcaaccgccgtatgtcgattggtgaagcaaaggctcgccgcgccaagaaagaaatggtggaagccaacctgcgtctggttatttctatcgcgaagaaatacaccaaccgtggtttgcagttccttgatctgattcaggaaggcaacatcggtctgatgaaagcggtagataagttcgaatatcgccgtggctacaaattctcgacctatgccacatggtggatccgtcaggcgatcacccgttctatcgccgatcaggcgcgtaccatccgtattccggtacatatgattgagacgatcaacaaattgaatcgtatctctcgtcagatgttgcaggaaatgggtcgcgagccgacgccggaagaactagctgaacgtatgttgatgccagaagacaagatccgcaaagtgctgaagatcgcgaaagagccgatctcaatggaaaccccgattggtgatgatgaagattcacatttgggcgatttcatcgaagatacgacgctggagctgccgctggattccgccacgtcggaaagcctgcgttctgcgacacacgacgtactggctggcctgaccgcgcgtgaagcgaaagtcttgcgcatgcgtttcggtatcgatatgaacaccgaccatacactggaagaagtgggcaaacagtttgacgttacgcgtgaacgtattcgtcagatcgaagcgaaagcgctgcgtaaactgcgtcacccaagccgttccgaagtgctgcgtagcttcctggatgattaa

SEQ ID NO: 74519 - protein, 611 aa, Erwinia carotovora subsp. atroseptica SCRI1043
MEQNPQSQLKLLVTRGKEQGYLTYAEVNDHLPEDIIDSDQIEDIIQMINDMGIQVMEEAPDADDLLLAENTNDADEDAAEAAAQVLSSVESEIGRTTDPVRMYMREMGTVELLTREGEIDIAKRIEDGINQVQCSVAEYPEAITYLLEQYDRVEAGESRLSDLIIGFVDPNAEEDIAPTATHVGSELSSEEISDNDEEEDEDEEEDDNSIDPELAREKFTELREQYETTRKVIKAHGRSHALAAQEILNLSEVFKQFRLVPKQFDFLVNSMRTMMDRVRTQERLIIKLCVEQCKMPKKNFVTMFTSNETNNSWFAAAVAMGKPWSEKLNDVAEDVTRSLQKLKQIEEETGLTIEQVKDINRRMSIGEAKARRAKKEMVEANLRLVISIAKKYTNRGLQFLDLIQEGNIGLMKAVDKFEYRRGYKFSTYATWWIRQAITRSIADQARTIRIPVHMIETINKLNRISRQMLQEMGREPTPEELAERMLMPEDKIRKVLKIAKEPISMETPIGDDEDSHLGDFIEDTTLELPLDSATSESLRSATHDVLAGLTAREAKVLRMRFGIDMNTDHTLEEVGKQFDVTRERIRQIEAKALRKLRHPSRSEVLRSFLDD

SEQ ID NO: 74520 - DNA, 1887 bp, Mannheimia succiniciproducens MBEL55E
  CDS (1)..(1887): transl_table=11
atgaatcaaaggcggacgtcatatatggatcacaatccacaatctcaattgaaattgttaatcgcccaagggaaagaacaaggttatttaacttatgcagaagtaaatgatcatcttcctgaagaacttgttgatacggatcaaattgaagatattattcaaatgattaatgacatgggtatccaagtgctggaaagcgcacctgatgccgatgatttaatgttgagtgaaaccattgccgatgaagatgcggtggaagaagcgactcaggtattgtcaagtgttgaagcggaattaggcagaacaacggatccggtgcgtatgtatatgcgtgaaatgggaagcgttgaattattaacccgcgaaggcgagatcgatattgcaaaacgtattgaagacggcattaatgaagtacaaagtgctgttgcagaatatccggaagctctggattatttactgaaacaatatgaacaagttgaagaaggttcggttcgtttggctgatttgatcacaggttttgttgatttgaatgcggaagaagcaagtgaagaaatttctgatttagaggaagtgcttgatgatgaagacggcgatattccggcggatgcgctaaatgatgaggaagaagacgaagagagcgatgaaggcgatacctcaacggacgatagcgataattctatcgatcctgaagtcgctcgtgaaaaattctccgcattaaaagatcaatgtgttaaaactttagaatttattgaaaaatacggacgcaccgataataaagtaaaagaacagattcaagttttgtctgatatttttactcaattccgtttagtccctcgccagttcgatacgttagtgttgtcaatgcgcagtatgatgaaacaagttcgagcggaagaacgtcaaattcaacgccttgccgtggattatgcgaaagtgccgaaagatgatttccaaaaggcctttatcggtaacgaaacctctgaacaatggttggaaagcttgttgcaaagcaaaaaaacttatgtagaaaaattgcagcaacgggcaccggaaatcagtaaatctatcgtgcgtttacagcaggttgaaacggatacgaaattaaccgttcaacaaatccgcgatatcggcgaacgtattgctcaaggtgagttgaaagcccgtcgcgccaaaaaagaaatggtggaagcgaacttacgtttagtgatttctattgcgaaaaaatataccaatcgtggtttacaattcctggatttgattcaggaaggtaatatcggcttgatgaaagctgtagataaattcgaatatcgccgcggttacaagttttcaacttatgcaacctggtggattcgtcaggcgattacccgttctattgcggaccaggcgcgcaccattcgtattccggtgcatatgatcgaaaccattaataaattaaaccgtatttcccgtcaaatgttacaggaaatgggccgtgaggcttcacctgaagagttggctgaacgtatgggaatgccggaagataaaatccgtaaggtgcttaaaatagccaaagagccgatttcaatggaaactccgattggtgatgacgatgattcgcatttaggtgatttcattgaggacagcaccttggaattaccgttagattccgcaacggcacaaagcctgaaagttgccactcatgaagtacttgaaggtttgaccccgcgtgaagcgaaagttttgcgtatgcgtttcggtattgatatgaatacggatcatactcttgaagaagtaggtaaacaatttgatgtaacccgtgaacgtattcgtcagattgaagcaaaagcattgcgtaaattgcgtcatccaagccgttcggaaacgttgcgcagtttcctggatgaataa

SEQ ID NO: 74521 - protein, 628 aa, Mannheimia succiniciproducens MBEL55E
MNQRRTSYMDHNPQSQLKLLIAQGKEQGYLTYAEVNDHLPEELVDTDQIEDIIQMINDMGIQVLESAPDADDLMLSETIADEDAVEEATQVLSSVEAELGRTTDPVRMYMREMGSVELLTREGEIDIAKRIEDGINEVQSAVAEYPEALDYLLKQYEQVEEGSVRLADLITGFVDLNAEEASEEISDLEEVLDDEDGDIPADALNDEEEDEESDEGDTSTDDSDNSIDPEVAREKFSALKDQCVKTLEFIEKYGRTDNKVKEQIQVLSDIFTQFRLVPRQFDTLVLSMRSMMKQVRAEERQIQRLAVDYAKVPKDDFQKAFIGNETSEQWLESLLQSKKTYVEKLQQRAPEISKSIVRLQQVETDTKLTVQQIRDIGERIAQGELKARRAKKEMVEANLRLVISIAKKYTNRGLQFLDLIQEGNIGLMKAVDKFEYRRGYKFSTYATWWIRQAITRSIADQARTIRIPVHMIETINKLNRISRQMLQEMGREASPEELAERMGMPEDKIRKVLKIAKEPISMETPIGDDDDSHLGDFIEDSTLELPLDSATAQSLKVATHEVLEGLTPREAKVLRMRFGIDMNTDHTLEEVGKQFDVTRERIRQIEAKALRKLRHPSRSETLRSFLDE

SEQ ID NO: 74522 - DNA, 1872 bp, Legionella pneumophila subsp. pneumophila str. Philadelphia 1
  CDS (1)..(1872): transl_table=11
gtgcctatgaccatgaatgaccaagatcagcaaagctcacaaattacgaaagtcattagcctgggtaaagagcaaggttatttgacttacagtcaaattaatgacttattacctaatattgtggatacggagcattttgatgtaatcattagcatgctggaaggcatgaacatcaaagtttttgagcttccacccagtgaagatgaacttgcgctcttattaaatactgaagaagtcccagatattgaagaagcagccatggtactcgcctctgtggataaagaaacaggtagaacaactgacccggttcgtatgtatatgcgcgaaatgggtacagtagaactgctgactcgtgaaggtgaaatccgcattgccaaacgcattgaagaaggaatttaccaggtcctaaaatccctggcgcattatccggaaacagtgcaactggttcttgaagactatgatcgtttccttgccgaagaaattcgccttaatgaaatcattagtggttttgcggatgttgatgaagaaatagcacctgccactaacattggctccatgctggatgaagagcaacaggaagaaatacttcttgatgtggatgaggaagatgaagacggcgaaggtggtatatctgatgtggatgatggacccaatcctgagcaagcgaagatttactttgatgaactgcgtgaagcctttgaaaaggcaatgaaagccctcaaagaacatggccgtacgaataaaaaaacggtcgagttgctcgattccatgtcggaatcttttctgaaactcaaattgacttccagacaagttgataaattaactcgtcattttcgccaattgcgaaatcatatccgtgaatttgagagaagcattatgcgtctttgcatcgaaaaagcacgcatccccagaaaattgtttatagataccttcccaggccaggaaacagatctaggctggttagaaaccattatcagcaaacatgccaaaaaacttgatcttcagcgtatagaagaaaatcgggaagaaatactgcgcttacaatccaagttggcctcttttgaaatcgaatatggtttaaccattagtgaaatcaaagacattaaccgcaagatgtctattggcgaagccaaagcaagacgtgctaaaaaagaaatggtcgaggctaacttgcgtctcgtgatttctatcgccaaaaaatacaccaaccgcggcttgcagtttcttgatttgatccaggaaggcaacatcggcctgatgaaagcagtcgataaattcgaataccgccgtggctataagttttctacctatgcgacctggtggattagacaagcgattacacgatccatagccgatcaggcgcggactattcgtattccggttcatatgattgaaaccatcaataagctcaatcgtatttctcggcaaattttgcaagaaactggccgggaagcgacaccggaagaattggcggaaaaaatggagctaagtgaagataaaattcgcaaagttctaaagatagccaaagaacctatttccatggaaacccctgtcggtgatgatgacgactctcatctgggtgattttattgaagacaacaacattgaatcgccaatcgatatggctacagcggaaggtttaagagaagccactttagaaatactggaaaccttgaccccacgagaagccaaggttctgcgtatgcgttttggtatcgaaatgaatacagaccatactctggaagaagttggtaaacaatttgacgtaacccgcgaacgtattcgccaaatcgaagcaaaagcactacgcaaattgcgccacccttcacgttcagaaaagctaagaagcttccttgaaggagacgaaggttaa

SEQ ID NO: 74523 - protein, 623 aa, Legionella pneumophila subsp. pneumophila str. Philadelphia 1
MPMTMNDQDQQSSQITKVISLGKEQGYLTYSQINDLLPNIVDTEHFDVIISMLEGMNIKVFELPPSEDELALLLNTEEVPDIEEAAMVLASVDKETGRTTDPVRMYMREMGTVELLTREGEIRIAKRIEEGIYQVLKSLAHYPETVQLVLEDYDRFLAEEIRLNEIISGFADVDEEIAPATNIGSMLDEEQQEEILLDVDEEDEDGEGGISDVDDGPNPEQAKIYFDELREAFEKAMKALKEHGRTNKKTVELLDSMSESFLKLKLTSRQVDKLTRHFRQLRNHIREFERSIMRLCIEKARIPRKLFIDTFPGQETDLGWLETIISKHAKKLDLQRIEENREEILRLQSKLASFEIEYGLTISEIKDINRKMSIGEAKARRAKKEMVEANLRLVISIAKKYTNRGLQFLDLIQEGNIGLMKAVDKFEYRRGYKFSTYATWWIRQAITRSIADQARTIRIPVHMIETINKLNRISRQILQETGREATPEELAEKMELSEDKIRKVLKIAKEPISMETPVGDDDDSHLGDFIEDNNIESPIDMATAEGLREATLEILETLTPREAKVLRMRFGIEMNTDHTLEEVGKQFDVTRERIRQIEAKALRKLRHPSRSEKLRSFLEGDEG

SEQ ID NO: 74524 - DNA, 1899 bp, Anaplasma marginale str. St. Maries
  CDS (1)..(1899): transl_table=11
ttgcgtttggattgcccgctgattgtttggttttcctttgtgggattcgtaatggataaagaacttgtcaaaaatctcataactaaaggcattaagcagggtggagtaattacctttgacgacataagcgatgcgctgtcagatgatgacgtcgtttcttctgaaagcatcgatgaaaccatatccctgctgcaggactctggaataggcgtgctagaacagagcgatgaagaagaggccgacgctgtagtttctgaggaaaacgcagcgaaagacgaagaggatgaggccggaatgcggtctttagatttcggccaaactgatgatcctatacgcatgtacctgtgcgaaatgagctcggtagagttgctctccagagagggggaaatagaaatcgcaaagaggattaagtcggaaaaaattaatatgttgcggtctctgatcgaggctccgctggtactgcgcacttttatgtcatggagggatgacctggtaaatcagcaggtaatgctcagagacctaatagatctggacgcaaattatagggggggtgctcctcgacaggaatttgaggaaggaggagaatacggggagcaagagatggcggaacccggagatagtgatgtgggcggtgatggagctgatgatgaagatgaaggggaagactcttcagcgggtaatgcttcaatcttggaaatggagagcgcacttttaccaaaggtgatttctattttggatgcaactatagagtccgcagagaaaatcctggagatgaaaaagcagaaaagagattcaggaaagtacgacaagaaggcctataatgcactacatgaaaatatctgggagcttgtctctcagatgaagctcagtgatcctgcggttttgtctgtaacccagcagatctataacctcagcaaggccatagcggcggaggaagcggcgctcatgtcgcttgtagagagttacggagtagaccgtaaaagtttcctcgaggcatataacaacaatacagtctttgagcaagccaatgcttctcctgagtggaaaaacctgcttgagaaagagaagaaaaccctgacggatatacaaaacaaggtgcgcttgctatcaggggaagatagcccgggtaactttaaagccttagtcgcaaagatccagaaacatgagaggaccgccaacaaggcaaagcaggagatgatcaaggcaaacctgcggcttgtcgtatcgattgccaaaaaatactccaatcgcggcctgcagtttttagatctcgtacaagagggtaacatagggctgatgaaggccgtggataagtttgactacaagcgcgggtacaaattctccacctacgccacctggtgggtcagacaagccataacacgcgcaatagccgaccaggcccgtaccatcaggataccggtacacatgattgagaccgtaaataagatcaaccgcacattgaggcagatgttgcacgagatcggtcgggagccaacattggaagagctgtctactaggctcggcatgaatgttgagaaaatccgcaaagtgatgaaaatcgtaaaggatcctgtaagccttgaaagccccataggtgatgacgatagcagcacattcggcgattgtatagaagataagcgggctgtgaagccggaaaatgcagcagtgctggcagatttgcgtgagataaccacgaaagtgctgtcaaccttaacgcccaaggaagagagaattctgcgtatgcggtttggtatcggcaaaggcgggaaagatcacacactggaagaagttgggaaactctttaacgtcaccagggagcgtatccggcagattgaggcaaaagcgctgcgcaaattgcggcaccccagccgcgctaggaagctacgcggctttttctag

SEQ ID NO: 74525 - protein, 632 aa, Anaplasma marginale str. St. Maries
MRLDCPLIVWFSFVGFVMDKELVKNLITKGIKQGGVITFDDISDALSDDDVVSSESIDETISLLQDSGIGVLEQSDEEEADAVVSEENAAKDEEDEAGMRSLDFGQTDDPIRMYLCEMSSVELLSREGEIEIAKRIKSEKINMLRSLIEAPLVLRTFMSWRDDLVNQQVMLRDLIDLDANYRGGAPRQEFEEGGEYGEQEMAEPGDSDVGGDGADDEDEGEDSSAGNASILEMESALLPKVISILDATIESAEKILEMKKQKRDSGKYDKKAYNALHENIWELVSQMKLSDPAVLSVTQQIYNLSKAIAAEEAALMSLVESYGVDRKSFLEAYNNNTVFEQANASPEWKNLLEKEKKTLTDIQNKVRLLSGEDSPGNFKALVAKIQKHERTANKAKQEMIKANLRLVVSIAKKYSNRGLQFLDLVQEGNIGLMKAVDKFDYKRGYKFSTYATWWVRQAITRAIADQARTIRIPVHMIETVNKINRTLRQMLHEIGREPTLEELSTRLGMNVEKIRKVMKIVKDPVSLESPIGDDDSSTFGDCIEDKRAVKPENAAVLADLREITTKVLSTLTPKEERILRMRFGIGKGGKDHTLEEVGKLFNVTRERIRQIEAKALRKLRHPSRARKLRGFF

SEQ ID NO: 74526 - DNA, 1983 bp, Silicibacter pomeroyi DSS-3
  CDS (1)..(1983): transl_table=11
atggccgccaaggacaccgccgaagaccagaagcccgaagaccaggaagacgaagtctcgctcgacatgagccaggcccaagtcaagaagatgatcgccgaggcccgtgaaaagggctatatcacctacgatcagctcaaccaggttctgccgcccgatcaggtgagttccgagcaaatcgaggatgtgatgtcgatgctctccgagatgggcatcaatatcatcgaggatgaagaggccgaagaggaagagcagaagggctcgaccgacctcatcaccaccgaaagcaaccgcgaggttgcgctggctggcgcccaggcagaaaagctcgaccgtaccgatgacccggtgcgcatgtatctgcgcgagatgggttcggtcgaactgctcagccgcgagggcgagatcgccatcgccaagcggatcgaggccgggcgcaacacgatgatcgccgggctgtgcgaaagcccgctgacctttcaggcgatcaccatctggcatgacgaacttctgtccgaggacatcctgctgcgcgacgtgatcgacctggaggccaccttcggcaaccagctggatgacgaagatgacgagccggtggtcgcgaccagcgcggtgcaggcggtcaagccgcagcgcgaggagaccccggaatacgacgccgacggcaacccgatcgtcaccgaggatgacgaggacgaggacgatcaggccaacatgtcgctggccgcgatggaggccgcgctcaaggacaaggtgctgatcacgctcgagcggatctcgtccgattacgcacagctgagcgagatgcaggacagccgtatctcggccacgctgaacgaagacggctcgttcagcgcgcatgacgaggcgacctatcagtcgctgcgctcggaaatcgtgctgctggtgaacgaactgcacctgcacaacaaccggatcgaggcgctgatcgaccagctctacggcatcaacaagcgggtgatgtcgatcgacagttcgatggtcaagctggccgaccaggcgcgcatcaaccggcgcgagttcatcgacgcctatcgcgggcgcgaactggacccgaactggctggccgaaatggccgaaaagcccggtcgcggctggcagatgttcatcgaacgctcgtccgacaaggttgaggagctgcgcgccgacatggcccaggtgggtcagtatgtgggtctggatatctctgaattccgccgcatcgtgcagcaggtccagaagggcgagaaagaggcccgtcaggcgaaaaaggaaatggtcgaggccaacctgcgcctggtgatctcgatcgccaagaaatacaccaaccgcgggttgcagttcctcgacctgatccaggagggcaacatcggcctgatgaaggcggtggacaagttcgagtatcgtcgcggctacaagttctcgacctacgcgacatggtggatccgccaggcgatcacccgctccatcgccgaccaggcccgcacgatccgcatcccagtccatatgatcgagacgatcaacaagctggtgcgcaccggtcgccagatgctgcacgagatcggccgcgaaccgacgccggaagaactggccgaaaaactgcagatgccgctggaaaaggtccgcaaggtgatgaagatcgccaaggagccgatttcgctggaaaccccgatcggggacgaggaagacagccagctgggcgatttcatcgaggacaagaatgccgtgctgccgctcgacagtgccattcaggagaacctcaaggaaaccacgacccgcgtgctggcctcgctcaccccgcgcgaggaacgtgttctgcggatgcggttcggcatcggtatgaacaccgaccacacgctggaggaagtgggccagcagttcagcgttacccgcgagcgtatccgccagattgaggccaaggcgctcaggaaactgaaacaccccagccgctcgcgcaagctgcgcagcttcctggaccagtga

SEQ ID NO: 74527 - protein, 660 aa, Silicibacter pomeroyi DSS-3
MAAKDTAEDQKPEDQEDEVSLDMSQAQVKKMIAEAREKGYITYDQLNQVLPPDQVSSEQIEDVMSMLSEMGINIIEDEEAEEEEQKGSTDLITTESNREVALAGAQAEKLDRTDDPVRMYLREMGSVELLSREGEIAIAKRIEAGRNTMIAGLCESPLTFQAITIWHDELLSEDILLRDVIDLEATFGNQLDDEDDEPVVATSAVQAVKPQREETPEYDADGNPIVTEDDEDEDDQANMSLAAMEAALKDKVLITLERISSDYAQLSEMQDSRISATLNEDGSFSAHDEATYQSLRSEIVLLVNELHLHNNRIEALIDQLYGINKRVMSIDSSMVKLADQARINRREFIDAYRGRELDPNWLAEMAEKPGRGWQMFIERSSDKVEELRADMAQVGQYVGLDISEFRRIVQQVQKGEKEARQAKKEMVEANLRLVISIAKKYTNRGLQFLDLIQEGNIGLMKAVDKFEYRRGYKFSTYATWWIRQAITRSIADQARTIRIPVHMIETINKLVRTGRQMLHEIGREPTPEELAEKLQMPLEKVRKVMKIAKEPISLETPIGDEEDSQLGDFIEDKNAVLPLDSAIQENLKETTTRVLASLTPREERVLRMRFGIGMNTDHTLEEVGQQFSVTRERIRQIEAKALRKLKHPSRSRKLRSFLDQ

SEQ ID NO: 74528 - DNA, 1929 bp, Neisseria gonorrhoeae FA 1090
  CDS (1)..(1929): transl_table=11
atgtccaaaaaccaaaatcacgaagaataccaagacgatgcccgccccctgacgattgaggaacaacgtgcgcgcctgcgccaactcatcattatgggcaaagaacgcggctacatcacctactccgaaatcaacgacgcactgcccgacgatatgtccgatgccgatcaaatcgacaacatcgtcagtatgatttccggtttgggtatccaagttaccgaacacgcccctgatgcggaagacatattgttaagcgacaatgccgccgttaccgacgatgatgccgtcgaagaagccgaggccgccctttccagcgcagattccgagttcggcaggacgaccgaccccgtccgtatgtatatgcgcgaaatgggacaggtcgacctgctgacccgcgaagacgaaatcatcatcgccaaaaaaatcgaaaacgccctgaaaaatatggttcaggccatctccgcctgcccgggttccattgcggaaatcttagaactcatcgaaaaaatctgcaaagacgaaatccgcgtcgacgaagtcgtagaagccattatcgacccgaatgaagtattgctcaacgaattgggcttggggcacttggaaaccacagcacccgagaaaccttccaacgacaattcggacgaaaacgaagacgacgaagaatcggaagaagatgcggatgaaatctcggcagccaatctcgccgaattgaaacaaaaagtcatcggccactttgcccaaatcgaaaaagactacaaaaaaatgatcggctgtttggaaaaacaccacagccggcacaaagactatctcgcctaccgcgacgcgattgccaacaaactgctggaagtccgtttcgccacccggcaaatcgacagcctcagcagcagcctgcgcggaaaagtagaaaacatccgcaaactcgaacgcgaaatccgcgacatctgcctcgaccgcgtccatatggaacgcgactacttcatccaaaacttcctgcccgaaatcaccaatctgcaatggattgaagaagaaatcgccaaaggcagggtttggagcaacgcactcgaccgcttccgccacgccatcctcgaaaaacaaaccgagttggcggatatggaaaaagaaacccgcatttccatcgaagagttgaaagaaatcaacaaaaatatggtgtcgagcgaaaaagaaaccgcagccgccaaacaggaaatgattcaggcaaacttgcgcctcgtcatttccattgccaaaaaatacaccaaccgtggcttgcagttccttgatttgattcaggaaggcaacatcggcctgatgaaggcggtcgacaagttcgaataccgccggggctacaaattctccacctacgcaacctggtggatccgccaggcaattacccgctcgattgccgatcaggcgcgtaccatccgtattccggtacatatgattgaaaccatcaacaagatgaaccgcatctcgcgccaacaccttcaagaaaccggcgaagaacccgattccgccaaacttgccgaactgatgcagatgcccgaagacaaaatccgcaaaatcatgaaaatcgccaaagagccgatttcgatggaaacccccatcggcgacgacgacgattcgcacttgggcgacttcatcgaagatgccaacaatgttgcgccggccgatgcggcaatgtacaccagcctgcacgaagtaaccaaagaaatcctcgaaagcctgacaccgcgtgaggcaaaagtcctgcgtatgcgtttcggcatcgatatgaacaccgaccacacgctggaagaagtcggcagacagtttgacgtaacgcgcgaacgcatccgtcaaatcgaggcaaaagcactccgcaagctgcggcatccgacaagaagcgaccgtttgagaagtttcttggacagcgaagacagcaagctgtaa

SEQ ID NO: 74529 - protein, 642 aa, Neisseria gonorrhoeae FA 1090
MSKNQNHEEYQDDARPLTIEEQRARLRQLIIMGKERGYITYSEINDALPDDMSDADQIDNIVSMISGLGIQVTEHAPDAEDILLSDNAAVTDDDAVEEAEAALSSADSEFGRTTDPVRMYMREMGQVDLLTREDEIIIAKKIENALKNMVQAISACPGSIAEILELIEKICKDEIRVDEVVEAIIDPNEVLLNELGLGHLETTAPEKPSNDNSDENEDDEESEEDADEISAANLAELKQKVIGHFAQIEKDYKKMIGCLEKHHSRHKDYLAYRDAIANKLLEVRFATRQIDSLSSSLRGKVENIRKLEREIRDICLDRVHMERDYFIQNFLPEITNLQWIEEEIAKGRVWSNALDRFRHAILEKQTELADMEKETRISIEELKEINKNMVSSEKETAAAKQEMIQANLRLVISIAKKYTNRGLQFLDLIQEGNIGLMKAVDKFEYRRGYKFSTYATWWIRQAITRSIADQARTIRIPVHMIETINKMNRISRQHLQETGEEPDSAKLAELMQMPEDKIRKIMKIAKEPISMETPIGDDDDSHLGDFIEDANNVAPADAAMYTSLHEVTKEILESLTPREAKVLRMRFGIDMNTDHTLEEVGRQFDVTRERIRQIEAKALRKLRHPTRSDRLRSFLDSEDSKL

SEQ ID NO: 74530 - DNA, 1851 bp, Pseudomonas syringae pv. syringae B728a
  CDS (1)..(1851): transl_table=11
atgtccggaaaagcgcaacagcaatctcgtatcaaagagttgatcaccctgggtcgtgagcagaagtatctgacttacgcagaggtcaacgaccacttgcccgaggatatttcagatcccgagcaggtggaagacatcatccgcatgatcaacgacatggggatcccggtacacgagagtgctccggatgcggacgccttgatgctggccgacgccgataccgacgaggcagccgcagaagaagcggctgcagcgttggcagcggtcgagaccgacatcggtcgtaccaccgatcctgttcgtatgtacatgcgggaaatgggcaccgttgaacttctgacccgtgaaggcgaaatcgaaatcgccaaacgtatcgaagaaggcatccgtgaagtgatgggcgcaattgcgcacttcccaggcacggttgaccacattctctccgaatacacacgcgtcaccagtgaaggcggtcgcctttccgatgtcctgagcggctatatcgacccggacgacggcattgcgccgcctgccgaagtcccgccgcctgtcgaccccaaagccgtcaaggccgaaggtgccgatgacgacgaggaagagtcggcagacgccagcgacgaagaagacgaagtcgagagcggtcctgatccggtcatcgcccagcagcgcttcggtgcggtttccgatcaaatggaaatcacccgcaaggccctgaagaaatttggtcgcgacgacaagcacgccattgccgaaatggttgcactggccgaactgttcatgccgatcaaactggttccaaaacagtttgaaggtctggtagagcgtgtacgcggtgccctcgagcgtcttcgcgcccaggaacgcgccatcatgcagctgtgtgtacgtgatgcacgtatgccgcgcgccgatttcctgcgccagttcccgggcaacgaagtcgacgaaagctggactgacgcactggccaagggcaagagcaaatacgccgaagccatcggtcgcctgcagcctgacatccagcgttgccagcagaagctgtctgcactggaagaagagactggcctgaaaatcgccgagatcaaggacatcaaccgtcgcatgtcgatcggtgaggccaaggcccgccgcgcgaagaaagagatggttgaagcgaacttgcgtctggtgatctccatcgccaagaagtacaccaaccgtggtctgcaattcctcgatctgatccaggaaggcaacatcggcttgatgaaggctgtggacaagttcgaataccgtcgtggctacaagttctcgacttatgccacctggtggatccgtcaggcgatcactcgctcgattgccgaccaggcacgcaccattcgtattccggtgcacatgatcgagacgatcaacaagctcaaccgtatttcccggcagatgttgcaggaaatgggtcgcgaaccgaccccggaagagctgggcgaacgcatggaaatgcctgaggataaaatccgcaaggtattgaagatcgcaaaagagccgatctccatggaaaccccgatcggtgacgacgaagattcgcacttgggtgacttcatcgaagactcgaccatgcagtcgccaatcgatgtcgccactgttgaaagcctcaaagaagcaacacgcgaagtgctgtcgggccttaccgcccgtgaagccaaggttctgcgcatgcgcttcggcatcgacatgaataccgaccacacgcttgaagaggttggtaagcagtttgacgtgacccgcgagcggattcgtcagatcgaagccaaggcactgcgcaagctgcgtcacccgacaagaagcgagcacctgcgctcgttcctcgacgagtaa

SEQ ID NO: 74531 - protein, 616 aa, Pseudomonas syringae pv. syringae B728a
MSGKAQQQSRIKELITLGREQKYLTYAEVNDHLPEDISDPEQVEDIIRMINDMGIPVHESAPDADALMLADADTDEAAAEEAAAALAAVETDIGRTTDPVRMYMREMGTVELLTREGEIEIAKRIEEGIREVMGAIAHFPGTVDHILSEYTRVTSEGGRLSDVLSGYIDPDDGIAPPAEVPPPVDPKAVKAEGADDDEEESADASDEEDEVESGPDPVIAQQRFGAVSDQMEITRKALKKFGRDDKHAIAEMVALAELFMPIKLVPKQFEGLVERVRGALERLRAQERAIMQLCVRDARMPRADFLRQFPGNEVDESWTDALAKGKSKYAEAIGRLQPDIQRCQQKLSALEEETGLKIAEIKDINRRMSIGEAKARRAKKEMVEANLRLVISIAKKYTNRGLQFLDLIQEGNIGLMKAVDKFEYRRGYKFSTYATWWIRQAITRSIADQARTIRIPVHMIETINKLNRISRQMLQEMGREPTPEELGERMEMPEDKIRKVLKIAKEPISMETPIGDDEDSHLGDFIEDSTMQSPIDVATVESLKEATREVLSGLTAREAKVLRMRFGIDMNTDHTLEEVGKQFDVTRERIRQIEAKALRKLRHPTRSEHLRSFLDE

SEQ ID NO: 74532 - DNA, 1944 bp, Psychrobacter arcticus 273-4
  CDS (1)..(1944): transl_table=11
atgtccgatgcaagtaagcgagtatttatgaacgataagtcagtttctaagtccacatctcaactggccaccttaatccaaatgggtaaagagcaagggtatttaacctatgctgaggtgaatgaccaactgcccgactctattaccgaaagcgatcagatcgaagatattatacaaatgctaaccgacgttggcatcaaaatctttgaatctgcgcccgacgccgatgacatcttgatgaacgacgattcaagtgatgatgacatggcagcggatgaggcagcagcggtattggcttctgttgagaccgaacctggtcgcaccactgaccctgtgcgtatgtatatgcgtgagatgggtacggttgatctattaacccgtgaaggcgaaattgccattgccaagcgtatcgaagaaggtattcgtgacgtacagcatgccatgtcttactggccgggcacggtacagttcgtccttgatgaatatcaaaaagttcaagatggcgagaaaaaactttctgacgtcatcactggtttcttagatcctgaaaccgaagaagacaaaatcgccgctcaagaagccaaagaagcggcgaaagaagagcgcgagcgcatcaaagaagaaaaagaaaaccctcctattatcaaagaaaaagccaaagcaaaatctgggcttgatgatgacgaggacgaggacgacgttgaagaggacgctgaagaagaaaccagcggtatcgatccagaagaagtgcgcttgcgcctagaagagattgagcatttatttattaaagccaagcaagcattgcttgattatggtcgtggtagtgctcaagccaatgaagcttatgagcaactggctagccgctttatgatgctaaagcttaacaatcgcctatctgatcaagtcatggccatcatgcatgatgtctatgatgacgtgcgtaaacatgagcgtcaaatcatgcgtttggtgattcgccgtggtcgtatgccgcgcgaagagttccgtaagactttcccaagtaatgaaaccaacgttgattggttgattgagcgtattaaaggtaagccggcgtttgctgccacgctcgagaaagttaccgacgatgttatcttgttacaacgtgctatccgtgattatgagcataagctcgagatggaaatccacgacatgaaagatgtggcacgccgtatggctattggtgaagccaaagcccgccgtgccaaaaaagagatggttgaagccaacttacgtctcgttatctcaatcgccaaaaaatacaccaaccgtggtctacagttcttggacttgattcaagaaggcaacatcggcttgatgaaagcagtagataaatttgaatatcgccgtggttataaattctcaacctatgccacttggtggattcgtcaggcaatcacccgctctatcgctgaccaagcacgtaccatccgtatccctgtgcatatgattgagaccatcaacaaaatcaaccgtgtgtctcgtcagttattgcaagaaatgggacgcgagccaacgcctgaagaattaggcgaacgtctagagatggacgaagtcaaagtccgcaaagtgctaaaaattgccaaagagcctatctctatggaaacgccaatcggtgatgatgaagactcgcacctaggtgacttcatcgaagatgggacaatctcaagtcctgttgacgatgcgacggctgccggtctacgtgaagcaacgcgtgatgtgcttggcaacctaacggaacgtgaagctcgcgtcctcaaaatgcgttttggtatcgatatgccaaccgatcataccttggaagaagtcggtaagcagtttgatgtaacgcgtgagcgtatccgtcagattgaagcaaaagccttgcgtaagctacgtcatccgtcacgctctgagcatctgcgctctttccttgaaaatgactaa

SEQ ID NO: 74533 - protein, 647 aa, Psychrobacter arcticus 273-4
MSDASKRVFMNDKSVSKSTSQLATLIQMGKEQGYLTYAEVNDQLPDSITESDQIEDIIQMLTDVGIKIFESAPDADDILMNDDSSDDDMAADEAAAVLASVETEPGRTTDPVRMYMREMGTVDLLTREGEIAIAKRIEEGIRDVQHAMSYWPGTVQFVLDEYQKVQDGEKKLSDVITGFLDPETEEDKIAAQEAKEAAKEERERIKEEKENPPIIKEKAKAKSGLDDDEDEDDVEEDAEEETSGIDPEEVRLRLEEIEHLFIKAKQALLDYGRGSAQANEAYEQLASRFMMLKLNNRLSDQVMAIMHDVYDDVRKHERQIMRLVIRRGRMPREEFRKTFPSNETNVDWLIERIKGKPAFAATLEKVTDDVILLQRAIRDYEHKLEMEIHDMKDVARRMAIGEAKARRAKKEMVEANLRLVISIAKKYTNRGLQFLDLIQEGNIGLMKAVDKFEYRRGYKFSTYATWWIRQAITRSIADQARTIRIPVHMIETINKINRVSRQLLQEMGREPTPEELGERLEMDEVKVRKVLKIAKEPISMETPIGDDEDSHLGDFIEDGTISSPVDDATAAGLREATRDVLGNLTEREARVLKMRFGIDMPTDHTLEEVGKQFDVTRERIRQIEAKALRKLRHPSRSEHLRSFLEND

SEQ ID NO: 74534 - DNA, 1851 bp, Colwellia psychrerythraea 34H
  CDS (1)..(1851): transl_table=11
atggaaccagcccctcaatctagacttaaagacctgataaccaaaggtaaagaacaaggttatctaacgtttgcgcaggttaacgatcatcttccacaagacataatcgactctgatcaagttgaagatatcgttagtatgattaacgatatgggtattcaagtatttgaaaatgcgccggatcaagataccttgatgatggctgaagcaaatacagatgaagatgcagccgaagcagcagcacaagcacttgcgactgtagaaagtgaaattggtcgcacaacagatcctgtacgtatgtatatgcgtgaaatgggtactgttgaacttctaacgcgtaaaggcgaaatcgtcattgctaagcgtatagaagaaggtattaaagaagttcagcgtagtgtttctgaatacccaccagcaataaactatttattagatatgtgggataactttgaagcggaagaagtccgcttaactgatattataatcggctttttagacccagatgctgaagatgacgatgttgccgctgcagcgacgcatgttggtagtgaattatcgaaagaagatctcgccaatgaagatagcgaaaagaaagaaggcgacgctgaagaagaagatgaagaagaagaagatactggaccagatccagagctagcgcgtgaaaaattcactttgctacgcgaagcacatgagaatgctaccaaagtagtcaagaagaaaggccgcggccataaagacgctcaagaagctattgatgcggttgccgaagtttttaaagaattccgtttaattcctaaattatttgataagttagttaaaaacatgcgtggcatgatggacagactacgtgttcaagaacgtttgatcatgaagcactgtgttagtgctggtatgcctaagactacatttatcaaaatattcccgggtaatgaaacctcaaaagaatggtttgaagcagaaaaagctgcaggtaacccgtattcaactaagcttggtgatattgagcatgatgttgaacgttgtatctacaaacttaaccaaattgaagaagaaacccacctaaatattcacggcattaaagatattaaccgtcgtatgtctattggtgaagcgaaagcacgtcgtgcaaagaaggagatggttgaggcaaacttacgtttagttatctcaattgcgaagaagtacaccaaccgtggcttacagttccttgatttaatccaagaaggtaacattggcttaatgaaggccgttgataaatttgaataccgtcgtggttacaaattctcaacttatgcaacatggtggatccgtcaagcaatcactcgttctattgctgatcaggcgcgtaccattcgtattcctgtgcacatgattgaaaccattaataagctaaaccgtgtttctcgtcaaatgttacaagaaatgggacgtgaacctacgccagaagaattagctgaacgtatggtaatgcctgaagataaaattcgtaaagtattgaaaatagctaaagagccaatttcaatggaaacgccaatcggtgatgatgaagattcacatcttggtgactttattgaagatggtagtggtgagcttcctgttgattcagcgacttcagaaaaccttaaaggtgcaactcatgaagtacttgctggtttaactgctcgtgaagcgaaagtacttagaatgcgctttggcatcgatatgaatactgaccatactttggaagaggttggtaagcaatttgatgttactcgtgaacgtattcgtcaaattgaagcgaaagctttacgtaaattacgtcatccatctcgttcagagcagcttaaaagcttcttagatggtgaataa

SEQ ID NO: 74535 - protein, 616 aa, Colwellia psychrerythraea 34H
MEPAPQSRLKDLITKGKEQGYLTFAQVNDHLPQDIIDSDQVEDIVSMINDMGIQVFENAPDQDTLMMAEANTDEDAAEAAAQALATVESEIGRTTDPVRMYMREMGTVELLTRKGEIVIAKRIEEGIKEVQRSVSEYPPAINYLLDMWDNFEAEEVRLTDIIIGFLDPDAEDDDVAAAATHVGSELSKEDLANEDSEKKEGDAEEEDEEEEDTGPDPELAREKFTLLREAHENATKVVKKKGRGHKDAQEAIDAVAEVFKEFRLIPKLFDKLVKNMRGMMDRLRVQERLIMKHCVSAGMPKTTFIKIFPGNETSKEWFEAEKAAGNPYSTKLGDIEHDVERCIYKLNQIEEETHLNIHGIKDINRRMSIGEAKARRAKKEMVEANLRLVISIAKKYTNRGLQFLDLIQEGNIGLMKAVDKFEYRRGYKFSTYATWWIRQAITRSIADQARTIRIPVHMIETINKLNRVSRQMLQEMGREPTPEELAERMVMPEDKIRKVLKIAKEPISMETPIGDDEDSHLGDFIEDGSGELPVDSATSENLKGATHEVLAGLTAREAKVLRMRFGIDMNTDHTLEEVGKQFDVTRERIRQIEAKALRKLRHPSRSEQLKSFLDGE

SEQ ID NO: 74536 - DNA, 1974 bp, Dechloromonas aromatica RCB
  CDS (1)..(1974): transl_table=11
atggctaaggcaaaagacaccgctaaggaagccccgaaggctcgcaccagcaaggccaaggataaagccgccgaaaaggcgctgctccagggccagatggctgagacgccggaaccgcttgacgccgaagcgcgcaaaatgcgcctcaaggccctgatcaagctgggcaaggaacgcggctacctgacttacgccgaaatcaacgatcacctgccggatgacgtcgtcgatgccgaaagtatcgaagcgatcatctcgactttcagcgaaatgagcatccaggtcttcgacgaagccccggctgcagaagacctgctgatgtccgacactgctgcggttgccgccgacgacgaggaagtcgaagcgcaggccgagcaggccctgtccactgtcgactccgaattcggccgcaccaccgacccggtccgcatgtacatgcgtgaaatgggctcggtcgaactcctcacccgcgaaggcgaaatcgagatcgccaagcgaatcgaggaaggcctgaagcacatgatccaggcgattgccgcctgcccgacgacgatttccgacattctcgaattggccgccaaggtcgaatccgatgaaatgcgcatcgacgaactggtcgacggcctgatcgacccgaacgctgtcgaagaagccccggcggccgaaatgccggaagccgaagaagacgaagaagaagacggcgatgacgacggcgagggtgctggcggcggcgccgctgcggcctccctgctgcaactgaagaccgatgccttggagcgcttcaagaacatcaagggcatccacgccaagatgcagaagatgctcccgaccaagggttcgcacgacaaggtgtacatcaagctgctgcaacaggtttccgacgaactgatgaacatccgcttcacctcgcgttcgatcgagcgcctgtgcgatagcgtgcgcggcatggtcgagcaggttcgcggttgcgagcgcaagatccagcaaatctgcgtggaccgcgtcaagatgccgcgcccgcacttcatccagtccttcccgggcaatgaaatcaacctcgactgggccgatgccgaagtcgctgccgcccccaagacctacgttgccatcctgacccgcaacgcgccggacatcaaggaagagcagaagaaactgctcgccctgcaggaccgtatcggcattccgctcaaggacctgaaagacatcaacaagcagatgtccaccggcgaagccaaggcccgccgcgccaagcgcgaaatgaccgaagccaacctgcgtctggtcatctcgatcgccaagaaatacaccaaccgcggcctgcagttcctcgacctgatccaggaaggcaatatcggcctgatgaaggcggtggacaagttcgaataccgccgcggctacaagttctccacctacgccacatggtggatccgccaggccatcacccgctccatcgccgaccaggcacggaccatccgtatccccgtgcacatgatcgaaacgatcaacaagatgaaccggatcagccgccagatcctgcaggaaacgggtgccgaacccgatccggcgacgctagccaagaagatggacatgccggaagacaagattcgcaagatcatgaagatttccaaggagccaatctccatggaaaccccgatcggcgacgacgacgactcgcacctcggcgacttcatcgaagactcaggcaccctggccccggccgatgccgcgatgtattccagcctgcgcggcgtcaccaaggaaatcctcgacacgctgacgacgagggaagccaaggtactgcgcatgcgcttcggcatcgaaatgaacaccgatcacacgctggaagaagtcggcaagcaattcgacgtcacccgcgaacgtatccgtcagatagaagccaaagccctgcgcaagctgcgtcacccgacccgctccgacaagctgcgcagtttcgtcgacacgaacaacagttaa

SEQ ID NO: 74537 - protein, 657 aa, Dechloromonas aromatica RCB
MAKAKDTAKEAPKARTSKAKDKAAEKALLQGQMAETPEPLDAEARKMRLKALIKLGKERGYLTYAEINDHLPDDVVDAESIEAIISTFSEMSIQVFDEAPAAEDLLMSDTAAVAADDEEVEAQAEQALSTVDSEFGRTTDPVRMYMREMGSVELLTREGEIEIAKRIEEGLKHMIQAIAACPTTISDILELAAKVESDEMRIDELVDGLIDPNAVEEAPAAEMPEAEEDEEEDGDDDGEGAGGGAAAASLLQLKTDALERFKNIKGIHAKMQKMLPTKGSHDKVYIKLLQQVSDELMNIRFTSRSIERLCDSVRGMVEQVRGCERKIQQICVDRVKMPRPHFIQSFPGNEINLDWADAEVAAAPKTYVAILTRNAPDIKEEQKKLLALQDRIGIPLKDLKDINKQMSTGEAKARRAKREMTEANLRLVISIAKKYTNRGLQFLDLIQEGNIGLMKAVDKFEYRRGYKFSTYATWWIRQAITRSIADQARTIRIPVHMIETINKMNRISRQILQETGAEPDPATLAKKMDMPEDKIRKIMKISKEPISMETPIGDDDDSHLGDFIEDSGTLAPADAAMYSSLRGVTKEILDTLTTREAKVLRMRFGIEMNTDHTLEEVGKQFDVTRERIRQIEAKALRKLRHPTRSDKLRSFVDTNNS

SEQ ID NO: 74538 - DNA, 1971 bp, Thiobacillus denitrificans ATCC 25259
  CDS (1)..(1971): transl_table=11
atgattttttccggcgcggtccatagcgtaacggaaaacataagcggagaaaagcctgtggctgtacgtggaagaaaacccggcggcggcgccaagaaacccgaggcactgctccccctgaaggagttgacgcccgtcgaggccgaggcacgccgtacccagctgaagaatctcatcattctgggcaaggagcgcggctttctgacgtacgccgagatcaacgatcacctgcccgacgaggtgctggacgccgaccagatcgaaggcgtgatcagcatgatcaacgacatgggcattcaggtctacgacgaagcgccggacgccgagacgctgctcatgcaggaagcggcgccggctgtcgcggacgaggacgtcgtcgcagaggccgagcaggcgctgacgacggtcgattccgaattcgggcggacgaccgaccccgtgcgcatgtacatgcgcgaaatgggctcggtcgacctgctcacgcgcgagggcgaaatcgagatcgcgaagcgcatcgaggaaggcctgcgccatatggtgcaggcgatttcgtcgtgcccgctgacgatccagcagatcctcgacatggcggcccaggtcgagaaggacgaactgcgcatcgacgagttgatcgatggtttcgtcgaggcggaaaccgaagctgccgccgaggaggaaaccgcggcgggcgacgatgaaaccgacgaggacgacgaggacgcgagcgccgccgtggccgccgccaaccttgcgcaactcaaggccgaggcgctcgcgcagttcgactacatccgcaaggcctacaaaaaggcgcagaacgcccacgtcaaatatggactcggcagcgcgcagcacatgaaggcacaggccgaagtcaccgaactgctgatggcgatccgcttctcggtgcgccaggtggacaacctttgcgagcagatccgcagcgcggtcgaagaagtgcgctcgcacgagcgcaagatcatggagttttgcgtaaaccgctcgggcatgccgcgggcgcacttcatcaaggccttccccggcaacgagaccaatctcgcctggctggacagggaaatcgccgccaagaaagcctactgctcgacgctctcgaaagtccagtacgaggtcaaggcgcaccaggaggccttgatcgcgatgcaggaccgggtcggcctgccgatcaagaatctcaaggacatcaacaagcagatgtcgaccggcgaagccaaggcgcggcgcgcgaagcgcgagatgatcgaggcgaacctgcggctggtgatctcgatcgcgaagaagtacaccaaccgcggcctgcagttcctcgacctgatccaggaaggcaacatcggcctcatgaaggccgtggacaaattcgaataccgccgcggctacaagttctcgacctacgcgacctggtggatccggcaggcgatcacgcgctcgatcgcggaccaggcccgcacgatccgcatcccggtacacatgatcgagacgatcaacaagatgaaccggatcagccggcagattctgcaggaaacgggcatcgagccggaccccgcgacgctcgcgatcaagatggaaatgccggaagacaagatccgcaagatcatgaagatcgcgaaggagccgatctcgatggagacaccgatcggcgacgacgaggattcccatctcggcgacttcatcgaggacgcgagcacgctctcgcccgacgactccgcgatctacgccaacctgcgcgacgccacgcgggaggtgctcgacagcctgacctcgcgcgaagccaaggtcctgcgcatgcgcttcggtatcgagatgaacaccgaccacacactcgaggaagtcggcaagcagttcgacgtgacccgcgagcgcattcggcagatcgaagcgaaggccctgcgcaagctgcgccatccgacccgctccgaaaagctgaagagcttcgtcggcagcggcgaacagtaa

SEQ ID NO: 74539 - protein, 656 aa, Thiobacillus denitrificans ATCC 25259
MIFSGAVHSVTENISGEKPVAVRGRKPGGGAKKPEALLPLKELTPVEAEARRTQLKNLIILGKERGFLTYAEINDHLPDEVLDADQIEGVISMINDMGIQVYDEAPDAETLLMQEAAPAVADEDVVAEAEQALTTVDSEFGRTTDPVRMYMREMGSVDLLTREGEIEIAKRIEEGLRHMVQAISSCPLTIQQILDMAAQVEKDELRIDELIDGFVEAETEAAAEEETAAGDDETDEDDEDASAAVAAANLAQLKAEALAQFDYIRKAYKKAQNAHVKYGLGSAQHMKAQAEVTELLMAIRFSVRQVDNLCEQIRSAVEEVRSHERKIMEFCVNRSGMPRAHFIKAFPGNETNLAWLDREIAAKKAYCSTLSKVQYEVKAHQEALIAMQDRVGLPIKNLKDINKQMSTGEAKARRAKREMIEANLRLVISIAKKYTNRGLQFLDLIQEGNIGLMKAVDKFEYRRGYKFSTYATWWIRQAITRSIADQARTIRIPVHMIETINKMNRISRQILQETGIEPDPATLAIKMEMPEDKIRKIMKIAKEPISMETPIGDDEDSHLGDFIEDASTLSPDDSAIYANLRDATREVLDSLTSREAKVLRMRFGIEMNTDHTLEEVGKQFDVTRERIRQIEAKALRKLRHPTRSEKLKSFVGSGEQ

SEQ ID NO: 74540 - DNA, 1848 bp, Pseudomonas fluorescens PfO-1
  CDS (1)..(1848): transl_table=11
atgtccggaaaagcgcaacagcagtctcgtattattgagttgatcaaactgggtcgtgagcagaagtatctgacttacgccgaggtcaacgaccacctgcccgaggatatttcagatccggagcaggtggaagacatcatccgcatgattaacgacatggggatccccgtacacgagagtgctccggatgcggacgcccttatgctggccgacgccgataccgacgaggccgctgcggaagaagcagccgctgcgttggcggcggtggagaccgatatcggtcgcaccactgacccggtgcgcatgtacatgcgtgaaatgggtacggtcgagcttctgactcgtgaaggcgaaatcgaaatcgccaagcgtatcgaagaaggcatccgtgaagtgatgagcgccatcgcgcacttccctggcacggttgaccatattctctccgagtacactcgcgtcaccaccgaaggtggtcgcctgtccgacgttctgagcggttacatcgacccggacgacggcattacgccgcctgccgccgaagtaccgccaccgatcgacgcgaaagccgcgaaagcggatgacgactccgaggacgatgacgccgaagcttccgatgacgaagaagaagccgaaagcggtccggatccggtcattgccgcacagcgcttcggtgctgtcgccgaccagatggaaatcacccgcaaggccctgaaaaagcacggtcgtcacaacaaggcggcaattgccgaactgttggccctggccgagctgttcatgccgatcaagctggtgccgaagcagttcgaagccctggtcgagcgtgttcgcagcgccctggatcgcctgcgtcagcaagagcgcgcgatcatgcaactgtgcgtacgtgatgcacgtatgcctcgtgccgacttcctgcgccagttcccgggcaacgaagtcgacgaaagctggtccgacgccctggccaaaggcaagagcaagtacgccgaagccatcgcccgcgtgcaaccggacatcatccgttgccagcaaaagctgaccgcgctggaaaccgagaccggtttgaccatcgccgagatcaaggacatcaaccgtcgcatgtcgatcggtgaggcgaaagcccgccgcgcgaagaaagagatggttgaagcgaacttgcgtctggtgatctccatcgccaagaagtacaccaaccgtggcctgcaattcctcgacctgatccaggaaggcaacatcggtctgatgaaagcggtggacaagttcgaataccgtcgtggttacaagttctcgacttacgccacctggtggatccgtcaggcgatcactcgctcgatcgccgaccaggcccgcaccatccgtattccggtgcacatgatcgagacgatcaacaagctcaaccgtatttcccggcagatgctgcaggaaatgggtcgcgaaccgaccccggaagagctgggtgaacgcatggaaatgcctgaggacaagatccgcaaggtattgaagatcgccaaagagccgatctccatggaaaccccgatcggtgatgacgaagactctcatctgggtgacttcatcgaagactcgaccatgcagtcgccaatcgatgtcgccactgtcgagagcctgaaagaagcgacccgcgaagtgctgtccggccttactgcccgtgaagccaaggtactgcgcatgcgtttcggtatcgacatgaacaccgaccatacgcttgaagaagtcggcaaacagtttgacgtgacccgcgagcggatccgtcagatcgaagccaaggcgctgcgcaagctgcgccacccgacgcgaagcgagcatctgcgctccttcctcgacgagtga

SEQ ID NO: 74541 - protein, 615 aa, Pseudomonas fluorescens PfO-1
MSGKAQQQSRIIELIKLGREQKYLTYAEVNDHLPEDISDPEQVEDIIRMINDMGIPVHESAPDADALMLADADTDEAAAEEAAAALAAVETDIGRTTDPVRMYMREMGTVELLTREGEIEIAKRIEEGIREVMSAIAHFPGTVDHILSEYTRVTTEGGRLSDVLSGYIDPDDGITPPAAEVPPPIDAKAAKADDDSEDDDAEASDDEEEAESGPDPVIAAQRFGAVADQMEITRKALKKHGRHNKAAIAELLALAELFMPIKLVPKQFEALVERVRSALDRLRQQERAIMQLCVRDARMPRADFLRQFPGNEVDESWSDALAKGKSKYAEAIARVQPDIIRCQQKLTALETETGLTIAEIKDINRRMSIGEAKARRAKKEMVEANLRLVISIAKKYTNRGLQFLDLIQEGNIGLMKAVDKFEYRRGYKFSTYATWWIRQAITRSIADQARTIRIPVHMIETINKLNRISRQMLQEMGREPTPEELGERMEMPEDKIRKVLKIAKEPISMETPIGDDEDSHLGDFIEDSTMQSPIDVATVESLKEATREVLSGLTAREAKVLRMRFGIDMNTDHTLEEVGKQFDVTRERIRQIEAKALRKLRHPTRSEHLRSFLDE

SEQ ID NO: 74542 - DNA, 2007 bp, Rhodobacter sphaeroides 2.4.1
  CDS (1)..(2007): transl_table=11
atggcagtcaaagacactgacgacggcaaacccgaggatcaggacgccgaaacctcgctggacatgagccaggccgccgtcaaacggatgatcgcggaggcgcgcgagcgcggctatatcacctacgatcagctcaacacggttctgccgcaggaccaggtctcgtccgagcagatcgaggacgtgatggccatgctctcggagatgggcatcaacgtcatcgagaacgaggaggcggaggagggcgagcccgcgggcgagctcgtcgagcagggctcggggtcgcgcgagatcgccgtggcgggaacgcagggcgagacgctcgaccgcaccgacgatccggtgcgcatgtatctgcgcgagatgggctcggtggagcttctgagccgcgagggcgagatcgccatcgccaagcgcatcgaggccggccgcaacacgatgatcgcgggtctctgcgagagcccgctgacctttcaggccatcacgatctggcgcgacgagcttctgtccgaagacatcctgctgcgcgacgtgatcgacctcgaggcgaccttcggccgctcgctcgacggcgatggcgacgacgagatcgacgggccggagatcgacgaggtcgaggtggccgcggcgcccgcgccggccccgcgccggtcgacctcgtccgagcccgaactcgatgccgacggcaacccgatcagccgcgccgaggaagaggacgaggacgacgaggcctcggccatgtcgctcgccgcgatggaagcggcgctgaagccgcgcgtgctcgagacgctcgagctgatcgcgcgcgactacggcaagctggccgagatgcagaaccggcgcatgtcggccacgctgaacgatcatatccgcttcacgaccgaggacgaggccgcctatcagaagctgcgctccgagatcgtgcttctggtgaacgagcttcatctgcacaacaaccggatcgaggcgctgatcgaccagctctacggcatcaaccgcaagatcatgtcgatcaactcggccatggtgaagctggccgatgcggcccgcatcaaccggcgcgagttcatcgacgaatatcagggctacgagctcgacccgatgtgggccgagcggatggccgcgaagtcgggccgcggctggcagaccctgatggagaagagccgcgaccgggtcgaggatctgcggggcgagatggcgcaggtcggccagtatgtcggcgtggatatctccgagttccgccgcatcgtgaaccaggtccagaagggtgagaaggaagcccgtcaggccaagaaggagatggtcgaggcgaacctgcgtctcgtgatctcgatcgccaagaaatacaccaaccgcgggctgcagttcctcgatctgatccaggagggcaacatcggcctgatgaaggcggtggacaagttcgaataccggcgcggctacaagttctcgacctatgcgacctggtggatccgacaggccatcacgcgctccatcgccgaccaggcccgcacgatccgcatcccggtccacatgatcgagacgatcaacaagctggtgcggacggggcggcagatgctgcacgagatcggccgcgagcccacgcccgaggagctggccgaaaagctgcagatgccgctcgagaaggtccgcaaggtgatgaagatcgccaaggagccgatctcgctcgagacgcccatcggggacgaggaagacagccagctcggcgatttcatcgaggacaagaacgcgatcctgccgctcgattccgccattcaggagaacctgaaggagacgaccacccgggtcctggccagcctcaccccgcgcgaggagcgggttctgcggatgcggttcggcatcggcatgaacaccgaccatacgctcgaagaggtgggccagcagttctcggtgacgcgcgagcgcatccgccagatcgaagccaaggcgctgcgcaagctcaagcatcccagccgcagccgcaagctgcggagtttcctcgatcagtaa

SEQ ID NO: 74543 - protein, 668 aa, Rhodobacter sphaeroides 2.4.1
MAVKDTDDGKPEDQDAETSLDMSQAAVKRMIAEARERGYITYDQLNTVLPQDQVSSEQIEDVMAMLSEMGINVIENEEAEEGEPAGELVEQGSGSREIAVAGTQGETLDRTDDPVRMYLREMGSVELLSREGEIAIAKRIEAGRNTMIAGLCESPLTFQAITIWRDELLSEDILLRDVIDLEATFGRSLDGDGDDEIDGPEIDEVEVAAAPAPAPRRSTSSEPELDADGNPISRAEEEDEDDEASAMSLAAMEAALKPRVLETLELIARDYGKLAEMQNRRMSATLNDHIRFTTEDEAAYQKLRSEIVLLVNELHLHNNRIEALIDQLYGINRKIMSINSAMVKLADAARINRREFIDEYQGYELDPMWAERMAAKSGRGWQTLMEKSRDRVEDLRGEMAQVGQYVGVDISEFRRIVNQVQKGEKEARQAKKEMVEANLRLVISIAKKYTNRGLQFLDLIQEGNIGLMKAVDKFEYRRGYKFSTYATWWIRQAITRSIADQARTIRIPVHMIETINKLVRTGRQMLHEIGREPTPEELAEKLQMPLEKVRKVMKIAKEPISLETPIGDEEDSQLGDFIEDKNAILPLDSAIQENLKETTTRVLASLTPREERVLRMRFGIGMNTDHTLEEVGQQFSVTRERIRQIEAKALRKLKHPSRSRKLRSFLDQ

SEQ ID NO: 74544 - DNA, 1740 bp, Geobacter metallireducens GS-15
  CDS (1)..(1740): transl_table=11
atggccaagaaaagttcggacgaagttaagcagcagctggtggacatcggcaaggagaagggattccttacctatgacgaagtcaacgacgtgctgcctcccgacttctcaacggagcagattgacgatgtaatgagcatgttcggtgagatggacatcgacctcgtcgattcatcgcagaaggtcaaaatccccaagatgaagctcgacctcgaagaggaagaggagatggagggggagcaggaggagatggagtacgagccgggggtcctggggcgcacgagcgatccggtccggatgtacctgcgggaaatgggttccgtgtcgcttctcacgcgcgaaggtgaggttgagatcgccaagcggatcgaggaaggggaacgcgacatcgcccgtgtcatccttaccactcccattaccgtcaaggagataatcgcccttggcgacaaactccgcaagttccagataagcgcggccgagatcagcaaggaagttgaagaagaggaactggaagaggacgaggaagacgtccaggccaatcgcgtcctctccattatcgatgagatccgggatcttgacgtgaggatggaggccattgccgaagagctcgacgctgagggcgctgctgcgaaacgccaaaaagagctccacgccgaacagcacgagatcagggaaaagttcgccgatctcgtgaagtcccttcggctcaaggaccgccacatcaccaagattgcccagcgcctcaaggaactttcgggcaaagtggaagccattctgacagagattgcggcggttgaaaccgaagcaggcatcaacggcgaacgcctcaaggagattgttgccaagggcgacgaaaaggccaaggggctcaaggtaaaccttgaggatgcccaaaagctcgacaagaagatccgcgccgctgagaaaaagctcaagaagctggagcacgagtcgggcttcaaggcccaggaactttccgacgccctccacgccatcgaccggggcgaggccaaggcgaagctggccaagtccgagctggttgaagcgaacctccggctggtggtttccatcgccaagaagtatacgaaccggggcctccagttcctggacctgatccaggaggggaacatcggtctcatgaaggcggtggacaagttcgagtaccagcgggggtacaagttctccacctacgccacctggtggattcgtcaggccatcacccgcgccatcgccgaccaggcgaggaccatccggattccggtccacatgatcgagaccatcaataagctgatccggaccagccgccaactggtgcaggaaatcggccgggagccgtcgcccgaggaaatcgccgagcggatgaatctccccctcgacaaggtacgcaaggttctcaagatcgccaaagaacccatctccctcgaaacccccatcggggaggaggaagattcgcatctaggggatttcattgaggacaagggggtcgtttcgcccctagaggcggtcatcaaggccaacctctcggagcagacctcccgggtcctctccaccctcaccccccgggaggagaaggtgctccggatgcgcttcggcattggcgagaagagcgaccacaccctggaggaagtggggcaggatttcgaggttacccgcgagcggatccggcagatcgaggccaaggccctgcggaaactccggcacccgagccgggccaagaagctcaagagcttcgtggaatag

SEQ ID NO: 74545 - protein, 579 aa, Geobacter metallireducens GS-15
MAKKSSDEVKQQLVDIGKEKGFLTYDEVNDVLPPDFSTEQIDDVMSMFGEMDIDLVDSSQKVKIPKMKLDLEEEEEMEGEQEEMEYEPGVLGRTSDPVRMYLREMGSVSLLTREGEVEIAKRIEEGERDIARVILTTPITVKEIIALGDKLRKFQISAAEISKEVEEEELEEDEEDVQANRVLSIIDEIRDLDVRMEAIAEELDAEGAAAKRQKELHAEQHEIREKFADLVKSLRLKDRHITKIAQRLKELSGKVEAILTEIAAVETEAGINGERLKEIVAKGDEKAKGLKVNLEDAQKLDKKIRAAEKKLKKLEHESGFKAQELSDALHAIDRGEAKAKLAKSELVEANLRLVVSIAKKYTNRGLQFLDLIQEGNIGLMKAVDKFEYQRGYKFSTYATWWIRQAITRAIADQARTIRIPVHMIETINKLIRTSRQLVQEIGREPSPEEIAERMNLPLDKVRKVLKIAKEPISLETPIGEEEDSHLGDFIEDKGVVSPLEAVIKANLSEQTSRVLSTLTPREEKVLRMRFGIGEKSDHTLEEVGQDFEVTRERIRQIEAKALRKLRHPSRAKKLKSFVE

SEQ ID NO: 74546 - DNA, 2091 bp, Rhodospirillum rubrum ATCC 11170
  CDS (1)..(2091): transl_table=11
atggcgaccaaggcgaccaacacggcggaagcggtgaacacccaggaagagggcggcgatagccccttgcttgattcgatgaacgccgccgtcaagaaattggtcaaccggggcaaagaccggggttacatcacctacgacgaactcaataacgctctgcccccagacgatgtgtcctccgagcagatcgaggacaccatggccatgctttccgatatgggaatcaacgtcgtcgaggacgaggaagagggcgaggccagcgccgcccccccggccgaggccggcgaggaggaacccggccgcgaagtcgccgcgaccggcaatgtcagtgaagacgatatcggccggaccgacgatccggtgcgcatgtatctgcgcgagatgggctcggtcgaactgctgtcgcgcgagggcgaaatcgccatcgccaagcggatcgaagccggccgcgagatgatgatcggcggcatctgcgaaagcccgctgaccatccgcgccctgctgcaatggcacgacgccctggtcgatggccgcatgctgctgcgcgacatcatcgatctcgacgccacctatggctcgggcgccggtcccgacgtggtggccgaaggcctggaagactcggtggtgccgctgtcgccgttggccctgtctccggcccgcgcccttcccaaagaggccgacgaggccgaagaggccgtgacgcccgggcgcgatgacgactccgaagatgaggacgagggcgacgacgccaagcccgccgatggggcgggcgacgaggaggccgcgccgagcggcgaggacgagggcgacggcagcgagaacaacgtgtccctcgccgccatggaacaggagctgatgccccgggttctggaaaccttcgagcatatcgccaccacctatggcaagctgaagaaggcccaggatcagcgcatcgccgccttgcaaaagggcgaggagccgggcgcggcgctggagcgcaaatacgacaagctgaagctggagctggtcgggctgatggaggatgtccatctgaacaacgcccgcatcgagcagctggtcgagcagctcaacgcgctgaacaagggcctgatcacccaggaaggcaagctgctgcgtctggccgaacgggccaagatccgccgcgatgaattccttgatcactacttcggccgcgagatggacccgagctggcgcgaggatgtcgccgcgctgccgggcaagggctggcgcgatttcaccacgcgcttcgccgatgagatcaaggatatccggggctcgatcgccgagatcgccgagcgctccttgctgcccatccccgagttccgccgcatcgtgtcgacggtgcagaagggcgagcgcgaggccagccgggccaagaaggagatgatcgaagccaacctgcgcctcgtcatctcgatcgccaagaaatacaccaaccgcggtctgcagttcctcgacctgattcaggaaggcaacatcggcctgatgaaggcggttgataagttcgaataccgccggggctacaagttctcgacctatgccacgtggtggatcagacaggcgatcacccgctcgatcgccgatcaggcccgcaccatccgcattccggtgcatatgatcgagacgatcaacaagctggtccgcacctcgcgccagatgctccacgagatcggccgcgagccgacccccgaggaactggccgaaaagcttcagatgcccttggagaaagtgcgcaaggttctgaagatcgccaaggagccgatcagcctggaaacgccgatcggcgacgaggaagacagccacctgggcgatttcatcgaggacaagaacgccgttcagcctttggacgcggcgatcaactcgaacctgcgcgaaacctgcacccgggtgctggccagcctgacaccacgcgaggagcgcgtgctgcgcatgcgctttggcatcggcatgaacaccgaccacaccctggaagaggtgggccagcagttcagcgtgacccgcgagcgtatccgccagatcgaagccaaggccctgcgcaagctcaagcatccctcgcgctcgcgcaagctgcgctctttcctcgacaactga

SEQ ID NO: 74547 - protein, 696 aa, Rhodospirillum rubrum ATCC 11170
MATKATNTAEAVNTQEEGGDSPLLDSMNAAVKKLVNRGKDRGYITYDELNNALPPDDVSSEQIEDTMAMLSDMGINVVEDEEEGEASAAPPAEAGEEEPGREVAATGNVSEDDIGRTDDPVRMYLREMGSVELLSREGEIAIAKRIEAGREMMIGGICESPLTIRALLQWHDALVDGRMLLRDIIDLDATYGSGAGPDVVAEGLEDSVVPLSPLALSPARALPKEADEAEEAVTPGRDDDSEDEDEGDDAKPADGAGDEEAAPSGEDEGDGSENNVSLAAMEQELMPRVLETFEHIATTYGKLKKAQDQRIAALQKGEEPGAALERKYDKLKLELVGLMEDVHLNNARIEQLVEQLNALNKGLITQEGKLLRLAERAKIRRDEFLDHYFGREMDPSWREDVAALPGKGWRDFTTRFADEIKDIRGSIAEIAERSLLPIPEFRRIVSTVQKGEREASRAKKEMIEANLRLVISIAKKYTNRGLQFLDLIQEGNIGLMKAVDKFEYRRGYKFSTYATWWIRQAITRSIADQARTIRIPVHMIETINKLVRTSRQMLHEIGREPTPEELAEKLQMPLEKVRKVLKIAKEPISLETPIGDEEDSHLGDFIEDKNAVQPLDAAINSNLRETCTRVLASLTPREERVLRMRFGIGMNTDHTLEEVGQQFSVTRERIRQIEAKALRKLKHPSRSRKLRSFLDN

SEQ ID NO: 74548 - DNA, 1743 bp, Syntrophus aciditrophicus SB
  CDS (1)..(1743): transl_table=11
atggggaaaaatatacaatcggaagaattcaagaaattaatttctctgggcgaggaaaagggtttccttacttatgacgatgtgaatgactttctgccgtccgatattacatcttcagatcagatagacgatatcatcatgcttttcggtgaaaaaaatatcgatatcattgataccgagaagggagaaaagctgctggtaaaaagtcctgtcgaggaacgagaaaccgcgaaagaaggggagcttatcgatatgatgtccgtcgcgggaaagacaggagaccccgttaagatgtatctccgcgagatgggatatgtgtccctgttgagccgtgatggtgaggttgagattgccaagattattgaagaaggcgctcaggaggcaatgggagcggtattcggtgtcacggcatccgtgaaggaagtggttgatattggaaataaactgaaaagtgacgagatacgtattaaaaatgtgattgacaatcttgaggatgaagacggctatgttgaggaagactctcaacgggaacgtgtgataaaactgcttgataaggttgccatgcttgacggcaaaaatgatcaaattctgcagaagttgagagcaaaggatctcagtgaggatggacgtaaagctttaaaaattcagatggaaaagaataagaaagcaatcatcaagctttgccgtaaagtcaggtttggtaaaaaacagattgataaactggttgccaatatcaaacggtatcttgccgaactcgaaaaggctgaagatgaaattcaaaaatgcaaagaggaaacgggactttcgttgacgcagattgaaaaggcatgttccagactgaaaaaatatcctcaagatgaagcagcgattctggcggaatatggcattaccatggaaaagctgaaatccgtggaagccatgattcgggaagccaatcgaaagctaaaaaatatcacgaaggaaacaggatactctgtaacggctttcaaaaaaatcctgttcaacatcgagcatggtgaaaaaaaagctgaagaagccaagcggaaactcgttgaagccaatctgcggctggttgtcagcattgctaaaaaatacacgaatcgggggttgcagtttctggatctgatccaggagggaaacatcggattaatgaaggctgttgataaatttgaatatcagaggggatataaattttcgacgtatgcaacatggtggatcagacaggcgattacccgggcgatcgccgatcaggccagaacgattcgaatccctgtccatatgattgagactattaataaattgattcgcacatcacgctatctcgtgcaggagctgggacgggaaccgagcccggatgaaatcgcgaataagatggagtatcctctggaaaaggtaaggaaggttctgaaaatcgccaaagaacctatttcactcgaaactcccatcggtgaggaggaggatagccatcttggtgatttcatagaagataaaaagatcatgtctccgtccgaggcgacgatcagtatggatctggcggagcagacaagaaagatattatcgacgttgacaccaagggaagaaaaggtgttgcggatgcgttttggaatcagcgaaagaatcgagtatggtgaagaagaactggaacagggggaagaggagggtgaatttcccggtcccatagagaccggcgcttaccgcaaattgagaaatccttcacgacgacggactgttaaacaggtctaa

SEQ ID NO: 74549 - protein, 580 aa, Syntrophus aciditrophicus SB
MGKNIQSEEFKKLISLGEEKGFLTYDDVNDFLPSDITSSDQIDDIIMLFGEKNIDIIDTEKGEKLLVKSPVEERETAKEGELIDMMSVAGKTGDPVKMYLREMGYVSLLSRDGEVEIAKIIEEGAQEAMGAVFGVTASVKEVVDIGNKLKSDEIRIKNVIDNLEDEDGYVEEDSQRERVIKLLDKVAMLDGKNDQILQKLRAKDLSEDGRKALKIQMEKNKKAIIKLCRKVRFGKKQIDKLVANIKRYLAELEKAEDEIQKCKEETGLSLTQIEKACSRLKKYPQDEAAILAEYGITMEKLKSVEAMIREANRKLKNITKETGYSVTAFKKILFNIEHGEKKAEEAKRKLVEANLRLVVSIAKKYTNRGLQFLDLIQEGNIGLMKAVDKFEYQRGYKFSTYATWWIRQAITRAIADQARTIRIPVHMIETINKLIRTSRYLVQELGREPSPDEIANKMEYPLEKVRKVLKIAKEPISLETPIGEEEDSHLGDFIEDKKIMSPSEATISMDLAEQTRKILSTLTPREEKVLRMRFGISERIEYGEEELEQGEEEGEFPGPIETGAYRKLRNPSRRRTVKQV

SEQ ID NO: 74550 - DNA, 1869 bp, Ehrlichia chaffeensis str. Arkansas
  CDS (1)..(1869): transl_table=11
atgaaagatctacaaacagataaagaattactcagaactcttgtgagtaagggactcaaacaaggatttgttacatttaacgatatcaacgatgttttttctgactacgtgctgtcatctgacaacatagatgaaactatatcaatgcttcaggattcaggtattaatgttcttgaacaaagtgatgaagacgaggcaaatagcataatagaagaaaacagaatcaaagatgaaatggacgaagatgatgtatcagacaccagtataaaatcttgggattttggacaaacagatgaccctatacgcatgtacctatgtgaaatgagttctgttgaattactatctcgtgaaggagaaattgaaattgccaaaaagatcaaatcagaaaaagtaaatatgctcaggtcactagtagaatccccaatagtattacgtacatttatgtcatggagggatgacttagtaaatgaacaaataatgttaagagatttaatagatttagatgcaaattacaggtatgaatttcctgaaaaattttctgacactgatgatgctagtgttttaggttatgataaagatttaatggatgaacctgatgaagatccagatataccagaagatgaagatgaagaaaacatttcaataaatgcttcaatattagaaatggaaaatgcattgctacccaaagtagtaagcatcttagattcagtaattgcatcagcagaaaaaattttagaactcaaaaaacaatatcaaggtaaaattaaccaagatattgaaaaacaatacaatgacttacacgatagcatatgggaaatgatatatcaaattaaacttagtaattccgcagtcctatcaatcacacaacaaatatatagcttaagtaaatcaatagcagcagaagaggcaaaaattatttcccttgcagaaagctatggtatacaacgcaaagacttcttagatgcatataatactaattctgtattgcaaaaaaaaggcacttctcctcaatgggataacatgttactcaatgaagagagtaatatagtaagtatgtacagtaaaattaagctactgtctggagaaaataaccttaccgaattcaaagcattagtcacaaaaatacaaaagcacgaacgtgcagcaaatcaagcaaagcaagaaatgataaaagcaaatctaaggttagtagtatcgattgcaaaaaaatattcaaatcgaggtttacagtttctagatttagtacaagaagggaatattggcttaatgaaagcagtagataaatttgattacaaacgtggatataaattctcaacttatgcaacgtggtgggtgaggcaagctatcactagagcaatagcagatcaggcacgaactattagaattcctgtacacatgattgaaacagtaaataaaatcaatcgcacactaagacaaatgctacacgaaatgggtagagaaccaacattagaggaattatcagcaagattaaacattaatgtagataagatacgtaaggtaatgaaaatagttaaagaccccgtaagcttagaaagccccataggagatgatgacagtagtacctttggtgattgcatagaagataaacgtgcagtaaagccagaagatgcagcagtacttgcagacttacgagaaataactacaaaagtattatcaacattaacaccaaaagaagagagaatcttacgtatgcggtttggaataggtaaaggtggaaaagaccataccttagaagaagtaggaaaactattcaatgtaacaagagaacgtatacgacaaattgaagcaaaagctttacgtaaactacgtcatccaagtcgtgcaagaaagcttagaggatttttctaa

SEQ ID NO: 74551 - protein, 622 aa, Ehrlichia chaffeensis str. Arkansas
MKDLQTDKELLRTLVSKGLKQGFVTFNDINDVFSDYVLSSDNIDETISMLQDSGINVLEQSDEDEANSIIEENRIKDEMDEDDVSDTSIKSWDFGQTDDPIRMYLCEMSSVELLSREGEIEIAKKIKSEKVNMLRSLVESPIVLRTFMSWRDDLVNEQIMLRDLIDLDANYRYEFPEKFSDTDDASVLGYDKDLMDEPDEDPDIPEDEDEENISINASILEMENALLPKVVSILDSVIASAEKILELKKQYQGKINQDIEKQYNDLHDSIWEMIYQIKLSNSAVLSITQQIYSLSKSIAAEEAKIISLAESYGIQRKDFLDAYNTNSVLQKKGTSPQWDNMLLNEESNIVSMYSKIKLLSGENNLTEFKALVTKIQKHERAANQAKQEMIKANLRLVVSIAKKYSNRGLQFLDLVQEGNIGLMKAVDKFDYKRGYKFSTYATWWVRQAITRAIADQARTIRIPVHMIETVNKINRTLRQMLHEMGREPTLEELSARLNINVDKIRKVMKIVKDPVSLESPIGDDDSSTFGDCIEDKRAVKPEDAAVLADLREITTKVLSTLTPKEERILRMRFGIGKGGKDHTLEEVGKLFNVTRERIRQIEAKALRKLRHPSRARKLRGFF

SEQ ID NO: 74552 - DNA, 1734 bp, Francisella tularensis subsp. holarctica
  CDS (1)..(1734): transl_table=11
atgacaaaagaagatttgctctctgatttaaaagatttgatgattgatggtagggaaagaggatatttaactagagccgatattttagatgctctaccaggagatgtttcagaagatcctaaaatatatgaagaaattgaggctatacttattgacgctggtattgatgtctatgatagaactcctcagatagaagaagatgatgaaagaaaggttagtgaagctaatcttgatgatttaaaaggtaaaacttcagatcctattcgtatgtatatgcgcgaaatgggtattgttgatcttttagataaaaaaggcgagacggatatcgctattaggatagaagaaggtactacagaagtttttagtacgattttaagctatccgatagtaattaaaacttatattgagcgtttccgtgagctagaagaaaaagctatagattatatgaattcccaagatattgagaatgagcctgtagctagatatattcgttttaatgaagttatggctggttttagtgatgaacaggtaactgaagaaaaggttgctgaagatgatcatgaggaaaaaattgatactcaaagggcttatgaattctttacaaatttagagaaaatgtttgaagaatatcaagataagcctaacaaaaaactttatactaaaatagttaaggaatttgataatttaagattgtcaacatcacatttacaaaagttggttgattatattagattaccttatgctcgagttaaagaattcgaaagaaaaattttaagactctgtgttgaaagatcaaaaacaccacgccaagagtttattaaagtttataaagttggttctctagaatggttggagccattaactaaaaagtataaatttactgagaatactattagagaaataaaaaatttaactaagcaaattaatcaattccaaattttaatgatgatggatattgaagagcttaaacaagtcaatcttgagatttcaaggagtgaagctaaaattactcaagctaaaaaagagatgatagaagcaaacttaagactagttgtttctgaagctaaaaagtataccaatagaggcttacatttcttagatattatccaagaaggaaatattggcttaatgaaagctgtagataagtttgattatcgtaaaggctttaagttctcgacatatgctacttggtggatacgtcaagcaattactcgttcgattgcagaccaagctagaactattcgtgtacctgtacatatgattgagacaatcaataaagtaaatagaattaaacgtcagattctacaagaaaaagggcgtgaagctacagaagaggagattatcgagcatactcctaatatgagtaaagagaagctgaaaaagattcttaatatttcacatacaccaatttcaatggagagcccaattggtgatgatgaagattctacagtgggcgattttattgaggataaaaataactattctccgatagaggcagctaatttagaaaatttacgcgaagcaataaaggagcttattgaaactggcttaactgagagagaggctaaagttctaatgatgcgttttggtattggtatgaatactgatcatactttagaagaagtaggtaagcagtttaatgttactagagaacgtattagacaaattgaggctaaggctcttagaaagcttaaacatccttctagatcggcatttttgaaaacatttttgtaa

SEQ ID NO: 74553 - protein, 577 aa, Francisella tularensis subsp. holarctica
MTKEDLLSDLKDLMIDGRERGYLTRADILDALPGDVSEDPKIYEEIEAILIDAGIDVYDRTPQIEEDDERKVSEANLDDLKGKTSDPIRMYMREMGIVDLLDKKGETDIAIRIEEGTTEVFSTILSYPIVIKTYIERFRELEEKAIDYMNSQDIENEPVARYIRFNEVMAGFSDEQVTEEKVAEDDHEEKIDTQRAYEFFTNLEKMFEEYQDKPNKKLYTKIVKEFDNLRLSTSHLQKLVDYIRLPYARVKEFERKILRLCVERSKTPRQEFIKVYKVGSLEWLEPLTKKYKFTENTIREIKNLTKQINQFQILMMMDIEELKQVNLEISRSEAKITQAKKEMIEANLRLVVSEAKKYTNRGLHFLDIIQEGNIGLMKAVDKFDYRKGFKFSTYATWWIRQAITRSIADQARTIRVPVHMIETINKVNRIKRQILQEKGREATEEEIIEHTPNMSKEKLKKILNISHTPISMESPIGDDEDSTVGDFIEDKNNYSPIEAANLENLREAIKELIETGLTEREAKVLMMRFGIGMNTDHTLEEVGKQFNVTRERIRQIEAKALRKLKHPSRSAFLKTFL

SEQ ID NO: 74554 - DNA, 1842 bp, Saccharophagus degradans 2-40
  CDS (1)..(1842): transl_table=11
atgagcgaacaggcgaaaaagcagtcccgcatcaaagaattgatcaaccgcggccgagaacagggctatctcacctacgatgaagtaaacgatcatctacccgacgatatttctgatcccgatcaggttgaagacatcatccaaatgattaacgacatgggtattcgcgtgtacgaagttgcacccgatgccgatgagctgttaatgaccgatggcgattcttccgcggacgaaatagcagcagcagaagctgccgcagcactggcggcggtagaaaccgaagctggtcgcaccacagaccctgtgcgtatgtatatgcgcgaaatgggaacagtagagctgcttactcgcgaaggcgaaatagcaattgccaaacgcatagaagaaggcctgcgcgaactaaaccacgccatcgccctttggccagaggcagtacagcaatacgtaaacgaatacgatctagtcgaaaaagaagagcgccgcctagcagacgtcattagcggctggctcgaccccgccgaagacgtagccccccccgttgtagccgccgaaaccgcagaagacaccgattccgacgatgatgatgacgacgatgacgataccgacaccgaggacgaagaagagtccaccggtatcgaccccgaatacgcacgcgagcgcttcgacgagctaaaagccgccctgcttaaagtagaaaaagccattgccaagcacggcttcgaaagcaaagcagcaggcaaagaaatggaagcgttgggcgaaatattcaaatatttcaaactgccaccgcgccagttcgaccctatttaccaaggtattcgtcaaatacttacccgcgtacgtgcagaagagcgtgaaattatgcgcttgtgtacccgcctaggtggtatgccacgcaaaaccttcatgaaagaattccccggccaagaaaccgatgaagattggattccagctaccattggcaaaggccgcgactactccgattcgctaaagccctacgcagaggacattattcgtgcgcagcgtaaacttaagcaaattcaagaagagtctggcttaagccttggccacattaaagaaattaaccgtcgcatgtccattggcgaagcccgtgcacgtcgcgctaagaaggaaatggtagaagccaaccttcgcttggtaatttctattgctaaaaaatacaccaaccgcggtttgcagttcttagatcttatccaagaaggcaacatcggcctaatgaaggccgtagataaattcgaataccgtcgcggttacaagttctctacctacgccacttggtggattcgtcaggccattacccgctctattgcggatcaggcccgcactatccgtattccagtgcacatgatagagaccataaacaaactaaaccgtatctctcgtcaaatgcttcaagaaatgggccgcgagcccacaccagaagagctaggcgagcgcatggaaatgccagaagataaagttcgcaaggtacttaaaattgccaaagaacctatctctatggaaaccccaattggcgacgatgaagattcccacctaggcgacttcattgaagacaccaccatcgactcacccgtcgattctgccaccatccaaggcctaacagaagccactcgctcggtacttgcaggcctaaccgcccgcgaagcaaaagtactaagaatgcgctttggtatagatatgaataccgaccacaccttggaagaagtgggcaaacaatttgacgtaacccgtgagcgtatccgtcaaattgaagccaaagccctgcgcaaactgcgtcaccctagccgctctgaccacttgcgcggcttcctagacgactag

SEQ ID NO: 74555 - protein, 613 aa, Saccharophagus degradans 2-40
MSEQAKKQSRIKELINRGREQGYLTYDEVNDHLPDDISDPDQVEDIIQMINDMGIRVYEVAPDADELLMTDGDSSADEIAAAEAAAALAAVETEAGRTTDPVRMYMREMGTVELLTREGEIAIAKRIEEGLRELNHAIALWPEAVQQYVNEYDLVEKEERRLADVISGWLDPAEDVAPPVVAAETAEDTDSDDDDDDDDDTDTEDEEESTGIDPEYARERFDELKAALLKVEKAIAKHGFESKAAGKEMEALGEIFKYFKLPPRQFDPIYQGIRQILTRVRAEEREIMRLCTRLGGMPRKTFMKEFPGQETDEDWIPATIGKGRDYSDSLKPYAEDIIRAQRKLKQIQEESGLSLGHIKEINRRMSIGEARARRAKKEMVEANLRLVISIAKKYTNRGLQFLDLIQEGNIGLMKAVDKFEYRRGYKFSTYATWWIRQAITRSIADQARTIRIPVHMIETINKLNRISRQMLQEMGREPTPEELGERMEMPEDKVRKVLKIAKEPISMETPIGDDEDSHLGDFIEDTTIDSPVDSATIQGLTEATRSVLAGLTAREAKVLRMRFGIDMNTDHTLEEVGKQFDVTRERIRQIEAKALRKLRHPSRSDHLRGFLDD

SEQ ID NO: 74556 - DNA, 1935 bp, Methylobacillus flagellatus KT
  CDS (1)..(1935): transl_table=11
atggggtcaagcatggctaaagagcaacagaatgacaatgtaaacgataaagccgatattacactgaatgacgcagatatacgtcgcacgcggttaaagtccctgattatcctgggtaaggagcgcggatacctcacttacgcagaaattaacgatcacctgccggatgatgtacaggattccgagcagatcgacagcatcatcggcatgatcaacgacatgggcatccaggtctatgaagaggcgcccgacgccgaagcattgctgatgtccgatgtaccagcaccagttgctgacgaggatgccgttgaggaagccgagcaggccctttctacggtggattccgagtttggccgcaccactgacccggtgcgcatgtacatgcgggaaatgggtacggtcgatctgttgacccgtgagggcgaaatcgagattgccaagcggatagaagacggcctcaagcatatggtgcaagctattgccgcctgtcccagtaccattgccgaattattggccatggtggatcaggttgagaagggcgagttgggggtcgatgatctggtcgatggcctgattgatgctgacgatggtcttggtgccgaaatcgtggctgaagaagctgctgatgctggagatgtggctgaagacgccgacgaggaggacgaagaagacgatgatggtgccaaggcggcagcgatctcggcagaagcacttgcaaggcttcgcgaggaagtgctgacgcgatttgccgtcatccgtagcgctcatgagaagatgaccgtgcttttggcaagcaagggttctcaggacaaagagtatctcaagctgcaggctacgattattgaagagctgatggcattccgcttttcagccaagcaggttgaggcattgtgtgaccgtgtgcgtggcatggtagaagagatccgtagccatgaacgtaaaatcatggacttctgcgtcgaaaaggccggtatgccgagggcgcatttcattaagagcttcccgggcaacgagggcaatccagagtggttggctgcggaacttgccgtcaacaaaccgtatgttgagcgtcttgagcgattcaggcactcgatcgatgaccagcagcaacaattacttgccattcaagagcgtgtgggtattcccatcagggagctcaaggaaatcaacaagcagatgtccacaggcgaggcacgggcgcgtcgtgccaagcgcgagatgatcgaggccaacttgcgtctcgtgatttctatcgccaagaaatacaccaaccgtggcctgcaattccttgacctgattcaggaaggcaatatcggtttgatgaaggcggtagacaagttcgaataccgtcgtggttacaagttctctacatatgccacatggtggattcgccaggcaatcacacgctcgatcgcagatcaggcgcgtactattcgcattcctgtgcacatgatcgagacgatcaacaagatgaatcgcatcagccgccagatcctgcaggaaaccggcttggagccagatccagccacccttgcggaaaaaatggagatgccggaagataagatccgcaaaatcctcaagatttccaaggagcctatctccatggaaaccccaattggagatgacgacgattcccacttgggtgatttcatcgaggatgtcgcaacacttgctcccgtggatgccgccgtatacgcaagcttgcgtgatgccaccaaagaagtgttagaatcgctgaccgcaagggaggccaaggtgttgcgcatgcggttcggtattgagatgaataccgaccacaccctggaagaggttggcaaacaattcgatgtcacccgcgaacgtatccgtcaaattgaggccaaggcgctacgcaaactgcgccatccaacccgctcagaacgcctgcgcagtttcctcgaaactggcaacgactaa

SEQ ID NO: 74557 - protein, 644 aa, Methylobacillus flagellatus KT
MGSSMAKEQQNDNVNDKADITLNDADIRRTRLKSLIILGKERGYLTYAEINDHLPDDVQDSEQIDSIIGMINDMGIQVYEEAPDAEALLMSDVPAPVADEDAVEEAEQALSTVDSEFGRTTDPVRMYMREMGTVDLLTREGEIEIAKRIEDGLKHMVQAIAACPSTIAELLAMVDQVEKGELGVDDLVDGLIDADDGLGAEIVAEEAADAGDVAEDADEEDEEDDDGAKAAAISAEALARLREEVLTRFAVIRSAHEKMTVLLASKGSQDKEYLKLQATIIEELMAFRFSAKQVEALCDRVRGMVEEIRSHERKIMDFCVEKAGMPRAHFIKSFPGNEGNPEWLAAELAVNKPYVERLERFRHSIDDQQQQLLAIQERVGIPIRELKEINKQMSTGEARARRAKREMIEANLRLVISIAKKYTNRGLQFLDLIQEGNIGLMKAVDKFEYRRGYKFSTYATWWIRQAITRSIADQARTIRIPVHMIETINKMNRISRQILQETGLEPDPATLAEKMEMPEDKIRKILKISKEPISMETPIGDDDDSHLGDFIEDVATLAPVDAAVYASLRDATKEVLESLTAREAKVLRMRFGIEMNTDHTLEEVGKQFDVTRERIRQIEAKALRKLRHPTRSERLRSFLETGND

SEQ ID NO: 74558 - DNA, 1725 bp, Acidobacteria bacterium Ellin345
  CDS (1)..(1725): transl_table=11
ttggctctcgacgacaagtacgacgatatcaaaaaactgattgataccggcaaggaaaagggttacctgacgtacagcgaggtgaatgatctcatcccgcacgacgttcactcgcccgacgatcttgatgatctcctgacgacgatcggtacgcaaggcattgacgttctcgaaggtccgggaaaacttccctccgccgcagttctcgacaagcgctatgacgatgtcgaggccggcgaagaggagatggaactcgacctcactccgggagcgctcgaaaagacgaatgaccccgtgcgcatgtatttgcgcgaaatgggcacggtaccgctgctgacacgtgaaggcgaagttgaaatcgccaagcgtatcgagcgcggacaacttcgcgtattaaaagcaatctcgcgttctcccatcgtcattcgcgacatcatcgcgattggcgaagacctgaagcgcggcgtgcgcagcatcaaggaaatcgtgatcttcgatgaagaagaaatcacggatgaagtccttgctgctcgcctgaaagacaccaccgggcgcatcgatgagctgaacaagcactacaagaagagttcccagctcgagcagaagcttgaagagattgctcccggcggcgttaaggaaatcaaggacaagaaaaaagcacgcgacgtgcgcaaggtccgttggacgctgggccgcgaattggtctcgatctcgcgcatcattcgcaagatcaacttcaccaacgtcgaacgcaagcgcttgatcgatcgcgtgagcaagacggtcgagaacctgcgcattctcgagcgccaggtttcgcatctcgagcatcgtgccaacgaaacgcgttcggaagagacgaagaaagagctcaagaagcagagccgcacccttaagggcgacctggagcgcatggagcaggaggctggcgtttccatcgccgagctgaagcgtacccagcgcgaaattatccagggagacatggatgccgagcaggcgaagaaggagctcatcgaagctaaccttcgactcgtcgtctcgatcgcgaagaagtacaccaaccgcggactccagttcctcgacctcatccaggaaggcaacatcggcctgatgaaagccgtggacaagttcgagtaccgccgtggctacaagttctcaacgtacgccacgtggtggattcgccaggccattacacgcgcgattgccgatcaggcccgcaccatccgtattccggtgcacatgatcgaaaccatcaacaagctcatccgcacctcgcgtcaactggtgcaggaacttgggcgtgaaccgagcagcgaagaaatcgccaagcggatggatatccccgtggcgaaggtccgcaaagtgctgaagatcgcacaggaaccgatctcgctcgaaacaccgatcggcgaagaggaagattcacaccttggcgatttcatcgaggaccgctcgatggtttcgccggccgaggccgtcatcaacgtgaacctcaaggaccagacagcccaggtcctgcgcacgctcaccgcgcgcgaagaaaaggtcatcaagatgcggttcggactcgaagacggttcagagcacacgctcgaggaagtcggccagtcgttcgccgttacacgcgaacgcatccgccaaatcgaggcgaaggcgttgcgcaagctgcgtcatccgtcacgctcgcggaagctgcgggcatttctcgatggagtgcgcgactag

SEQ ID NO: 74559 - protein, 574 aa, Acidobacteria bacterium Ellin345
MALDDKYDDIKKLIDTGKEKGYLTYSEVNDLIPHDVHSPDDLDDLLTTIGTQGIDVLEGPGKLPSAAVLDKRYDDVEAGEEEMELDLTPGALEKTNDPVRMYLREMGTVPLLTREGEVEIAKRIERGQLRVLKAISRSPIVIRDIIAIGEDLKRGVRSIKEIVIFDEEEITDEVLAARLKDTTGRIDELNKHYKKSSQLEQKLEEIAPGGVKEIKDKKKARDVRKVRWTLGRELVSISRIIRKINFTNVERKRLIDRVSKTVENLRILERQVSHLEHRANETRSEETKKELKKQSRTLKGDLERMEQEAGVSIAELKRTQREIIQGDMDAEQAKKELIEANLRLVVSIAKKYTNRGLQFLDLIQEGNIGLMKAVDKFEYRRGYKFSTYATWWIRQAITRAIADQARTIRIPVHMIETINKLIRTSRQLVQELGREPSSEEIAKRMDIPVAKVRKVLKIAQEPISLETPIGEEEDSHLGDFIEDRSMVSPAEAVINVNLKDQTAQVLRTLTAREEKVIKMRFGLEDGSEHTLEEVGQSFAVTRERIRQIEAKALRKLRHPSRSRKLRAFLDGVRD

SEQ ID NO: 74560 - DNA, 1860 bp, Shewanella sp. MR-4
  CDS (1)..(1860): transl_table=11
atgatatctatggatcatactccgcagtcgcaactcaagctgttgcttgccaaaggtaaagagcaaggttacttaacctatgcagaagtgaacgatcacttacctgcagacatggtcgattctgaccagatcgaagatattatccagatgataaatgacatgggtattcgggtgtttgaagaagcgccagatgccgatgacatgatgatgtcggaagacaacacagacgaagatgcagcggaagaagccgcagccgcccttgccacagtagaaagtgagctaggccgtaccacagaccctgtgcgtatgtacatgcgcgaaatgggtaccgttgaactgctgacccgtgaaggcgaaattgttatcgccaaacgcatcgaagaaggcatcaacacagttcaaagctctgtcgcagaatacccacaagcgatcgccatgatccttgaacagtacgaccaatacgaagccgacgaactgcgcctgtctgatattatctctggatttgttaacccggacgaagaagacctaggcccaaccgcaacccatatcggctctgaattatcggaagaagatcttgatgatgaagatgacgatgaagaagatgaagacgaagacggtgatggcgacggcgatgacgatggcaacaagggtcccgatcctgaagaggcgcgtgaacgctttggccaattaagaacggcctacgaaaatgcccttaaaatcatcgaagccaaaggtcgtgaacatcctgaatcgatcaaagcactgtttgaaatcggtgagattttcaaagagttccgcctagtacccaagcagttcgaccgcttagtaaaaagcatgcgttctatgatggaccgtgttcgtgtacaagagcgtctgctgatgaagctctgtgtcgaacaggccaagatgccgaagaagaattttgttaagttcttcaccggtaacgaaaccaatttagattggttcgatgctgaaaagaactcgaacaagccttatgccgaaggcttaaaaatggttgaagaagacgttcagcgttgccgtagcaagctggccgccatcgaagaagaaactggcttagtcattgctgccattaaagacatcaaccgtcgtatgtcaatcggtgaagccaaggctcgccgtgcgaagaaagagatggttgaggcaaacttacgtctggtaatttctatcgcgaagaaatacaccaaccgtggtctgcaattcttggacttaattcaagaaggtaacatcggtttgatgaaggcagttgataagttcgaataccgtcgtggttacaagttttcgacctatgcgacttggtggatccgtcaggcaatcacccgctcaatcgcggaccaagcccgtacaatccgtattccagtacacatgatcgaaaccatcaacaagctgaaccgtatctctcgccaaatgttacaggaaatgggtcgtgagccttctcctgaagaactggcagagcgtatgatgatgccggaagataagatccgtaaggtactgaaaatcgctaaagaacctatctccatggaaaccccaataggtgacgatgaagattcgcatttaggtgattttatcgaggatactaccctcgaattaccactggacagcgccactagcgaaagcctgaagagcgcgacccatgaggtattagctggcctaacagcccgtgaagcgaaagtactgcgtatgcgttttggtatcgacatgaataccgaccacacgctggaagaagtgggtaaacaatttgacgtgacccgtgaacgtatccgtcaaattgaggcgaaagccctgcgtaaactacgccacccttcacgctcggaaatcttaaagtcattcttagacgaatag

SEQ ID NO: 74561 - protein, 619 aa, Shewanella sp. MR-4
MISMDHTPQSQLKLLLAKGKEQGYLTYAEVNDHLPADMVDSDQIEDIIQMINDMGIRVFEEAPDADDMMMSEDNTDEDAAEEAAAALATVESELGRTTDPVRMYMREMGTVELLTREGEIVIAKRIEEGINTVQSSVAEYPQAIAMILEQYDQYEADELRLSDIISGFVNPDEEDLGPTATHIGSELSEEDLDDEDDDEEDEDEDGDGDGDDDGNKGPDPEEARERFGQLRTAYENALKIIEAKGREHPESIKALFEIGEIFKEFRLVPKQFDRLVKSMRSMMDRVRVQERLLMKLCVEQAKMPKKNFVKFFTGNETNLDWFDAEKNSNKPYAEGLKMVEEDVQRCRSKLAAIEEETGLVIAAIKDINRRMSIGEAKARRAKKEMVEANLRLVISIAKKYTNRGLQFLDLIQEGNIGLMKAVDKFEYRRGYKFSTYATWWIRQAITRSIADQARTIRIPVHMIETINKLNRISRQMLQEMGREPSPEELAERMMMPEDKIRKVLKIAKEPISMETPIGDDEDSHLGDFIEDTTLELPLDSATSESLKSATHEVLAGLTAREAKVLRMRFGIDMNTDHTLEEVGKQFDVTRERIRQIEAKALRKLRHPSRSEILKSFLDE

SEQ ID NO: 74562 - DNA, 1797 bp, Alkalilimnicola ehrlichei MLHE-1
  CDS (1)..(1797): transl_table=11
atgacacaggatcagcagtctcagatcaagcagctcatcgccaagggcaaggagcaggggttcctcacctatgccgaggtgaacgaccacctgcccgatgacatcgtcgatcccgagcagatcgaagacatcattggcatgatcaacgacatgggtatcaatgtccatgaggtcgcgccggatgccgatgagttgctgctcagtgatgctgcggtcagtaccgacgaggacgaggccgaagaggcggcggcggcgctggcggcggtggacgccgagtttggccgcaccaccgacccggtgcgcatgtacatgcgcgagatgggtacggtggagctgctgacccgtgagggcgagatcgagctggccaagcgcatcgaagaggggttggaccaggtgctggccgcgctctccgcctatcccggtgcggcggccaagctgctcgacctgtaccgcaaggtgcaggacggtgagatgcgcctgaacgaactgatgggcggcttccgcaaccccgacgaggaactctccgcctactccgccgacgccggcaaggaggaggacgaggacggcgaggaggccgtggtcgacaacgggcccgacccggagatggccgctgagctgttccggcggctggcggaggcggatcagcgcatgcaggaggtcctgcggcgacagggctccgacagccccgagtgcgcggaactgcgtgagcagctggcggagatcttcctgaccttcaagttcccgccgaagatcatcgaccagctggtggatgggctgcgccgggatgtcaacgtgctgcgccgcaacgagcgccacatcctcaaggcctgcaccaaggcgggcatgccgcgcaagaccttcgtgcgcagcttcatctcccgcgagaccgatccgggctggctggacgagatgctggccagcaaagagccgtgggcccaacgcctggccgagcacgaggacgatatccgccgtgcccagcaggtgctgatcgacgccgagcgtaaggtgggtatgaccatcggcgagatcaaggacatcaaccggcgcatgtccatcggcgaggccaaggcccgccgggcgaagaaggagatggtggaggccaacctgcggctggtcatctccatcgctaagaagtacaccaaccgcggcctgcagttcctggacctcatccaggagggcaacatcggcctgatgaaggcggtggacaagttcgaataccgccggggttacaagttctccacctacgccacctggtggatccggcaggccatcacccgctccatcgccgaccaggcccgcaccatccgcatcccggtgcacatgatcgagaccatcaacaagctcaaccgggtctctcggcagatgctccaggagatgggccgggagccgagcccggacgagctggctgagcgcatggagatgcccgaggacaaggtgcgcaaggtgctcaagatcgccaaggagccgatctccatggagacgcccattggcgacgacgaggactcccacctgggggatttcatcgaggacatcaacgccatgtccccggtggattccgccacccgggaggggctgcgcgaatcggtcaagggcgtgctctccggcctgaccccccgggaggccaaggtgctgcgcatgcgctttggcatcgacatgaacaccgaccacaccctggaagaggtcggcaagcagtttgacgtcacccgcgagcgcatccgccagatcgaggccaaggccctgcgcaagctacgccacccgacccgctccgagggtctgcgcagtttcctcgacgagtaa

SEQ ID NO: 74563 - protein, 598 aa, Alkalilimnicola ehrlichei MLHE-1
MTQDQQSQIKQLIAKGKEQGFLTYAEVNDHLPDDIVDPEQIEDIIGMINDMGINVHEVAPDADELLLSDAAVSTDEDEAEEAAAALAAVDAEFGRTTDPVRMYMREMGTVELLTREGEIELAKRIEEGLDQVLAALSAYPGAAAKLLDLYRKVQDGEMRLNELMGGFRNPDEELSAYSADAGKEEDEDGEEAVVDNGPDPEMAAELFRRLAEADQRMQEVLRRQGSDSPECAELREQLAEIFLTFKFPPKIIDQLVDGLRRDVNVLRRNERHILKACTKAGMPRKTFVRSFISRETDPGWLDEMLASKEPWAQRLAEHEDDIRRAQQVLIDAERKVGMTIGEIKDINRRMSIGEAKARRAKKEMVEANLRLVISIAKKYTNRGLQFLDLIQEGNIGLMKAVDKFEYRRGYKFSTYATWWIRQAITRSIADQARTIRIPVHMIETINKLNRVSRQMLQEMGREPSPDELAERMEMPEDKVRKVLKIAKEPISMETPIGDDEDSHLGDFIEDINAMSPVDSATREGLRESVKGVLSGLTPREAKVLRMRFGIDMNTDHTLEEVGKQFDVTRERIRQIEAKALRKLRHPTRSEGLRSFLDE

SEQ ID NO: 74564 - DNA, 2001 bp, Hyphomonas neptunium ATCC 15444
  CDS (1)..(2001): transl_table=11
atggcgacagccaccaagaagaaaaagaacacggccggtgacggcgagggcgaagacgacaaagagacggaaagcggtcttgtcgattttaacgccacagacgtcaaaaaggttctgaagcgcgcccagaagcgcggcttcatcacccatgatgagataaaccagcttctgccggactccgacatgagttccgaccagatcgaggacgtgatgtcccagatctcggagatgggcatcgctgtggtcgagaccgaggaagaggccgaagaacagggcaaggccctcaccaagatcgaggacaagaaagtcgtcgccaagaagggcaatgcccgtggcagcgaccggaccgacgatccggtgcggatgtatctgcgcgagatgggcgcggtggagcttctttcccgtgagggcgagattgcgattgccaagcgcatcgaggccggccgggacgcgatgatccgcggcctgtgcgaaagcccgctgaccttcgaggccatgatggtgtggcgcgatgagctcatgaatgagcgcatcctgctgcgcgacctgatcgacctggaagccacctatggcgcggaaaatccgccgcccgagcccaagcctgtcgaagaacgcccgcctgagccggctgcgccggtcaagggcaagaagcggtctgccgaagaggtcgacgaggttgaggctgagcgcatgcgccagcagcagcaggaagaggaagaggaagacgacgcggttgcgatgtcgatgtcggcgatggaaggggagctgcgcgaaggcgtgctcgccaagctcgacgagattgccgacgcgttcagccgtttccgcaagcttcaggatcgcctgctggtccgccggattgagggcaaggaccttacccccaaggcacagggcgaatatgacgacctgtctctgcagatcgtggacaatctcaagacgatccacatcaacaacgcccgtatcgaggcgctggtggagcagctctacgccatcaacaagaagctgatgggccttgaaggcaagctgatgcgtctggctgacgctcatggcgtgccgcgcaaggagttcctgcacaactatatcggcagcgagcttgagcctgactgggccgagcgcgtgcgcgagatttcggcgaaatggaaacgcctggtcgacggcaagggcgaggaagtccaggtcgttcgcgacgagatttccgagattgcccaggaaatcggcattccaatcgatgacttccgccggatcgttcagaccgtgcagaagggcgagcgggaagcgcgcatcgcgaagaaggagatggtggaagccaacctccgcctcgtgatctcgattgccaagaaatataccaaccgcggcctgcaattcctggatctcatccaggagggcaatatcggcctcatgaaagcggtcgataagttcgaatatcgccgcggctacaaattctcgacctatgccacctggtggatccgtcaggccattacccgctctattgcggaccaggcccggacgatccgtatcccggtgcacatgatcgagacgatcaacaagatcatccgtacacagcgccagatgctgcacgagatcggccgcgagccgaccccggaagaactggccgaaaagctcggcctgccgctggagaagatccgcaaggttctgaaaatcgcgaaagagccgatctcgctggaaacgccgattggcgacgacgaggattcaaacctcggcgacttcatcgaggacaagatggcgctgcttcccgtggacgcggccatccagtcgaacctgcgcgagacgacgacccgcgtgctggcttcgctcaccccacgtgaggaacgcgttctgcggatgcgctttggcatcggcatgaacacggaccacacgctggaagaagtcggccagcagttctcggtcacccgcgaacgcatccgccagatcgaggcgaaggcgctgaggaaactcaagcacccgagccggagccggaagctgcgaagctttctggatacctga

SEQ ID NO: 74565 - protein, 666 aa, Hyphomonas neptunium ATCC 15444
MATATKKKKNTAGDGEGEDDKETESGLVDFNATDVKKVLKRAQKRGFITHDEINQLLPDSDMSSDQIEDVMSQISEMGIAVVETEEEAEEQGKALTKIEDKKVVAKKGNARGSDRTDDPVRMYLREMGAVELLSREGEIAIAKRIEAGRDAMIRGLCESPLTFEAMMVWRDELMNERILLRDLIDLEATYGAENPPPEPKPVEERPPEPAAPVKGKKRSAEEVDEVEAERMRQQQQEEEEEDDAVAMSMSAMEGELREGVLAKLDEIADAFSRFRKLQDRLLVRRIEGKDLTPKAQGEYDDLSLQIVDNLKTIHINNARIEALVEQLYAINKKLMGLEGKLMRLADAHGVPRKEFLHNYIGSELEPDWAERVREISAKWKRLVDGKGEEVQVVRDEISEIAQEIGIPIDDFRRIVQTVQKGEREARIAKKEMVEANLRLVISIAKKYTNRGLQFLDLIQEGNIGLMKAVDKFEYRRGYKFSTYATWWIRQAITRSIADQARTIRIPVHMIETINKIIRTQRQMLHEIGREPTPEELAEKLGLPLEKIRKVLKIAKEPISLETPIGDDEDSNLGDFIEDKMALLPVDAAIQSNLRETTTRVLASLTPREERVLRMRFGIGMNTDHTLEEVGQQFSVTRERIRQIEAKALRKLKHPSRSRKLRSFLDT

SEQ ID NO: 74566 - DNA, 2058 bp, Rhizobium leguminosarum bv. viciae 3841
  CDS (1)..(2058): transl_table=11
atggcaaccaaggtcaaagagaacgaagacgcggaagtcgaacgcgacggcgcaagcgacggccctcttctcgatctttccgacgacgcggtcaagaagatgatcaaagccgccaagaagcgcggctatgtgaccatggacgagcttaacgcggtcctgccgtccgaagaagtgacgtccgagcagatcgaagacacgatgtcgatgctgtccgacatgggcatcaacgtcatcgaggacgaggaagccgaggaagccggcgcttccggcagcagcgatgacgacgacgccggcggcgacgaggagagcgaaggcggcgaactggcgccttcgagcggcacggcgctggcgactgccaagaaaaaagaaccgaccgaccgtaccgacgatccggttcgcatgtacctgcgcgagatgggctcggtggagctgctttcccgcgagggcgaaatcgcgatcgccaagcgtatcgaggccggccgcgagacgatgatcgcgggtctctgcgagagcccgctgaccttccaggcgctgatcatctggcgcgacgagctcaacgaaggcacgacgctgctgcgcgagatcatcgatctcgaaacgacctattccggccctgaagccaaggctgcgccgcagttccagagcccggagaagatcgaagccgatcgcaagctggcagaagagaaggaaaagacccgtcgcgcccgctccggcgacgacgacatcaccgatgtcggcggcgaaggcctgcctcccgaggaggaggaagaggacgaggacgaatccaatctttcgctggcggcgatggaagccgagcttcgcccgcaggtgatggagacgctcgatacgatcgccgagacctacaagaagctgcgcaagctgcaggaccagcaggtcgagcagcggctgtcggcttccggcacgctgtccaccgcccaggagcgccgctacaaggaactcaaagatgagctcatcaaggccgtcaaatctctgtccttgaaccagaaccgcatcgacgccctcgtcgagcagctctacgacatcaacaagcgcctcgtttccaacgagggccgcctgctgcgtctggccgaatcctacggcgtcaagcgcgactccttcctggagcaataccagggcgctgagctcgatccgaactggatgaagtcgatcggcaatctggccgcccgcggatggaaggaattcgccaggggcgaaaacacgacgatccgcgacattcgccaggaaatccagaatctggcgaccgaaaccggtatctcgatctcggaattccgccgcatcgtccatatggtgcagaagggcgagcgcgaagcgcgcatcgccaagaaggaaatggtcgaagcgaaccttcgcctggtcatctccatcgccaagaagtacacgaaccgcggcctgcagttcctcgacctcattcaggaaggcaatatcggcctgatgaaggcggtcgacaagttcgaataccgccgcggctacaagttctcgacctatgcgacatggtggatccgtcaggcgatcacccgttcgatcgccgaccaggcccgcacgatccgcattccggtgcacatgatcgagacgatcaacaagatcgtccgcacatcgcgccagatgctgcacgagatcggccgcgagccgacgccggaagagctggccgaaaagctggccatgccgctcgaaaaggtccgcaaggtcctgaagatcgccaaggagccgatctcgctcgaaacccctgtgggcgacgaagaggattcgcatctcggcgatttcatcgaggacaagaacgcgctgctaccgatcgacgccgccatccaggcgaacctgcgcgagacgacgacccgcgttctcgcctcgctgacgccgcgcgaggaacgtgttctgcgcatgcgcttcggcattggcatgaacaccgaccacacgctcgaagaagtcggccagcagttctcggtcacccgcgaacgtattcgccagatcgaggcgaaggcgctgcgcaagctgaagcatccgagccgctccagaaagctgagaagcttcctcgacagctaa

SEQ ID NO: 74567 - protein, 685 aa, Rhizobium leguminosarum bv. viciae 3841
MATKVKENEDAEVERDGASDGPLLDLSDDAVKKMIKAAKKRGYVTMDELNAVLPSEEVTSEQIEDTMSMLSDMGINVIEDEEAEEAGASGSSDDDDAGGDEESEGGELAPSSGTALATAKKKEPTDRTDDPVRMYLREMGSVELLSREGEIAIAKRIEAGRETMIAGLCESPLTFQALIIWRDELNEGTTLLREIIDLETTYSGPEAKAAPQFQSPEKIEADRKLAEEKEKTRRARSGDDDITDVGGEGLPPEEEEEDEDESNLSLAAMEAELRPQVMETLDTIAETYKKLRKLQDQQVEQRLSASGTLSTAQERRYKELKDELIKAVKSLSLNQNRIDALVEQLYDINKRLVSNEGRLLRLAESYGVKRDSFLEQYQGAELDPNWMKSIGNLAARGWKEFARGENTTIRDIRQEIQNLATETGISISEFRRIVHMVQKGEREARIAKKEMVEANLRLVISIAKKYTNRGLQFLDLIQEGNIGLMKAVDKFEYRRGYKFSTYATWWIRQAITRSIADQARTIRIPVHMIETINKIVRTSRQMLHEIGREPTPEELAEKLAMPLEKVRKVLKIAKEPISLETPVGDEEDSHLGDFIEDKNALLPIDAAIQANLRETTTRVLASLTPREERVLRMRFGIGMNTDHTLEEVGQQFSVTRERIRQIEAKALRKLKHPSRSRKLRSFLDS

SEQ ID NO: 74568 - DNA, 1692 bp, Solibacter usitatus Ellin6076
  CDS (1)..(1692): transl_table=11
gtggcgttagacgataaatacgacgggcttcaacggctcgtacagatgggcaaggaaaaaggctacgtcttgtacgacgaggtcagcgaagtgctgcccggcgatatcaacggcggcaacgatcttgacgacgtgctggccggcctcgatgtcgcgggaatcgaaatcctggaagaaccgaaggatttcgagaaaaagatcgaagagtccagtgaagaattgatcgatctggaattgcccgccgggctgggcggcgagaagatcaacgatcccgttcgcatgtacctgcgcgagatgggaacggtcccgctgctcacccgcgagggcgaggtggagatcgcgcggcgcatcgagcgcgggcaaaacacagtgctgaaatcgctcttccgggcgcccctggtggtccaggagatcatcgggatgggagaggaagtaatcaacgatacgctttccgccagggacgttattcaaatcgccgaccccatgctcaccgatgagatggtggaggagaagcgccaggaattcgcccgccacaccgaagagatcgcgcggtattacaagaagacgctgcagtgccggcagaagctgatggcgataccgcgcggcatgaagcccaagcagtacaggcggcagttgtgggaagtggcgcggctgatcgtcaggactgcccgcctgtgccgcgccgtcaaattccagtcgcccgtcatccggcatctgatcgaccggctgcgcagcgcggtggaagagttgcgtcctgtggagaacgatctcgccaagacacagcgcaagctggagacgtggccggcggcgcgggcggaggccattaaggatctgcgcaaggaacagcgcagctacggccagaaattgcagcagatggaggagcagtacggcgcctcggcggccgagctgcggcgcacgctcgaaataatcacgcaggcgcaccaggaagccgagaccgccaaaaaggaactgatcgaagcaaacctgcggctggtggttagcattgcgaagcggtataccaatcgcgggcttcaattcctggatttgatccaggagggtaatatcggcctgatgaaggccgtggataagtttgagtaccggcgcggctacaagttctcgacgtacgccacctggtgggtgcggcaggccatcacgcgagcgatcgcggaccaggcgcgcaccatccgtatcccggtgcacatgatcgagacgatcaataagctgatccggacgtcgcgacagatggtgcaagagctgggtcgcgagccgagcaatgaagagcttgccaagcggctccagttgccggtctccaaggtcaggaaggtgctgagggtcgcgcaggagccgatttcgctggaaactccgatcggggaggaggaggaatcgcacctaggcgatttcatcgtcgatcagaacggaatttcaccatcggatgcggtgatcaacctgaatctacgggagcagacggcgcaggtgctgaagaccctgaccccgcgcgaagagaagatcatcaaaatgcgattcgggctggaagatgggagcgagcacacgctcgaggaggtcggccagaatttcgcggttacccgcgagcgcatccggcagatcgaggcgaaggcattgcgcaaactccgccatccgagccgcagccaccggctccgcgccttcctggaaaacggaacgaggggcgtctag

SEQ ID NO: 74569 - protein, 563 aa, Solibacter usitatus Ellin6076
MALDDKYDGLQRLVQMGKEKGYVLYDEVSEVLPGDINGGNDLDDVLAGLDVAGIEILEEPKDFEKKIEESSEELIDLELPAGLGGEKINDPVRMYLREMGTVPLLTREGEVEIARRIERGQNTVLKSLFRAPLVVQEIIGMGEEVINDTLSARDVIQIADPMLTDEMVEEKRQEFARHTEEIARYYKKTLQCRQKLMAIPRGMKPKQYRRQLWEVARLIVRTARLCRAVKFQSPVIRHLIDRLRSAVEELRPVENDLAKTQRKLETWPAARAEAIKDLRKEQRSYGQKLQQMEEQYGASAAELRRTLEIITQAHQEAETAKKELIEANLRLVVSIAKRYTNRGLQFLDLIQEGNIGLMKAVDKFEYRRGYKFSTYATWWVRQAITRAIADQARTIRIPVHMIETINKLIRTSRQMVQELGREPSNEELAKRLQLPVSKVRKVLRVAQEPISLETPIGEEEESHLGDFIVDQNGISPSDAVINLNLREQTAQVLKTLTPREEKIIKMRFGLEDGSEHTLEEVGQNFAVTRERIRQIEAKALRKLRHPSRSHRLRAFLENGTRGV

SEQ ID NO: 74570 - DNA, 2052 bp, Magnetococcus sp. MC-1
  CDS (1)..(2052): transl_table=11
atggacggaaaaagtaacatggccgaggataccaaacgcgaagacatgaaaaagctcatcgcccgtggcaaagagcggggatttttgacctatgatgaggtcaacgatgtgctacccaatgacatgacctctgcggaggatatggaagatgttgttggtctcctagacaacatgggcatcgatcttattgatgatgaacgagaagaaggggcgcgtccgaagagccgcccagcagccggtatcggcaatctcgacagtctagatgacgatgttgatgaggagattcttggcatctccgactttgatagcgaggatgatgagagtgacgatgaagatggcctgcgcagtgatggtgccatcgaagatatcgacttaggcaagactgatgatcctgtacgcatgtatttgcgtgagatgggctccgttgagttgctgacccgtgagggtgagatcgccattgccaagcgaattgaggaaggctgcaatgaggtgattgccaccatctgcgatgcaccttccacgtttaacgaagtgatgatgctggctgagcggttgcgggccggtgagatttcactgcgggaggtgctggacatctccacgccccaagatgaggggagtgaggacgaggatctcaacaacgacgatgatgaggttgaggccagcaccgagagcgatgatgaagatgtggatgaggatgatatcgtcaacgggcctgtcaaggtgcgcaatccggtaccagagcctcccccggttaagaccgaggaggagattgcggcccagcgggaggcggataatgagcaatttcgtgagctttacgaggccacattagccatctttgacgaaattacccgtgaaaatgaggtattggtagagctgcgggatccgctgaacgatgctttgcagaatgatcctgagggggaaacctgcaaacggctgctggcggagtatcaagcgcacaaggcacggattgtggagattgtcgcgggcattaagttttcgcccaagcagcgggatcggctggttgagcgcattaagagctacgtggctgcggtgcgcgcgcaggagcagaagattatcaccattgtgacccagtgtaatgtcaaaaagcccgagtttattgagcagtttacgggcaatgagagtgacacgacctggatacaaaactttgccaagacgcgcagtgcaccgtggaagcggctttatgagcagtctgagctcatctgcgaagcgcagttggttattcgcagcattgaggaagaggctggtcaaacggttgcggatttgaaaaagtgcaacaagaagttgatggatggtgagcggcgtgccaatcaggccaagaaggagatggtggaagccaacttgcgtctggtgatttccattgccaagaagtataccaaccggggtttgcaatttttggatttaatccaagagggcaacattggtttgatgaaggcggtggataagtttgagtggcgtcggggttacaagttttctacctatgctacgtggtggattcgtcaggcgattacccgttctattgcggatcaggcgcgcaccatacgtattccggtgcatatgattgagaccattaacaagctggtacgcaccagccgtcagatggtgcaggagatgggccgcgagcccacgccggaagagattgctgagcgcatgagcatgagtttggagaaggtgcgcaaggtattgaagattgccaaggagccgatctctttggagacacctgtaggggatgaagaggactcccatttgggagacttcattgaggacaagtccatgctatcgccatcggagcatgcgattatgtctaatttgcgggatacgacggggcgggtattgcagacgttgaccagtcgcgaggagcatgttttgcgcatgcgctttggtattggtctgccgacggatcacacgttggaggaggtgggtaagcagtttaatgttacccgtgagcgtattcgtcaaattgaggctaaagcacttcgcaagttgcgtcatccgacgcgttcgcgtaaactgcgcagcttcttggagtcataa

SEQ ID NO: 74571 - protein, 683 aa, Magnetococcus sp. MC-1
MDGKSNMAEDTKREDMKKLIARGKERGFLTYDEVNDVLPNDMTSAEDMEDVVGLLDNMGIDLIDDEREEGARPKSRPAAGIGNLDSLDDDVDEEILGISDFDSEDDESDDEDGLRSDGAIEDIDLGKTDDPVRMYLREMGSVELLTREGEIAIAKRIEEGCNEVIATICDAPSTFNEVMMLAERLRAGEISLREVLDISTPQDEGSEDEDLNNDDDEVEASTESDDEDVDEDDIVNGPVKVRNPVPEPPPVKTEEEIAAQREADNEQFRELYEATLAIFDEITRENEVLVELRDPLNDALQNDPEGETCKRLLAEYQAHKARIVEIVAGIKFSPKQRDRLVERIKSYVAAVRAQEQKIITIVTQCNVKKPEFIEQFTGNESDTTWIQNFAKTRSAPWKRLYEQSELICEAQLVIRSIEEEAGQTVADLKKCNKKLMDGERRANQAKKEMVEANLRLVISIAKKYTNRGLQFLDLIQEGNIGLMKAVDKFEWRRGYKFSTYATWWIRQAITRSIADQARTIRIPVHMIETINKLVRTSRQMVQEMGREPTPEEIAERMSMSLEKVRKVLKIAKEPISLETPVGDEEDSHLGDFIEDKSMLSPSEHAIMSNLRDTTGRVLQTLTSREEHVLRMRFGIGLPTDHTLEEVGKQFNVTRERIRQIEAKALRKLRHPTRSRKLRSFLES

SEQ ID NO: 74572 - DNA, 1860 bp, Shewanella sp. ANA-3
  CDS (1)..(1860): transl_table=11
atgatatctatggatcatactccgcagtcgcaactcaagctgttgcttgccaaaggtaaagagcaaggttacttaacctatgcagaagtgaacgatcacttacctgcagacatggtcgattctgaccagatcgaagatattatccagatgataaatgacatgggtattcgggtgttcgaagaagcaccagatgccgatgacatgatgatgtcggaagacaacacagacgaagatgcagcggaagaagccgcagccgcccttgccacagtagaaagtgagctaggccgcaccacagacccagtgcgtatgtacatgcgcgaaatgggtaccgttgaactgcttacccgtgaaggcgaaatcgttatcgccaaacgcatcgaagaaggcatcaacacagttcaaagctctgtcgccgaatacccacaagcgatcgccatgatccttgagcagtacgaccagtacgaagccgacgaactgcgcctgtctgatattatctctggatttgttaacccggacgaagaagacctaggtccaaccgcgactcatatcggttctgaattatcggaagaagatctcgatgatgaagatgacgatgaagacgacgaagacgaagacggtgatggcgaaggcgatgacgatggcaacaagggacccgatcctgaagaagcgcgtgaacgctttagccaattaagaaccgcctacgaaaacgcgcttaagatcatcgatgccaaaggtcgtgaacacccagaatcgattcaagcactgtttgaaatcggcgagattttcaaagagttccgcctcgtacctaagcaattcgaccgcttagtgaaaagcatgcgttctatgatggaccgagtgcgcgttcaagagcgtctactgatgaagctctgtgtcgaacaggccaaaatgccgaagaagaactttgttaaattcttcaccggtaacgaaaccaatctcgattggttcgatgcagaaaagaactcaactaagccttatgccgaaggcttaagaatggttgaagaagacgttcagcgttgccgtagcaagctggccgccatcgaagaagaaaccggcttagtgattgccgccattaaagatatcaaccgtcgtatgtcaatcggtgaagccaaggctcgccgtgcgaagaaagaaatggttgaagcaaacttacgtctggtaatttctatcgcgaagaaatacaccaaccgtggtctgcaattcttggaccttatccaagaaggtaacataggtctgatgaaggccgttgataagttcgaataccgtcgtggttacaagttctcgacctatgcgacttggtggatccgtcaggctatcacccgctcaatcgcggaccaagcccgtacgatccgtattccagtacatatgatcgaaaccatcaacaagctgaaccgtatctctcgtcaaatgctgcaggaaatgggtcgtgaaccctcacctgaagaactggcagagcgtatgatgatgccggaagataagatccgtaaggtactgaaaatcgctaaagaacctatctccatggaaaccccaatcggtgacgatgaagattcgcatttaggtgattttatcgaggatactaccctcgaattaccactggacagcgccaccagcgaaagcctgaagagcgccacccatgaggttttagcaggcttaacagcccgtgaagcgaaagtactgcgtatgcgttttggtatcgatatgaataccgaccacacgctagaagaagtgggtaaacaatttgacgtaacccgtgagcgtatccgtcaaatcgaggcgaaagccctacgtaaactgcgccacccttcacgttcggaaatcttaaagtcgttcttagacgaatag

SEQ ID NO: 74573 - protein, 619 aa, Shewanella sp. ANA-3
MISMDHTPQSQLKLLLAKGKEQGYLTYAEVNDHLPADMVDSDQIEDIIQMINDMGIRVFEEAPDADDMMMSEDNTDEDAAEEAAAALATVESELGRTTDPVRMYMREMGTVELLTREGEIVIAKRIEEGINTVQSSVAEYPQAIAMILEQYDQYEADELRLSDIISGFVNPDEEDLGPTATHIGSELSEEDLDDEDDDEDDEDEDGDGEGDDDGNKGPDPEEARERFSQLRTAYENALKIIDAKGREHPESIQALFEIGEIFKEFRLVPKQFDRLVKSMRSMMDRVRVQERLLMKLCVEQAKMPKKNFVKFFTGNETNLDWFDAEKNSTKPYAEGLRMVEEDVQRCRSKLAAIEEETGLVIAAIKDINRRMSIGEAKARRAKKEMVEANLRLVISIAKKYTNRGLQFLDLIQEGNIGLMKAVDKFEYRRGYKFSTYATWWIRQAITRSIADQARTIRIPVHMIETINKLNRISRQMLQEMGREPSPEELAERMMMPEDKIRKVLKIAKEPISMETPIGDDEDSHLGDFIEDTTLELPLDSATSESLKSATHEVLAGLTAREAKVLRMRFGIDMNTDHTLEEVGKQFDVTRERIRQIEAKALRKLRHPSRSEILKSFLDE

SEQ ID NO: 74574 - DNA, 1866 bp, Haemophilus somnus 2336
  CDS (1)..(1866): transl_table=11
atggaacaaaataaacaatctcagctgaaattgttaattgcacgaggtaaagaacaaggttatttaacttatgccgaagtgaatgatcatcttcctgaagatcttgttgatgctgatcaaattgaagatgtgattcaaatgatcaatgatatgggtattcaagtacttgaaagtgtgcctgatgctgatgacttgatgctcaatgaaaatattacggatgaggatgctgttgaggaagcgactcaagtattatcaagtgtagaggcagagttgggaagaacaacagatcctgtgcgtatgtatatgcgtgaaatgggaagtgttgaacttcttacgcgtgaaggcgaaatcgatattgcaaaacgcatcgaagaagggattaatgaagtacaaagtgccgtagccgcttatcctaaagcactcaattatcttcttgaacagtatactttagttgaagaaggcggtatgcggttggctgatctcattaccggttttgttgatccaaatgcggttgttgaagaagagataattgaagccgacgacatacttacagaagatgatgaagaacatgtagaaagcaatgttgatgtaaacgatgaagaagaggaagaggatagcgaagataatagcaatgtagactctgattcggataacacaattgccccagaagttgctcgtgagaaatttgaagcactaagaatacaacaccaaaaaactttagccgcaatagaaaaatatggtcgttcccgtaaacaagcaaaagatcatattcaagcattagccgatatttttactcagttccgtttagtgcctaaacagttcgatgcgttggtcaattatatgcgtgatatgatgaaatctgttcgtcagcatgaacgacaaattcaaaagctggtagttgatttggctaaaatgccaaaagaaaatttccaaaaattatttattggcaatgaaagttcagagggttggctggataaattactgcttgcaagaaaaccttggtctgaaagattaatacaacatgaaagtgcggttcgtcaaagcataaaccaattattaaaaattgaacaggaaaccaatttaactatttctcaaattcgtgaaatttgtgacaaagtggcacaaggagaattaaaagctcgccgtgcaaaaaaagaaatggttgaagcaaatttacgtttggttatttcaattgcgaagaaatacactaaccgtggattgcaattccttgatctcattcaagaagggaatattggtttaatgaaagcggtagataaatttgaataccggcggggttataaattttcaacctatgcaacttggtggatacgtcaagcgattacacgctctattgcagatcaagcaagaacgatccgcattccagtgcatatgattgaaactatcaataaattaaaccgcatttctcgtcaaatgttacaaaaaatggggcgtgaagccacatctgaagaattagctgaacgaatgggaatgcctgaggataaaattcgtaaagtattaaaaatcgcaaaagagcctatctctatggaaacgcctatcggtgatgacgatgattcccatttaggtgattttattgaagacaatacgttagagctaccgttagattctgcgacagcccaaagtttgcgtgctgcaacgcatgaagtgttggaaggactaaccccaagagaagcaaaagtcttgcgtatgcgttttggtattgatatgaatacagatcataccttggaagaagtcgggaaacaatttgatgtaactcgtgaacgtattcgtcaaattgaagctaaagcattgcgtaaattgcgtcatccaagtcgttctgaaaccctacgcagtttcttagatgagtaa

SEQ ID NO: 74575 - protein, 621 aa, Haemophilus somnus 2336
MEQNKQSQLKLLIARGKEQGYLTYAEVNDHLPEDLVDADQIEDVIQMINDMGIQVLESVPDADDLMLNENITDEDAVEEATQVLSSVEAELGRTTDPVRMYMREMGSVELLTREGEIDIAKRIEEGINEVQSAVAAYPKALNYLLEQYTLVEEGGMRLADLITGFVDPNAVVEEEIIEADDILTEDDEEHVESNVDVNDEEEEEDSEDNSNVDSDSDNTIAPEVAREKFEALRIQHQKTLAAIEKYGRSRKQAKDHIQALADIFTQFRLVPKQFDALVNYMRDMMKSVRQHERQIQKLVVDLAKMPKENFQKLFIGNESSEGWLDKLLLARKPWSERLIQHESAVRQSINQLLKIEQETNLTISQIREICDKVAQGELKARRAKKEMVEANLRLVISIAKKYTNRGLQFLDLIQEGNIGLMKAVDKFEYRRGYKFSTYATWWIRQAITRSIADQARTIRIPVHMIETINKLNRISRQMLQKMGREATSEELAERMGMPEDKIRKVLKIAKEPISMETPIGDDDDSHLGDFIEDNTLELPLDSATAQSLRAATHEVLEGLTPREAKVLRMRFGIDMNTDHTLEEVGKQFDVTRERIRQIEAKALRKLRHPSRSETLRSFLDE

SEQ ID NO: 74576 - DNA, 1908 bp, Rickettsia akari str. Hartford
  CDS (1)..(1908): transl_table=11
atgagcaatagcaatatagacaatgatctagatcaaatagatagtttacttaaaaaagctaaatctaaaaagatacctgtcacttatgatgatataaacaaagctcttcctcttaatgaaaatccttcaataagacaattagaagaagctatattaaaattttccgatgcgggagtagatattttagaatctaacgaagatgatgatattaagcttgatatcggaatggatgaagaatttaagctatctaccaatattgataatgaacctgaagatgaagcagaagaagaaaatataggtactaccgatgatcctgtaagattatatcttaaggatatgggaggagtcgatcttttaactcgtgaacacgaagtagaaatcgcaaaaaggattgaggaaggacgcaaaacaatgactgcttccttatgcagaagccctattgctatgcgttgttttatagtatggtatgaagatttagttaatgaaaaaatgttactacgtgacctgatagatttagaagctaacattttacatgacgaaacacccgaaaatgatgaagaacatagtagtgagaccgaaggagaagagcatgatgataatcacctatctatgtctagagtagaaacgcagatattacctaatatcatagagcgtatgaaaaagatttcttttatctgcgaagagctactcattgaagctaaaaaatgttatgaaaaatcttttgaacctaaagttttacaaaatagcaaaaaatataataataatttggaattattattacatgaagtttcggaaatacattttaattctaaaagaacggaagaaattttaggtaagatgtatggaataaatcgtgatttaattaataaagaaacagcttttttaaaacttgctgaaaaatatggagtaacgcgccaaaatttcctcgatgaatatataggatcggttatcaatgcagcatggaaagaaaaaatgctgaaaaataaaaaagtcgcttggaaagagttaattactaaagaatcggattatatagatcaaatgattgctgaattatcggttatagaatctaataccggtcttttagttaatgattttaaaaaactagtgaatactatacaaaaaagtgagagacaaacactgcaagcaaaaaaggatatgatagaagcgaatttacgtttagttatatctatcgctaaaaaatatgctaatagagggttgcagtttttagatttaattcaagagggtaatataggacttatgaaagcggtggataaatttgaatatcgccgtggttataaattctctacctatgctacttggtggattagacaggctataacaagagctattgcagatcaagcaaggactatacgtattcctgtgcatatgattgaaacaattaataagatactgcgtacttcaagacaaatgcttaatgaacttggatacgaaccaacggcaacggaaatcgctaatcgtctttcaatgccgcttgataaagtgcgtaaagttatgaaaatagctaaagaacctataagtcttgagaatccagtaggtgatgatagtgacggcggtcaattaggcgattttatcgaagataagaatgcaatagcaccgattgatgcagcgattcagtcaaatttacgagaagttaccactagagtacttgcaacccttacgcctcgtgaagaaagagtgcttagaatgcgtttcggtataggtatgaatactgaccatacattagaagaagtagggcagcaatttaaggtaactagagaacgtataagacaaatcgagtcaaaagctttaagaaagttacaacatcctattagatccaaaaaacttaatagctttagaagcggtggaaagcgtggtgaaggtaatccatcagatttactagaggcatga

SEQ ID NO: 74577 - protein, 635 aa, Rickettsia akari str. Hartford
MSNSNIDNDLDQIDSLLKKAKSKKIPVTYDDINKALPLNENPSIRQLEEAILKFSDAGVDILESNEDDDIKLDIGMDEEFKLSTNIDNEPEDEAEEENIGTTDDPVRLYLKDMGGVDLLTREHEVEIAKRIEEGRKTMTASLCRSPIAMRCFIVWYEDLVNEKMLLRDLIDLEANILHDETPENDEEHSSETEGEEHDDNHLSMSRVETQILPNIIERMKKISFICEELLIEAKKCYEKSFEPKVLQNSKKYNNNLELLLHEVSEIHFNSKRTEEILGKMYGINRDLINKETAFLKLAEKYGVTRQNFLDEYIGSVINAAWKEKMLKNKKVAWKELITKESDYIDQMIAELSVIESNTGLLVNDFKKLVNTIQKSERQTLQAKKDMIEANLRLVISIAKKYANRGLQFLDLIQEGNIGLMKAVDKFEYRRGYKFSTYATWWIRQAITRAIADQARTIRIPVHMIETINKILRTSRQMLNELGYEPTATEIANRLSMPLDKVRKVMKIAKEPISLENPVGDDSDGGQLGDFIEDKNAIAPIDAAIQSNLREVTTRVLATLTPREERVLRMRFGIGMNTDHTLEEVGQQFKVTRERIRQIESKALRKLQHPIRSKKLNSFRSGGKRGEGNPSDLLEA

SEQ ID NO: 74578 - DNA, 1983 bp, Roseovarius nubinhibens ISM
  CDS (1)..(1983): transl_table=11
atggccgccaaggacaacgatgatcaaaaacccgatgatcaggatgccgagatttcgctggatctgagccagacggcgatcaagaagatgatcgccgaggcgcgcgagaagggctacatcacctatgaccagctgaaccaggcgctgccgcccgatcaggtgtcgtcggaacagatcgaagatgtcatgtcgatgctcagcgagatgggcatcaacatcatcgaggccgaggatgtcgaggaagaagagcagcgggtgacggcgctcgccgaggtgggcaagcgcggcgaggtcacgctcgggtccggcaaggaagaaaagctcgaccggacggatgacccggtgcgcatgtatctgcgcgagatgggctcggtcgagctgctcagccgcgagggcgagatcgccattgccaagcgcatcgaggcgggccgcaacacgatgatcctcgggctctgcgaaagcccgctgacctttcaggcgatcaccatctggcgcgacgaacttctgaccgaagacattctgctgcgcgatgtgatcgatctcgaggcgacctttggcaatcagctcggtgatgacgaggatgaggaggcccccgtggtcgccgccaatgtgggcgaggcgccgggcaagaaatccgagaccacccaagagctcgatgccgatggcaacccgatctcgtcggatgatgacgaggacgaggatgatcaggccaatatgagcctcgcggcgatggaggccgcgctcaagccgcgggtgctcgagacgctggaccggatcgccaatgattatgaaaagctgtcggagatgcaggacagccggatttcggcgacgctcaatgaggatggttcgttctcggccaagcaggaagcgacctatcagaagctgcgctcggagattgtcgagctggtgaatgagctgcacctgcacaacaaccggatcgaagcgctgatcgaccagctctatgggatcaaccagcgcatcatgtccatcgacagcgcgatggtgaagctcgccgatcaggcgcgcatcaaccgccgcgaattcatcgatgcctatcgcggtcgcgagctcgaccccaattggctcgacgatatggcgtcgaaatcgggccggggctggcagatgttcatggaacgctcgcccgagaaagtggccgagctgcgcgccgatatggcccaggtcgggcaatatgtcggtctcgacatcagcgaattccgccgcatcgtgggacaggttcagaagggcgagcaagaggcgcgtcaggccaagaaggaaatggtcgaggcgaacctgcgtctggtgatctcgattgccaagaaatacaccaaccgcggtctgcaattcctcgatctcattcaggaaggcaacatcggcctgatgaaggcggtggacaagttcgaataccgtcgcggctataaattctcgacctatgcgacctggtggatccggcaagcgatcacccgttcgattgccgatcaggcgcgcaccatccgtatcccggtgcatatgatcgagacgatcaacaagctggtccgtacgggccgtcagatgctgcatgagatcggccgcgagccgacgccggaagagctcgccgagaagctgcagatgccgctcgagaaggtccgcaaggtgatgaagatcgccaaggagccgatttcgctcgagacgccgattggcgatgaggaagacagccagcttggcgatttcatcgaggacaagaacgcggtactgcccctcgacagcgccattcaggacaatctcaaggaaaccacgacgcgggttctgtcgtcgctcaccccgcgtgaagagcgggttctgcggatgcggttcggcattggcatgaacaccgatcacacgctggaagaagtcggccagcagttcagcgtgacccgcgaacggatccgtcagatcgaagccaaagcgctgcgcaagctcaaacatccgagccggtcgcgcaagctgcgcagtttcctcgaccagtaa

SEQ ID NO: 74579 - protein, 660 aa, Roseovarius nubinhibens ISM
MAAKDNDDQKPDDQDAEISLDLSQTAIKKMIAEAREKGYITYDQLNQALPPDQVSSEQIEDVMSMLSEMGINIIEAEDVEEEEQRVTALAEVGKRGEVTLGSGKEEKLDRTDDPVRMYLREMGSVELLSREGEIAIAKRIEAGRNTMILGLCESPLTFQAITIWRDELLTEDILLRDVIDLEATFGNQLGDDEDEEAPVVAANVGEAPGKKSETTQELDADGNPISSDDDEDEDDQANMSLAAMEAALKPRVLETLDRIANDYEKLSEMQDSRISATLNEDGSFSAKQEATYQKLRSEIVELVNELHLHNNRIEALIDQLYGINQRIMSIDSAMVKLADQARINRREFIDAYRGRELDPNWLDDMASKSGRGWQMFMERSPEKVAELRADMAQVGQYVGLDISEFRRIVGQVQKGEQEARQAKKEMVEANLRLVISIAKKYTNRGLQFLDLIQEGNIGLMKAVDKFEYRRGYKFSTYATWWIRQAITRSIADQARTIRIPVHMIETINKLVRTGRQMLHEIGREPTPEELAEKLQMPLEKVRKVMKIAKEPISLETPIGDEEDSQLGDFIEDKNAVLPLDSAIQDNLKETTTRVLSSLTPREERVLRMRFGIGMNTDHTLEEVGQQFSVTRERIRQIEAKALRKLKHPSRSRKLRSFLDQ

SEQ ID NO: 74580 - DNA, 2025 bp, Erythrobacter sp. NAP1
  CDS (1)..(2025): transl_table=11
atggcctcgactgctaaagccgccgacaaagacgacgcaccgcttatcgatctcaatgaagcttcagtgaagaagctgatgaccaaggccaagaagaagggctacatcacgtatgatgagctcaacgcggccttgccgtcgggcgaaatgagccccgaccagatcgaagacatccagaccgcgctttccgaaatgggcgtccagatcgtcgaaaacgacgaagaagccgaggccgaggctgaacaggaagccgaagtcgaggaaatgtcggtcgaaggcgaggccgagaagaagaaagacaccaaggctgctgccaagcccgccgcgaagaaaaccggcaccggtgagcgcacggatgacccggttcgcatgtatctacgcgaaatgggcgcggtcgagctgctcagccgcgaaggcgaaatcgctatcgccaagcgtatcgaagctggccgcgacatgatgatcatgggcctgtgcgagagcccgatcaccttccacgcgatcatccagtggtccgaagctctgaattccgaagacatgcagctgcgcgagatcctcgatctcgacgctatgctttcgaaggaaccgccccctgacaagatggaggaggagaacgaagacgacgacggtgagatctcagaagaaaccgccggcccgaccattcgcgacgatgacgaggacgattctgacgagagcgaagacggtgaagacggcgaagaaggcgcatccaagaaggatgacgaggaagaggaagacaacaccctcagccttgcccagatggaagcggccttaaagcccgacgcgatcgagcgtttcgcccgcatcaccaagctgttcaagaccttcgagaaacttcaggcggagcgcgtcgaaactcttgcagcgggtaatgaattcccgaaggcgaaggaaaacaagtacgaaaagctctcggaagagctgaccgccgaagttgaaagcgtccagttccacgcgaccaagatcgaattcctggtcgacaacctctacgccttcaatcgtcgcctgaccgctcttggcggccagatgctgcgtcttgccgaacgtcacaagatcaagcgcatcgacttcctcaagtcctatgtaggcaacgagctcgacgatagctggattgctgccaacgccaagaaggacaagaagtgggccgccttcgccgagaaggaagaggccgcgatcgaacgcatccggaccgagatcaccgacattgccgcgcagaccggcatggcgcttcccgagttccgccgcatcgtgaacatggtgcagaaaggcgagcgcgaagcacgtattgcgaagaaagaaatggtcgaggcgaacctgcgtctcgtgatttccatcgccaagaaatacaccaatcgcgggctgcaattccttgatcttattcaggaaggcaacatcggcctgatgaaggccgtcgacaaattcgagtaccgtcgcggctacaagttcagcacttacgcgacatggtggatccgtcaggcgatcacccgttcgattgccgaccaggcgcgcactatccgcatcccggtccacatgatcgagacgatcaacaagctggtccgcacttcgcgccagttcctccacgaggaaggccgcgagcccacgccggaagaaatggcagcgcgcctctcaatgccactcgaaaaggttcgcaaggtgatgaagatcgccaaggaaccgatcagtctcgaaacgccgattggcgacgaggaagattcgcatctgggcgatttcatcgaggacaaaaacgccgtcatcccggtcgatgccgcgattcaggcaaacctcaaggagaccgtcactcgcgtcctcgcctcgctgaccccgcgcgaagagcgtgtgctgcgcatgcgtttcggcatcggcatgaacaccgaccacactctcgaagaggtcggccaacagttctcggtgacgcgcgaacgaatccgtcagatcgaggcgaaggcgctgcgcaagctcaagcacccgagccgcagccgcaagatgcgctccttcctcgaccagtaa

SEQ ID NO: 74581 - protein, 674 aa, Erythrobacter sp. NAP1
MASTAKAADKDDAPLIDLNEASVKKLMTKAKKKGYITYDELNAALPSGEMSPDQIEDIQTALSEMGVQIVENDEEAEAEAEQEAEVEEMSVEGEAEKKKDTKAAAKPAAKKTGTGERTDDPVRMYLREMGAVELLSREGEIAIAKRIEAGRDMMIMGLCESPITFHAIIQWSEALNSEDMQLREILDLDAMLSKEPPPDKMEEENEDDDGEISEETAGPTIRDDDEDDSDESEDGEDGEEGASKKDDEEEEDNTLSLAQMEAALKPDAIERFARITKLFKTFEKLQAERVETLAAGNEFPKAKENKYEKLSEELTAEVESVQFHATKIEFLVDNLYAFNRRLTALGGQMLRLAERHKIKRIDFLKSYVGNELDDSWIAANAKKDKKWAAFAEKEEAAIERIRTEITDIAAQTGMALPEFRRIVNMVQKGEREARIAKKEMVEANLRLVISIAKKYTNRGLQFLDLIQEGNIGLMKAVDKFEYRRGYKFSTYATWWIRQAITRSIADQARTIRIPVHMIETINKLVRTSRQFLHEEGREPTPEEMAARLSMPLEKVRKVMKIAKEPISLETPIGDEEDSHLGDFIEDKNAVIPVDAAIQANLKETVTRVLASLTPREERVLRMRFGIGMNTDHTLEEVGQQFSVTRERIRQIEAKALRKLKHPSRSRKMRSFLDQ

SEQ ID NO: 74582 - DNA, 1848 bp, Pseudoalteromonas tunicata D2
  CDS (1)..(1848): transl_table=11
atggagcaaactcctcagtcacaactaaaactcctgattcaaaaaggtaaagagcaaggctatttgacgttcgcagaagtgaacgatcaccttccacaggatataatcgattccgatcaggttgaagatatcattagcatgatcaatgacatgggtattcaggtttgtgaaagcgcacctgatgctgatgaattgatgatgcaggaaacaacaacagatgaagatgctgcagaagctgctgccgctgcacttgcaactgttgataaagaaattggtcgtacgactgatccagtacgcatgtacatgcgagaaatgggaacggttgagcttttaacacgtgaaggcgaaatccaaatcgctaaacggattgaagaaggcatcaatcaagtacaaatttctgttgctgaatacccagaagcaattacctatttacttgagcaatgggataaatatgaagctgaagagatccgcttaagcgatatcatttctggcttttttgattctgatgaagaacaatttccaattgcagcaacacacatcggctcagatttaaacgatgagcaactaaaagatgaagacgtcgacttagatgacgatgatgatgacgactcaaatgaagaagaagttgatttaggtccagaccctgagcttgctcgcgaaaactttgaaaaattacgtgatctttacaataaagcgcgtcttatttttgaagagaaaggtcgctctcacccagatgcgaaagaagcgattactgaaatcggcgaattattccgcacgtttaaattaatgcctaaacagtttgaccgcatggtaaataacatgcgcgacatgatggatagagttcgtgtacaagaacgtctgatcatgaaacaagcatgtcaaattgctaagttacctaaaaaaacctttattaagcattttgccaataatgaaagtaatggtgagtggctagatattgaaatcaatgctggtgaaaagtattcagataaacttgctgaatgtcgccctgaaatagagcgtagcttaaacaaactacgtaatatggaacaaaccacaggtttgagcgttgagcgcattaaagatatcaaccgtcgtatgagcattggtgaagcaaaagcccgccgtgcgaaaaaagaaatggttgaagctaacttacgtctagtaatttcaatcgccaaaaaatataccaaccgaggcttacaattcttggatcttattcaagaaggtaacattggtttgatgaaagcggttgataaatttgaatatcgtcgtggttataagttttcaacttatgctacgtggtggatccgccaagcaattactcgttcaattgccgaccaagcacgtacaatccgtatcccagttcatatgattgaaacaatcaataaactgaatcgcatttcgcgccaaatgttgcaagaaatgggtcgtgagccaaaccctgaagaattagctgagcgaatgatgatgcctgaggataaaatccgtaaggtattaaaaatcgctaaagagcctatttcaatggaaacgccaattggtgatgatgaagattcacatcttggtgattttattgaagatagcaccattgaatcaccaattgattctgcaacaatggaaagcttaaaaggcgcgactcacgaagttttagcgggtttaacggcgcgcgaagctaaagtattacgtatgcgttttggtatcgatatgaataccgaccacacgttagaagaagtaggtaaacaatttgatgtaacacgtgaacgtattcgtcaaattgaagccaaagcgttacgtaaattacgtcacccttctcgctcagacttattaaaaagcttcttagattttaaataa

SEQ ID NO: 74583 - protein, 615 aa, Pseudoalteromonas tunicata D2
MEQTPQSQLKLLIQKGKEQGYLTFAEVNDHLPQDIIDSDQVEDIISMINDMGIQVCESAPDADELMMQETTTDEDAAEAAAAALATVDKEIGRTTDPVRMYMREMGTVELLTREGEIQIAKRIEEGINQVQISVAEYPEAITYLLEQWDKYEAEEIRLSDIISGFFDSDEEQFPIAATHIGSDLNDEQLKDEDVDLDDDDDDDSNEEEVDLGPDPELARENFEKLRDLYNKARLIFEEKGRSHPDAKEAITEIGELFRTFKLMPKQFDRMVNNMRDMMDRVRVQERLIMKQACQIAKLPKKTFIKHFANNESNGEWLDIEINAGEKYSDKLAECRPEIERSLNKLRNMEQTTGLSVERIKDINRRMSIGEAKARRAKKEMVEANLRLVISIAKKYTNRGLQFLDLIQEGNIGLMKAVDKFEYRRGYKFSTYATWWIRQAITRSIADQARTIRIPVHMIETINKLNRISRQMLQEMGREPNPEELAERMMMPEDKIRKVLKIAKEPISMETPIGDDEDSHLGDFIEDSTIESPIDSATMESLKGATHEVLAGLTAREAKVLRMRFGIDMNTDHTLEEVGKQFDVTRERIRQIEAKALRKLRHPSRSDLLKSFLDFK

SEQ ID NO: 74584 - DNA, 1851 bp, Oceanospirillum sp. MED92
  CDS (1)..(1851): transl_table=11
atgtccgatacttctcagcaacagcagtctcgccttaaggaattgatcgcccgtggtaaggagcagggttacctaacctactccgaagtgaatgaccacctgccacaggatattgccgatccagatcaggttgaagatatcatccgcatgatcaatgacatgggtatatccgtgtcggaagaagctccagatgcagaaaccctgcttatgacagagggtgactctgcagaagaggcagatgaagaagcagtagcagcacttgccgccgttgaatctgacgctggccgtaccactgaccctgttcgtatgtatatgcgagaaatgggtacagtagagctgctgacgcgtgaaggcgaaatcagcattgctaagcgtatcgaagaaggacttcgtgaagtaatgtccgcggttgcctgcttcccaggcactgtagaaagcatccttgaagcttacaaactaacccttgaagaggaaggtcgcctgagcgacatcttcagcggttatatcgatgcagacgacgatgaagagatccctgctgccgtcattcctggctctgaagaagatctctctgatgaagacgatgacgaagacgaagacagcgatgacgatgacgatgaagaagatgagaaagagaaaggccctgaccctgaagaagcagcgcgtcgtttcggccttctttctgataactatgacgcattgctaatcgcattagacaagcatggccgtgatagcaaagagttcggcgctgctcaggttgaactgagcgaatcatttgcaccgattaaactggctcctcgctattatgaagcactggtaaaccaggttcgctccacgattgagaacattcgcaatcaggaacgtacgatcatgcgaatctgcactcaacgtgcaaaaatgccacggaaaacatttattaaagagttcccgggcaatgaagttaatgctgattggttcaatcaggttattgaatccggcgagagctattctcgtgcgatcaaaaccaatctgatcgaactgaagcgtgcgcagaaaaagctgattcaggcagagatcgaaacaggcattagtctcgccgagatcaaagaagttaatcgccgcatgtctattggcgaagcacgcgctcgacgtgccaagaaagagatggttgaagccaacctacgtctggttatctccatcgccaaaaagtatacaaaccgcggactgcaattcctggaccttatccaggagggcaacatcggtctgatgaaggctgttgataagtttgaataccgtcgtggttacaaattctctacctacgcaacatggtggatccgtcaggcaatcactcgctcgattgccgaccaggcgcgcacaatccgtattcctgttcacatgatcgagacgatcaacaaattgaaccgcatctcccgtcagatgcttcaggaaatgggacgagaagcaacgccggaagagctggctgaacgtatggaaatgccagaagataaagttcgcaaggtgctgaaaattgctaaagaacctatctctatggaaacaccaatcggtgacgatgaagattccagtctgggcgatttcattgaagatacaaccatctcgtctcctgtagactcagcaacaggcgaaggcctgcgcgaagcgactagagaggtactggctggtctgactgtacgtgaatctaaagttctacgtatgcgtttcggtatcgagatgaacaccgaccacacattggaagaagtcggcaagcagttcgacgttacgcgtgagcgtatccgtcagatcgaagctaaagcacttcgcaaacttcgtcacccaagccgctcagaacacttacgcggcttcctcgacgaacagtaa

SEQ ID NO: 74585 - protein, 616 aa, Oceanospirillum sp. MED92
MSDTSQQQQSRLKELIARGKEQGYLTYSEVNDHLPQDIADPDQVEDIIRMINDMGISVSEEAPDAETLLMTEGDSAEEADEEAVAALAAVESDAGRTTDPVRMYMREMGTVELLTREGEISIAKRIEEGLREVMSAVACFPGTVESILEAYKLTLEEEGRLSDIFSGYIDADDDEEIPAAVIPGSEEDLSDEDDDEDEDSDDDDDEEDEKEKGPDPEEAARRFGLLSDNYDALLIALDKHGRDSKEFGAAQVELSESFAPIKLAPRYYEALVNQVRSTIENIRNQERTIMRICTQRAKMPRKTFIKEFPGNEVNADWFNQVIESGESYSRAIKTNLIELKRAQKKLIQAEIETGISLAEIKEVNRRMSIGEARARRAKKEMVEANLRLVISIAKKYTNRGLQFLDLIQEGNIGLMKAVDKFEYRRGYKFSTYATWWIRQAITRSIADQARTIRIPVHMIETINKLNRISRQMLQEMGREATPEELAERMEMPEDKVRKVLKIAKEPISMETPIGDDEDSSLGDFIEDTTISSPVDSATGEGLREATREVLAGLTVRESKVLRMRFGIEMNTDHTLEEVGKQFDVTRERIRQIEAKALRKLRHPSRSEHLRGFLDEQ

SEQ ID NO: 74586 - DNA, 2133 bp, Xanthobacter autotrophicus Py2
  CDS (1)..(2133): transl_table=11
gtgcgttcaggctggtttaacgggatggcgtcaaaaaagccgctcccgggcgcaaaggcaaaaggtggtacggccgaggcgccgcgccgccgttctgctgttggcactcagcaggatccgcaggagaagtccatggcgaagcagtcttccgaagcgaccgaggctcccgagaaggagaccgacgcgcccgacgggccgttgctcgacctctccgacgccgccgtccggaagatgatcaagaatgccaagcgccgcggctatgtgacctacgagcagctcaatgaggtgatgccttccgaggaagtcacctccgagcagatcgaggacactctcgcgatgctcaacgacatgggcatcaacgtcatcgaggccgaggaagccgaggccgaagagggcgccgaggaaaccgagaccgccgaggagcccgaggaggccgaaggcggcgagctcgctgagcccgccccgcgcgccgtcgcgcgctccgagaccaagtccgagccggccgagcgcaccgacgatccggtgcgcatgtacctgcgcgagatgggatcggtggagctgctctcccgcgagggcgaaatcgccatcgccaagcgcatcgaggccggccgcgaggccatgatcgccggcctgtgcgagagcccgctgacgttccaggccatcatcatctggcgcgacgagctcaccgagggccgcgtgctgttgcgcgacatcatcgacctcgaggcgacctacgccggccccgagggcaagaacccgcccgcggccctcggcgaggaagccgcccttgcgcctgaggccggggaagacggccttctgggcgacgcccccggtcccgagggcgaggacgacgacatggaaaattccatgtcgctcgccgccatggaggcggagatcaagccgaaggtgctggaaaccttcgaccgcatcgcctcctcctacaccaagctgcggcgcctgcaggaccagaacgtcgaatccaagctgaagaacgagacgctgtcgccggcgcaggagcgcaaggcgaagaagctgaaggaagacctcgttggcgacgtgaagagcctgtccctcaaccaggcccgcatcgacgccttggtggagcagctctacgagatcaacaagcgcctcgtgggcctggaggggcgcctgctacgcctcgccgacagctatggcgtgacccgcgacgacttcctgaagaactacatgggcgcggagctggaccccaagtggctgctgcgggtctccaagctcggcaccaagggctggaagggctttgtcggccacgagaaggataccatccacgagatccgcggcgacatccacgcgctggccactgagaccgggctggaaatcgccgagttccgcaagatcgtgcagatggtgcagaagggcgagaaggaagcccgccaggccaagaaggaaatggtggaggccaacctgcgcctcgtcatctccatcgccaagaagtacacgaaccgcggcctgcagttcctggacctgatccaggagggcaacatcggcctgatgaaggcggtggacaagttcgagtaccggcgcggctacaagttctccacctatgccacctggtggatccggcaggccatcacgcgatccatcgccgaccaggcgcgcaccatccgcattcccgtgcacatgatcgagacgatcaacaagatcgtgcgcacgagccggcagatgctgcacgagattggccgcgagcccacacccgaggagctggccgagaagctcggcatgccgctcgagaaggtgcgcaaggtgctgaagatcgccaaggagcccatctccctcgaaacgcccatcggcgacgaggaggattcgcacctcggcgacttcatcgaggacaagaacgccatcctgcccatcgacgcggcgatccagtccaacctgcgcgagaccaccacgcgagttctggcctccctcaccccgcgcgaggaacgcgttctgcgcatgcgcttcggcatcggcatgaacacggaccacacgctggaagaagtgggccagcagttctcggtgacccgcgagcgtatccgccagatcgaggcgaaggcgctgcgcaagctcaagcacccctcgcgctcgcgcaagctgcggtcgttcctcgacaattga

SEQ ID NO: 74587 - protein, 710 aa, Xanthobacter autotrophicus Py2
MRSGWFNGMASKKPLPGAKAKGGTAEAPRRRSAVGTQQDPQEKSMAKQSSEATEAPEKETDAPDGPLLDLSDAAVRKMIKNAKRRGYVTYEQLNEVMPSEEVTSEQIEDTLAMLNDMGINVIEAEEAEAEEGAEETETAEEPEEAEGGELAEPAPRAVARSETKSEPAERTDDPVRMYLREMGSVELLSREGEIAIAKRIEAGREAMIAGLCESPLTFQAIIIWRDELTEGRVLLRDIIDLEATYAGPEGKNPPAALGEEAALAPEAGEDGLLGDAPGPEGEDDDMENSMSLAAMEAEIKPKVLETFDRIASSYTKLRRLQDQNVESKLKNETLSPAQERKAKKLKEDLVGDVKSLSLNQARIDALVEQLYEINKRLVGLEGRLLRLADSYGVTRDDFLKNYMGAELDPKWLLRVSKLGTKGWKGFVGHEKDTIHEIRGDIHALATETGLEIAEFRKIVQMVQKGEKEARQAKKEMVEANLRLVISIAKKYTNRGLQFLDLIQEGNIGLMKAVDKFEYRRGYKFSTYATWWIRQAITRSIADQARTIRIPVHMIETINKIVRTSRQMLHEIGREPTPEELAEKLGMPLEKVRKVLKIAKEPISLETPIGDEEDSHLGDFIEDKNAILPIDAAIQSNLRETTTRVLASLTPREERVLRMRFGIGMNTDHTLEEVGQQFSVTRERIRQIEAKALRKLKHPSRSRKLRSFLDN

SEQ ID NO: 74588 - DNA, 1929 bp, Rickettsiella grylli
  CDS (1)..(1929): transl_table=11
atggatttcgaacaacaacaatcccgtttacgagagcttattacacacggtaaaaaacaaggatttgtcacgtatgctgaaatcaatgaccatctgttagaagatattatctctgaagctgagcaagagcaactgcagcttgatgaaatcatcttgatgcttaatgatatcggcataccggtttatgaagttcccccggatatggaaacattactctcctcgagtattgtcaataatgcagaagaagagaatagttcagaaaatgtaactattttaggtaatatcaccactgagttaggtcgcacaacggatccggttcggatgtatatgcgtgaaatgggaaccgttgaattactgactcgcgaaggtgaaattaaactcgccaagcgtattgaagacggattgcaagccatactcgccgcacttgctcaatatcctgtcaatatttcccatatattgaacgagtatacgcggtatgaacaacaagaaatccgtttaaatgacattattagtggatttttagatctcgaagaattatccatacctcttgaattgccttctggaaagaatatcacgtccacagaaacccctgatgaacgttttaacagaagtgataaacgcacagatgacaaagataatgatgaaggtgatgatgctaaatctaaaatcagtgcaacggacgatgatgaaggttttggcgagctggatggtgggcctgacccagaattagcacatacacgctttgctgaattaaaagcccattatgaagcgtatattgccgcacaaaaaaaatggggacgtcatgataaaaaaaccataaaacaagccgtcctattagccgatgcgtttactaaatttaaattaatcccacgtcagctcgacaaattaacacgcaacatgcgcgggcttttagaaaaaattcgactccaagaacgtattattatgcgtttatgcgttaatgaagcaaaaatgccacgtctgcttttcattaatacgtttcccaaaaatgaaaccaatgaaaatttcctaaaaaaacatattcacgctaaaaaaagttactcatcccgtttaaaggagctactcgctcccatcacagccgcacaaaataaattacatgaattggaaaaaacgataggcatgaccatcactgaaattaaagaaattaatcgccaaatgtccgcaggagaaacgaaagcaagacgagcaaaaaaagaaatggttgaagccaatctacgattggttatttctattgctaaaaaatataccaatcgaggtttacaattccttgatttaattcaagaaggtaatattggtttaatgaaagcggtcgataaatttgaatatcgccgcggctataaattttcaacctacgccacgtggtggatacggcaagcgattactcgatccattgctgatcaggcacgtactattcgtattcctgtgcatatgatcgaaacgattaataaattaaaccggatttcacgtcaaatattacaagcaacaggaaaagaaccttcgcccgaagatctcagtaaaaaaatgggtttacctgaagataaaattcgaaaaattcttaaaattgctaaagaacctatttcgatggaaacacctatcggtgatgaagatggtgattcccacctgggtgattttattgaagacgccgccgctttatcgcctattgacgccgcgacaatagaaggtttacgcgaaacagcacaacgggtattagcctcactgacgccgcgagaagcgaaagtattgcgtatgcgctttggtattgatatgaatacggaccacacattggaagaagtcggcaaacaatttgatgtaacgcgtgaacgcattcgtcaaattgaagcaaaagctttacgtaagttacgtcatccgacacgttcagaacccctacgcagttttttagatcaagaataa

SEQ ID NO: 74589 - protein, 642 aa, Rickettsiella grylli
MDFEQQQSRLRELITHGKKQGFVTYAEINDHLLEDIISEAEQEQLQLDEIILMLNDIGIPVYEVPPDMETLLSSSIVNNAEEENSSENVTILGNITTELGRTTDPVRMYMREMGTVELLTREGEIKLAKRIEDGLQAILAALAQYPVNISHILNEYTRYEQQEIRLNDIISGFLDLEELSIPLELPSGKNITSTETPDERFNRSDKRTDDKDNDEGDDAKSKISATDDDEGFGELDGGPDPELAHTRFAELKAHYEAYIAAQKKWGRHDKKTIKQAVLLADAFTKFKLIPRQLDKLTRNMRGLLEKIRLQERIIMRLCVNEAKMPRLLFINTFPKNETNENFLKKHIHAKKSYSSRLKELLAPITAAQNKLHELEKTIGMTITEIKEINRQMSAGETKARRAKKEMVEANLRLVISIAKKYTNRGLQFLDLIQEGNIGLMKAVDKFEYRRGYKFSTYATWWIRQAITRSIADQARTIRIPVHMIETINKLNRISRQILQATGKEPSPEDLSKKMGLPEDKIRKILKIAKEPISMETPIGDEDGDSHLGDFIEDAAALSPIDAATIEGLRETAQRVLASLTPREAKVLRMRFGIDMNTDHTLEEVGKQFDVTRERIRQIEAKALRKLRHPTRSEPLRSFLDQE

SEQ ID NO: 74590 - DNA, 1821 bp, Oceanobacter sp. RED65
  CDS (1)..(1821): transl_table=11
atggccgttacacaacagtcccgactgaaggaactcattgccaaaggtaaagagcaaggttatctaacgtatgcccaggtaaacgaccaccttcctgatgatattgctactcccgagcaagtagaagacatcattcgcatgatcaatgatatcggcatcaccgtgtctgaagtggcaccggatgcagatgaattgaacatgggcgaagtcaccacagacgaagccgctattgaagaagctgctgccgccctcgccgcagtagaaaccgacgtaggtcgcacaaccgacccagtgcgtatgtacatgcgtgaaatgggtacagtagagctactgacccgtgaaggtgaaattgtcatcgctaagcgaatcgaagaaggtattcgtgaagtaatggccgccctttcttacttccctggcgctgttcgtaccgtattagacgcggtagaagaatccatggcggatgaagagatcaaccgtctaggtgatgtcttcaacggtttcatcgacgcaagcgacgatgatccagaaccggctacgcccgtttctgcggaagccgcagcagataaagatagcgacgacgatgacgacgattccagcgacgccccttctggtcctgacccagaagaagtaaaacgtcgtatggcggaaatcgaaaagcagcttgataaaaccgaaaaagccatcgaaaaacacggccgtggtagcaagcaagctgataaagaaggtgaaaaattggccgagctatttgcgccaatcaaactatcgccaaaatactttgatgacctagtgggcactgcccgtgacaacctagacttcattcgcgtgcaagagcgtcagatcatggtgatctgtactcgcaaagccaagatgaagcgtcaggagttcatcaagtctttccaaggtaacgaaggcaacgacagctggattgatgatctaattaacgctggtaaagactacagccaaatcatcgaaaaccacggctacgacctaaagcgtgcccagaagaaaattcgtcaagtaaaagaccgcgtaggtctagaaatctctgacatcaaagaaattaaccgccgcgtgagcattggtgaagcccgtgcccgccgtgcgaaaaaagaaatggtagaagccaacctacgtctggttatctccattgccaaaaaatacaccaaccgtggcctacagttcttggatctaatccaagaaggtaacatcggtttgatgaaagccgtagacaagttcgaataccgtcgtggttacaagttctccacttatgccacatggtggattcgtcaggctattacgcgttccatcgcagaccaagcgcgtactatccgtattccggttcacatgattgagaccatcaataaactgaaccgtgtaagccgtcagatgcttcaggaaatgggccgtgaagccactccagaagaactggctgagcgcatggatatgcctgaagacaagatccgcaaggtattgaagatcgccaaagagcctatctctatggaaaccccaatcggtgatgatgaagatagccacttaggtgacttcattgaagacgtgaacggtcacagcccgattgatacggccacagaaaccggtctaaccgacgccacacgctctgtactaagcggcctaaccgcccgtgaaagcaaagtactgcgtatgcgctttggtatcgacatgaacaccgaccacacgctggaagaagtaggtaagcaatttgacgtaacccgtgagcgtatccgtcagattgaagccaaggcactgcgtaaactacgccacccaagccgcagcgaccacctacgttcgttcctagatgagtaa

SEQ ID NO: 74591 - protein, 606 aa, Oceanobacter sp. RED65
MAVTQQSRLKELIAKGKEQGYLTYAQVNDHLPDDIATPEQVEDIIRMINDIGITVSEVAPDADELNMGEVTTDEAAIEEAAAALAAVETDVGRTTDPVRMYMREMGTVELLTREGEIVIAKRIEEGIREVMAALSYFPGAVRTVLDAVEESMADEEINRLGDVFNGFIDASDDDPEPATPVSAEAAADKDSDDDDDDSSDAPSGPDPEEVKRRMAEIEKQLDKTEKAIEKHGRGSKQADKEGEKLAELFAPIKLSPKYFDDLVGTARDNLDFIRVQERQIMVICTRKAKMKRQEFIKSFQGNEGNDSWIDDLINAGKDYSQIIENHGYDLKRAQKKIRQVKDRVGLEISDIKEINRRVSIGEARARRAKKEMVEANLRLVISIAKKYTNRGLQFLDLIQEGNIGLMKAVDKFEYRRGYKFSTYATWWIRQAITRSIADQARTIRIPVHMIETINKLNRVSRQMLQEMGREATPEELAERMDMPEDKIRKVLKIAKEPISMETPIGDDEDSHLGDFIEDVNGHSPIDTATETGLTDATRSVLSGLTARESKVLRMRFGIDMNTDHTLEEVGKQFDVTRERIRQIEAKALRKLRHPSRSDHLRSFLDE

SEQ ID NO: 74592 - DNA, 1863 bp, Vibrio sp. Ex25
  CDS (1)..(1863): transl_table=11
atggatcacaatccgcagtcacagctaaagtcacttgttattaaaggcaaggaacaaggctatctgacctacgccgaagtaaatgaccacctacctgctgaaatcgtagattcagaacaggtagaagacatcattcagatgatcaacgacatgggcattaaggtagtagaaactgctcctgatgctgatgatttagcactgaacgatgacacaaatattaccgatgaagatgcagccgaagctgcagccgctgcactgtctagcgtagagagtgagattggtcgtacaacagacccagtacgtatgtacatgcgtgagatgggtactgtcgaacttctaactcgcgaaggcgaaatcgacatcgcaaaacgtattgaagaaggtattaaccaagttcaatcgtctgttgctgaatacccaggtacgattccgtacattcttgagcaatttgacaaagttcaagctgaagaactgcgtcttactgaccttatttcaggttttgtagacccagatgctgacgacaccgctgcaccaacggcaacacacatcggttctgaactgactgaatctcagttagaagaagaagacgatgaagacgttgatgacgacgaagatagcgatgacgattcagatgattctgaagaagatgtaggtatcgatccagagttagcgctagagaaattcaaccaactacgcagcacctatcaaaatcttcaattagcaatcaacgagtacggctataacagcccgaaagcaaccgttgctaatgaaatgatgctagacgtattccgcgagtttcgtctaacgcctaaacagtttgatcacctagtgaatgaactgcgtactgctatggatcgcgttcgtactcaagaacgcctgatcatgaagtctgtggttgaatacggcaaaatgccgaagaaatcattcatcgcgctgttcactggtaatgaatcaagtgaagcttggttggatgaagttcttgcttcagacaagccatacgctgaaaagatcaaacgtaacgaagaagaaatccgtcgttcaatcgctaagctaaaaatgattgaagaagagacttctctgaacgtacagaacattaaagacatcagccgtcgtatgtctatcggtgaagcaaaagctcgccgtgcgaagaaagagatggttgaagcgaacttgcgtcttgtaatttctatcgcgaagaaatacaccaaccgtggtctacagttcttggatcttatccaggaaggtaacatcggtctgatgaaagcggtagataaattcgaatatcgtcgtggttacaagttctcgacttacgcaacgtggtggatccgtcaggcaatcactcgttcaatcgcggaccaagcacgtacgattcgtatcccggtacacatgatcgaaacgatcaacaagctcaaccgtatctctcgtcaaatgttgcaagagatgggtcgtgagccactaccggaagaactggctgagcgcatgcagatgccagaagacaagattcgcaaagttctgaaaatcgctaaagagcctatctcaatggagacaccaatcggtgacgacgaagattcgcatctaggtgattttatcgaagatacaacgctagaactgccgctagattctgcaactgcaactagccttaaagtggcgacaaaagacgtgcttgcaggtctaacgccacgtgaagcgaaagtacttcgtatgcgctttggtattgacatgaacactgaccatactctagaagaagttggtaagcagttcgacgttactcgtgagcgtatccgtcagatcgaagcaaaagcactacgtaaacttcgtcacccaagccgctcagagactctgcgcagcttcctagacgaataa

SEQ ID NO: 74593 - protein, 620 aa, Vibrio sp. Ex25
MDHNPQSQLKSLVIKGKEQGYLTYAEVNDHLPAEIVDSEQVEDIIQMINDMGIKVVETAPDADDLALNDDTNITDEDAAEAAAAALSSVESEIGRTTDPVRMYMREMGTVELLTREGEIDIAKRIEEGINQVQSSVAEYPGTIPYILEQFDKVQAEELRLTDLISGFVDPDADDTAAPTATHIGSELTESQLEEEDDEDVDDDEDSDDDSDDSEEDVGIDPELALEKFNQLRSTYQNLQLAINEYGYNSPKATVANEMMLDVFREFRLTPKQFDHLVNELRTAMDRVRTQERLIMKSVVEYGKMPKKSFIALFTGNESSEAWLDEVLASDKPYAEKIKRNEEEIRRSIAKLKMIEEETSLNVQNIKDISRRMSIGEAKARRAKKEMVEANLRLVISIAKKYTNRGLQFLDLIQEGNIGLMKAVDKFEYRRGYKFSTYATWWIRQAITRSIADQARTIRIPVHMIETINKLNRISRQMLQEMGREPLPEELAERMQMPEDKIRKVLKIAKEPISMETPIGDDEDSHLGDFIEDTTLELPLDSATATSLKVATKDVLAGLTPREAKVLRMRFGIDMNTDHTLEEVGKQFDVTRERIRQIEAKALRKLRHPSRSETLRSFLDE

SEQ ID NO: 74594 - DNA, 1845 bp, Alteromonadales bacterium TW-7
  CDS (1)..(1845): transl_table=11
atggatccaactcctcagtcacaattaaaacttctgattcaaaaaggtaaagagcaaggctacttaacttttgcagaagtaaatgatcaccttccacaagacataattgactcagatcaagtagaagatatcataagcatgattaatgacatgggtattaaggttagcgaaaacgcgcctgatgccgatgaactaatgatgcaagaaacaacgacagacgaagacgcagctgaagctgccgctgctgcacttgctacggtagaaaaagaaattggccgcactaccgatccagttcgcatgtacatgcgcgaaatgggcactgttgaacttcttacacgtgaaggcgaaattgttatcgctaagcgtattgaagaagggatcaaccaagtacaaatttcagttgctgaataccctgaagcaatcacttacctactagagcagtgggataagtttgaagcagaagaaatgcgtttaagcgatatcatcgttggtttcattgatccaaacgaagatgaagcgccaatttcagcaactaacatcggttcagaattaagtgaaaaacaacttgatgacgatgatgaagacgatgacaaaagtgacgatgatgaagatgaagaagaagtagatacaggcccagatcctgaagaagctcgaattcattttgaaaacttacgtgatttatacaataaagcacgtgatacgtttgaagctaaaggtcgttcgcatcctgattcacaagccgccatttttgaaattggtgagcttttcagaaccttcaagctaattcctaaacagtttgatcgcatggttaacaacatgcgcgaaatgatggatcgtgttcgtgttcaagaacgtctaatcatgaaacaagctgtacaaattgctaagctacctaaaaaagcattcgttaagcactttgctaataacgaaacagatccttcgtgggttgatttagaaatttcaaacaacgagaaatactcagctaaacttgaagaagttaaacctgaaataattcgttgtatcaataagctatctattattgagcaaacaactggtttaagcatagagcgtattaaagacattaaccgtcgtatgagtattggtgaagcaaaagcgcgccgtgcgaaaaaagaaatggttgaagctaatttacgtcttgtaatctcaattgctaaaaaatacacaaaccgtggtttacagttcttggatttaatccaagaaggtaatattggtttgatgaaagcggtagataagtttgaataccgtcgtggttataagttctctacttatgctacgtggtggatacgtcaagctatcactcgctctattgccgaccaagcaagaactatccgtatcccggtacatatgatcgaaacgattaataaacttaaccgtatctctcgtcaaatgttacaagaaatgggtcgtgagccaaatcctgaagaattagcagaacgcatgatgatgcctgaggataaaatccgtaaggtactaaaaattgctaaagagccaatttcgatggaaacaccaatcggtgatgatgaagattcgcacttaggtgactttatcgaagatactaccattgattcgccaattgattcggcaacaatggagtcgcttcgtggtgcaactaacgatgtactagccggcttaacagcgcgtgaagctaaagtacttcgtatgcgctttggtatcgatatgaataccgaccacaccttagaagaagtaggtaagcagtttgatgtaacacgtgagcgtattcgtcaaatagaagcgaaagcactgcgtaaattacgccatccttctcgctcagatttactaaaaagctttttagacgctaagtaa

SEQ ID NO: 74595 - protein, 614 aa, Alteromonadales bacterium TW-7
MDPTPQSQLKLLIQKGKEQGYLTFAEVNDHLPQDIIDSDQVEDIISMINDMGIKVSENAPDADELMMQETTTDEDAAEAAAAALATVEKEIGRTTDPVRMYMREMGTVELLTREGEIVIAKRIEEGINQVQISVAEYPEAITYLLEQWDKFEAEEMRLSDIIVGFIDPNEDEAPISATNIGSELSEKQLDDDDEDDDKSDDDEDEEEVDTGPDPEEARIHFENLRDLYNKARDTFEAKGRSHPDSQAAIFEIGELFRTFKLIPKQFDRMVNNMREMMDRVRVQERLIMKQAVQIAKLPKKAFVKHFANNETDPSWVDLEISNNEKYSAKLEEVKPEIIRCINKLSIIEQTTGLSIERIKDINRRMSIGEAKARRAKKEMVEANLRLVISIAKKYTNRGLQFLDLIQEGNIGLMKAVDKFEYRRGYKFSTYATWWIRQAITRSIADQARTIRIPVHMIETINKLNRISRQMLQEMGREPNPEELAERMMMPEDKIRKVLKIAKEPISMETPIGDDEDSHLGDFIEDTTIDSPIDSATMESLRGATNDVLAGLTAREAKVLRMRFGIDMNTDHTLEEVGKQFDVTRERIRQIEAKALRKLRHPSRSDLLKSFLDAK

SEQ ID NO: 74596 - DNA, 1803 bp, marine gamma proteobacterium HTCC2143
  CDS (1)..(1803): transl_table=11
atgagtgaaaccgaacagcagcagtctcgtctaaagacgctaattgccaaaggaaaagagcagggctacctcacatatgctgaggtaaatgaccacctgccacaagatatttctgaccctgatcaggttgaagacatcattcagatgatcaacgatctcggtatacaggtttttgagacggctcctgatgcggacgaaatactcctcacagaagaggactctactgatgatatcgccgccgccgaggcagcagcagcgcttgccgcagtagagacagaagcgggtagaaccaccgaccccgtgcgcatgtatatgcgcgagatgggcaccgtagaactgctcactcgagaaggcgagatcgcaatcgccaagcgcattgaagaaggtattcgcgacatcatggcagctgtcgcatattaccccggcgccgtgcaagacgtgatcgacgattacgacaaagtggccaccgaggagcgccgcttagccgacattctggttggctatctgaacccaacagatgttgtcccccctgccgcacagcaagctgccgcagcggtttccactgatgacgacgatgacgaaacaccgtcaggtccggatcccgaagaagccaaaaaacgcttcaccgctttgcgtaaacaacacaacaaactcgataaagcgattgaaaaacatggtcgctacagcaaagagtcggctaaagagctgcaaaagctgggcgaagtcttcaagtttttcaaactcacccccaaagtattcgagcccctgtctattcgggtccgctcaaagctcaatgtcattcgttccaatgaacgcctgattatgaacacctgtgtcagacaggcgaaaatgacccgcagagactttgttaaatcgtttcagggacaggaaaccaatcttgactggatcgaacagcagatcaaagctcatgaagatgtagcaccggttcttgaggctaataaagaagagatccttcgagcacagcgtaaaattgctcaaatagaaacacaaacaggtctgacaattttagacattaaagaaatcaatcgcagaatgtccattggcgaagcacgtgcacgtcgcgccaagaaagaaatggtggaagccaatttacgtctggtaatttctatcgcgaagaagtacaccaaccgcggtttacagttcctcgacttaattcaggaaggcaatatcggcctgatgaaagcggttgataaatttgaatatcgtcgtggctataagttctcaacttatgctacctggtggattcgtcaggcgattacccgctctatcgccgaccaagcccgcaccattcgtattccggtgcatatgattgaaaccatcaacaagctcaaccgtatctctcggcaaatgctgcaggaaatgggacgcgagcccacacctgaagagctgggcgaacgcatggacatgcctgaggacaaagtccgcaaggtactcaaaattgccaaagaacccatctcaatggaaacccctatcggtgacgacgaagactcgcatctgggtgatttcatcgaagataacaccattgcccaaccagtagactctgccactggacaaggcctacaagaagcgacaaaagacgtgcttggcggccttactgcacgagaagccaaggtattgcggatgcgctttggtatcgatatgaatacagatcatacgctggaggaagtcggcaagcagttcgacgtaacccgcgaacgtattcgccaaattgaagccaaggcactgcgtaaactccgtcacccttctcgctcagaccacctgcgcagctttctcgacgactga

SEQ ID NO: 74597 - protein, 600 aa, marine gamma proteobacterium HTCC2143
MSETEQQQSRLKTLIAKGKEQGYLTYAEVNDHLPQDISDPDQVEDIIQMINDLGIQVFETAPDADEILLTEEDSTDDIAAAEAAAALAAVETEAGRTTDPVRMYMREMGTVELLTREGEIAIAKRIEEGIRDIMAAVAYYPGAVQDVIDDYDKVATEERRLADILVGYLNPTDVVPPAAQQAAAAVSTDDDDDETPSGPDPEEAKKRFTALRKQHNKLDKAIEKHGRYSKESAKELQKLGEVFKFFKLTPKVFEPLSIRVRSKLNVIRSNERLIMNTCVRQAKMTRRDFVKSFQGQETNLDWIEQQIKAHEDVAPVLEANKEEILRAQRKIAQIETQTGLTILDIKEINRRMSIGEARARRAKKEMVEANLRLVISIAKKYTNRGLQFLDLIQEGNIGLMKAVDKFEYRRGYKFSTYATWWIRQAITRSIADQARTIRIPVHMIETINKLNRISRQMLQEMGREPTPEELGERMDMPEDKVRKVLKIAKEPISMETPIGDDEDSHLGDFIEDNTIAQPVDSATGQGLQEATKDVLGGLTAREAKVLRMRFGIDMNTDHTLEEVGKQFDVTRERIRQIEAKALRKLRHPSRSDHLRSFLDD

SEQ ID NO: 74598 - DNA, 1821 bp, marine gamma proteobacterium HTCC2080
  CDS (1)..(1821): transl_table=11
atgtccgaaaaagtgcatcagcaatcgcgcctcaaagcgctaattgctaagggtaaggagcagggctacctcacctacgccgaagtcaacgatcacctacctcaagatatttctgaacccgatcaggttgaagacatcattcaaatgatcaacgacatgggtattcaggtctttgagcaagcccccgatgctgacgaattgatcctgactgaaggtgaccggtctgctgacgagatcgcggccgctgaagccgctgccgctcttgccgctgttgaaaacgaagccggacgcactaccgaccctgttcgcatgtacatgcgggaaatgggtacggttgaactgctgacccgcgaaggcgagatcgttatcgccaagcgcattgaggaaggtattcgtgagctaatggccgcgatggcgcactacccgggtgtagcccggaaacttagcaacgcctatgacatggtggccaaggaagagcgcaaactttcagacattttaattggctacctcgatccggcagagcacgtcccttcagcgcaagaaatggcggaagccgccgaagccgccgctgcaaccgctaccgatgacgacgacgacactgaagtcgagacgggaccagacccggttgaagcaaagaaacgatttaccgcattaaagcgacagtgcaccaaaactgaaaaagccattgctacccacggctacggtcacaaaaccgcgaccgcggaaatggacaagttgggcgagctgtttaagttcttcaagcttaccccccgcgtatttgacccactcattgatgagccgcgtgaatcgctgtacatcattcgcaagcaggaacgagccatcatgcgcattgccgttcgcgagtgtcgtatggatcgcaaagagttcattaagagtttctcgggttctgaaagcgacagccgctggatttctcgtgtcgctagaaagaaggacattggtgcgcgcctggcactgcacaaagatgatattcaacggatgcagcgacgcattagcgaagtcgagcaagcaaccgggctaagcgtggccgagattaaggaaattaatcgccgcatgagcatgggtgaagccagagctcgccgtgccaagaaagaaatggtggaagccaaccttcgtctggttatctccatcgcgaagaagtacaccaaccgcggattgcagttcctcgatcttattcaggaaggcaacattggcttgatgaaggcggtcgataaatttgagtatcgacgcggttataagttttcgacctacgccacttggtggattagacaggccattacccgatcgattgctgatcaggcccgcactatccgtattccagtacatatgatcgagaccattaacaagctcaatcgtatttcacggcagatgctgcaagaaatggggcgtgaacccacgccagaggaactgggtgagcgcatggaaatgcctgaggacaaagtccgcaaggtgttgaaaattgcgaaagaacccatttctatggaaacacccattggcgacgacgaagattcgcacctgggcgacttcattgaagacgtcaccatatccagtcccgtcgattcggccactgaagagggcctgactgaagcgacccaagatgtcctagcaggactgaccgctagggaagccaaggtactacgcatgcgctttgggattggcatgaacaccgaccacaccctagaggaagttggtaaacagttcgatgtaacacgggaacgtatccgtcagatcgaagccaaagctttgcgtaaattgcgtcatcccacgcgatctgattaccttcgcagcttcttagacgagtaa

SEQ ID NO: 74599 - protein, 606 aa, marine gamma proteobacterium HTCC2080
MSEKVHQQSRLKALIAKGKEQGYLTYAEVNDHLPQDISEPDQVEDIIQMINDMGIQVFEQAPDADELILTEGDRSADEIAAAEAAAALAAVENEAGRTTDPVRMYMREMGTVELLTREGEIVIAKRIEEGIRELMAAMAHYPGVARKLSNAYDMVAKEERKLSDILIGYLDPAEHVPSAQEMAEAAEAAAATATDDDDDTEVETGPDPVEAKKRFTALKRQCTKTEKAIATHGYGHKTATAEMDKLGELFKFFKLTPRVFDPLIDEPRESLYIIRKQERAIMRIAVRECRMDRKEFIKSFSGSESDSRWISRVARKKDIGARLALHKDDIQRMQRRISEVEQATGLSVAEIKEINRRMSMGEARARRAKKEMVEANLRLVISIAKKYTNRGLQFLDLIQEGNIGLMKAVDKFEYRRGYKFSTYATWWIRQAITRSIADQARTIRIPVHMIETINKLNRISRQMLQEMGREPTPEELGERMEMPEDKVRKVLKIAKEPISMETPIGDDEDSHLGDFIEDVTISSPVDSATEEGLTEATQDVLAGLTAREAKVLRMRFGIGMNTDHTLEEVGKQFDVTRERIRQIEAKALRKLRHPTRSDYLRSFLDE

SEQ ID NO: 74600 - DNA, 2217 bp, Candidatus Desulfococcus oleovorans Hxd3
  CDS (1)..(2217): transl_table=11
atggcaaagacaccctctgtgaaaaagaaacccgcatccaccggaaagccgggtaccgcaacgggcaagccggccaaggcggctaaaaaagccgccttggcaaaaccggcgaacaagaaagcggcgccaaagaaggccgctcccgtaaaaggtgctacccgcaagacagcgtccgggacgactgccagtgctgcctcgccggataaagtaaaaaagagcgggccggcagtccggaaggcgggcggatcatctgaaaaaccggggaaggcgggtgctgccgtcacggccaggccgaagaaaaagactgcggtaaagcagaaacctgtgaaaaaggctgccgctgtcaaggcggcagccgacaggaaacccaaggcaggagccgtcgctgaaaagaagcgaaaagtgagcccagcggccggtaaggcggggaagaaggccccggccggcaaaaaacggcaggcagcggcatctcccccgcctcagaatttcaagcagaaactgagcgggctgatcgccaaggggaaaaagcagggagaactgacctacgaggagattgccaaggcaattgaggccaatgatattcccaccgatcagatggatgatctgctggtgcatctggatgatctggatatttcggtggtgaaaaaggccgatcaggcggatgattccggagaagacggggcaaagagtaccacccgcggcgacagcccggtgacttatgattcagacccgggttcggtgaccgatacggtcaagatgtaccttcgggagatgggtctggtcaccctgctgagccgggagggagaggtcgagattgccaagaagatcgaagcaggggaacaggaagccttaaggggcatgctggataccgccgttggggtggagagcatcatcgcctacggcgataatattgatgtcggcaatctgcgtcccaaatcggttttaaaggatgtggatgaaggtgatgcaggagaggaagagatcctgcggatcgatgcgtttgccgccaccattcggcagattaaagcactggatgcaaccatccagccccttcggcagaaacacctgtccgtttcgctctccgcaactgaacgcaaaaccgttgccgagcagctcacccggaagaccgacgagatttttgaactccttcttccgtggcggctggagagtgaagtgctggatgccatggaggaacggattcaagatgagatcaagtggtttgacaccatggagcagaccattgatcgacggctcgccgggctgggagccggaggcgccgtttccactatccggtcgaaaatgaaaacaaagaccgggtttgtaaactgggcctacccgcgcatgcagaccaccaaggtgcatcttgccgcgttttacgacgagatcaaatcccttgaaaggcagatggagatccgcgaacgggccatcatggccgaccgtcgcctgctgcggaaaaccatgaagaaaatagatgacggctatctgcgggccaaggcgtccaagagcgagctgatccgggccaacctgaggctggtggtcagtatcgcaaaaaaatacaccaaccggggcctgcagttcctggacctgatccaggagggcaacgtggggctgatgaaggccgtggataaattcgaataccgtcgcggctacaagttcagtacctatgccacctggtggattcgtcaggccattacccgggccatcgcggaccaggccagaaccatccgtattccggtccacatgatcgaaaccattaataagctgatccggacctcccggtaccttgtgcaggagcggggctacgagccgtcgcccgaagagatcgcggaaaagatggagatcccccttgaaaaggtccggcgggtgctcaagatcgccagggagcccatctctcttgaaacccccatcggcgaagaggaagacagccacctgggcgattttatcgaggacaagaagttcatgattccttcggaagccgcggtcagcatgaacctgtccgaacagacaagaaaggtgctggccacgttgacgcccagggaggagaaggtgcttcgcatgcgtttcggcatcggcgaaaaggcagaccatacgctggaggaggtcggcagggattttgccgtgacccgggagcgcattcgccagatcgaggccaaggccttgcgaaagcttcggcaccccacacggagcaagatgctcaaacattttatcgagtcctga

SEQ ID NO: 74601 - protein, 738 aa, Candidatus Desulfococcus oleovorans Hxd3
MAKTPSVKKKPASTGKPGTATGKPAKAAKKAALAKPANKKAAPKKAAPVKGATRKTASGTTASAASPDKVKKSGPAVRKAGGSSEKPGKAGAAVTARPKKKTAVKQKPVKKAAAVKAAADRKPKAGAVAEKKRKVSPAAGKAGKKAPAGKKRQAAASPPPQNFKQKLSGLIAKGKKQGELTYEEIAKAIEANDIPTDQMDDLLVHLDDLDISVVKKADQADDSGEDGAKSTTRGDSPVTYDSDPGSVTDTVKMYLREMGLVTLLSREGEVEIAKKIEAGEQEALRGMLDTAVGVESIIAYGDNIDVGNLRPKSVLKDVDEGDAGEEEILRIDAFAATIRQIKALDATIQPLRQKHLSVSLSATERKTVAEQLTRKTDEIFELLLPWRLESEVLDAMEERIQDEIKWFDTMEQTIDRRLAGLGAGGAVSTIRSKMKTKTGFVNWAYPRMQTTKVHLAAFYDEIKSLERQMEIRERAIMADRRLLRKTMKKIDDGYLRAKASKSELIRANLRLVVSIAKKYTNRGLQFLDLIQEGNVGLMKAVDKFEYRRGYKFSTYATWWIRQAITRAIADQARTIRIPVHMIETINKLIRTSRYLVQERGYEPSPEEIAEKMEIPLEKVRRVLKIAREPISLETPIGEEEDSHLGDFIEDKKFMIPSEAAVSMNLSEQTRKVLATLTPREEKVLRMRFGIGEKADHTLEEVGRDFAVTRERIRQIEAKALRKLRHPTRSKMLKHFIES

SEQ ID NO: 74602 - DNA, 1851 bp, Pseudomonas putida GB-1
  CDS (1)..(1851): transl_table=11
atgtccggaaaagcgcaacagcagtctcgtatcaaagagttgatcacccgcggtcgtgagcagggctacctgacttacgcggaggtcaacgaccacctgcctgaggatatttcagatccggaacaggtggaagacatcatccgcatgatcaacgacatggggatcaacgtattcgagagtgctccggatgcggatgcccttctgttggcggaagccgacaccgacgaagccgcggccgaagaagccgctgctgcgttggcggccgttgaaaccgatatcggccgcacgaccgacccggtgcgcatgtacatgcgcgaaatgggtactgtcgagctgctgacccgtgaaggcgagatcgaaatcgccaagcgtatcgaggaaggcattcgtgaagtcatgggcgccatcgcccacttcccgggcactgtcgattacattctcggcgaatatgaccgcgtcaccaccgagggtggccgcctgtccgacgttctcagcggctacatcgaccctgacgacaacattgctgcgccgaccgaagaagtgccgatcccaggcaccaaggccgctgctgcgaaggaagagtccgacgacgaagaggaagagtccgaaagcggtgacgacgaggaagaggccgagagcggcccggacccggtagtcgcggctcaacgcttcggtgcggtatccgatcaacttcaggcaacctccaaggtcctgaagaaaaacggtcgtggccacaaggaaagcatcgaggcccttcaggccctggctgacctgttcatgccgatcaagcttgtaccgaagcagttcgaggtactggtcgagcgtgtacgtgacgccctgaaccgtctgcgccagcaagaacgcgccatcatgcagctgtgcgtccgtgacgcccgcatgccgcgtgccgacttcctgcgcatgttcccgagcaacgaaaccgaccagacctggagcggtgacctggccaagcgcaacaccaagtgggctgctgccctgggtgaaaaggacgcagccatcgtcgcttgccagcagaaactgatcgaccttgagaccgaaaccggcttgaccgttgccgagatcaaggaaatcaaccgtcgcatgtcgatcggtgaagccaaggcccgccgcgccaagaaagaaatggtcgaggcgaacctgcgtctggtgatctccatcgccaaaaagtacaccaaccgtggcctgcagttcctcgacctgatccaggaaggcaacatcggcttgatgaaagcggtggacaagttcgaataccgccgcggctacaagttctcgacctatgccacctggtggatccgtcaggcgatcacccgctcgatcgccgaccaggcacgcaccatccgtattccggtgcacatgatcgagacgatcaacaagctcaaccgtatttcccgccagatgctgcaggaaatgggtcgcgaaccgaccccggaagagctgggcgagcgcatggaaatgcctgaggacaagatccgcaaggtactgaagatcgccaaagagccgatctccatggaaaccccgatcggtgacgacgaagattcgcacctgggcgacttcatcgaggactcgaccatgcagtccccgattgacgtggccacggtcgaaagcctcaaggaagccacccgcgacgtgctctcgggcctgaccgcacgcgaagccaaggtgctgcgcatgcgtttcggtatcgacatgaacaccgaccacaccctcgaagaggtgggcaagcagtttgacgtaacccgtgagcggattcgtcagatcgaagcgaaggcgttgcgcaaactgcgccacccgactcgcagcgagcacctgcgctccttcctcgacgagtga

SEQ ID NO: 74603 - protein, 616 aa, Pseudomonas putida GB-1
MSGKAQQQSRIKELITRGREQGYLTYAEVNDHLPEDISDPEQVEDIIRMINDMGINVFESAPDADALLLAEADTDEAAAEEAAAALAAVETDIGRTTDPVRMYMREMGTVELLTREGEIEIAKRIEEGIREVMGAIAHFPGTVDYILGEYDRVTTEGGRLSDVLSGYIDPDDNIAAPTEEVPIPGTKAAAAKEESDDEEEESESGDDEEEAESGPDPVVAAQRFGAVSDQLQATSKVLKKNGRGHKESIEALQALADLFMPIKLVPKQFEVLVERVRDALNRLRQQERAIMQLCVRDARMPRADFLRMFPSNETDQTWSGDLAKRNTKWAAALGEKDAAIVACQQKLIDLETETGLTVAEIKEINRRMSIGEAKARRAKKEMVEANLRLVISIAKKYTNRGLQFLDLIQEGNIGLMKAVDKFEYRRGYKFSTYATWWIRQAITRSIADQARTIRIPVHMIETINKLNRISRQMLQEMGREPTPEELGERMEMPEDKIRKVLKIAKEPISMETPIGDDEDSHLGDFIEDSTMQSPIDVATVESLKEATRDVLSGLTAREAKVLRMRFGIDMNTDHTLEEVGKQFDVTRERIRQIEAKALRKLRHPTRSEHLRSFLDE

SEQ ID NO: 74604 - DNA, 1851 bp, Marinobacter sp. ELB17
  CDS (1)..(1851): transl_table=11
atgtcgggcaattcgcaaaaatcacgtttaaaagacctcatcgcgcgaggcaaggaacaaggttacctgacttacgccgaggtgaacgatcaccttccggaagacatcgctgacccggaccaggtcgaagacatcattcgcatgatcaacgacatgggcattcaggtatctgaagttgcaccagacgctgacacgttgattatgactgatggtgattcaaccgccgatgaagcggcgactgccgaagccgcagcggctctggccgcagtagaatccgacgccgggcgcaccaccgacccggtgagaatgtacatgcgcgagatgggtaccgttgaactgctgacccgcgaaggcgaaattgttatcgccaagcgtatcgaagaaggcattcgcgacgtgatggcggcggttgcgcactttcccggcaccaccggcaccgtaatccaaggctacgatcgcattgtcgagaatgaaggccggttgagcgatattgttgccggctttcttgatccggacgacgctgagccgttcatgccagaagagcctgccccggcggcgcctgccagcgccgaagaatcagacagcgacgacgatgcagatgatgccgaagaagaagaaactgagagcggtccagatcccgaagagacccgcctgcgctttggcctgctaaaagaaaaactggcagtcgccgatgagctcttggaacagcacggccgcagcgacaagcgcacccaaaaagccctgaacgagctgggcgcggtgtttgccccgttcaaactaggcaacaaagcgtttgatggactcgtaaacgttgttcgttccaccaacgacatgatccgtcagaatgagcgcaccatcatgcgcatctgcattcgcgaaagtaagatggatcgtaaagaatttatcaagtcgttccccggcaacgagatcaacttagactgggctgaaaaaattgctcgcagcaagaagccctatgcttctgcgatttccgagcgcctggacgaaatcgtgcgcttacaaaagcgcattaaaaacgtacagttggaagtagctttagacgttgtcgacatcaaggaaatcaaccgccgggtgtccattggcgaagccaaagcccgccgcgccaagaaagaaatggtagaggcgaacctgcgcctggtgatttccattgcaaaaaaatacaccaaccgcggccttcaatttctcgacctgattcaggaaggcaacatcggcctgatgaaagcagtcgacaagtttgaatatcgccggggctacaagttctcaacctacgctacttggtggattcgccaggccattactcgctccatcgcggatcaggcccgcaccatccgtattccggtgcacatgattgaaaccatcaacaagctgaaccgcatttcgcgccagatgttgcaggaaatgggccgcgagcccacgccggaagagctgggcgagcgcatggaaatgccggaagacaagattcgcaaagtgctgaaaatcgctaaagagccgatctccatggaaaccccgattggcgacgacgaagacagccatctgggcgatttcattgaagacatccaagccttgtcgccggttgattccgctaccgccgaaggcctgcgcgaagccactcgctcggtattggccggcttaaccgcccgcgaatcaaaagtactgcgcatgcgctttggtatcgaaatgaacaccgaccacacgttggaagaggtcggcaaacaatttgatgttacccgcgagcggattcgtcaaattgaagccaaagccctgcgtaaactgcgccatccatcgcgttcggaccatttgcgcggctttatcgacgatcaaggcaacacttaa

SEQ ID NO: 74605 - protein, 616 aa, Marinobacter sp. ELB17
MSGNSQKSRLKDLIARGKEQGYLTYAEVNDHLPEDIADPDQVEDIIRMINDMGIQVSEVAPDADTLIMTDGDSTADEAATAEAAAALAAVESDAGRTTDPVRMYMREMGTVELLTREGEIVIAKRIEEGIRDVMAAVAHFPGTTGTVIQGYDRIVENEGRLSDIVAGFLDPDDAEPFMPEEPAPAAPASAEESDSDDDADDAEEEETESGPDPEETRLRFGLLKEKLAVADELLEQHGRSDKRTQKALNELGAVFAPFKLGNKAFDGLVNVVRSTNDMIRQNERTIMRICIRESKMDRKEFIKSFPGNEINLDWAEKIARSKKPYASAISERLDEIVRLQKRIKNVQLEVALDVVDIKEINRRVSIGEAKARRAKKEMVEANLRLVISIAKKYTNRGLQFLDLIQEGNIGLMKAVDKFEYRRGYKFSTYATWWIRQAITRSIADQARTIRIPVHMIETINKLNRISRQMLQEMGREPTPEELGERMEMPEDKIRKVLKIAKEPISMETPIGDDEDSHLGDFIEDIQALSPVDSATAEGLREATRSVLAGLTARESKVLRMRFGIEMNTDHTLEEVGKQFDVTRERIRQIEAKALRKLRHPSRSDHLRGFIDDQGNT

SEQ ID NO: 74606 - DNA, 1830 bp, Moritella sp. PE36
  CDS (1)..(1830): transl_table=11
atggaatcccctcaatcacaattaaaactacttgtcgctaaaggtaaagaacaaggttacctaacttatgcagaagtaaatgatcacttaccacaagatattgtagactcagatcaggttgaagatattattcaaatgatcaatgacatgggtattcaagtgctagaaacagcacctgatgcagatgatttgttgatggcagaaaatacaacggcaccagatgacgatgccgccgaagccgcagccgcagcgcttgcttctgtagaatctgaaattggccgaactaccgaccctgtgcgtatgtacatgcgtgagatgggtaccgttgaattattgactcgtgaaggcgagatcgtaattgccaaacgtattgaagaaggtatctatgcggtacaaactgccgttgcagaatacccagaagcaattaactcgttattagctgaatatgacaagttccttgctgaagaatcacgcttaagtgacatcatcactggtttcatcgatcccaatgcggacgatgtagcaccaacagcaacacatatcggttctgaagttaccaagaaacaaaatgaatctgatagtactgatgatgacgaagaagaggaagaaggcaacaaaggcccggatcctgaagaagcagctgaaaaatttgccgaactacgcaaacatcacacagcattactcaaaggcattaaagaccacggtttagaccacccgaaaacacgcctacacgttgaaatgctaagtgaagtattccgtactttccgtctgatcccaaaacagtttgatcgcatcgttaatagcatgcgtgacatgatggatcacgtacgtgtgcaagaacgtcttgtgatcaagatgtgtgttgaacaatgcaaaatgccaaaagccgctttcgtcgaagcatttgctggcaacgaaactgactttacttggttcgaaaaagcacaacaatctgcggcaccttatgcgccagcattacaacgtatcgattttgacgtacgccgttgtatcaacaaattaaagttagttgaaaataccactggtctgactatctcacagatcaaaaacatcaaccgtcgtatgagtattggtgaagcgaaagcccgccgtgcgaaaaaagaaatggttgaagcgaacttacgtctggtaatttcgattgccaaaaaatacaccaaccgtggtctacagttccttgatttaatccaggaaggtaacatcggtctgatgaaagccgtagataagtttgaataccgtcgtggttacaaattctcgacttacgctacatggtggatccgtcaggcaatcacccgttctattgctgaccaagcgcgtacaatccgtattccagtgcatatgattgaaacaatcaataaactgaatcgtatttcgcgtcaaatgctgcaagagatgggccgtgaagcaacgccagaagaattggctgagcgcatgatgatgccagaagatcgtattcgtaaagtattgaagattgctaaagagccaatctcaatggaaacgccgatcggtgatgatgaagattctcacttaggcgatttcattgaagataccacgctttctttaccagttgacgctgctacaaaagatagccttaaaggcgcgacagacgacgtactagcaggcctaacagcccgtgaagcgaaagtactgcgtatgcgttttggtatcgatatgaatactgaccacacacttgaagaagtgggtaaacagttcgatgtaacgcgtgagcgtatccgtcaaattgaagcgaaggcattacgtaaattacgtcatcctagccgcagcgaacagctacgcagcttcttagacgaataa

SEQ ID NO: 74607 - protein, 609 aa, Moritella sp. PE36
MESPQSQLKLLVAKGKEQGYLTYAEVNDHLPQDIVDSDQVEDIIQMINDMGIQVLETAPDADDLLMAENTTAPDDDAAEAAAAALASVESEIGRTTDPVRMYMREMGTVELLTREGEIVIAKRIEEGIYAVQTAVAEYPEAINSLLAEYDKFLAEESRLSDIITGFIDPNADDVAPTATHIGSEVTKKQNESDSTDDDEEEEEGNKGPDPEEAAEKFAELRKHHTALLKGIKDHGLDHPKTRLHVEMLSEVFRTFRLIPKQFDRIVNSMRDMMDHVRVQERLVIKMCVEQCKMPKAAFVEAFAGNETDFTWFEKAQQSAAPYAPALQRIDFDVRRCINKLKLVENTTGLTISQIKNINRRMSIGEAKARRAKKEMVEANLRLVISIAKKYTNRGLQFLDLIQEGNIGLMKAVDKFEYRRGYKFSTYATWWIRQAITRSIADQARTIRIPVHMIETINKLNRISRQMLQEMGREATPEELAERMMMPEDRIRKVLKIAKEPISMETPIGDDEDSHLGDFIEDTTLSLPVDAATKDSLKGATDDVLAGLTAREAKVLRMRFGIDMNTDHTLEEVGKQFDVTRERIRQIEAKALRKLRHPSRSEQLRSFLDE

SEQ ID NO: 74608 - DNA, 1995 bp, Magnetospirillum gryphiswaldense
  CDS (1)..(1995): transl_table=11
atggcgaccaaaacgcagaatacggcggaagtcaacgagagccaggaagagaacctggacggtccgctgctcgacgccctgggcgtcgccgtcaagaagatggtcacccgtggccgcgagcgcggctatgtgacctatgacgagctgaacgccgccctgccgccggatgaagtgtcgtcggaacagatcgaagacaccatggccatgctgtccgaaatgggcatcaacgtggtggaaagcgaagaaaccgacgaagctgccgccgtcgagaccgaggaagaggaagccgaacccagctcgggcgccggcaacgtcgacgaagaggatctgggccgcaccgacgaccccgtgcgcatgtatctgcgcgagatgggttcggtcgaactgctgtcgcgcgagggcgaaatcgccatcgccaagcgcatcgaggccggtcgcgagatgatgatcggcggcatctgcgaaagcccgctgaccatccgcgccatcatcgaatggcacgacgccctgcaaaacggccgcatgctgctgcgcgacatcatcgatctggacgccacctatggctccggccccggcggtgaattgtcggaagaggaaatggaagccggcccggccgaggaagaaccggccgccgcccccgccgaaggcgaggaaggggccgaaccgcgcgaccccaacgcccccgagggcgaagtggaaggcgagggtgacggcgaaggcgaggacaattccatctcgctggcggccatggaagcccagctgatgccgcaggttctcgaaaccttcgaggccatcgccgccaatttcctgcgcatggaaaagctgcagaaggaccgcatggccgccctgtccaagggcgacaccgtgtcggcggcgacggaaaagaagtacgacaagctgaaggcggaaatggtccgcctgatggaagacgtgcatctgaacaacgcccgcatcgagcagttggtcgaccatatgaacggcctgaacaagcggttgatgggctttgaaggccgtctgctgcgtctggccgaatcgtgcaaggtcaagcggcaggacttcctggacagctatttcggctcggaactggaccccaactggctggaaaccgtggcggtcaagtccaagcactggaaggacttctcggaaaagcaccgccgtgacgtgggcgatatccgcacccagatcggcgtggtctcgggcgaggccggcctgcccatcaccgaattccgccgcatcatccagacggtgcagcgcggcgagcgcgaggccagcaaggccaagaaggaaatgatcgaggccaacctgcgtctggttatttccatcgccaagaagtacaccaaccgcggcctgcaattcctcgatttgatccaggaaggcaatatcggcctgatgaaggcggtggataagttcgaataccgccgcggctacaaattctcgacctatgccacgtggtggatccgtcaggccatcacccggtccatcgccgatcaggcgcggaccatccgcattcccgtgcacatgatcgaaaccatcaacaagctggtgcgcaccagccgccagatgctgcacgagatcgggcgcgagccgacgccggaagaactggcggaaaagctcagcatgcctttggaaaaagtgcgcaaggtgctgaagatcgccaaggagccgatctccctggaaacccccatcggcgacgaggaagacagccatctgggcgacttcatcgaggacaagaacgcggttctgccgctggatgcggccatccaggccaatttgcgtgaaaccaccacccgggtgctggccagcctgaccccgcgtgaggaacgcgtgctgcgcatgcgtttcggcatcggcatgaacaccgaccacaccttggaagaggtgggccagcagttcagtgtgacgcgcgaacgcatccgccagatcgaggccaaggcgctgaggaagctgaagcatccgtcgcgctcgcgcaagctgcgcagctttctcgacacctag

SEQ ID NO: 74609 - protein, 664 aa, Magnetospirillum gryphiswaldense
MATKTQNTAEVNESQEENLDGPLLDALGVAVKKMVTRGRERGYVTYDELNAALPPDEVSSEQIEDTMAMLSEMGINVVESEETDEAAAVETEEEEAEPSSGAGNVDEEDLGRTDDPVRMYLREMGSVELLSREGEIAIAKRIEAGREMMIGGICESPLTIRAIIEWHDALQNGRMLLRDIIDLDATYGSGPGGELSEEEMEAGPAEEEPAAAPAEGEEGAEPRDPNAPEGEVEGEGDGEGEDNSISLAAMEAQLMPQVLETFEAIAANFLRMEKLQKDRMAALSKGDTVSAATEKKYDKLKAEMVRLMEDVHLNNARIEQLVDHMNGLNKRLMGFEGRLLRLAESCKVKRQDFLDSYFGSELDPNWLETVAVKSKHWKDFSEKHRRDVGDIRTQIGVVSGEAGLPITEFRRIIQTVQRGEREASKAKKEMIEANLRLVISIAKKYTNRGLQFLDLIQEGNIGLMKAVDKFEYRRGYKFSTYATWWIRQAITRSIADQARTIRIPVHMIETINKLVRTSRQMLHEIGREPTPEELAEKLSMPLEKVRKVLKIAKEPISLETPIGDEEDSHLGDFIEDKNAVLPLDAAIQANLRETTTRVLASLTPREERVLRMRFGIGMNTDHTLEEVGQQFSVTRERIRQIEAKALRKLKHPSRSRKLRSFLDT

SEQ ID NO: 74610 - DNA, 2058 bp, Rhizobium etli
  CDS (1)..(2058): transl_table=11
atggcaaccaaggtcaaagagaacgaagacgcggaagtcgaacgcgacggcgcaacggacggccctcttctcgatctttccgacgatgcggtcaagaagatgatcaaggccgccaagaagcgcggctatgtgacgatggacgagctgaacgccgtgctgccgtccgaggaagtgacctccgagcagatcgaagacacgatgtcgatgctgtcggacatgggcatcaacgtcatcgaggacgaggaagccgaagaggccggtgcttccggcggtggcgatgacgacgacgctggcggcgatgaggacagcgaaggcggcgaactcgcgccttcggccggcactgcgcttgcgaccgcgaagaagaaagagccgaccgaccgtaccgacgacccggtgcgcatgtatctgcgcgagatgggctcggtggagcttctgtcgcgcgaaggcgaaatcgcaatcgccaagcgcatcgaagccggccgcgagacgatgatcgccgggctctgtgagagcccgctgaccttccaggcgctgatcatctggcgcgacgaactcaacgaaggcacgacgctgctgcgcgagatcatcgatctcgagacgacctattccggtccggaagccaaggccgcgccacagttccagagccctgagaagatcgaggccgaccgcaaggcggcggaagagaaggaaaagacccggcgcgcccgctccggcgacgacgacattaccgatgtcggcggcgaaggtctgcctccggaagaggaggaagaggacgaggacgaatccaacctctctctcgccgcgatggaagcggaactccgcccacaggtcatggagacgctcgacatcattgccgagacctacaagaagctgcgcaagctgcaggaccagcaggtcgagcagcgccttgccgccaccggcacgctgtcttccgcccaggagcgccgctacaaggagctcaaggacgagctcatcaaggcggtcaagtcgctgtcgctcaaccagaaccgcatcgatgcactggtcgagcagctctacgacatcaacaagcgcctcgtgcagaacgaaggccgcctgctgcgtctggccgaatcctacgccgtcaagcgcgactcgttcctggagcaggatcagggggccgagctcgacccgaactggatgaagtcgatcggcaatctggccgcccgcggctggaaggaattcgccaaggcggagaatacgacgatccgcgacatccgccaggagatccagaatctggcgacggagaccggcatctcgatctcggaattccgccgcatcgtgcacatggtgcagaagggcgagcgcgaagcgcgcatcgccaagaaggaaatggtcgaagcgaaccttcgcctcgtcatttcaatcgccaagaagtacacgaaccgcggcctgcagttcctcgacctcattcaggaaggcaatatcggcctgatgaaggcggtcgacaagttcgaataccgccgcggttacaagttctcgacctatgcgacatggtggatccgccaggcgatcacccgctcgatcgccgaccaggcccgcacgatccgcattccggtgcacatgatcgagacgatcaacaagatcgtccggacctcgcgccagatgctgcacgagatcggccgcgagccgacaccggaagaactggccgaaaagctcgccatgccgctcgaaaaggtccgcaaggtcctgaagatcgccaaggagccgatctcgctcgaaaccccggtgggcgacgaagaggattcgcatctcggcgatttcatcgaggacaagaacgcgctgctgccgatcgacgccgccatccaggcgaacctgcgcgagacgacgacccgcgttctcgcctcgctgacgccgcgcgaggaacgtgtcctgcgcatgcgcttcggcatcggcatgaacaccgaccacacgctcgaagaagtcggccagcagttctcggtcacccgcgaacgtatccgccagatcgaagcgaaggcgctgcgcaagctcaagcatccgagccgctcgagaaagctgagaagctttctggacagctaa

SEQ ID NO: 74611 - protein, 685 aa, Rhizobium etli
MATKVKENEDAEVERDGATDGPLLDLSDDAVKKMIKAAKKRGYVTMDELNAVLPSEEVTSEQIEDTMSMLSDMGINVIEDEEAEEAGASGGGDDDDAGGDEDSEGGELAPSAGTALATAKKKEPTDRTDDPVRMYLREMGSVELLSREGEIAIAKRIEAGRETMIAGLCESPLTFQALIIWRDELNEGTTLLREIIDLETTYSGPEAKAAPQFQSPEKIEADRKAAEEKEKTRRARSGDDDITDVGGEGLPPEEEEEDEDESNLSLAAMEAELRPQVMETLDIIAETYKKLRKLQDQQVEQRLAATGTLSSAQERRYKELKDELIKAVKSLSLNQNRIDALVEQLYDINKRLVQNEGRLLRLAESYAVKRDSFLEQDQGAELDPNWMKSIGNLAARGWKEFAKAENTTIRDIRQEIQNLATETGISISEFRRIVHMVQKGEREARIAKKEMVEANLRLVISIAKKYTNRGLQFLDLIQEGNIGLMKAVDKFEYRRGYKFSTYATWWIRQAITRSIADQARTIRIPVHMIETINKIVRTSRQMLHEIGREPTPEELAEKLAMPLEKVRKVLKIAKEPISLETPVGDEEDSHLGDFIEDKNALLPIDAAIQANLRETTTRVLASLTPREERVLRMRFGIGMNTDHTLEEVGQQFSVTRERIRQIEAKALRKLKHPSRSRKLRSFLDS

SEQ ID NO: 74612 - DNA, 1794 bp, Acidobacterium capsulatum
  CDS (1)..(1794): transl_table=11
gtgcgcccatcgtcccgcgactttgttcgcaatgggacatgcctgtcatggcctcgatcgcacttcgtccgattcaacgccagatccgaccatattcgcgggagacgaatccgcttggcattagacgataaatacgaagaggatctgcagaagctcatcgacgccggtaaggaaaagggctatttgacctacaacgaggtcaacgacctgatccctggcgacatgacttctccagaagacctggacgacctgatgacgaccatcgggacccagggaatcgacattcttgaaggcagtcccaagctcggcaacgatggcttcgacgacgaagacagcgacgacgtcgagcttgatcttaccccaggaacgcttgaaaaaaccaacgaccccgtgcgcatgtatctgcgcgaaatgggcaccgttccgctgctcacacgcgaaggcgaagtagaaatcgccaagcgcattgaacgcggccagttgcgcgtgatgaaggctgtctcgcgctcgcccatcgtgattcgcgagatcatcgcgctcggtgaagatctgcgccgcggtgtgcgcagcgtcaaggaagtggtgatcttcgacgaagaagagatcactgaagaagtactggccgcccgcgtgcgccagacggccaacaagatcgacggcatcgtcaagcaccagaagaagattcaggcgctcgaagagaagatgcaggccgccaagagcaaggtgaaggagcagcgcaagctgcgctggctcatcgcgcgcgaaatggtcttcatcacgcgcattgtgcgcgacctgaagtacaccaatcaggagcgcaagcgcctgctcgacaaggtcaacaagaccgtcgattccatgcgcacgcttgagcgccagattcgctctctcgaccagaagtatgaccagtcgaagagcgaagagctcaagaaggaataccgccgccagcagaagaactgcaagaccgacctcgaaaagctcgaagaggaagccggactctccattgccgacctgaagcgcacgcagcgcgagatcattcagggcgacatggatgccgagcaggccaagcgcgagctgattgaagccaacctgcgcctggtggtctcgattgccaagaagtacaccaatcgcggcctgcagttcctcgatctgattcaggaaggcaacatcggcctgatgaaggccgtggacaagttcgagtaccgccgcggttacaagttctccacctacgccacctggtggattcgccaggccatcacgcgcgccatcgccgatcaggcccgcaccatccgtattccggtgcacatgattgagacgatcaacaagctcatccgcacctcgcgtcaactggtgcaggagctgggccgcgaacccacctcagaggaaattgcccgccgcatggatattccggtggccaaggtccgcaaggtgctcaagattgcgcaggagcccatctccctcgaaacgccgatcggcgaagaggaagattcgcacctgggcgacttcattgaggactcgcaggcggtctcgccttcagaggcggtcatcagcgtgaacctcaaggagtacacctcgcaagtgctgcgcaccctgacaccgcgcgaagagcgcgtcatcaagatgcgcttcggcctcgaagacggctcagagcacacgctcgaagaagtaggccagagcttccaggtcacccgcgagcgcattcgccagatcgaagccaaggcgctgcgcaagctgcggcacccctcgcgctcgcgcaagctgcgggcctttgtggacaacgcccgcgaaatgtaa

SEQ ID NO: 74613 - protein, 597 aa, Acidobacterium capsulatum
MRPSSRDFVRNGTCLSWPRSHFVRFNARSDHIRGRRIRLALDDKYEEDLQKLIDAGKEKGYLTYNEVNDLIPGDMTSPEDLDDLMTTIGTQGIDILEGSPKLGNDGFDDEDSDDVELDLTPGTLEKTNDPVRMYLREMGTVPLLTREGEVEIAKRIERGQLRVMKAVSRSPIVIREIIALGEDLRRGVRSVKEVVIFDEEEITEEVLAARVRQTANKIDGIVKHQKKIQALEEKMQAAKSKVKEQRKLRWLIAREMVFITRIVRDLKYTNQERKRLLDKVNKTVDSMRTLERQIRSLDQKYDQSKSEELKKEYRRQQKNCKTDLEKLEEEAGLSIADLKRTQREIIQGDMDAEQAKRELIEANLRLVVSIAKKYTNRGLQFLDLIQEGNIGLMKAVDKFEYRRGYKFSTYATWWIRQAITRAIADQARTIRIPVHMIETINKLIRTSRQLVQELGREPTSEEIARRMDIPVAKVRKVLKIAQEPISLETPIGEEEDSHLGDFIEDSQAVSPSEAVISVNLKEYTSQVLRTLTPREERVIKMRFGLEDGSEHTLEEVGQSFQVTRERIRQIEAKALRKLRHPSRSRKLRAFVDNAREM

SEQ ID NO: 74614 - DNA, 1716 bp, Chlamydia psittaci
  CDS (1)..(1716): transl_table=11
atgctcatgaatacacaaaatggccaggctatggaagcggctcatgaagaagaagctcagaaaaagttagaagaactcgtttctcttgctaaggatcagggctttattacttacgaggagatcaatgagattcttcccatgtctttcgatacgcctgaacaaatcgatcaggtgctgattttccttacgggaatggatattcaagtcctgaaccaagcagatgtagaacgacaaaaggaaagaaaaaaagaagccaaagagctagagggcttagccaagcgtacagaggggactcctgatgaccctgtgcgtatgtatttaaaagaaatgggaactgttcctctattaactagagaggaagaggttgaaatttctaaaagaatagaaaaagctcaagttcaaattgaacggattatcttacgttttcgttattcttcaaaagaagctatttctattgcgcaatacctcatcaatggaaaagaacgttttgataaaattatttcagaaaaagaagtcgaagacaaagctcacttcttaaagctgcttcctaagttaattagtttgcttaaggaagaagatgcatatctagagtctttgctgttccgtttaaaacaaaataatttatcgaaagaagagactgcgaaattaaacgacgatttagaaaagtgtcgtattcgtacgcaagcttatctgcgttgtttccattgtcgtcacaatgttaccgaagatttcggtgaggttgtctttaaagcatatgattctttcttacaattggaacagcaaatcaatgatttgaaggttcgagcagaaagaaataagtttgcagcagcaaaattagacgctgctaagcgtagattatacaagcgagaagttgcagcaggaagaactctggaagagttcaaaaaagacgtgcgtatgctgcagcgttggatggacaagagccaggaagctaaaaaagaaatggttgagtccaaccttcgtttagtgatttccatagctaaaaaatatacaaaccgcggcctttccttcttagatttgattcaagaggggaatatgggcttgatgaaagctgtagaaaaatttgaatatcgcagaggatataaattttctacttatgccacatggtggattcgtcaagctgttacacgtgctattgcagatcaggcacgaaccatccgtattcctgtgcacatgattgaaactataaacaaagttcttcgtggtgctaagaaattaatgatggaaacgggcaaagagcctacaccagaggaattggccgaagagttaggattaacccctgatcgggtgcgggaaatttataaaattgctcagcatccaatttctttacaagcagaggttggtgagggaggcgaaagctcctttggcgactttttggaagatactggtgtggagtctccagcagaggccacaggctattctatgcttaaagataaaatgaaagaggtgttaaaaacccttacggatcgtgaacgttttgttttgattcatcgttttggtcttttggatggcaagcctaaaacactagaagaggtgggttcagcatttaatgtgactcgagagcgtattcgtcagattgaagctaaggctttgagaaaaatgcgtcacccgattcgttcaaaacaattgcgagctttcctcgatcttttagaagaagaaaaaatcacgggtaaagcaaagaatatcaagggaaaataa

SEQ ID NO: 74615 - protein, 571 aa, Chlamydia psittaci
MLMNTQNGQAMEAAHEEEAQKKLEELVSLAKDQGFITYEEINEILPMSFDTPEQIDQVLIFLTGMDIQVLNQADVERQKERKKEAKELEGLAKRTEGTPDDPVRMYLKEMGTVPLLTREEEVEISKRIEKAQVQIERIILRFRYSSKEAISIAQYLINGKERFDKIISEKEVEDKAHFLKLLPKLISLLKEEDAYLESLLFRLKQNNLSKEETAKLNDDLEKCRIRTQAYLRCFHCRHNVTEDFGEVVFKAYDSFLQLEQQINDLKVRAERNKFAAAKLDAAKRRLYKREVAAGRTLEEFKKDVRMLQRWMDKSQEAKKEMVESNLRLVISIAKKYTNRGLSFLDLIQEGNMGLMKAVEKFEYRRGYKFSTYATWWIRQAVTRAIADQARTIRIPVHMIETINKVLRGAKKLMMETGKEPTPEELAEELGLTPDRVREIYKIAQHPISLQAEVGEGGESSFGDFLEDTGVESPAEATGYSMLKDKMKEVLKTLTDRERFVLIHRFGLLDGKPKTLEEVGSAFNVTRERIRQIEAKALRKMRHPIRSKQLRAFLDLLEEEKITGKAKNIKGK

SEQ ID NO: 74616 - DNA, 1812 bp, Escherichia coli
  CDS (1)..(1812): transl_table=11
atggagcaaaacccgcagtcacagctgaaacttcttgtcacccgtggtaaggagcaaggctatctgacctatgccgaggtcaatgaccatctgccggaagatatcgtcgattcagatcagatcgaagacatcatccaaatgatcaacgacatgggcattcaggtgatggaagaagcaccggatgccgatgatctgatgctggctgaaaacaccgcggacgaagatgctgccgaagccgccgcgcaggtgctttccagcgtggaatctcaaatcgggcgcacgactgacccggtacgcatgtacatgcgtgaaatgggcaccgttgaactgttgacccgcgaaggcgaaattgacatcgctaagcgtattgaagacgggatcaaccaggttcaatgctccgttgctgaatatccggaagcgatcacctatctgctggaacagtacgatcgtgttgaagcagaagaagcgcgtctgtccgatctgatcaccggctttgttgacccgaacgcagaagaagatctggcacctaccgccactcacgtcggttctgagctttcccaggaagatctgggcgatgacgacagcgccgatgatgacaacagcatcgacccggaactggctcgcgaaaaatttgcggaactacgcgctcagtacgttgtaacgcgtgacaccatcaaagcgaaaggtcgcagtcacgctaccgctcaggaagagatcctgaaactgtctgaagtattcaaacagttccgcctggtgccgaagcagtttgactacctggtcaacagcatgcgcgtcatgatggaccgcgttcgtacgcaagaacgtctgatcatgaagctctgcgttgagcagtgcaaaatgccgaagaaaaacttcattaccctgtttaccggcaacgaaaccagcgatacctggttcaacgcggcaattgcgatgaacaagccgtggtcggaaaaactgcacgatgtctctgaagaagtgcatcgcgccctgcaaaaactgcagcagattgaagaagaaaccggcctgaccatcgagcaggttaaagatatcaaccgtcgtatgtccatcggtgaagcgaaagcccgccgtgcgaagaaagagatggttgaagcgaacttacgtctggttatttctatcgctaagaaatacaccaaccgtggcttgcagttccttgacctgattcaggaaggcaacatcggtctgatgaaagcggttgataaattcgaataccgccgtggttacaagttctccacctacgcaacctggtggatccgtcaggcgatcacccgctctatcgcggatcaggcgcgcaccatccgtattccggtgcacatgattgagaccatcaacaagctcaaccgtatttctcgccagatgctgcaagagatgggccgtgaaccgacgccggaagaactggctgaacgtatgctgatgccggaagacaagatccgcaaagtgctgaagatcgccaaagagccaatctccatggaaacgccgatcggtgatgatgaagattcgcatctgggggatttcatcgaggataccaccctcgagctgccgctggattctgcgaccaccgaaagcctgcgtgcggcaacgcacgacgtgctggctggcctgaccgcgcgtgaagcaaaagttctgcgtatgcgtttcggtatcgatatgaacaccgaccacacgctggaagaagtgggtaaacagttcgacgttacccgcgaacgtatccgtcagatcgaagcgaaggcgctgcgcaaactgcgtcacccgagccgttctgaagtgctgcgtagcttcctggacgattaa

SEQ ID NO: 74617 - protein, 603 aa, Escherichia coli
MEQNPQSQLKLLVTRGKEQGYLTYAEVNDHLPEDIVDSDQIEDIIQMINDMGIQVMEEAPDADDLMLAENTADEDAAEAAAQVLSSVESQIGRTTDPVRMYMREMGTVELLTREGEIDIAKRIEDGINQVQCSVAEYPEAITYLLEQYDRVEAEEARLSDLITGFVDPNAEEDLAPTATHVGSELSQEDLGDDDSADDDNSIDPELAREKFAELRAQYVVTRDTIKAKGRSHATAQEEILKLSEVFKQFRLVPKQFDYLVNSMRVMMDRVRTQERLIMKLCVEQCKMPKKNFITLFTGNETSDTWFNAAIAMNKPWSEKLHDVSEEVHRALQKLQQIEEETGLTIEQVKDINRRMSIGEAKARRAKKEMVEANLRLVISIAKKYTNRGLQFLDLIQEGNIGLMKAVDKFEYRRGYKFSTYATWWIRQAITRSIADQARTIRIPVHMIETINKLNRISRQMLQEMGREPTPEELAERMLMPEDKIRKVLKIAKEPISMETPIGDDEDSHLGDFIEDTTLELPLDSATTESLRAATHDVLAGLTAREAKVLRMRFGIDMNTDHTLEEVGKQFDVTRERIRQIEAKALRKLRHPSRSEVLRSFLDD

SEQ ID NO: 74618 - DNA, 1851 bp, Pseudomonas fluorescens
  CDS (1)..(1851): transl_table=11
atgtccggaaaagcgcaacagcagtctcgtatcaaagagttgatcgttctcggtcgtgagcagggttacctgacttacgcggaggtcaacgaccatctgcctgaggatatttcagatccagagcaggtggaagacatcatccgcatgattaacgacatggggatcaacgtattcgaagctgcgccagataaggattcccttatgctggcggacgccgataccgacgaggctgccgctgaagaagcggctgccgcgctggctgctgtggagaccgatatcggtcgtaccaccgaccctgtgcgcatgtatatgcgtgaaatgggtaccgtcgagctgctgacacgcgaaggcgaaattgaaatcgccaagcgtatcgaagaaggcatccgtgaagtgatgggcgcaattgcgcacttccctggcacggttgaccatattctgtccgagtacactcgcgtcaccaccgaaggcggtcgcctgtccgacgtcttgagcggttacatcgacccggatgacggcattgcgccgcccgccgccgaagtaccgccgcctgtcggtgcgaaaaccgcgaaagctgacgacgacactgatgacgacgaggctgaagccagcagcgacgacgaagaagaagtcgaaagcggcccggacccgatcatcgctgcccagcgcttcggtgcggtttccgatcaaatggaaatcacccgcaaggccctgaaaaagcacggtcgtggcaacaagcaggcaatcgccgagctgatcgccctggctgagctgttcatgccgatcaaactggtgccgaagcaattcgaaggcctggttgagcgtgttcgcagtgcccttgagcgtctgcgtgcccaagagcgcgcaatcatgcagctatgtgtacgtgatgcacgtatgccgcgcgccgacttcgtgcgccagttcccgggcaacgaagttgacgaaagctggaccgacgcgctggccaaaggcaaggcgaaatacgccgaagccattggtcgtctgcagcccgatatcatccgttgccagcagaagctgactgcgcttgagactgaaaccggtctgacgattgctgaaatcaaggacatcaaccgtcgcatgtcgatcggtgaggccaaggcccgccgcgcgaagaaagagatggttgaagcgaacttgcgtctggtgatctccatcgccaagaagtacaccaaccgtggcctgcaattcctcgatctgatccaggaaggcaacatcggcttgatgaaggctgtggacaagttcgaataccgtcgcggctacaagttctcgacttatgccacctggtggatccgtcaggcgatcactcgctcgatcgccgaccaggcacgcaccatccgtattccggtgcacatgatcgagacgatcaacaagctcaaccgtatttcccggcagatgttgcaggaaatgggtcgcgaaccgaccccggaagagctgggcgaacgcatggaaatgcctgaggataaaatccgtaaggtattgaagatcgctaaagagccgatctccatggaaacgccgattggtgatgacgaagactcccatctgggtgacttcatcgaagactcgaccatgcagtcgccaatcgatgtcgccactgttgagagccttaaagaagcgactcgcgacgtactgtccggcctcactgcccgtgaagccaaggtactgcgcatgcgtttcggcatcgacatgaataccgaccatacccttgaggaagtcggtaagcagtttgacgtgacgcgtgagcggatccgtcagatcgaagccaaggcgctgcgcaagttgcgccacccgacgcgaagcgagcatctacgctccttcctcgacgagtga

SEQ ID NO: 74619 - protein, 616 aa, Pseudomonas fluorescens
MSGKAQQQSRIKELIVLGREQGYLTYAEVNDHLPEDISDPEQVEDIIRMINDMGINVFEAAPDKDSLMLADADTDEAAAEEAAAALAAVETDIGRTTDPVRMYMREMGTVELLTREGEIEIAKRIEEGIREVMGAIAHFPGTVDHILSEYTRVTTEGGRLSDVLSGYIDPDDGIAPPAAEVPPPVGAKTAKADDDTDDDEAEASSDDEEEVESGPDPIIAAQRFGAVSDQMEITRKALKKHGRGNKQAIAELIALAELFMPIKLVPKQFEGLVERVRSALERLRAQERAIMQLCVRDARMPRADFVRQFPGNEVDESWTDALAKGKAKYAEAIGRLQPDIIRCQQKLTALETETGLTIAEIKDINRRMSIGEAKARRAKKEMVEANLRLVISIAKKYTNRGLQFLDLIQEGNIGLMKAVDKFEYRRGYKFSTYATWWIRQAITRSIADQARTIRIPVHMIETINKLNRISRQMLQEMGREPTPEELGERMEMPEDKIRKVLKIAKEPISMETPIGDDEDSHLGDFIEDSTMQSPIDVATVESLKEATRDVLSGLTAREAKVLRMRFGIDMNTDHTLEEVGKQFDVTRERIRQIEAKALRKLRHPTRSEHLRSFLDE

SEQ ID NO: 74620 - DNA, 1839 bp, Serratia plymuthica
  CDS (1)..(1839): transl_table=11
atggagcaaaacccgcagtcacagcttaaacttcttgtccaacgtggtaaggagcaaggctatctgacctatgctgaggtcaatgaccatctgccggaagatatcgtcgactccgatcagatcgaagacatcatccagatgatcaacgacatggggatccaggtgatggaagaagccccggacgccgatgacctgttgctggctgaaaactcaaacagcacagacgaagatgcggaagaagctgccgctcaagtcctgtccagcgttgaatctgaaattggccgtaccaccgacccggtgcgcatgtacatgcgtgaaatgggtaccgttgaactgctgacgcgcgaaggcgaaatcgacatcgccaaacgtatcgaagacgggatcaaccaggttcagtgctcggttgccgaatacccggaagccattacctacctgctggagcagtacgatcgcgttgaagccggcgaagctcgcctgtccgacctgatcaccggtttcgtcgatcctaatgcggaagaggacatcgccccaaccgcaacgcacgtcggttctgagctgtcgaccgaagagcagaacgacgacgaagaagacgaagaagacgacgacgacgccgaagacgacaacagcatcgatccggaactggcacgtcagaaattcaccgacctgcgcgatcagtatgaagcgacccgtctggtcatcaaaaagaacggccgtagccacgccagcgcagcagaagaaattctgaagctgtctgaggtgttcaagcagttccgcctggtgccaaaacagttcgacttcctggtcaacagcatgcgcatcatgatggaccgcgttcgtactcaggaacgtatcatcatgaagctgtgcgttgaacagtgcaaaatgccgaagaaaaacttcgtcactttgttcgccggcaacgaaaccagcgattcctggttcgaagcggcgctggcgatggccaagccatggtcagaaaagctgaaagacgtaacggatgacgtacagcgcagcctgcagaaactgcgtcagatcgaagaagagaccggcctgaccatcgagcaggtgaaggacatcaaccgtcgcatgtctatcggcgaagcgaaagcgcgccgtgcgaagaaagagatggttgaagccaacttgcgtctggttatttctatcgccaagaagtacaccaaccgtggcctgcagttcttggatctgatcaggaagggcaacatcggtttgatgaaagcggtagacaagttcgaataccgccgtggttataagttctcaacttacgccacctggtggatccgtcaggccatcacccgctctatcgccgaccaagcgcgtaccatccgtattccggtgcacatgattgagaccatcaacaagctcaaccgtatttcgcgccagatgctgcaagagatgggccgtgaaccgacgccggaagagctggctgaacgtatgctgatgccggaagacaaaatccgcaaagtgctgaagattgccaaagagccgatctccatggaaacgccgatcggtgatgatgaagattcacatctgggcgatttcatcgaggataccaccctcgagctgccgctggattctgccacctcggaaagcctgcgctctgcaacgcacgacgtattggccggcctgaccgcccgtgaagcgaaagtgctgcgcatgcgtttcggcatcgatatgaacactgaccacacgctggaagaagtgggcaaacagttcgacgttatccgtgagcgtattcgtcagatcgaagccaaagcactgcgtaaactgcgccacccaagccgttccgaagtgctgcgcagcttcctggacgactaa

SEQ ID NO: 74621 - protein, 612 aa, Serratia plymuthica
MEQNPQSQLKLLVQRGKEQGYLTYAEVNDHLPEDIVDSDQIEDIIQMINDMGIQVMEEAPDADDLLLAENSNSTDEDAEEAAAQVLSSVESEIGRTTDPVRMYMREMGTVELLTREGEIDIAKRIEDGINQVQCSVAEYPEAITYLLEQYDRVEAGEARLSDLITGFVDPNAEEDIAPTATHVGSELSTEEQNDDEEDEEDDDDAEDDNSIDPELARQKFTDLRDQYEATRLVIKKNGRSHASAAEEILKLSEVFKQFRLVPKQFDFLVNSMRIMMDRVRTQERIIMKLCVEQCKMPKKNFVTLFAGNETSDSWFEAALAMAKPWSEKLKDVTDDVQRSLQKLRQIEEETGLTIEQVKDINRRMSIGEAKARRAKKEMVEANLRLVISIAKKYTNRGLQFLDLIRKGNIGLMKAVDKFEYRRGYKFSTYATWWIRQAITRSIADQARTIRIPVHMIETINKLNRISRQMLQEMGREPTPEELAERMLMPEDKIRKVLKIAKEPISMETPIGDDEDSHLGDFIEDTTLELPLDSATSESLRSATHDVLAGLTAREAKVLRMRFGIDMNTDHTLEEVGKQFDVIRERIRQIEAKALRKLRHPSRSEVLRSFLDD

SEQ ID NO: 74622 - DNA, 1866 bp, Burkholderia cepacia
  CDS (1)..(1866): transl_table=11
gtgaagctgcgcgcgctgatcaagctcggcaaggagcgcggcttcctcacgtatgccgaaatcaacgaccacctgccggacaacttcaccgagacggaagccctggaagggatcatcggcacgttcaacgacatgggcgtggcggtttacgagcaggcgccggacgcggaaacgctgctcctgaacgacaacgcgccggccgcgtcgtcggacgacgaagtcgaggaagaagcggaagtcgcgctgtcgacggtcgattcggaattcggtcgcacgaccgatccggtccggatgtacatgcgcgagatgggcacggtcgagctgctcacgcgtgaaggcgaaatcgagatcgcgaagcggatcgaggacggcctgcgccacatggtgatggcgatttccgcgtgcccgacgacgatcgccgacatcctcgcgatggccgagcgcgtcgcgaacgaagagatccgcgtcgacgagctcgtcgacggcctgctcgatccgaacgccgcagacgccgccgataccgacggtttctccgcgaaggaagcggaagcgatcgagaacgaggacgaagaagccgaagaggaagaggaagaagaggaagaggaggacgatgacggcgccgctcaggcaaccgccaacgccgcccagctcgaagccttgaagcgcgcgtcgctcgagaagttctcgcagatcagcgagtggttcgacaagatgcgccgtgcgttcgaaaaggaaggctacaagtcgaagtcctacctgaaggcgcaggaaacgatccagaccgagctgatgacgatccgcttcaccgcgcgtaccgtcgagcgtctgtgcgacacgttgcgtgcgcaagtggacgaagtgcgtcaggtcgagcgtcagatcctgcacatcgtcgtcgacaagtgcgggatgccgcgctcggaattcatcgcgcgcttccccggcagcgagacggatctcgactgggccgagaagatcgcggccgaaggtcattcgtacagcgcggtgctgtcgcgcaacatcccggcgatccgcgaacagcagcagcgtctgctcgacctgcaggcgcgcgtcgtgctgccgctgaaggacctgaaggaaaccaaccgtcagatggcggccggcgaactgaaggcgcgtcaggcgaagcgcgaaatgaccgaggcgaacctgcgtctcgtgatctcgatcgcgaagaagtacacgaaccgcggcctgcagttcctcgatctgatccaggaaggcaacatcggcctgatgaaggcggtggacaagttcgaataccgtcgtggctacaagttctcgacctatgcgacgtggtggatccgtcaggccatcacgcgctcgatcgcggaccaggcgcgcacgatccgtattccggttcacatgatcgagacgatcaacaagatgaaccgcatctcgcggcagatcctgcaggaaaccggtctcgagccggatccggcaacgctcgccgaaaagatggagatgccggaagacaagatccgcaagatcatgaagatcgcgaaggagccgatctcgatggaaacgccgatcggcgacgacgacgattcccatctcggcgacttcatcgaggacaacaacacggtcgcgccggcggacgccgcgctgcatgccagcatgcgcgacgtcgtgaaggacgtgctcgattcgctgacgccgcgcgaggcgaaggtgctgcggatgcgcttcggcatcgagatgagcaccgaccatacgctcgaggaagtcggcaagcagttcgacgtcacgcgtgagcggatccgtcagatcgaagccaaggcgctgcgcaagctgcgtcatccgagccgttccgacaagctgaagtcgttcctcgaagggaactga

SEQ ID NO: 74623 - protein, 621 aa, Burkholderia cepacia
MKLRALIKLGKERGFLTYAEINDHLPDNFTETEALEGIIGTFNDMGVAVYEQAPDAETLLLNDNAPAASSDDEVEEEAEVALSTVDSEFGRTTDPVRMYMREMGTVELLTREGEIEIAKRIEDGLRHMVMAISACPTTIADILAMAERVANEEIRVDELVDGLLDPNAADAADTDGFSAKEAEAIENEDEEAEEEEEEEEEEDDDGAAQATANAAQLEALKRASLEKFSQISEWFDKMRRAFEKEGYKSKSYLKAQETIQTELMTIRFTARTVERLCDTLRAQVDEVRQVERQILHIVVDKCGMPRSEFIARFPGSETDLDWAEKIAAEGHSYSAVLSRNIPAIREQQQRLLDLQARVVLPLKDLKETNRQMAAGELKARQAKREMTEANLRLVISIAKKYTNRGLQFLDLIQEGNIGLMKAVDKFEYRRGYKFSTYATWWIRQAITRSIADQARTIRIPVHMIETINKMNRISRQILQETGLEPDPATLAEKMEMPEDKIRKIMKIAKEPISMETPIGDDDDSHLGDFIEDNNTVAPADAALHASMRDVVKDVLDSLTPREAKVLRMRFGIEMSTDHTLEEVGKQFDVTRERIRQIEAKALRKLRHPSRSDKLKSFLEGN

SEQ ID NO: 74624 - DNA, 2055 bp, Agrobacterium tumefaciens
  CDS (1)..(2055): transl_table=11
atggcaaccaaagtcaaagaaaacgaagaagcagaaaacgaacgcgacggtgcgacggacggtccgcttctcgatctttcggatgacgcggtcaaaaagatgatcaaggccgccaagaagcgcggctatgtgacgatggacgagctgaattccgtcctgccgtccgaagaggtgacgtccgagcagatcgaagacacgatggcgatgctgtccgatatgggcatcaacgttatcgaggacgaggatgccgaggaagccgcgcctgccgaagacgacggcgattccgacaatgaggagtccgaaggcggcgaactggcgccgtccggcggcacggcgcttgcgaccgccaagaagaaagaaccgaccgaccgcaccgatgatcccgtgcgcatgtatctgcgcgaaatgggttccgtcgagcttctgtcgcgcgaaggcgaaatcgccatcgccaagcgcatcgaggccggccgcgaaacgatgatttcgggcctgtgcgaaagcccgctgacgttccaggcgctgatcatctggcgcgacgaactgaacgagggcacgacgctgctgcgcgagatcatcgatctcgaaacgacctattccggtccggaagccaaggctgcaccgcagttccagagcccggaaaagatcgaggctgaccgcaaggccgccgaagaaaaggaaaagacccgcaggctgcgtgcgccaaccggcgacgaagacgtgactgacgtgggtggcgatggcctgcctccggaagaggaagaagaggacgacgacgagtccaatctttcgcttgccgcgatggaagccgagctgcgcccgcaggtcatggaaacgctcgacaccattgccgacacctacaagaagctgcgcaagcttcaggatcagcaggtcgaggcccgtctcgcctgcaccggtaccctgtcttccggccaggagcgtcgttacaaggaactgaaggatcagctgatcacggccgtcaagtcgctgtcgctgaaccagaaccgcatcgacagcctcgtcgagcagctctacgacatttccaagcggctgatgcagaacgaaggccggctgctgcgtcttgccgaatcctatggcgtcaagcgcgacagcttcctcgagcagtatcacggtgcggaactcgatccgaactggatgaagtcgatcaccaatctggccgcgcgcggctggaaggaattcgcccgcgaggaaagcaacacgatccgggaaatccgtcaggaaatccagaacctctccacggaaaccggcatttccattgccgaattccgccgcatcgtttcgatggtgcagaagggcgaacgtgaagcgcgtatcgccaagaaggagatggtcgaagcgaacctgcgtctcgtgatctcgattgcgaagaaatacaccaaccgcggtctgcagttcctcgacctcattcaagaaggcaatatcggcctgatgaaggcggtggacaagttcgaatatcgccgtggttacaagttctcgacctatgcgacctggtggatcaggcaggcgatcacccgctcgatcgccgaccaggcccgcacgatccgtattccggttcacatgatcgagacgatcaacaagatcgttcgcacctcgcgccagatgcttcacgagatcggccgcgagccgaccccggaagaactggcggaaaagctggccatgccgcttgaaaaggtgcgcaaggttctgaagatcgccaaggagccgatctcgctcgaaacccctgttggtgacgaagaggattcgcatctcggcgacttcatcgaggacaagaacgcgctgctgccgatcgacgccgccattcaggcgaacctgcgtgagacgaccacccgggttctcgcctcgctgacgccgcgtgaggaacgtgttctgcgcatgcgcttcggcatcggcatgaataccgaccatacgctggaagaagtcggccagcagttctcggtcacgcgcgaacgtattcgccagatcgaggcaaaggcgttgcgcaagctgaagcacccgagccgctcgagaaagctgcgcagcttcctcgacagctaa

SEQ ID NO: 74625 - protein, 684 aa, Agrobacterium tumefaciens
MATKVKENEEAENERDGATDGPLLDLSDDAVKKMIKAAKKRGYVTMDELNSVLPSEEVTSEQIEDTMAMLSDMGINVIEDEDAEEAAPAEDDGDSDNEESEGGELAPSGGTALATAKKKEPTDRTDDPVRMYLREMGSVELLSREGEIAIAKRIEAGRETMISGLCESPLTFQALIIWRDELNEGTTLLREIIDLETTYSGPEAKAAPQFQSPEKIEADRKAAEEKEKTRRLRAPTGDEDVTDVGGDGLPPEEEEEDDDESNLSLAAMEAELRPQVMETLDTIADTYKKLRKLQDQQVEARLACTGTLSSGQERRYKELKDQLITAVKSLSLNQNRIDSLVEQLYDISKRLMQNEGRLLRLAESYGVKRDSFLEQYHGAELDPNWMKSITNLAARGWKEFAREESNTIREIRQEIQNLSTETGISIAEFRRIVSMVQKGEREARIAKKEMVEANLRLVISIAKKYTNRGLQFLDLIQEGNIGLMKAVDKFEYRRGYKFSTYATWWIRQAITRSIADQARTIRIPVHMIETINKIVRTSRQMLHEIGREPTPEELAEKLAMPLEKVRKVLKIAKEPISLETPVGDEEDSHLGDFIEDKNALLPIDAAIQANLRETTTRVLASLTPREERVLRMRFGIGMNTDHTLEEVGQQFSVTRERIRQIEAKALRKLKHPSRSRKLRSFLDS

SEQ ID NO: 74626 - DNA, 1839 bp, Buchnera aphidicola subsp
  CDS (1)..(1839): transl_table=11
atggatcaaaacccacagtcgcaacttaagctacttgtcacacatggtaaggagcaagggtatttaacctattctgaagtgaatgatcatctaccagaagacattattgattctgaacaaatcgatgatattattcagatgattaatgacatgggcattccagtagttgaagaagcacctgatgctgacgatctaatattaaatgaaatcaatacagatacagatgaagatgcagttgaagcagcaactcaggtactatctagtgtagaatctgaattaggacgaactactgatcctgtacgcatgtatatgagagaaatgggtactgttgaattactcacacgagaaggagaaattgatattgctaaacgtattgaagaaggcattaatcaggttcaatgctcagtatcagagtatccagaagccattacatatcttcttgaacaatatgatcgtgttaaaactggacaaatacgattatcagatataataacaggttttgtagatcccaatgcagaagaaattttcccccctacagctattcatataggttctgaacttcttgatgaacaacaaaataatgaagaagacgaagaaaacaatcaagaagatcatgaagatgatcatagtattgatccagaattagctaatgaaaaattttctgaattacgtatacaatataataatacaaataatacaattaaaaataaaaatcgaacacataaagattcattattagaaatttacaatctttcagaagtttttaaacaatttcgactagttccaaaacaatttgatcatttagttaataatatgagacatatgatggaaagagtacgaaaacaagaaagaattattataaaattatgtgttgaaatatgtaaaatgccaaaaaaaaattttattaaaatttttccaataaaaaaaattaactatctttggtttataagagaacaaaatacaaatcaaccatggtctgaaaacttaaaaaaagttaaagaagatgtgtttattagtgtgaaaaaattaattaaaatagaagaagaaactggcttaacaattgaacaagtaaaagatattaataaaagaatgtctattggagaagcaaaagctagacgagcgaaaaaagaaatggtcgaagctaatttacgattagttatttctatcgcaaaaaaatatacgaatagaggactacagtttttagacttaattcaagaaggaaatattggtttaatgaaagctgtagataaatttgaataccgtcgtggttataagttttcaacttatgctacttggtggattcgacaagctattactcgatctattgctgatcaagctcgtacaattcgtattccagtacatatgattgaaactattaataaactcaatcgtatttctagacaaatgttacaagaaataggtcgagaaccgactccagaagaactttctgaaaaaatgcttattcctgaagataaaattagaaaagtattgaaaatagccaaagaaccgatctcaatggaaacacctattggagatgatgatgattcacatttaggtgattttattgaagatactactttggaattaccattagactctgctacctctgaaagtttacgttctgcaacacatgatgttctatcaggtttaacagctcgtgaagcaaaagtactccgtatgcgctttggaatagatatgaatactgatcacactttagaagaagttggaaaacaatttgatgttactcgagagagaattcgtcaaatagaagcaaaagcacttagaaaactacgtcatcccagcagatcagaagttttgcgcagttttttagacgattaa

SEQ ID NO: 74627 - protein, 612 aa, Buchnera aphidicola subsp
MDQNPQSQLKLLVTHGKEQGYLTYSEVNDHLPEDIIDSEQIDDIIQMINDMGIPVVEEAPDADDLILNEINTDTDEDAVEAATQVLSSVESELGRTTDPVRMYMREMGTVELLTREGEIDIAKRIEEGINQVQCSVSEYPEAITYLLEQYDRVKTGQIRLSDIITGFVDPNAEEIFPPTAIHIGSELLDEQQNNEEDEENNQEDHEDDHSIDPELANEKFSELRIQYNNTNNTIKNKNRTHKDSLLEIYNLSEVFKQFRLVPKQFDHLVNNMRHMMERVRKQERIIIKLCVEICKMPKKNFIKIFPIKKINYLWFIREQNTNQPWSENLKKVKEDVFISVKKLIKIEEETGLTIEQVKDINKRMSIGEAKARRAKKEMVEANLRLVISIAKKYTNRGLQFLDLIQEGNIGLMKAVDKFEYRRGYKFSTYATWWIRQAITRSIADQARTIRIPVHMIETINKLNRISRQMLQEIGREPTPEELSEKMLIPEDKIRKVLKIAKEPISMETPIGDDDDSHLGDFIEDTTLELPLDSATSESLRSATHDVLSGLTAREAKVLRMRFGIDMNTDHTLEEVGKQFDVTRERIRQIEAKALRKLRHPSRSEVLRSFLDD

SEQ ID NO: 74628 - DNA, 1959 bp, Caulobacter crescentus
  CDS (1)..(1959): transl_table=11
atgagcaacaattcctcggccgagacggaagcgcccgaaaccaccggtggtgacggccccctgctcgatctgaccgacgccggcgtcaagaagttcatcaaacaggcgaaagcccgcggctacgtcacgatggacgagctgaacaaggtgctgccgtccgaggaagtcagccccgacgccatcgaagacacgctggccatgctcagcgagatgggcgtcaacgtggttgaggccgaggaagacgccgagaacgccgagggcggcgaggtcgccacgcgtgacgagaacaccaccgtcatcgccagcgacaagccggcggcctatgaccgcaccgacgacccggtgcggatgtatctgcgcgaaatgggctcggtggaactgctctcgcgcgaaggcgaaatcgccatcgccaagcgcatcgaggccggccgcgacacgatgatccgcggcctgtgcgagtcggccctgaccttcgaagccatcatggtgtggcgcgaggaactgggcactggccgcatcctgctgcgcgaagtcatcgacctggaaggcacctacgccgcgatcaacggcgtggccgcccagccggccgccgaggacgacgagggtccggccgagccggtcgacgacgaggccggcgaagccaaggccgagggcgccgaaggcgaggacgaggacgacttcgacgacggcgcgggtccgaccgtcagcgccatggaaggcgagctgcgcgaaggcgtgatggccattctggacgccatcgccagcgagttcgaagccttccgcaagctgcaggacaagctggtcggcagccgcctgaagggcgaggacctctcggacgccgaccgcaaggcctatgaaggcctgtcggcgacgatcatccagcacctgaagacgctgaagctgaacaacaaccgcatcgaggctctggtcgagcagctctatgcgatcaacaagcgcctgatcggtctggaaggccgcctgctgcgcctggccgacagctacggcatcagccgtggcgagttcctcaaggcctatttcggatcggagctgaacccgacctggtccgaacaggtcaaggcgatgggcgtgcgctggaccaagttcgtcgagaacgacagccagtcggtcaccgacatccgcagcgagatcgccgccctggccaccgaaaccggcgtgccgatcgacgactatcgccgcatcgtccagaccgtgcagaagggcgagcgcgaagcccgtcaggccaagaaggaaatggtcgaggccaacctccgcctcgtgatctcgatcgccaagaagtacaccaaccgcggcctgcagttcctggacctgatccaggaaggcaatatcggcctgatgaaggccgtcgataagttcgagtatcgccgcggctacaagttctcgacctacgccacctggtggatccgtcaggcgatcacccgctcgatcgccgaccaggctcgcaccatccgcatcccggtgcacatgatcgagacgatcaacaagatcgtccgcaccagccgccagatgctgcacgagatcggccgcgagccgaccccggaagaactggccgaaaagctggccatgccgctggaaaaggtccgcaaggtcctcaagatcgccaaagagccgatcagcctcgaaaccccgatcggcgacgaggaagacagccacctgggcgacttcatcgaggacaagaacgccatcctgccgatcgacgcggccatccagagcaacctgcgcgaaaccaccacccgcgtgctggcctcgctgaccccgcgtgaagagcgcgtgctgcgcatgcgcttcggcatcggcatgaacaccgaccacaccctggaagaagtcggccagcagttctcggtgacccgcgaacgcatccgtcagatcgaggccaaagccctgcgcaagctcaagcacccctcgcggtcgcgcaagctgcgcagcttcctggactcgtaa

SEQ ID NO: 74629 - protein, 652 aa, Caulobacter crescentus
MSNNSSAETEAPETTGGDGPLLDLTDAGVKKFIKQAKARGYVTMDELNKVLPSEEVSPDAIEDTLAMLSEMGVNVVEAEEDAENAEGGEVATRDENTTVIASDKPAAYDRTDDPVRMYLREMGSVELLSREGEIAIAKRIEAGRDTMIRGLCESALTFEAIMVWREELGTGRILLREVIDLEGTYAAINGVAAQPAAEDDEGPAEPVDDEAGEAKAEGAEGEDEDDFDDGAGPTVSAMEGELREGVMAILDAIASEFEAFRKLQDKLVGSRLKGEDLSDADRKAYEGLSATIIQHLKTLKLNNNRIEALVEQLYAINKRLIGLEGRLLRLADSYGISRGEFLKAYFGSELNPTWSEQVKAMGVRWTKFVENDSQSVTDIRSEIAALATETGVPIDDYRRIVQTVQKGEREARQAKKEMVEANLRLVISIAKKYTNRGLQFLDLIQEGNIGLMKAVDKFEYRRGYKFSTYATWWIRQAITRSIADQARTIRIPVHMIETINKIVRTSRQMLHEIGREPTPEELAEKLAMPLEKVRKVLKIAKEPISLETPIGDEEDSHLGDFIEDKNAILPIDAAIQSNLRETTTRVLASLTPREERVLRMRFGIGMNTDHTLEEVGQQFSVTRERIRQIEAKALRKLKHPSRSRKLRSFLDS

SEQ ID NO: 74630 - DNA, 1716 bp, Chlamydia trachomatis
  CDS (1)..(1716): transl_table=11
atgcgcatggatacgctagatagtcaagctgccgaggcagctcaagaagaagaaatccaaagaaagttagaagagttagtcactcttgctaaggatcaagggttcatcacgtatgaagaaatcaatgaaattcttcctccttctttcgatacgccagaacagatcgatcaagttttaatttttctggcgggaatggatgttcaagtcctgaaccaagcagatgtagagcgacagaaagaaagaaaaaaggaagcaaaagagctagaagggttagctaagcgttctgaaggaacgccagatgatcctgttcgtatgtatttgaaagaaatgggaaccgttcctctacttactagagaggaagaggtggaaatttctaagagaatagaaaaagctcaagttcaaatagaaagaattattttgcgcttccgctattctacaaaggaagctgtgtcgatcgcgcagtatctcatcaatggtaaagaacgatttgataagatcgtttctgaaaaggaagtagaagataagacacacttccttaatcttctgcccaaactcatctctttattgaaagaagaagatgcatatttggaagagcggcttcttgctttaaaagatccggcgttgtccaagccagatcaggcaaggttgaatgacgagctggagaaatgccgtatccgtacacaagcgtatttgcggtgtttccattgtcgtcataatgtgacggaagatttcggagaggtggtttttaaggcttatgattcattcttgcagttagaacagcaaatcaatgatttgaaagcgcgagctgagagaaataagtttgccgcagcgaaacttgctgcggcgcggcgaaagcttcacaagcgtgaggtagcggctggacgcactcttgaagagtttaaaaaagatgtgcggatgttacagcgttggatggacaagagccaggaagccaaaaaagagatggtcgaatccaacttacggttggtaatttccatcgcgaaaaaatataccaacagagggctgtctttcttggatctgattcaagaaggtaatatgggcttgatgaaggctgttgagaagtttgagtatcgtagaggatacaagttttcaacttatgccacgtggtggattcgtcaggctgttacacgggctattgcggatcaagcacgaacgatccgcattcctgttcacatgatagaaaccatcaataaagtgcttcgtggagctaaaaaattaatgatggaaacagggaaagagcctactccggaagagctcggagaggaattgggctttactccagatcgtgttcgagaaatctataaaatagctcaacacccgatttctttgcaggcagaggtcggagatggtggggagagctcttttggagatttcttggaagatactgctgttgaatctccagcggaggcaacagggtattccatgttaaaagataaaatgaaagaagttttgaaaacgcttacggaccgtgagcgttttgttttgattcatcggtttggtcttcttgatggtcgtcccaagactttggaagaggtgggttctgcattcaatgtaacacgagagcggattcgccaaattgaagctaaagctttacgaaagatgcgtcatcctatccgttccaaacagttgcgagcgttcctagatctattggaagaagaaaaaattggttcgggtaagattaaaagttataaaaattag

SEQ ID NO: 74631 - protein, 571 aa, Chlamydia trachomatis
MRMDTLDSQAAEAAQEEEIQRKLEELVTLAKDQGFITYEEINEILPPSFDTPEQIDQVLIFLAGMDVQVLNQADVERQKERKKEAKELEGLAKRSEGTPDDPVRMYLKEMGTVPLLTREEEVEISKRIEKAQVQIERIILRFRYSTKEAVSIAQYLINGKERFDKIVSEKEVEDKTHFLNLLPKLISLLKEEDAYLEERLLALKDPALSKPDQARLNDELEKCRIRTQAYLRCFHCRHNVTEDFGEVVFKAYDSFLQLEQQINDLKARAERNKFAAAKLAAARRKLHKREVAAGRTLEEFKKDVRMLQRWMDKSQEAKKEMVESNLRLVISIAKKYTNRGLSFLDLIQEGNMGLMKAVEKFEYRRGYKFSTYATWWIRQAVTRAIADQARTIRIPVHMIETINKVLRGAKKLMMETGKEPTPEELGEELGFTPDRVREIYKIAQHPISLQAEVGDGGESSFGDFLEDTAVESPAEATGYSMLKDKMKEVLKTLTDRERFVLIHRFGLLDGRPKTLEEVGSAFNVTRERIRQIEAKALRKMRHPIRSKQLRAFLDLLEEEKIGSGKIKSYKN

SEQ ID NO: 74632 - DNA, 1842 bp, Escherichia coli
  CDS (1)..(1842): transl_table=11
atggagcaaaacccgcagtcacagctgaaacttcttgtcacccgtggtaaggagcaaggctatctgacctatgccgaggtcaatgaccatctgccggaagatatcgtcgattcagatcagatcgaagacatcatccaaatgatcaacgacatgggcattcaggtgatggaagaagcaccggatgccgatgatctgatgctggctgaaaacaccgcggacgaagatgctgccgaagccgccgcgcaggtgctttccagcgtggaatctgaaatcgggcgcacgactgacccggtacgcatgtacatgcgtgaaatgggcaccgttgaactgttgacccgcgaaggcgaaattgacatcgctaagcgtattgaagacgggatcaaccaggttcaatgctccgttgctgaatatccggaagcgatcacctatctgctggaacagtacgatcgtgttgaagcagaagaagcgcgtctgtccgatctgatcaccggctttgttgacccgaacgcagaagaagatctggcacctaccgccactcacgtcggttctgagctttcccaggaagatctggacgatgacgaagatgaagacgaagaagatggcgatgacgacagcgccgatgatgacaacagcatcgacccggaactggctcgcgaaaaatttgcggaactacgcgctcagtacgttgtaacgcgtgacaccatcaaagcgaaaggtcgcagtcacgctaccgctcaggaagagatcctgaaactgtctgaagtattcaaacagttccgcctggtgccgaagcagtttgactacctggtcaacagcatgcgcgtcatgatggaccgcgttcgtacgcaagaacgtctgatcatgaagctctgcgttgagcagtgcaaaatgccgaagaaaaacttcattaccctgtttaccggcaacgaaaccagcgatacctggttcaacgcggcaattgcgatgaacaagccgtggtcggaaaaactgcacgatgtctctgaagaagtgcatcgcgccctgcaaaaactgcagcagattgaagaagaaaccggcctgaccatcgagcaggttaaagatatcaaccgtcgtatgtccatcggtgaagcgaaagcccgccgtgcgaagaaagagatggttgaagcgaacttacgtctggttatttctatcgctaagaaatacaccaaccgtggcttgcagttccttgacctgattcaggaaggcaacatcggtctgatgaaagcggttgataaattcgaataccgccgtggttacaagttctccacctacgcaacctggtggatccgtcaggcgatcacccgctctatcgcggatcaggcgcgcaccatccgtattccggtgcatatgattgagaccatcaacaagctcaaccgtatttctcgccagatgctgcaagagatgggccgtgaaccgacgccggaagaactggctgaacgtatgctgatgccggaagacaagatccgcaaagtgctgaagatcgccaaagagccaatctccatggaaacgccgatcggtgatgatgaagattcgcatctgggggatttcatcgaggataccaccctcgagctgccgctggattctgcgaccaccgaaagcctgcgtgcggcaacgcacgacgtgctggctggcctgaccgcgcgtgaagcaaaagttctgcgtatgcgtttcggtatcgatatgaacaccgactacacgctggaagaagtgggtaaacagttcgacgttacccgcgaacgtatccgtcagatcgaagcgaaggcgctgcgcaaactgcgtcacccgagccgttctgaagtgctgcgtagcttcctggacgattaa

SEQ ID NO: 74633 - protein, 613 aa, Escherichia coli
MEQNPQSQLKLLVTRGKEQGYLTYAEVNDHLPEDIVDSDQIEDIIQMINDMGIQVMEEAPDADDLMLAENTADEDAAEAAAQVLSSVESEIGRTTDPVRMYMREMGTVELLTREGEIDIAKRIEDGINQVQCSVAEYPEAITYLLEQYDRVEAEEARLSDLITGFVDPNAEEDLAPTATHVGSELSQEDLDDDEDEDEEDGDDDSADDDNSIDPELAREKFAELRAQYVVTRDTIKAKGRSHATAQEEILKLSEVFKQFRLVPKQFDYLVNSMRVMMDRVRTQERLIMKLCVEQCKMPKKNFITLFTGNETSDTWFNAAIAMNKPWSEKLHDVSEEVHRALQKLQQIEEETGLTIEQVKDINRRMSIGEAKARRAKKEMVEANLRLVISIAKKYTNRGLQFLDLIQEGNIGLMKAVDKFEYRRGYKFSTYATWWIRQAITRSIADQARTIRIPVHMIETINKLNRISRQMLQEMGREPTPEELAERMLMPEDKIRKVLKIAKEPISMETPIGDDEDSHLGDFIEDTTLELPLDSATTESLRAATHDVLAGLTAREAKVLRMRFGIDMNTDYTLEEVGKQFDVTRERIRQIEAKALRKLRHPSRSEVLRSFLDD

SEQ ID NO: 74634 - DNA, 2016 bp, Helicobacter pylori
  CDS (1)..(2016): transl_table=11
atgaaaaagaaagctaacgaagaaaaagcccaaaaaagagctaaaacagaagccaaagcagaagccacacaagaaaataaaactaaagaaaacaataaagccaaagaaagcaaaattaaagaaagcaaaatcaaagaagctaaagcgaaagaacctattcctgttaaaaagcttagttttaatgaagcgttagaagaattgttcgctaattccttaagcgattgcgtttcttatgagtccatcattcaaatcagcgcgaaagtccccactctagcccaaatcaaaaaaatcaaagaattgtgccaaaaataccaaaagaaattagtcagctcttcagaatacgctaaaaaactcaatgcgattgacaagattaaaaaaaccgaagaaaagcaaaaagttttagatgaagaattagaagatggctatgactttttgaaagaaaaggattttttagagtggagcagaagcgatagcccagtgcgcatgtatttgcgcgaaatgggggatataaaacttttaagcaaagatgaagagattgaattgagcaagcaaatccgcttgggtgaagacattattttagacgcgatctgctcggtgccgtatttgattgattttatctatgcgtataaagacgctttaatcaatcgtgaaagaagggttaaagagcttttcaggagctttgatgatgacgatgaaaatagcgtgagcgattctaaaaaagatgaagacaacgaagaagatgaagaaaacgaagaaaggaaaaaagtcgtttctgaaaaagacaagaagcgtgtagaaaaggttcaagaaagctttaaagccctagacaaggctaaaaaagaatggcttaaagcccttgaagcccccatagatgaaagagaagacgaattggtgcgttcattgaccctagcttacaaacgccaaacactcaaagacagactctatgatttagaacctaccagcaaactgattaatgaattagtcaaaacgatggaaaccactttaaaaagcggcgatgggtttgaaaaagagttgaaacgcttggaatacaaactgcccttattcaatgacactctcatcgcaaaccataaaaaaatccttgccaatatcactaacatgactaaagaagatattatcgctcaagtgccagaagcgactatggtgagcgtgtatatggatcttaaaaagctttttttgactaaagaagcgagcgaagaaggctttgatctagcccccaacaagctaaaagaaattttagagcaaatcaaaagagggaagttgatttccgatcgcgctaaaaacaaaatggctaaatccaatttaaggttggtggtgagcatcgctaaacgattcacgagcagaggcttaccattcttggatttgattcaagagggcaatattggcttgatgaaagcggtggataagtttgagcatgaaaagggcttcaagttttctacctatgcgacctggtggatcaaacaagctatcagcagagccatagccgatcaggcccgcactatccgcatccccattcacatgattgatacgattaatcgcatcaataaagtcatgcgcaaacacattcaagaaaacggcaaagagcctgatttagaagtggtggctgaagaagtggggctttcgttagataaagtgaagaatgtgattaaggtgactaaagagcctatcagtttggaaaccccagtcggcaatgatgatgatggcaagtttggggatttcgtggaagataagaatatcgtcagctccattgatcacatcatgcgagaagatttgaaagcacaaattgaaagcgttttggatcagttgaatgagcgagaaaaagcggtgatccgcatgcgttttgggcttttagacgatgaaagcgatcgaactttagaagaaattggcaaggaattgaatgttactagagaaagggtgcgccagattgaaagctctgcgattaaaaaattgagaagcccgcagtacgggcgcattttaagaaactatttgcgcatttga

SEQ ID NO: 74635 - protein, 671 aa, Helicobacter pylori
MKKKANEEKAQKRAKTEAKAEATQENKTKENNKAKESKIKESKIKEAKAKEPIPVKKLSFNEALEELFANSLSDCVSYESIIQISAKVPTLAQIKKIKELCQKYQKKLVSSSEYAKKLNAIDKIKKTEEKQKVLDEELEDGYDFLKEKDFLEWSRSDSPVRMYLREMGDIKLLSKDEEIELSKQIRLGEDIILDAICSVPYLIDFIYAYKDALINRERRVKELFRSFDDDDENSVSDSKKDEDNEEDEENEERKKVVSEKDKKRVEKVQESFKALDKAKKEWLKALEAPIDEREDELVRSLTLAYKRQTLKDRLYDLEPTSKLINELVKTMETTLKSGDGFEKELKRLEYKLPLFNDTLIANHKKILANITNMTKEDIIAQVPEATMVSVYMDLKKLFLTKEASEEGFDLAPNKLKEILEQIKRGKLISDRAKNKMAKSNLRLVVSIAKRFTSRGLPFLDLIQEGNIGLMKAVDKFEHEKGFKFSTYATWWIKQAISRAIADQARTIRIPIHMIDTINRINKVMRKHIQENGKEPDLEVVAEEVGLSLDKVKNVIKVTKEPISLETPVGNDDDGKFGDFVEDKNIVSSIDHIMREDLKAQIESVLDQLNEREKAVIRMRFGLLDDESDRTLEEIGKELNVTRERVRQIESSAIKKLRSPQYGRILRNYLRI

SEQ ID NO: 74636 - DNA, 1758 bp, Leptospira interrogans serogroup Icterohaemorrhagiae serovar
  CDS (1)..(1758): transl_table=11
atggaaaatctacaaagtatgcccgaggttcaaaaaattatttccctcggaaaagcaaacggtgaagtttcttacgatgatattaacgaaatacttcccgataaaattctgaactcggaaaagatagacgatttttttacactactgcacgagatgggaatcgaaatcgtagaagaatataccagaaacactctggaacctgcttctactctcgttcctaaagacgattctaaaccagctagaaagaaaaaagaatcctccgcttctacaagcggttccgaagatcccatcaaactttacttaagagaaatcggtaaggtaagtttgatttccggtgaaacagaggtttttttagcaaaaagaattgaaaagggagaaaagattatcgaagagacaatcttaagttcctccattctcagagcgaattatattaaacttttacctaaaattcgaagtaagaagatcaaggtttatgatctgattcgagttgataaaatgtatgctctcaacgcagaagaggctcataaactagaagaattattttttaaaaacattttagtgattcaagaacaagagaaagttcttcaagaagcagtttctaaaattagaaagtattctgaaacttctaaaaagtacaaggaatttaaagagaagatagacgcttctacagaaatcatacacaacgcgattagagaacttggagtttcccaaaaagaaattcaaaaaatttctcaaaagatcaagtccatggtttttagaatcaaggaaatagatcgtcattttttaaagatcaaagcacaatatggtcaagacgtccgagacatcaaagcgtttaatcgttttatcgaaaagaatgaaaagttagacgacatcgaagtcaagatgggagtcaacatagacgaggttcgagaagttatcaaggacatccgaaacaacgaaagaaaacttcgtcgtatggaacaagaagctggctccacagtccaagaaatcaaagactggggcgaaaaaatcatcaaaggggaaagggaaatttcccaagcaaaaaaagagctcgttaaagcaaatcttagactcgtggtttccatcgcaaaacgttatgcgaatcgtggtatgcacttcttcgatttaattcaagaaggaaacattggacttatcaaagcggtagataaattcgaatataaaaaaggttataaattttccacatacgctacttggtggattcgccaggcaattacacgtgcaatttccgatcaagcaagaacgattcgagttccagttcacatgatcgaacaagtcaataaggtcattcgtgaaaccagattgtttatccaagaatttggacgcgatccaaataacgaagagattgcagaaagacttggttggccggttcaaaaagtgaaaatggttaagaacgttgcgagggaaccaatttctttggaaattcctgtgggctccgaagaagattcggaattgggagattttattccagatactgaagtggaaactcctgtaaatgcagcggcgtccagtattttagcggaacaaattcgccaagtgttacatactcttcccgcgcgcgaacaaaaggtaattcggatgcgtttcggtttggacgacggttatcctcaaacgttggaagaagtaggctatcaattcaaagtgacaagagagaggattcgtcagatcgaagcgaaggctcttcgaagactcagacatccgtctcgttctaagaagctgaaggattatatcgacggttga

SEQ ID NO: 74637 - protein, 585 aa, Leptospira interrogans serogroup Icterohaemorrhagiae serovar
MENLQSMPEVQKIISLGKANGEVSYDDINEILPDKILNSEKIDDFFTLLHEMGIEIVEEYTRNTLEPASTLVPKDDSKPARKKKESSASTSGSEDPIKLYLREIGKVSLISGETEVFLAKRIEKGEKIIEETILSSSILRANYIKLLPKIRSKKIKVYDLIRVDKMYALNAEEAHKLEELFFKNILVIQEQEKVLQEAVSKIRKYSETSKKYKEFKEKIDASTEIIHNAIRELGVSQKEIQKISQKIKSMVFRIKEIDRHFLKIKAQYGQDVRDIKAFNRFIEKNEKLDDIEVKMGVNIDEVREVIKDIRNNERKLRRMEQEAGSTVQEIKDWGEKIIKGEREISQAKKELVKANLRLVVSIAKRYANRGMHFFDLIQEGNIGLIKAVDKFEYKKGYKFSTYATWWIRQAITRAISDQARTIRVPVHMIEQVNKVIRETRLFIQEFGRDPNNEEIAERLGWPVQKVKMVKNVAREPISLEIPVGSEEDSELGDFIPDTEVETPVNAAASSILAEQIRQVLHTLPAREQKVIRMRFGLDDGYPQTLEEVGYQFKVTRERIRQIEAKALRRLRHPSRSKKLKDYIDG

SEQ ID NO: 74638 - DNA, 1848 bp, Pseudomonas fluorescens
  CDS (1)..(1848): transl_table=11
atgtccggaaaagcgcaacagcagtctcgcctcaaagagttgatcagccgtggacgtgagcagggttacctgacttacgcggaggtcaacgaccacctgccggaggatatttcagatccggaacaggtggaagacatcatccgcatgatcaacgacatggggatcaacgtattcgagagtgctccggatgcggatgcccttttgttggccgaagccgataccgacgaagcagcagctgaagaagccgccgcagcgttggcggctgtggaaaccgacattggtcgcactaccgacccagtgcgcatgtacatgcgcgaaatgggcacggtagagctgctcacacgtgaaggcgaaatcgaaatcgccaagcgtatcgaagagggtatccgtgaagtgatgggcgcaatcgcgcacttccctggcacggttgatcacatcctctccgagtacactcgcgtcaccaccgaaggtggacgcctgtccgacgttctcagcgggtacatcgacccggatgacggcattacgccgcctgccgccgaagtgccgccgcctgtcgacaccaagaccgcgaaagcggatgacgacagcgaagacgaagaagcggaagcgaccgaagacgaagaagaagccgaaagcggtccggatccggtcatcgccgcacagcgctttggcgccgtcgccgaccagatggaagtcacccgcaaggcgctgaagaaacacggccgcgagaacaagcaagccatcgccgaaatgctggccctggctgaactgttcatgccgatcaaactggttccgaagcaattcgaaggcctggttgaacgtgtacgcagtgccctggatcgcctgcgccagcaggaacgcgccatcatgcagctctgcgtgcgtgatgcccgcatgccacgtgccgacttcctgcgccagttcccgggcaacgaagtggatgaaagctggaccgacgccctggccaaaggcaagagcaagtacgccgaagccatcgcccgcctgcagccggacatcatccgttgccagcagaagctgaccgctcttgaagtcgaaacaggcttgaagatcgccgagatcaaggacatcaaccgtcgcatgtcgatcggtgaggccaaggcccgccgcgcgaagaaagagatggttgaagccaacctgcgtctggtgatctccatcgccaagaagtacaccaaccgtggcctgcagttcctcgacctgatccaggaaggcaacatcggcttgatgaaagccgtggacaagttcgaataccgtcgcggctacaagttctcgacttatgccacctggtggatccgtcaggcgatcactcgctcgatcgccgaccaggcccgcaccattcgtattccggtgcacatgatcgagacgatcaacaagctcaaccgtatttcccggcagatgctgcaggaaatgggtcgcgaaccgactccggaagagctgggcgaacgcatggaaatgcctgaggacaagatccgcaaggtattgaagatcgccaaagagccgatctccatggaaaccccgatcggtgatgacgaagactcccatctgggcgacttcatcgaagactcgaccatgcagtcgccaatcgatgtcgccacagttgagagcctgaaggaagcaactcgcgaagtactctccggcctcactgcccgtgaagccaaggtactgcgcatgcgcttcggcatcgacatgaataccgaccataccctcgaggaagtcggtaagcagttcgatgtgacccgtgagcggatccgccagatcgaagccaaggcgctgcgcaagctgcgccacccgacgcgaagcgagcatctgcgctccttcctcgacgagtaa

SEQ ID NO: 74639 - protein, 615 aa, Pseudomonas fluorescens
MSGKAQQQSRLKELISRGREQGYLTYAEVNDHLPEDISDPEQVEDIIRMINDMGINVFESAPDADALLLAEADTDEAAAEEAAAALAAVETDIGRTTDPVRMYMREMGTVELLTREGEIEIAKRIEEGIREVMGAIAHFPGTVDHILSEYTRVTTEGGRLSDVLSGYIDPDDGITPPAAEVPPPVDTKTAKADDDSEDEEAEATEDEEEAESGPDPVIAAQRFGAVADQMEVTRKALKKHGRENKQAIAEMLALAELFMPIKLVPKQFEGLVERVRSALDRLRQQERAIMQLCVRDARMPRADFLRQFPGNEVDESWTDALAKGKSKYAEAIARLQPDIIRCQQKLTALEVETGLKIAEIKDINRRMSIGEAKARRAKKEMVEANLRLVISIAKKYTNRGLQFLDLIQEGNIGLMKAVDKFEYRRGYKFSTYATWWIRQAITRSIADQARTIRIPVHMIETINKLNRISRQMLQEMGREPTPEELGERMEMPEDKIRKVLKIAKEPISMETPIGDDEDSHLGDFIEDSTMQSPIDVATVESLKEATREVLSGLTAREAKVLRMRFGIDMNTDHTLEEVGKQFDVTRERIRQIEAKALRKLRHPTRSEHLRSFLDE

SEQ ID NO: 74640 - DNA, 1845 bp, Pseudomonas putida
  CDS (1)..(1845): transl_table=11
atgtccggaaaagcgcaacagcagtctcgtatcaaagagttgatcacccgcggtcgtgagcagggctacctgacttacgcggaggtcaacgaccacctgcctgaggatatttcagatcccgaacaggtggaagacatcatccgcatgatcaacgacatggggatcaacgtattcgagagtgctccggatgcggatgcccttctgttggcggaagccgacaccgacgaagccgcggccgaagaagccgctgctgcgttggcggcagttgaaaccgatatccgccgcacgaccgacccggtgcgcatgtacatgcgcgaaatgggtaccgtcgagctgctgacccgcgaaggcgaaatcgaaatcgccaagcgtatcgaggaaggcatccgtgaagtcatgggcgccatcgcccacttcccgggcactgtcgactacattctcggcgaatatgaccgcgtcaaccgagggtgccgtctgtcggacgttctcagcggttacatcgaccctgacgacaacatcgctgcaccgaccgaagaagtgccgatccctggcaccaaggccgccgctgcgaaagaagaggccgacgacgacgaagaagagtccgaaggcggtgacgacgaggaagagccgaaagcggccctgacccggtcgtcgcagcccagcgtttcggtgcggtatccgagcagcttcagcgaccaccaaggtcctgaagaaaaacggtcgtacccacaaggaaagcgtcgagccctgcaggccctggccgacctgttcatgcccatcaagctggtaccgaagcagttcgaggtactggtcgagcgtgtacgtgatgccctgaaccgcctgcgccagcaagaacgcgccatcatgcagctgtgcgtgcgtgacgcccgcatgccgcgtgccgacttcctgcgcatgttcccaagcaacgaaaccgaccagacctggagcggtgacctggccaagcgcaacaccaagtgggctgctgccctgggtgaaaaggacgccgccatcgttgcctgccagcagaagctgatcgaccttgagaccgaaaccggcctgaccgttgccgagatcaaggaaatcaaccgtcgcatgtcgatcggtgaagccaaggcccgccgcgccaagaaagaaatggtcgaggcgaacttgcgtctggtgatctccatcgccaagaagtacaccaaccgtggcctgcagttcctcgacctgatccaggaaggcaacatcggcttgatgaaagcggtggacaagttcgaataccgtcgcggctacaagttctcgacctacgccacctggtggattcgtcaggcgatcacccgttcgatcgccgaccaggcacgcaccatccgtattccggtgcacatgatcgaaacgatcaacaagctcaaccgtatttcccgccagatgctgcaggaaatgggccgtgaaccgaccccggaagagctgggcgagcgcatggaaatgcctgaggacaagatccgcaaggtattgaagatcgccaaagagccgatctccatggaaaccccgatcggtgacgacgaagattcgcacctgggcgacttcatcgaggactcgaccatgcagtccccgatctacgttgccacggtcgaaagcctcaaggaagccacccgcgacgtgctctcgggcctgaccgcacgcgaagccaaggtgctgcgcatgcgtttcggtatcgacatgaacaccgaccacaccctcgaagaggtgggcaagcagtttgacgtaacgcgtgagcgtatccgtcagatcgaagcgaaggcttggcgcaaactgcgccacccgactcgcagcgagcacttgcgctccttcctcgacgagtga

SEQ ID NO: 74641 - protein, 614 aa, Pseudomonas putida
MSGKAQQQSRIKELITRGREQGYLTYAEVNDHLPEDISDPEQVEDIIRMINDMGINVFESAPDADALLLAEADTDEAAAEEAAAALAAVETDIRRTTDPVRMYMREMGTVELLTREGEIEIAKRIEEGIREVMGAIAHFPGTVDYILGEYDRVNRGCRLSDVLSGYIDPDDNIAAPTEEVPIPGTKAAAAKEEADDDEEESEGGDDEEEPKAALTRSSQPSVSVRYPSSFSDHQGPEEKRSYPQGKRRALQALADLFMPIKLVPKQFEVLVERVRDALNRLRQQERAIMQLCVRDARMPRADFLRMFPSNETDQTWSGDLAKRNTKWAAALGEKDAAIVACQQKLIDLETETGLTVAEIKEINRRMSIGEAKARRAKKEMVEANLRLVISIAKKYTNRGLQFLDLIQEGNIGLMKAVDKFEYRRGYKFSTYATWWIRQAITRSIADQARTIRIPVHMIETINKLNRISRQMLQEMGREPTPEELGERMEMPEDKIRKVLKIAKEPISMETPIGDDEDSHLGDFIEDSTMQSPIYVATVESLKEATRDVLSGLTAREAKVLRMRFGIDMNTDHTLEEVGKQFDVTRERIRQIEAKAWRKLRHPTRSEHLRSFLDE

SEQ ID NO: 74642 - DNA, 2055 bp, Rhizobium meliloti
  CDS (1)..(2055): transl_table=11
atggcaacaaaagtcaaagaaaacgaagaagccgacgttgaacgtgaaggtgcaccggacggtccgcttctcgatctttccgacgatgctgtcaagaagatgatcaaggccgccaagaagcgcggctatgtgaccatggacgagctcaactccgttctgccctccgaagaagtgacttccgagcagatcgaagacacgatgtccatgctttccgacatgggcatcaacgtcatcgaggacgaggaagccgaggaggctgccgccagcgacgacgatgacggcgccgacgagggcgaaagcgaaggcggcgaactcgcgcctgctagcggcaccgcacttgcagccagcaagaagaaggagccgaccgatcgcaccgacgatccggtgcgcatgtatctgcgcgagatgggctccgtggagcttctctcgcgcgaaggcgaaatcgccatcgccaagcgtatcgaggccggccgcgaaacgatgattgccgggctctgtgagagcccgcttaccttccaggcgttgatcatctggcgcgacgagttgaacgagggccagacgctgctgcgcgagatcatcgatctcgagacgacctattccggccccgaggcaaaggctgcaccgcagttccagagcccggaaaagatcgaagccgaccgcaaggcggcggaagagaaggaaaaggtccgcaggacccgaactgcggcgaacgacgacgacatcaccaatgtcggcggcgaaggccaggcacccgaggaagaggaggaggacgacgacgagtcgaacctctcgctcgccgcgatggaagcggaactgcgcccgcaggtgatggagacgctcgacgtcatcgccgaaacctacaagaagctccgcaagctgcaggaccagcaggtggaagcgcgccttgccgcgaccggcactctgtcgccggcgcaggagcgccgctacaaggagctgaaggacgagctgatcaaggccgtgaagtcgctgtcgctcaaccagaaccgcatcgacgccctggttgagcagctctacgacatctccaagcgcctgacgcagaacgagggccgcctcctgcgcctggccgaatcctatggcgtcaagcgtgaggcgttcctggagcagtattccggcgccgagctcgatccgaactggatgaagtcgatcagcaatctcgccggcaaaggctggaaggagtttgccagggccgagaaccagacgatccgcgacatccgccaggagatccagaaccttgcgacggagaccggcatttccatcgccgagtttcgccgcatcgtatccatggtgcagaagggcgagcgtgaagcgcgtatcgccaagaaggagatggtcgaggccaaccttcgtctggtgatctcgattgccaagaagtacacgaaccgcggtctgcagttcctcgatctgatccaggaaggcaacatcggtctcatgaaggcggtcgacaagttcgagtatcgccgcggctacaagttctcgacctatgccacatggtggatccggcaggcgatcacccgttcgatcgccgaccaggcccgcacgatccgcattccggtgcacatgatcgagacgatcaacaagatcgtccgcacctcgcgccagatgctgcacgagatcggccgcgagccgacgcccgaggaactggcggaaaagctcgcaatgccgctcgagaaggtgcgcaaggtcctgaagatcgccaaggagccgatctcgctcgaaacgccggtcggcgacgaggaagattcgcatctcggggatttcatcgaggacaagaatgcgttgttgccgatcgatgcggccattcaggcgaatctgcgcgagacgaccacgcgcgtgctcgcctcgctcacgccccgcgaggagcgcgtgctgcgcatgcgtttcggcatcggcatgaacaccgaccatacgctggaagaagtcggccagcagttctcggttacccgcgaacgcatccggcagatcgaagcgaaggcgctgcgcaagctcaagcatccaagccgttcgcgcaagttgcgctcgttcctggacagctga

SEQ ID NO: 74643 - protein, 684 aa, Rhizobium meliloti
MATKVKENEEADVEREGAPDGPLLDLSDDAVKKMIKAAKKRGYVTMDELNSVLPSEEVTSEQIEDTMSMLSDMGINVIEDEEAEEAAASDDDDGADEGESEGGELAPASGTALAASKKKEPTDRTDDPVRMYLREMGSVELLSREGEIAIAKRIEAGRETMIAGLCESPLTFQALIIWRDELNEGQTLLREIIDLETTYSGPEAKAAPQFQSPEKIEADRKAAEEKEKVRRTRTAANDDDITNVGGEGQAPEEEEEDDDESNLSLAAMEAELRPQVMETLDVIAETYKKLRKLQDQQVEARLAATGTLSPAQERRYKELKDELIKAVKSLSLNQNRIDALVEQLYDISKRLTQNEGRLLRLAESYGVKREAFLEQYSGAELDPNWMKSISNLAGKGWKEFARAENQTIRDIRQEIQNLATETGISIAEFRRIVSMVQKGEREARIAKKEMVEANLRLVISIAKKYTNRGLQFLDLIQEGNIGLMKAVDKFEYRRGYKFSTYATWWIRQAITRSIADQARTIRIPVHMIETINKIVRTSRQMLHEIGREPTPEELAEKLAMPLEKVRKVLKIAKEPISLETPVGDEEDSHLGDFIEDKNALLPIDAAIQANLRETTTRVLASLTPREERVLRMRFGIGMNTDHTLEEVGQQFSVTRERIRQIEAKALRKLKHPSRSRKLRSFLDS

SEQ ID NO: 74644 - DNA, 1845 bp, Shewanella violacea
  CDS (1)..(1845): transl_table=11
atggagcacactcctcagtcgcaacttaaattgttgctagctaaaggtaaagagcaaggctacttaacctatgcagaagtgaatgatcacttgcctgctgatatggtcgatgcagaccagatcgaagatattgtccagatgattaatgacatgggtattcgcgtctatgaacaggcgccggatgctgatgaaatcatgatgacagaagacagcacagatgatgatgctgcagaagaagctgccgctgcacttgcaacggtagaggccgagcttggtcgtacaacagatccagtccgcatgtatatgcgtgaaatgggtactgttgaacttcttacccgtgaaggcgagatcgttatcgctaaacgtatcgaagaaggaatttataccgttcaagcatcggtcgctgagtaccctccagcgattgcctcgatcctcgatcagttcgatcgctatgaagccgaagaagttcgtctatccgatatcatctcaggttttatcgaccctaatgccgctgatattgccccaacggctactcacattggttcagatttgtcacaaagtgagcgcgacaaagatgactcaaaggatgactcgaaggatgatgatgaagatgaagaagaggaaggtccaaaaggaccggatcctgaagaatctaaagagcgcttcactcagctaagagaagtacatgagaacacgctgaagatcatcgcagacaaaggtcgtggccatcctgaagcaaccgttgccctgtttgagattggtgaattatttaaagaattccgtctcatgcctaagcagttcgaccgcttagtcaagaacatgcgtgccaccatggataaggtccgtgttcaagaacgtttgatcatgaagctctgtgtcgaacaagctaagatgcctaagaaaaacttcgttaagggctataccgccgacgaaagcagcatagcctggtttgacaccgaactcgcctctaagaaaccttatgctgaaggtttaaagatgatcgagcctgacgttcgtcgttgtcgcttcaagctcgatattatcgagaaagaaaccggactcgcgattgcgtctatcaaagacatcaaccgtcgtatgtcgatcggtgaagctaaggctcgtcgcgctaagaaagagatggtagaagctaacttacgtctggttatctctatcgctaaaaagtacaccaaccgtggtttgcagttcctggatcttattcaggaaggtaacatcggcttgatgaaagcggttgataagttcgaatatcgtcgtggttataagttctcaacctacgctacttggtggatccgtcaggcgatcactcgctcaattgccgatcaggcaagaacgattcgtatcccagtgcatatgattgagacaattaacaagttgaaccgtatttctcgtcagatgctacaggaaatgggccgcgagccgactcctgaagagctggctgagcgtatgctgatgcctgaagataagatccgtaaggtacttaagattgccaaagagcctatctcaatggaaacacctatcggtgatgacgaagattcgcacttaggtgatttcatcgaggataccactctcgaactgcctttggactcagcaacaggcgagagcctacgaaacgcaactcacgaagtattagcaggtctaacggcccgtgaagctaaggtattgcgtatgcgtttcggtatcgacatgaacaccgaccatactctcgaagaggttggtaagcagtttgacgtaacccgtgagcgtattcgtcaaattgaagctaaggcgctgcgtaaactacgtcacccttctcgctcagaaatcctcaagtctttccttgatgagtaa

SEQ ID NO: 74645 - protein, 614 aa, Shewanella violacea
MEHTPQSQLKLLLAKGKEQGYLTYAEVNDHLPADMVDADQIEDIVQMINDMGIRVYEQAPDADEIMMTEDSTDDDAAEEAAAALATVEAELGRTTDPVRMYMREMGTVELLTREGEIVIAKRIEEGIYTVQASVAEYPPAIASILDQFDRYEAEEVRLSDIISGFIDPNAADIAPTATHIGSDLSQSERDKDDSKDDSKDDDEDEEEEGPKGPDPEESKERFTQLREVHENTLKIIADKGRGHPEATVALFEIGELFKEFRLMPKQFDRLVKNMRATMDKVRVQERLIMKLCVEQAKMPKKNFVKGYTADESSIAWFDTELASKKPYAEGLKMIEPDVRRCRFKLDIIEKETGLAIASIKDINRRMSIGEAKARRAKKEMVEANLRLVISIAKKYTNRGLQFLDLIQEGNIGLMKAVDKFEYRRGYKFSTYATWWIRQAITRSIADQARTIRIPVHMIETINKLNRISRQMLQEMGREPTPEELAERMLMPEDKIRKVLKIAKEPISMETPIGDDEDSHLGDFIEDTTLELPLDSATGESLRNATHEVLAGLTAREAKVLRMRFGIDMNTDHTLEEVGKQFDVTRERIRQIEAKALRKLRHPSRSEILKSFLDE

SEQ ID NO: 74646 - DNA, 1875 bp, Xanthomonas campestris pv
  CDS (1)..(1875): transl_table=11
atggccaacgaacgtcctgcccagcaatccgacatcaagctactgatcagcaagggcctggaacagggctatctgacctacgccgaagtcaatgaccacctgcccgacgacctggtcgacccggagcagatcgaagacatcatcagcatgatcaacggcatgggcatcgatgtccatgaagttgcccccgatgctgaaaccctgctgctcaacgatggcaacaccggcaaccgcgaggttgacgacaccgctgccgaagaagccgccgccgcgctgaccgcgctggacaccgaaggtggtcgcaccaccgacccggtgcgcatgtatatgcgcgaaatgggcacggtcgagctgctgacccgcgaaggcgaaatcgccatcgccaagcgtatcgaagagggcctgagccaggtccaggccgcactgggtacgttcccgctgtcgaccgagctgctgctgtccgattacgaagcgcacaaggaaggcaagaagcgcctggccgagatcgtggtcggcttcaacgacctgatcgaagaagccgacgctgccgctgcagcgctggccgctgccggcccggtcgccgttgacgaagatgcggtggacgaagacgcagacgaagacggcgatgacgacgctgccgaggaagaagccggcccgaccggtccggacccggtggaagttgccacgcgcatggagaacctggccaacgagtacgccaagttcaagaaggcctacgtcaagtatggcgccgagcacaagaatgtggccaaggcgcgcgaagacatggccgccatcttcaccacactcaagctgccgctgccgctgaccgatgcgctggtcacccagttgcgtggcgtggtcaacggcatcaaggaccacgagcgcaaggtgctgcacctggcgaccaccgtggcgcgcatgccgcgcaaggacttcatccgttcgtgggaaggcaaccagaccaacctggaatgggtggaagacgcactcaagcgcaagcagaagtggtcgtcggcgctgcgcgacgtcaaggaccagatcgtctccgagcagcagggttcgatcgagatggaaaaggcgaactacctcaccctggccgagatcaaggacatcagccgtgcgatggcctacggcgaagccaaggcgcgcaaggccaagaaggaaatggtcgaggccaacctgcgtctggtcatctccatcgccaagaagtacaccaaccgtggcctgcagttcctcgacctcatccaggaaggcaacatcggcctgatgaaggccgtggacaagttcgaataccgtcgcggttacaagttctccacgtatgccacgtggtggatccgtcaggccatcacccgttcgatcgccgatcaggcgcgcaccatccgtattccggtgcacatgatcgaaacgatcaacaagttgaaccgcatttcccgccagatgctccagcagttcggccgtgaggccacgccggaggagctggccaaggaaatggacatgcccgaggacaagatccgcaaggtgatgaaaatcgccaaggaaccgatctcgatggaaaccccgatcggcgacgacgaggattcgcatctgggcgatttcatcgaggacaccaacgtggagtccccgatcgacaacaccaccaacatcaatctctccgagacggtgcgggacgtgttggccggcctgaccccgcgggaagccaaggtgctgcgcatgcgcttcggtatcgacatgaacaccgatcacacgctggaagaggtcggcaagcagttcgatgtcacgcgtgagcggattcgccagatagaggccaaggcgttgcgcaagctgcgtcacccgagccgttcggaacagctgcggtcgttcctggacatcgactga

SEQ ID NO: 74647 - protein, 624 aa, Xanthomonas campestris pv
MANERPAQQSDIKLLISKGLEQGYLTYAEVNDHLPDDLVDPEQIEDIISMINGMGIDVHEVAPDAETLLLNDGNTGNREVDDTAAEEAAAALTALDTEGGRTTDPVRMYMREMGTVELLTREGEIAIAKRIEEGLSQVQAALGTFPLSTELLLSDYEAHKEGKKRLAEIVVGFNDLIEEADAAAAALAAAGPVAVDEDAVDEDADEDGDDDAAEEEAGPTGPDPVEVATRMENLANEYAKFKKAYVKYGAEHKNVAKAREDMAAIFTTLKLPLPLTDALVTQLRGVVNGIKDHERKVLHLATTVARMPRKDFIRSWEGNQTNLEWVEDALKRKQKWSSALRDVKDQIVSEQQGSIEMEKANYLTLAEIKDISRAMAYGEAKARKAKKEMVEANLRLVISIAKKYTNRGLQFLDLIQEGNIGLMKAVDKFEYRRGYKFSTYATWWIRQAITRSIADQARTIRIPVHMIETINKLNRISRQMLQQFGREATPEELAKEMDMPEDKIRKVMKIAKEPISMETPIGDDEDSHLGDFIEDTNVESPIDNTTNINLSETVRDVLAGLTPREAKVLRMRFGIDMNTDHTLEEVGKQFDVTRERIRQIEAKALRKLRHPSRSEQLRSFLDID

SEQ ID NO: 74648 - DNA, 1857 bp, Xylella fastidiosa
  CDS (1)..(1857): transl_table=11
atgtccaatgaacgaactgctcagcaatccgatatcaagcaactgatcagcaaggggttggagcagggttacctgacttacgccgaagtcaatgatcacctaccagaggatctggtggatcccgatcaaattgaagacattattgggatgattaacggaatgggcattgaggtccatgaagtggctcccgatgctgagactttgttgcttaacgaaggaaacactgggaacagggaagtcgacgataccgctgcagaagaggccgcagctgcgcttagcgcccttgataccgaagcaggacgtactaccgatccggtacgtatgtacatgcgtgagatgggtacggtcgaactattaacccgtgaaggtgaaatagcaattgcaaagcgtattgaagaaggcttgagcgaggtacaagctgctttaggcgttttcccgttatctacggaattactgcttagtgaatatgagttgcataaagaaggtaagcggcgtctgactgaggttgtcgttggctttaatgatttgatagaggaggataactccgtaacctcctcagtggacgttactgacgagtcgattgttgaggttgacgaagaagacgatgacagtgtcggtaatgatgaggatgcgcctacgattggtcctgatcctgccgaagttgcttcgcgtatcgaatcgctgtccactgagtatgccaagttcaagaaactttacgccaagcatggccctgagcacaaagcagtcattaaggtgcgtgaagatgtggctgcgatctttgtgacgtttaaactgtcgttgccattgaccgatttacttgttcagcagctacaaaatatggtgaattctgtcaaggatcatgagcgcaaagtgcttcacttggcaacgaatgtagccaaaatgccgcgtaaagacttcatccgttcctgggaaaacaaccagacaaatttagaatgggtggaggatgcgattaagcgcaagcagaaatggtcctctgcgttgcgtgatatcaaagatcagatcaccgctgagcagcaagcttccattgatttggagaaagctaattctttgacgttagccgacatcaaagagattaaccgtatgatggtttatggtgaagcaaaagcatccaaggcgaagaaagagatggttgaagctaatcttcgcttagtgatctcgattgctaagaagtataccaaccgagggttgcagttcctggatttgatacaggaaggcaacatcggtttgatgaaagcagtgtgtaagtttgaacaccgtcgcggctttaagttctccacctacgcgacttggtggatccgtcaggcaattactcgttctattgccgatcaggcgcgcaccattcgtatcccggtgcatatgattgagacgatcaacaaacttaaccgtatctctcgtcaaatgttgcagcagtttggtcgtgaggcgactccagaggaattggctaaggaaatggacatgcctgaggacaagatccgtaaggtaatgaagattgctaaagagccaatctcaatggagactccgatcggagatgatgaagattctcatctgggtgacttcattgaggatcctaatgttgagtctcctgtggataccacaaccaatgtcaacttgtcggaaacagtgcgtgaagtgttggctggtttgacaccaagagaggcgaaggttctgcgtatgcgtttcggtattgatatgaataccgaccacactctggaggaggtgggtaaacaatttgatgtcactcgtgaacgtattcgccagattgaagctaaagcattacggaaacttcgtcatccaagtcgttctgaacaactgcgctcattccttgatattgactga

SEQ ID NO: 74649 - protein, 618 aa, Xylella fastidiosa
MSNERTAQQSDIKQLISKGLEQGYLTYAEVNDHLPEDLVDPDQIEDIIGMINGMGIEVHEVAPDAETLLLNEGNTGNREVDDTAAEEAAAALSALDTEAGRTTDPVRMYMREMGTVELLTREGEIAIAKRIEEGLSEVQAALGVFPLSTELLLSEYELHKEGKRRLTEVVVGFNDLIEEDNSVTSSVDVTDESIVEVDEEDDDSVGNDEDAPTIGPDPAEVASRIESLSTEYAKFKKLYAKHGPEHKAVIKVREDVAAIFVTFKLSLPLTDLLVQQLQNMVNSVKDHERKVLHLATNVAKMPRKDFIRSWENNQTNLEWVEDAIKRKQKWSSALRDIKDQITAEQQASIDLEKANSLTLADIKEINRMMVYGEAKASKAKKEMVEANLRLVISIAKKYTNRGLQFLDLIQEGNIGLMKAVCKFEHRRGFKFSTYATWWIRQAITRSIADQARTIRIPVHMIETINKLNRISRQMLQQFGREATPEELAKEMDMPEDKIRKVMKIAKEPISMETPIGDDEDSHLGDFIEDPNVESPVDTTTNVNLSETVREVLAGLTPREAKVLRMRFGIDMNTDHTLEEVGKQFDVTRERIRQIEAKALRKLRHPSRSEQLRSFLDID

SEQ ID NO: 74650 - DNA, 21 bp, Artificial sequence
  primer
atgtccgtaaaagctcaacag

SEQ ID NO: 74651 - DNA, 20 bp, Artificial sequence
  primer
tcactcgtcaaggaaggagc

SEQ ID NO: 74652 - protein, 734 aa, Artificial sequence
  consensus sequence
  Variant (2)..(2): Xaa in position 2 is any amino acid
  Variant (3)..(3): Xaa in position 3 is any or no amino acid
  Variant (5)..(6): Xaa in position 5 to 6 is any amino acid
  Variant (7)..(29): Xaa in position 7 to 29 is any or no amino acid
  Variant (31)..(31): Xaa in position 31 is any amino acid
  Variant (32)..(32): Xaa in position 32 is any or no amino acid
  Variant (35)..(52): Xaa in position 35 to 52 is any amino acid
  Variant (53)..(58): Xaa in position 53 to 58 is any or no amino acid
  Variant (61)..(61): Xaa in position 61 is any amino acid
  Variant (63)..(63): Xaa in position 63 is any amino acid
  Variant (65)..(87): Xaa in position 65 to 87 is any amino acid
  Variant (88)..(133): Xaa in position 88 to 133 is any or no amino acid
  Variant (136)..(136): Xaa in position 136 is any amino acid
  Variant (143)..(143): Xaa in position 143 is any amino acid
  Variant (148)..(148): Xaa in position 148 is any amino acid
  Variant (150)..(150): Xaa in position 150 is any amino acid
  Variant (153)..(153): Xaa in position 153 is any amino acid
  Variant (159)..(159): Xaa in position 159 is any amino acid
  Variant (166)..(166): Xaa in position 166 is any amino acid
  Variant (168)..(178): Xaa in position 168 to 178 is any amino acid
  Variant (180)..(294): Xaa in position 180 to 294 is any amino acid
  Variant (295)..(392): Xaa in position 295 to 392 is any or no amino acid
  Variant (394)..(397): Xaa in position 394 to 397 is any amino acid
  Variant (398)..(410): Xaa in position 398 to 410 is any or no amino acid
  Variant (412)..(415): Xaa in position 412 to 415 is any amino acid
  Variant (416)..(426): Xaa in position 416 to 426 is any or no amino acid
  Variant (428)..(467): Xaa in position 428 to 467 is any amino acid
  Variant (468)..(486): Xaa in position 468 to 486 is any or no amino acid
  Variant (489)..(490): Xaa in position 489 to 490 is any amino acid
  Variant (492)..(492): Xaa in position 492 is any amino acid
  Variant (493)..(493): Xaa in position 493 is any or no amino acid
  Variant (496)..(496): Xaa in position 496 is any amino acid
  Variant (499)..(499): Xaa in position 499 is any amino acid
  Variant (582)..(583): Xaa in position 582 to 583 is any amino acid
  Variant (585)..(585): Xaa in position 585 is any amino acid
  Variant (589)..(589): Xaa in position 589 is any amino acid
  Variant (591)..(591): Xaa in position 591 is any amino acid
  Variant (593)..(593): Xaa in position 593 is any amino acid
  Variant (598)..(598): Xaa in position 598 is any amino acid
  Variant (603)..(608): Xaa in position 603 to 608 is any amino acid
  Variant (609)..(609): Xaa in position 609 is any or no amino acid
  Variant (611)..(612): Xaa in position 611 to 612 is any amino acid
  Variant (614)..(614): Xaa in position 614 is any amino acid
  Variant (618)..(618): Xaa in position 618 is any amino acid
  Variant (627)..(627): Xaa in position 627 is any amino acid
  Variant (634)..(635): Xaa in position 634 to 635 is any amino acid
  Variant (636)..(636): Xaa in position 636 is any or no amino acid
  Variant (639)..(639): Xaa in position 639 is any amino acid
  Variant (647)..(651): Xaa in position 647 to 651 is any amino acid
  Variant (653)..(655): Xaa in position 653 to 655 is any amino acid
  Variant (657)..(660): Xaa in position 657 to 660 is any amino acid
  Variant (662)..(667): Xaa in position 662 to 667 is any amino acid
  Variant (670)..(671): Xaa in position 670 to 671 is any amino acid
  Variant (672)..(672): Xaa in position 672 is any or no amino acid
  Variant (675)..(675): Xaa in position 675 is any amino acid
  Variant (678)..(679): Xaa in position 678 to 679 is any amino acid
  Variant (688)..(690): Xaa in position 688 to 690 is any amino acid
  Variant (691)..(691): Xaa in position 691 is any or no amino acid
  Variant (701)..(701): Xaa in position 701 is any amino acid
  Variant (704)..(704): Xaa in position 704 is any amino acid
  Variant (722)..(722): Xaa in position 722 is any amino acid
  Variant (725)..(725): Xaa in position 725 is any amino acid
  Variant (728)..(729): Xaa in position 728 to 729 is any amino acid
  Variant (731)..(732): Xaa in position 731 to 732 is any amino acid
GXXTXXXXXXXXXXXXXXXXXXXXXXXXXNXXLPXXXXXXXXXXXXXXXXXXXXXXXXGIXVXEXXXXXXXXXXXXXXXXXXXXXXXXXXXXXXXXXXXXXXXXXXXXXXXXXXXXXXXXXXXXXXXXXXXXXRTXDPVRMYXREMGXVXLLXREGEIXIAKRIEXGXXXXXXXXXXXPXXXXXXXXXXXXXXXXXXXXXXXXXXXXXXXXXXXXXXXXXXXXXXXXXXXXXXXXXXXXXXXXXXXXXXXXXXXXXXXXXXXXXXXXXXXXXXXXXXXXXXXXXXXXXXXXXXXXXXXXXXXXXXXXXXXXXXXXXXXXXXXXXXXXXXXXXXXXXXXXXXXXXXXXXXXXXXXXXXXXXXXXXXXXXXXXXXXXXXXXXXXXXXXXXXXXXEXXXXXXXXXXXXXXXXXFXXXXXXXXXXXXXXXWXXXXXXXXXXXXXXXXXXXXXXXXXXXXXXXXXXXXXXXXXXXXXXXXXXXXXXXXXXXGEXXAXXAKXEMXEANLRLVISIAKKYTNRGLQFLDLIQEGNIGLMKAVDKFEYRRGYKFSTYATWWIRQAITRSIADQARTIRIPVHMIETINKXXRXSRQXLXEXGREPXPEELXXXXXXXPXXKXRKVXKIAKEPISXETPIGDXXXDSXLGDFIEDXXXXXPXXXAXXXXLXXXXXXVLXXXLTXREXXVLRMRFGIXXXXTDHTLEEVGXQFXVTRERIRQIEAKALRKLXHPXRSXXLXXFL

SEQ ID NO: 74653 - protein, 60 aa, Artificial sequence
  protein pattern
  Variant (2)..(2): Xaa in position 2 is any amino acid
  Variant (29)..(29): Xaa in position 29 is Phe or Tyr
  Variant (39)..(39): Xaa in position 39 is Ile or Val
  Variant (46)..(46): Xaa in position 46 is Ala or Ser
RXLQFLDLIQEGNIGLMKAVDKFEYRRGXKFSTYATWWXRQAITRXIADQARTIRIPVHM

SEQ ID NO: 74654 - protein, 28 aa, Artificial sequence
  protein pattern
  Variant (17)..(17): Xaa in position 17 is Lys or Arg
  Variant (20)..(20): Xaa in position 20 is Ser or Thr
  Variant (23)..(24): Xaa in position 23 to 24 is any amino acid
  Variant (25)..(25): Xaa in position 25 is Leu or Met
  Variant (26)..(26): Xaa in position 26 is Lys or Arg
  Variant (27)..(27): Xaa in position 27 is any amino acid
TRERIRQIEAKALRKLXHPXRSXXXXXF

SEQ ID NO: 74655 - protein, 29 aa, Artificial sequence
  protein pattern
  Variant (2)..(4): Xaa in position 2 to 4 is any amino acid
  Variant (5)..(6): Xaa in position 5 to 6 is any or no amino acid
  Variant (8)..(8): Xaa in position 8 is Ile or Val
  Variant (11)..(11): Xaa in position 11 is Ile or Val
  Variant (12)..(12): Xaa in position 12 is any amino acid
  Variant (15)..(15): Xaa in position 15 is Ala or Ser
  Variant (19)..(19): Xaa in position 19 is Ile, Leu or Val
  Variant (21)..(21): Xaa in position 21 is Leu or Met
  Variant (23)..(23): Xaa in position 23 is Asn or Thr
  Variant (25)..(25): Xaa in position 25 is Ile or Val
  Variant (27)..(28): Xaa in position 27 to 28 is Asp or Glu
  Variant (29)..(29): Xaa in position 29 is Asp, Glu or Ser
MXXXXXKXRKXXKIXKEPXSXEXPXGXXX

SEQ ID NO: 74656 - protein, 37 aa, Artificial sequence
  protein pattern
  Variant (2)..(2): Xaa in position 2 is any or no amino acid
  Variant (9)..(11): Xaa in position 9 to 11 is any or no amino acid
  Variant (14)..(14): Xaa in position 14 is Ala, Ser or Thr
  Variant (16)..(16): Xaa in position 16 is Asp, Glu, Pro, Gln or Ser
  Variant (19)..(19): Xaa in position 19 is Ser or Thr
  Variant (21)..(21): Xaa in position 21 is Glu or Lys
  Variant (24)..(24): Xaa in position 24 is Ile or Val
  Variant (25)..(25): Xaa in position 25 is any amino acid
  Variant (26)..(26): Xaa in position 26 is Ile or Leu
  Variant (32)..(32): Xaa in position 32 is any amino acid
  Variant (34)..(36): Xaa in position 34 to 36 is any amino acid
  Variant (37)..(37): Xaa in position 37 is Ile, Leu, Met or Val
TXDPVRMYXXXMGXVXLLXRXGEXXXAKRIEXGXXXX

SEQ ID NO: 74657 - protein, 27 aa, Artificial sequence
  protein pattern
  Variant (2)..(3): Xaa in position 2 to 3 is any amino acid
  Variant (4)..(5): Xaa in position 4 to 5 is any or no amino acid
  Variant (8)..(8): Xaa in position 8 is any amino acid
  Variant (10)..(10): Xaa in position 10 is Leu or Met
  Variant (11)..(11): Xaa in position 11 is any amino acid
  Variant (19)..(19): Xaa in position 19 is Ile or Val
AXXXXAKXEXXEANLRLVXSIAKKYTN

SEQ ID NO: 74658 - protein, 31 aa, Artificial sequence
  protein pattern
  Variant (8)..(12): Xaa in position 8 to 12 is any amino acid
  Variant (14)..(15): Xaa in position 14 to 15 is any amino acid
  Variant (16)..(16): Xaa in position 16 is any or no amino acid
  Variant (18)..(29): Xaa in position 18 to 29 is any amino acid
  Variant (30)..(30): Xaa in position 30 is any or no amino acid
LGDFIEDXXXXXPXXXAXXXXXXXXXXXXXL

SEQ ID NO: 74659 - protein, 15 aa, Artificial sequence
  protein pattern
  Variant (9)..(9): Xaa in position 9 is Asp, Glu, Gly or Ser
  Variant (10)..(12): Xaa in position 10 to 12 is any amino acid
  Variant (13)..(13): Xaa in position 13 is Asp or Glu
  Variant (14)..(14): Xaa in position 14 is His or Tyr
  Variant (15)..(15): Xaa in position 15 is Gly or Thr
VLRMRFGIXXXXXXX

SEQ ID NO: 74660 - protein, 20 aa, Artificial sequence
  protein pattern
  Variant (5)..(5): Xaa in position 5 is Ile, Leu or Met
  Variant (6)..(6): Xaa in position 6 is any amino acid
  Variant (8)..(8): Xaa in position 8 is any amino acid
  Variant (11)..(13): Xaa in position 11 to 13 is any or no amino acid
  Variant (15)..(17): Xaa in position 15 to 17 is any amino acid
  Variant (18)..(18): Xaa in position 18 is any or no amino acid
  Variant (20)..(20): Xaa in position 20 is Ala, Gly, Ile, Leu or Pro
TINKXXRXSRXXXQXXXXEX

SEQ ID NO: 74661 - protein, 12 aa, Artificial sequence
  protein pattern
  Variant (2)..(2): Xaa in position 2 is Phe or Tyr
  Variant (3)..(3): Xaa in position 3 is Ile, Leu or Val
  Variant (5)..(5): Xaa in position 5 is any amino acid
  Variant (6)..(6): Xaa in position 6 is Ala, Asp, Glu, Gly or Ser
  Variant (7)..(7): Xaa in position 7 is Asp, Glu or Gln
  Variant (8)..(8): Xaa in position 8 is Ile, Leu or Val
  Variant (10)..(11): Xaa in position 10 to 11 is any amino acid
GXXTXXXXNXXL

SEQ ID NO: 74662 - DNA, 1191 bp, Azotobacter vinelandii
  CDS (1)..(1191): transl_table=11
atgtccagcccactcccagaacccgatctcgactacctgcagcgcgtgctgctggaaatgctcgccatccccagcccgaccggcttcaccgacaccatcgtgcgctatgtcgccgaacaactggaggaactcggcattcccttcgaactgacccgccgcggcaccatccgcggaaccctcaagggacgccgctacagtccggaccgggcgctcgcggtacacctcgacaccatcggcgccatcgtccgcgagatccacgccaacggccgcatcggtctggcgccggtgggctgctggtcgagccgcttcgccgagggcagccgggtcagcctgttcagcgaccgcggcgtgctgcgcggcagcgtgctgccgctactggcctcgggacataccttcaacacccaggtcgaccagatgccgatcagttgggaccatgtcgagctgcgcctcgacgccatgaccgccagcctggccgaaacccaggccctgggggtggcggtaggcgatttcgtcgccttcgatccgctgccggagttcaccgagagcggccacatcagcgcccgccacctggacgacaaggccggtgccgccgccctgctcgccgcgctgaagagcgtgctcgacagtggccaggagccgccgatcgactgccatccgctgttcaccatcaccgaggaaaccggctccggcgcggcggcggcactgccctgggacgtcagcgaattcgtcggcatcgacatcgcgccggtcgctcccggccagcagtcctgcgaacgggcggcgaccgtcgccatgcaggactccggcggcccctacgactaccatctgacgcgccacctgctgcgcctggcggaacatcacgcgatccccgtacgccgcgacctgttccgctactaccacagcgacgcccagtcggcggtgaccgctggccacgacatccgcaccgccctgctggctttcggctgcgacgccacccatggctacgagcgtacccatatcgacgggctggccgcgctgagccgcctgatcggcgcctatctgctcagcccgccggtgttcgccagcgatgccaaaccgcagagcggctccctgaaacgcttcagccgccagctcgaacatgcggcccagatggaaagcgaaacgcgggttcccgccgtggacagcctgctcaagcacgaaccggatgcttga

SEQ ID NO: 74663 - protein, 396 aa, Azotobacter vinelandii
MSSPLPEPDLDYLQRVLLEMLAIPSPTGFTDTIVRYVAEQLEELGIPFELTRRGTIRGTLKGRRYSPDRALAVHLDTIGAIVREIHANGRIGLAPVGCWSSRFAEGSRVSLFSDRGVLRGSVLPLLASGHTFNTQVDQMPISWDHVELRLDAMTASLAETQALGVAVGDFVAFDPLPEFTESGHISARHLDDKAGAAALLAALKSVLDSGQEPPIDCHPLFTITEETGSGAAAALPWDVSEFVGIDIAPVAPGQQSCERAATVAMQDSGGPYDYHLTRHLLRLAEHHAIPVRRDLFRYYHSDAQSAVTAGHDIRTALLAFGCDATHGYERTHIDGLAALSRLIGAYLLSPPVFASDAKPQSGSLKRFSRQLEHAAQMESETRVPAVDSLLKHEPDA

SEQ ID NO: 74664 - DNA, 1209 bp, Kineococcus radiotolerans SRS30216
  CDS (1)..(1209): transl_table=11
atgaacgcgcgaacgaacgcccagccccccgcgacgacgccgcgggaggtcgacctccccgtcgacgtcgagtacctgacgagcaccctcatggagctgctgcgcatcccgagcccctcggggcgcaccgacgccgtcatgcaggtcgtgggcacccacgtcgacgccctgggcctgtccttcgacctgacccggcgcgggatcctgcgcgccaccctgcccggggccaccgacgccgtgaagcgggccgtggtggtgcacgccgacaccatcgggctgatggtcaagcaggtcaaggacagcggccgcctggaggtcgtccccgtcggcagccacagcgcccgcttcgccgagggcgcgcacgtgacgatcttcaccgacgacttcgaccgggtgtacaccggcacggtcctgccgctgaagagcagcgggcacaccttcggcgacgagatcgacacccagggcgtgggctgggaccaggtcgaggtgcgcatcgacgaacccgtcgagtccgcccgcgacgtcgccgccctcggcgtcgaggtcggggacttcgtcgccctcgacgccgcgccgcagctcacccgcggcgggtacgtgaagtcgcgccacctggacgacaaggccggcctggccgcgtgcctggccgcgctgaaggccctgcacgacgccgacgtccccctcgcggtgaccgcgcagttcctcgtcaccatcggcgaggaggtcggtttcggcgccacccacgggctggcccccgacgtcgccgagctcgtcgcggtggacaacgccgtcgtcgcggccgggcagaactcccgcgaggagctggtcagcatcgggatgctcgacatgaccggccccttcgactaccacctgtcccggcggctgcactccctggcccgcgcccacggcatccccgcggtgcgcgacgtgtaccgccactaccgctccgacgcggcccccgcgctggaggccggcatcgaggcccgccacgccctgctcggcttcggcctggactccagccacggtcacgagcgcgcccacgtcgacggcctcgtcgccctggcccgcctgctcgtggtgtacctccagagcgggctgaccttcgacgactgggaccaggccgaggccgggccgctggccgacttccccagcaccagcgtccagccggccgagcccgaaccggtggaccgcacggtcctccccgactga

SEQ ID NO: 74665 - protein, 402 aa, Kineococcus radiotolerans SRS30216
MNARTNAQPPATTPREVDLPVDVEYLTSTLMELLRIPSPSGRTDAVMQVVGTHVDALGLSFDLTRRGILRATLPGATDAVKRAVVVHADTIGLMVKQVKDSGRLEVVPVGSHSARFAEGAHVTIFTDDFDRVYTGTVLPLKSSGHTFGDEIDTQGVGWDQVEVRIDEPVESARDVAALGVEVGDFVALDAAPQLTRGGYVKSRHLDDKAGLAACLAALKALHDADVPLAVTAQFLVTIGEEVGFGATHGLAPDVAELVAVDNAVVAAGQNSREELVSIGMLDMTGPFDYHLSRRLHSLARAHGIPAVRDVYRHYRSDAAPALEAGIEARHALLGFGLDSSHGHERAHVDGLVALARLLVVYLQSGLTFDDWDQAEAGPLADFPSTSVQPAEPEPVDRTVLPD

SEQ ID NO: 74666 - DNA, 1011 bp, Pyrococcus horikoshii OT3
  CDS (1)..(1011): transl_table=11
atggaaaggatagtcaagatcttaagggaaatcttagagataccttctccaacgggctacacgaaggaggtaatgagttacctagaaaaatttctaaaggaaaatgaagtaaacttttactatacgaacaagggggccctaatagccggtaatcatccaaagcctgagctcgttgttatagcccacgtagacacgcttggggcaatggttaaggagatactaccagacggacacttagcattttcaaggataggagggctcgttctacctacgtttgaaggcgaatactgtactataataacgagaaaaggaaagaagtttagaggaacgctcctccttagaaatccgagcgctcatgtaaatagggaagtaggtaaaaaggagagaaaagaggagaatatgtatataagattggacgagctcgtggagaagagagaggatacagaaaagctggggataaggccaggagacttcatagcttttgatcccaaatttgaatacgtaaacggctttgttaaatcacacttcctagatgacaaggctagcgtagctgcaatactcgatctaataatagatatgaaggatgaactcgagaagtatccagttgcattcttcttctcaccgtatgaggaagttggccacggaggctcagctggctacccaccaacgactaaggaactgctcgtggttgatatgggagtagtgggtgaaggtgtttcaggaaaagaaaccgccgtatctatagcggccaaggatacaactgggccttatgactatgacatgacgaacaggttaatagagcttgctgaagagaacaatatcccatatgtagttgacgtgttcccctactatggttccgatggttcagctgcactaagagctggatgggatttcagggttgccctaattgggccaggtgtgcacgcaagccacggaatggagagaacccacgttaagggattgttggcaactaaagagcttataagggcttacataaaatggaaggggtaa

SEQ ID NO: 74667 - protein, 336 aa, Pyrococcus horikoshii OT3
MERIVKILREILEIPSPTGYTKEVMSYLEKFLKENEVNFYYTNKGALIAGNHPKPELVVIAHVDTLGAMVKEILPDGHLAFSRIGGLVLPTFEGEYCTIITRKGKKFRGTLLLRNPSAHVNREVGKKERKEENMYIRLDELVEKREDTEKLGIRPGDFIAFDPKFEYVNGFVKSHFLDDKASVAAILDLIIDMKDELEKYPVAFFFSPYEEVGHGGSAGYPPTTKELLVVDMGVVGEGVSGKETAVSIAAKDTTGPYDYDMTNRLIELAEENNIPYVVDVFPYYGSDGSAALRAGWDFRVALIGPGVHASHGMERTHVKGLLATKELIRAYIKWKG

SEQ ID NO: 74668 - DNA, 1032 bp, Deinococcus radiodurans R1
  CDS (1)..(1032): transl_table=11
atgagcagtcttcaactggactacaccctggacgtgctgctgcgtctgctcgccacgccgagtcctaccggctttacggaggcggcgctggcgctggtggagggcgaattgcacaaactgagcgtgccgtcgcagcgcacccgcaagggcgccctgacctgggaagtccccggcagcggcgcgggccacgtcacctacagcggccacgtggacaccctgggggcgatggtcaaggccatcaaaccgaatgggcgcctgctgctgtggcctctaggcggctacgactgggcgacagtggaaggcgaggacgtgctggttcaccgtcagaacggcgagacggtgagcggcacggtggtcaacgtgcggcagtctacccatgtccacggcgcggccctgcgcgacctgcgccgtgaagccgccgtgatggaagtgcgcctcgacgccgtgaccggcagcgccgccgagacgcggggcctgggcatcggcgtgggcgatttcgtcagcttcgatgcccggcctcggctgaccccggcgggctacgtcaaggcgcggcacctcgacaacaaagcggcggtggcggtctttctgaccgtgacccgcgcattgttgcagtcgcccccggtcaagacggtggccttccacgtcaccacctacgaggaagtcggacacggcgcggccaccggcattcccccgcacaccgacgagctgattgcggtggatatggcggcagtgggcgacgggcagacgagcagcgagcaccacgtcaccctgtgcgtggccgacggcggcggaccctacgaccacgcgctcggcaaccgcctgcgggcagcggcggcgcgggccggggtggagttgcgggtggacatctaccccttttactccagcgacggcacggcggcctggcgagcgggcggcgactacccggtggcgctcatcggccccggggtagacgccagccacgcctacgaacgcacccacaccgacgcgctggacgccaccgccgcgctgatgctggcctacgtgggcgcctga

SEQ ID NO: 74669 - protein, 343 aa, Deinococcus radiodurans R1
MSSLQLDYTLDVLLRLLATPSPTGFTEAALALVEGELHKLSVPSQRTRKGALTWEVPGSGAGHVTYSGHVDTLGAMVKAIKPNGRLLLWPLGGYDWATVEGEDVLVHRQNGETVSGTVVNVRQSTHVHGAALRDLRREAAVMEVRLDAVTGSAAETRGLGIGVGDFVSFDARPRLTPAGYVKARHLDNKAAVAVFLTVTRALLQSPPVKTVAFHVTTYEEVGHGAATGIPPHTDELIAVDMAAVGDGQTSSEHHVTLCVADGGGPYDHALGNRLRAAAARAGVELRVDIYPFYSSDGTAAWRAGGDYPVALIGPGVDASHAYERTHTDALDATAALMLAYVGA

SEQ ID NO: 74670 - DNA, 1032 bp, Clostridium acetobutylicum ATCC 824
  CDS (1)..(1032): transl_table=11
atgcataattctaaggaattaacagtttttttacaaaatctactacaaataaatagtccttctggctatactcatgatgtagtcagctatatcgaaaaagagttctgtaaacttggagttcattataaaataacaaataagggtaatataatggcaacccttcctggaaaaaatagttccttcgaaagaacaatttctgcacatctagataccttaggtgcaatggttaaagagataaaatcaaatggtactctttcacttactcctataggtggttatatgatgaattcaatagaaggcgaaaattgcaacataatgacacttgacgacaaaaaatatactggaacaatacaatcaaccaaaccatctgttcacatccacaatgatgccaaagagttaaaaagaatacctgaaaatatggaagttgtaatagacgaaaaggttttttctaaggaagatgttgaagctcttggaattaacgttggtgacttcatatgttttgatccaagaataaaatttactgatagtggttttataaaaagcagacatcttgatgataaggctagcgctgccataatgctctacgccataaagcattttatagacaataacattgagcttaagtacacaacaaatttttattttagtacctatgaagaagttgggcatggtgcctcaaacctccctcaaaataccaaagaattactttgtatagatatgggagctccaggaaaaggtcaaaactcttctgaatttgcaacctgtatatgtgcaaaagattcttctggtccttacgattatgcattcaggaaaagactggtagatatatgcaaaaataaaaatataccatataggatagatacttatccatactatggttcggatgcatctgctgctttaaaaagcggatacgatataaaaacagctcttataggcactggcgtatatgcctcacatggctacgaaagaactcatttagatggtatgctagcaacattagatcttcttataaattactgtacatctgaataa

SEQ ID NO: 74671 - protein, 343 aa, Clostridium acetobutylicum ATCC 824
MHNSKELTVFLQNLLQINSPSGYTHDVVSYIEKEFCKLGVHYKITNKGNIMATLPGKNSSFERTISAHLDTLGAMVKEIKSNGTLSLTPIGGYMMNSIEGENCNIMTLDDKKYTGTIQSTKPSVHIHNDAKELKRIPENMEVVIDEKVFSKEDVEALGINVGDFICFDPRIKFTDSGFIKSRHLDDKASAAIMLYAIKHFIDNNIELKYTTNFYFSTYEEVGHGASNLPQNTKELLCIDMGAPGKGQNSSEFATCICAKDSSGPYDYAFRKRLVDICKNKNIPYRIDTYPYYGSDASAALKSGYDIKTALIGTGVYASHGYERTHLDGMLATLDLLINYCTSE

SEQ ID NO: 74672 - DNA, 1041 bp, Bacillus subtilis subsp. subtilis str. 168
  CDS (1)..(1041): transl_table=11
atgacgtccgtacgtaaaacgatggagctcattaaagaacttgtatcgatcccaagcccgacaggaaatacatatgaggtgatcaattatattgaaagccttttaaaagaatggaaggtagaaacggttcggaaccacaagggcggcttaattgcaacgcttccaggacgcgacacatcccggcatcgcatgctgacagcgcacgttgacaccctcggcgctatggtgaaggaaattaaagcggacggccggctgaaaatcgacttaatcggcgggttccgctacaactcgattgagggggagtattgccaaattgaaaccgcctcgggaaaaatgtacacaggcacaatcttaatgcatcaaacgtctgtgcacgtatacaaagacgcgggaaaggctgagcggaatcaagagaatatggagatccgcctagatgaacctgttcactgccggaaagatacggaggagcttggcattggcgtcggagactttgtgtcgtttgatccacgtgtcgagatcacatcaagcggatttattaaatcgcgccatttggatgacaaagcaagcgtcgccttattgctccgcttaattcatgaaattcaaacagaagacattgagctgccgtatacaacccattttcttatttccaataatgaagaaatcggttacggcgggaattcgaatattcctcctgaaacagttgaatatttggcggttgatatgggcgctatcggtgacgggcaggcgacggatgaatattcagtatcaatctgtgtgaaggatgcgagcgggccgtatcattatcagctcagaaagcatttagttcaattagccgagaagcatcatattgactataagcttgatatatatccgtactacgggtctgatgcgtcagcagcgatcaaatccgggcatgatattgtgcatggcctcatagggccgggaattgacgcttcccatgcatttgaacgcacccataaatcatctcttcgccataccgctaagcttctgtattactatgtacagtcaccaatggtataa

SEQ ID NO: 74673 - protein, 346 aa, Bacillus subtilis subsp. subtilis str. 168
MTSVRKTMELIKELVSIPSPTGNTYEVINYIESLLKEWKVETVRNHKGGLIATLPGRDTSRHRMLTAHVDTLGAMVKEIKADGRLKIDLIGGFRYNSIEGEYCQIETASGKMYTGTILMHQTSVHVYKDAGKAERNQENMEIRLDEPVHCRKDTEELGIGVGDFVSFDPRVEITSSGFIKSRHLDDKASVALLLRLIHEIQTEDIELPYTTHFLISNNEEIGYGGNSNIPPETVEYLAVDMGAIGDGQATDEYSVSICVKDASGPYHYQLRKHLVQLAEKHHIDYKLDIYPYYGSDASAAIKSGHDIVHGLIGPGIDASHAFERTHKSSLRHTAKLLYYYVQSPMV

SEQ ID NO: 74674 - DNA, 1158 bp, Sinorhizobium meliloti 1021
  CDS (1)..(1158): transl_table=11
atgcagacaccgatcaatatcgacccggaatatctcaccagccggctgaaagctctgctcgacattgcgagccccaccggcttcaccgatgaggcggtgcgctacacggcgcgtgagctcgagcgcctcggccttgaagtcaagctgacccgccggggtgcgatccgggctcttcggccgggggctgccgagcggccggcccgcgggatcgtctcgcacctggacaccctcggcgcgcaggtgaaggcgctgaaggaaaacggccgcctcgaactggtatcgatcgggcactggtcggcacggttcgcggagggggctcgcgcctcgatcttttccggcaagggcacctatcgcggctcaattctcccgctgaaagcttccggtcacaccttcaacgaggaggtcgacacgcaaccgacaggctggcgccatatcgagctgcgcgtcgatgccctcgcccgcgaccgcaacgacctggtacagctcggaatagacgtcggcgacatcgtcgccattgatccgcagccggaattactcgagaacgggttcatcgtttcgcggcatctcgacgacaaggcgggggtcgccatcatgcttgcggcgcttgaggccatgcagcgtgagaaggtggacacgccggtcgacacccattggctcttcaccatcggcgaggaagtaggtgtaggcgcgtcagcggcaatcgtcccggaaatcgcctcgctggtggcgatagacaacggcacgaccgcgccgggccagaattcggacgagttcggcgtgactctcgcaatggcggaccagacgggacctttcgactatcacctctcaaaaaagctttacgagctttgcggcgagcatggcatccgcgtccagaaagacgtcttccgctactaccgttccgatgccgcttccgcggtcgaggcggggcacgacgtccgtacggcccttgtcactttcggtgtcgacgcgtcgcacggctacgagcgtatccacctccatgcgctgatgtccgttgcgaaactcgcggtgtatcacgcggcaagcgaggtccagatcgagcgcgacgccgaggaggtctccggtcttcggggctttacccggcagaaggtgcgacaggccgagcaggacctgaaagcggacgagcctgacgtatcctga

SEQ ID NO: 74675 - protein, 385 aa, Sinorhizobium meliloti 1021
MQTPINIDPEYLTSRLKALLDIASPTGFTDEAVRYTARELERLGLEVKLTRRGAIRALRPGAAERPARGIVSHLDTLGAQVKALKENGRLELVSIGHWSARFAEGARASIFSGKGTYRGSILPLKASGHTFNEEVDTQPTGWRHIELRVDALARDRNDLVQLGIDVGDIVAIDPQPELLENGFIVSRHLDDKAGVAIMLAALEAMQREKVDTPVDTHWLFTIGEEVGVGASAAIVPEIASLVAIDNGTTAPGQNSDEFGVTLAMADQTGPFDYHLSKKLYELCGEHGIRVQKDVFRYYRSDAASAVEAGHDVRTALVTFGVDASHGYERIHLHALMSVAKLAVYHAASEVQIERDAEEVSGLRGFTRQKVRQAEQDLKADEPDVS

SEQ ID NO: 74676 - DNA, 1053 bp, Listeria innocua Clip11262
  CDS (1)..(1053): transl_table=11
ttgagttacgaaccaaatacaacacaaacgatgcaaaaaattaaagagttaacttctatccctagtccgacagggaacacagggcaaatcattgaaaaactagtgagggatttagaagcttctaacatcccatataaattgaacaataaaggcggattaattgtaactctaccaggaaaagatgactccaaacatcgtatgctaacggcacatgttgatacgttaggcgcgatggtaaaagaaatcaaagcagatggaagattactattaactttaattggtggctatcgttttaatgcgattgaaggcgaatattgtacgattgaaactagcgaaggcgatttatatagcggaacaattcttatgcatcaaacctccgttcacgtatataaagacgctggtacggctgaacgcaatgataaaaatatggaagttcgtttagacgtaaaagcgctagatgctgacaaagttcgcgctcttggaatagaagttggtgattttgtttcctttgatccacgcgtccaaattattaatgatgagtatattaaatctcgccatttggatgataaagcaagtgtcgcgattttattacaactcattaaccatattcatgaaaataaattagagctaccacatacaactcatttccttatctctaataatgaagaaattggttatggtggtaattcaaatatcccagctgaaacagtggaatatttagctgtagacatgggagcgcttggtgatggtcaaacttctgatgaatacactgtttctatttgtgctaaagatggcagtggcccttatcatttaggtttgcgtaaacatttagttgaactagctaaaaagaataatattgattataaagtagacatttatccgttttatgcatcagatgcgagtgcggcgattaactctggtaatgacatcgttcatggtttaattggcccgggaattgatgctagccatgcatacgaacgaacacaccgcgattcactctatcatacagaaaaattagtttatgcttatttattttcgaatatattgaaatag

SEQ ID NO: 74677 - protein, 350 aa, Listeria innocua Clip11262
MSYEPNTTQTMQKIKELTSIPSPTGNTGQIIEKLVRDLEASNIPYKLNNKGGLIVTLPGKDDSKHRMLTAHVDTLGAMVKEIKADGRLLLTLIGGYRFNAIEGEYCTIETSEGDLYSGTILMHQTSVHVYKDAGTAERNDKNMEVRLDVKALDADKVRALGIEVGDFVSFDPRVQIINDEYIKSRHLDDKASVAILLQLINHIHENKLELPHTTHFLISNNEEIGYGGNSNIPAETVEYLAVDMGALGDGQTSDEYTVSICAKDGSGPYHLGLRKHLVELAKKNNIDYKVDIYPFYASDASAAINSGNDIVHGLIGPGIDASHAYERTHRDSLYHTEKLVYAYLFSNILK

SEQ ID NO: 74678 - DNA, 1035 bp, Clostridium perfringens str. 13
  CDS (1)..(1035): transl_table=11
atggtaagtataaacaaagattttattttagatgtagcaaaagaaattttaagtttccatagtccaagtggattttgttttgagattatggaaaaggtagaaagaatagttaataatctaggatatgatctagaattgactaacaagggatgtggagtaataaccattcctggagaaagtgatgaaaaggttattggattagctgctcatgtagataccttaggggctatggttagatctataacaccaaatggaactttaaagtttgatttagtaggaggtccaatagtaccaactttagattcagaatactgcataataagaacaagggaaggtaaagagtatactggaactttcttaagcacaagcccatcaatacatgtatttgatgatgcatcaagcaagcctagagagcctaagaatatggaaatcagaattgatgaaagagttttaaataaagaggatgtaaaggccttaggaataaataatggagattttatttttatagatccaaaaacaacaataactgaaagtggatttataaaatcaagatttatagatgataagggaagtgtatcagctttaataggattattagagctattaaaaagagaaaatataaagcctaaatataaaacaaaaatctttatatctgtatatgaagaggtaggacatggagcatcatatttaccagaggatataactgaatttatagcagtagatatgggatgtattggtgatgacttaagttgcacagagtatgatgtttctatatgtgcaaaggattcaggtggaccttatgactataaaattacatcagatcttatagaattagctaaaaataatagtttaagctatgcagtagatatataccctagatacggctcagatgttggagctgccttacgaggtggaaataatataaaaggtggccttataggccctggagttcacgcttcacatggtatggagagaactcactatgatgctttagaaaacaccataaaactaatatatttatatttaacaaggtaa

SEQ ID NO: 74679 - protein, 344 aa, Clostridium perfringens str. 13
MVSINKDFILDVAKEILSFHSPSGFCFEIMEKVERIVNNLGYDLELTNKGCGVITIPGESDEKVIGLAAHVDTLGAMVRSITPNGTLKFDLVGGPIVPTLDSEYCIIRTREGKEYTGTFLSTSPSIHVFDDASSKPREPKNMEIRIDERVLNKEDVKALGINNGDFIFIDPKTTITESGFIKSRFIDDKGSVSALIGLLELLKRENIKPKYKTKIFISVYEEVGHGASYLPEDITEFIAVDMGCIGDDLSCTEYDVSICAKDSGGPYDYKITSDLIELAKNNSLSYAVDIYPRYGSDVGAALRGGNNIKGGLIGPGVHASHGMERTHYDALENTIKLIYLYLTR

SEQ ID NO: 74680 - DNA, 1056 bp, Oceanobacillus iheyensis HTE831
  CDS (1)..(1056): transl_table=11
atggaaagttatccaaatgctcaagcaacaaaaacaataattgaacaattagtgaaaatcccaagtccaacggggtatacaactgaagcgatatcgtttgttgaaaattacttgaggcagttaggagttgaaacaaaacgaaatcgtaaaggaggtttaattgcgactgttaaaggagaaaacgataataaacatcgctttctaacagctcatgttgatacgcttggagctatggtaaaggaagtaaaagataacggacgtttaaaaattcagcgaataggcggatttccctttaattatattgaaggagaatattgtactattcatatgtctaataacaattctattagtggtacaattctaatgcatcaaaccgcagttcatgtttatcataagtcatcttcattagaaagaagtgaggataatattgaaatacgaattgatgcagaagtacataatgctaatgacactcgagcgctcgggatagaagtaggagactttatatcgttcgagccgagagtagagataacagataatggatttattaagtctagacacctagatgataaagcgagtgttggtatattattgcaagtgataaaacaaatcgaagcagaaaatataaaactacctcatacaacccattttttattctcaaataatgaagaaatagggtatggaggtaattcaaatataactcctgaaactgtggagtatttagcagttgatatgggagcaatcggggatggacaattaacagatgaatatactgtttctatttgtgtgaaagattcttcagggccttatcattatgggcttcgcaaccatcttgtgaagatagcgaaacaacatgatattagttataaattagatatatatccttattaccagtcagatgcatcagcagctatccaatcaggtaatgatattatacatggattaattggtcctggaattgatgcatctcatgcttttgaacgaacgcatgaatcttcgttaattcatacagaaaaattaatctatcattatattcaaacaaaaattatcgatatatga

SEQ ID NO: 74681 - protein, 351 aa, Oceanobacillus iheyensis HTE831
MESYPNAQATKTIIEQLVKIPSPTGYTTEAISFVENYLRQLGVETKRNRKGGLIATVKGENDNKHRFLTAHVDTLGAMVKEVKDNGRLKIQRIGGFPFNYIEGEYCTIHMSNNNSISGTILMHQTAVHVYHKSSSLERSEDNIEIRIDAEVHNANDTRALGIEVGDFISFEPRVEITDNGFIKSRHLDDKASVGILLQVIKQIEAENIKLPHTTHFLFSNNEEIGYGGNSNITPETVEYLAVDMGAIGDGQLTDEYTVSICVKDSSGPYHYGLRNHLVKIAKQHDISYKLDIYPYYQSDASAAIQSGNDIIHGLIGPGIDASHAFERTHESSLIHTEKLIYHYIQTKIIDI

SEQ ID NO: 74682 - DNA, 1185 bp, Pseudomonas putida KT2440
  CDS (1)..(1185): transl_table=11
atgtccgaacgactccccgaacccgatctcgactatctcaaacgcgtgctgctggaaatgctcgccatccccagccccaccggcttcaccgacaccatcgtgcgctacgtggccgaacgccttgacgaactgggcatccccttcgagctgacccgccgcggcaccattcgcgccaccctcaaaggccggcaggccacccccgaccgcgccgtctctgcccacctggataccatcggcgccagcgtgcgccaattgcaggacaatggccgcctggccctggcgcccgtcggctgctggtccagccgttttgccgagggcagccgggttagcgtgtttaccgataccggggtattccgtggcagcgtgctgccgctgatggccagcgggcatgcattcaacacggcgatcgaccagatgccgatcagctgggaccacgtggaagtgcgcctggatgcctactgcgccacgcgcgctgactgtgaggcactgggcgtgagcattggtgatttcgtggccttcgacccattgcccgagttcaccgaaagcggccacatcagcgcccgtcacctggacgacaaggctggcgtagcggcattgctggcggcactgaaggctgtggtggaaagcggccgccagccgctgatcgactgccacccgctgttcaccatcaccgaggagaccggctcgggtgcagccggcgccctgccctgggacgtcagcgagttcgtcggcatcgacatcgccccggtggcgcccgggcaggcttccagcgagcatgcggtcagtgtggccatgcaggactcgtcggggccttacgactaccacctgtcccggcacctgctgaaactggccggcgaccatgacttgccggtgcggcgcgacctgttccgctattacttcagcgatgcccattcggcggtgactgccgggcacgatattcgtaccgcgctggtggcgttcggttgcgatgccacccatggttacgagcgcacccatatcgacagcctggcagcgctgagccggttgttgtcagcctacctgctgagcccgcccgtatttgccagcgattcgcagccggccaatacgtcacttgagcgcttcagccaccagctggagcacgatgcgcagatggaaagcgacacgcgggtaccggccgtggacagcctggtcggaaacaaaggctaa

SEQ ID NO: 74683 - protein, 394 aa, Pseudomonas putida KT2440
MSERLPEPDLDYLKRVLLEMLAIPSPTGFTDTIVRYVAERLDELGIPFELTRRGTIRATLKGRQATPDRAVSAHLDTIGASVRQLQDNGRLALAPVGCWSSRFAEGSRVSVFTDTGVFRGSVLPLMASGHAFNTAIDQMPISWDHVEVRLDAYCATRADCEALGVSIGDFVAFDPLPEFTESGHISARHLDDKAGVAALLAALKAVVESGRQPLIDCHPLFTITEETGSGAAGALPWDVSEFVGIDIAPVAPGQASSEHAVSVAMQDSSGPYDYHLSRHLLKLAGDHDLPVRRDLFRYYFSDAHSAVTAGHDIRTALVAFGCDATHGYERTHIDSLAALSRLLSAYLLSPPVFASDSQPANTSLERFSHQLEHDAQMESDTRVPAVDSLVGNKG

SEQ ID NO: 74684 - DNA, 1197 bp, Pseudomonas syringae pv. tomato str. DC3000
  CDS (1)..(1197): transl_table=11
atgacccctgcaaccattcccgatccggatctgaaatacctgcagaaagttctgttggaaatgctcgcgatcccaagccccacgggcttcaccgacaccatcgtgcgctacgtggccgagcgtctggaagaactgggtatcccgtttgaattgacccgtcgcggcacgattcgcgcaaccctcaagggtaaacagaacagccccgaccgcgcagtatccgcgcacctggacaccattggtgccagcgttcgggaggtcaaagacaatggccgtctggcgcttgccgccgtcggctgctggtccagccggtttgccgaaggcagccgggtcagcgtgttcacggacaccggcgtgatccgtggcagcgtgctgccgttgatggcgtccgggcatgccttcaataccgctgtggatgaaatgccgatcagctgggaccacatcgagctgcgcctggatgcctactgcaccacccgcgctgattgtgaatcactgggcatcggcattggcgacttcgtggcattcgacccgctgccagagttcaccgagagcggccacatcagtgcccgccatctggacgacaaggccggtgttgccgcgctgctggcggcgctcaagtcgatcgtcgaaagcggtgccgagccgctgatcgactgccatccgctgttcaccatcaccgaagaaaccggcaccggtgcagcgggcgtgctgccctgggacgtgagcgagttcgtcggtatcgacatcgcaccggtcgcacccggccagcactccagcgagcacgcggtgagcgtggcgatgcaggactcgggcggtccttatgattaccacctgtctcgtcatttgctgcgtctgggcgtggaaaacgagctgccggtccgccgcgacctgttccgctactactacagcgatgcgcattctgcggtgacgtcggggcacgatattcgtaccgccctgctggcttttggctgcgacgccacccacggctacgagcgcacccatatcgacagcctggccgcgctcagcaagctgcttggcgcgtacatcctcagcccgccagtgttcgccagcgatgccaaaccggcgcagagttcgctggagcggttcagtcatcagattgaacatgacgcgcagatggagtccgacacccgcgtgccgccggtagacagcctgatcgggctgaatcgcgaggagagttga

SEQ ID NO: 74685 - protein, 398 aa, Pseudomonas syringae pv. tomato str. DC3000
MTPATIPDPDLKYLQKVLLEMLAIPSPTGFTDTIVRYVAERLEELGIPFELTRRGTIRATLKGKQNSPDRAVSAHLDTIGASVREVKDNGRLALAAVGCWSSRFAEGSRVSVFTDTGVIRGSVLPLMASGHAFNTAVDEMPISWDHIELRLDAYCTTRADCESLGIGIGDFVAFDPLPEFTESGHISARHLDDKAGVAALLAALKSIVESGAEPLIDCHPLFTITEETGTGAAGVLPWDVSEFVGIDIAPVAPGQHSSEHAVSVAMQDSGGPYDYHLSRHLLRLGVENELPVRRDLFRYYYSDAHSAVTSGHDIRTALLAFGCDATHGYERTHIDSLAALSKLLGAYILSPPVFASDAKPAQSSLERFSHQIEHDAQMESDTRVPPVDSLIGLNREES

SEQ ID NO: 74686 - DNA, 1236 bp, Mycobacterium avium subsp. paratuberculosis K-10
  CDS (1)..(1236): transl_table=11
gtgggccagaccgcggccatggccgaggccgaccgcacgtggatggtggacacgctgctggcgctgctgcagaccccgagcccgtcggggcgcacggacgcggtgatgcaggtgatcggcgacatcctcgacgacttcggcgtgccgttcacgctgacccggcgcggggcgctgaccgccgagctgccgggggagtcggcgaccaccgaccgcgcgctggtggtgcactccgacaccatcggctgcatggtccgcgggctcaaggacaacggccggctggaactcgttccggtcggcaccttctcggcccgattcgccgcgggtgcacgggtgcgcatcttcatcgacgatcccgaggagttcatcaccggcacgatcctgccgctcaagtccagcggccacgcgttcggcgacgagatcgacacccaacccacgggctgggagcacgtcgaggttcgcatcgaccgcaaggtgtcgtgccgggacgacctggtccgcctcggtctgcagatcggtgatttcgtcgccctgatcaccagccccgagctgaccgccgacggcttcgtggtctcccggcatctggacggcaaggcgggcgtggcgatcgcgctcgccctggccaagaacttcgccgagaacaaggtggtgttgccgcatcgcaccacgatcatggtcaccatcaccgaggaggtcggtcacggcgccagtcatggtctgccgccggacgtcgccgaactgatctccgtggacaacgcggtgtgcgcgcccggccagcactcgctggaggatggggtgacgatcccgatggccgatatgcacggcccgttcgactaccacctgacccgcaagttgtgccggctggcccaggaccggggaatcccgttcgcgcgcgacatctttcgctattaccggtccgacgccgccgcggcgatcgaggcgggcgcgaacacccgcgccgcgctggtcggcttcgggctcgacggcagccacggctgggagcgcacccacatcgattcgctggaggccgcctacaacctgctgcacgcgtggctgcagacgccgttgacgttcgccaagtgggacgccaagccgacggggagcctgcgcgacttcccgtcctcgaagcagcccgcacccagcgagcggtgggtgccgttgtcgcgcggcgactacgaaagcccgggggacgcgtcgccggggacgcactggccgccctcggaggggccgcagtcctga

SEQ ID NO: 74687 - protein, 411 aa, Mycobacterium avium subsp. paratuberculosis K-10
MGQTAAMAEADRTWMVDTLLALLQTPSPSGRTDAVMQVIGDILDDFGVPFTLTRRGALTAELPGESATTDRALVVHSDTIGCMVRGLKDNGRLELVPVGTFSARFAAGARVRIFIDDPEEFITGTILPLKSSGHAFGDEIDTQPTGWEHVEVRIDRKVSCRDDLVRLGLQIGDFVALITSPELTADGFVVSRHLDGKAGVAIALALAKNFAENKVVLPHRTTIMVTITEEVGHGASHGLPPDVAELISVDNAVCAPGQHSLEDGVTIPMADMHGPFDYHLTRKLCRLAQDRGIPFARDIFRYYRSDAAAAIEAGANTRAALVGFGLDGSHGWERTHIDSLEAAYNLLHAWLQTPLTFAKWDAKPTGSLRDFPSSKQPAPSERWVPLSRGDYESPGDASPGTHWPPSEGPQS

SEQ ID NO: 74688 - DNA, 1029 bp, Treponema denticola ATCC 35405
  CDS (1)..(1029): transl_table=11
atgaatgtcagatatgctgtggagctttcaaaagagcttttacaaatacacagtcccggaggctatacaaagaatgccatagaccgaataaaaaaagaattcgattcattaggcataaaatataccgaaacaaataagggtgctatttacggcactatcgaaggaaaaaatacggctaaacacagagttgtttcagctcacgcagacaccctcggcgctatggtgcgtcaaataaaacctaacggctgcttaaaacttgctgccattggaggtatagcctttaacagcatcgaaggagaaaatctttacatcattacaagaacgggaaaggttatcacaggcaccggccttcccgaaaaagcctctgttcatatttttgaatctatcgaaaaggaagagcgaaacttagaaacctttgaagtgcgccttgatgcggaaactcactcaaaggaagaaaccttggctctcggtataaacataggcgattttgtcgcctttgagccacgcacaatcgaaaccgaggacggctacataaaatcccgccatctggatgataaggcttgtatcggtatgctttttgccgcttgtaaggcccttaaagaaaagggagaaaaaccggcttatactacccacttttttataagcaattatgaagaaatagggcacggcttttacggtattcctaaagaatgctttgaagttttagctctggatatcggaacagtcggaggtgagcaaaattcggatgaacatgcagtaacaatcatcgctaaggattcacgcacaccctacgatttcggctttagacataggcttgaaaaccttgctattcaaaataaaatcaactacagaaccgatgttatgtttagatacggctcggatgcaagtatgtatgtattgcagggattcgatatcaactttgcctgtatgggcccgggagtaagtgctacccaccactatgaaagaacccatatcgactcctacaaagaaactataaacctattgtacgcttatttaatgagcgaatag

SEQ ID NO: 74689 - protein, 342 aa, Treponema denticola ATCC 35405
MNVRYAVELSKELLQIHSPGGYTKNAIDRIKKEFDSLGIKYTETNKGAIYGTIEGKNTAKHRVVSAHADTLGAMVRQIKPNGCLKLAAIGGIAFNSIEGENLYIITRTGKVITGTGLPEKASVHIFESIEKEERNLETFEVRLDAETHSKEETLALGINIGDFVAFEPRTIETEDGYIKSRHLDDKACIGMLFAACKALKEKGEKPAYTTHFFISNYEEIGHGFYGIPKECFEVLALDIGTVGGEQNSDEHAVTIIAKDSRTPYDFGFRHRLENLAIQNKINYRTDVMFRYGSDASMYVLQGFDINFACMGPGVSATHHYERTHIDSYKETINLLYAYLMSE

SEQ ID NO: 74690 - DNA, 1092 bp, Treponema denticola ATCC 35405
  CDS (1)..(1092): transl_table=11
atggaaaaaaataaacttgccgagcttaaaacttcaatttcgaatgcagccgaaaaggtaatggacgaaattatcactatctgcaatatacccagtcccacgggctacacttgcgaggccgccgattatgttctaaaaaggctttcaggtttaggctttaagccttggcttacgaacaagggtgctgttgtatgtgagcttgataaaaatgccgaacctaataccggtaaaaaaggagataaggctcttttgctttcagcccatatcgataccctcggcctctttgttaggcacattaaatcttcaggccggctgcgtacatcccttgacgggggctttccgtacaattatgtagagcagtccaacgtaacggttatcacaagagagggaaaaaaatatgagggcactatgaggctcacggaacccgccgttcacgcctcgcgcgaaataaacgagctaaaaagagatgattcaaacatggagctagtgctcgatgagattgtaaaatcccgtgaagatgtcgaaaagctcggcatcatggcgggcgatgttgttgccattgaatcccttgcccgaaaggccgggaacggctttttaaagagccggcacttggacgacaaggctagctgcggaatgttcatctaccttgcagaacaggttgcaaagggagaattaaaattaaaacgcaagacctacattatgtttaccaattatgaagaaataggccacggagcttctgcagggcacccggaaggcataagcgatatgcttgcagtcgatatgggtgttgttggaagcgaccttgataccgatgaatatgcggtttcaatttgtgcaaaggattcttccgggccctataactatgagtttacaagcgagcttatcaaaatagccaaggagatggaactgaactttgcagtcgatgtttatccattttacggctcggatgcttccgctgccctgaaagccggttatgactaccgccatgcccttgttggaaccggagttgccgcctcccacggctatgagagaattcataaacaggggcttgaaaacactcttcttttattgacagcttatatttcggaatag

SEQ ID NO: 74691 - protein, 363 aa, Treponema denticola ATCC 35405
MEKNKLAELKTSISNAAEKVMDEIITICNIPSPTGYTCEAADYVLKRLSGLGFKPWLTNKGAVVCELDKNAEPNTGKKGDKALLLSAHIDTLGLFVRHIKSSGRLRTSLDGGFPYNYVEQSNVTVITREGKKYEGTMRLTEPAVHASREINELKRDDSNMELVLDEIVKSREDVEKLGIMAGDVVAIESLARKAGNGFLKSRHLDDKASCGMFIYLAEQVAKGELKLKRKTYIMFTNYEEIGHGASAGHPEGISDMLAVDMGVVGSDLDTDEYAVSICAKDSSGPYNYEFTSELIKIAKEMELNFAVDVYPFYGSDASAALKAGYDYRHALVGTGVAASHGYERIHKQGLENTLLLLTAYISE

SEQ ID NO: 74692 - DNA, 1032 bp, Staphylococcus aureus subsp. aureus MRSA252
  CDS (1)..(1032): transl_table=11
atggaaccaatattagaaatgattaaaacattaacaggtattaatagtccttcaggagacacagaagaagcaattcaatttgtcgaaaaatatgcaaaagacttgggttatcaaacaacactaacaaataaaggtgcgttattaataacagtgccaggcaaaaatgatgaagtacaacgctgtattactgctcatgttgatactttaggtgcaatggttaaagaaattaaagaagatgggcgcttagcaatagaattaattggaggattcacgtataacgcgattgagggtgaatattgccaaattaaaactgatgctggtcaaatatatacaggaaccatttgtctgcatgaaacaagtgttcatgtatatagaaataatcatgaaatacctagagaccaaaagcatatggaaataagaattgatgaagtaactacatcagaagaagatacaaagagtttaggtatttcagtaggtgattttgttagctttgatccacgtacagttatcacgtcatcaggttttattaaatctcgtcatttagatgataaagctagcgtagcgatgatactaaaattactaaagaaattaaaagaagagcaaataatattaccacatacaacgcaattttatatttctaataacgaagaaataggttacggtgcaaatgcatcaattgattcgaaaatcaaagaatatattgcattagatatgggcgcgttgggagacggtcaagcatccgatgaatatacagtttctatttgtgccaaagattcttcaggtccatatcataagcaattgaaatcacacctagttaatctttgcaaaataaataatattccatataaagtagacatatatccatattatggttcagatgcttcagcagctttacatgctggtgcggatatcagacatggtttatttggcgctggcattgaatcatctcatgcaatggaacgaacacatattgattctattaaagcgacagagaaattactatatgcatattgcttatcaccaattgagtaa

SEQ ID NO: 74693 - protein, 343 aa, Staphylococcus aureus subsp. aureus MRSA252
MEPILEMIKTLTGINSPSGDTEEAIQFVEKYAKDLGYQTTLTNKGALLITVPGKNDEVQRCITAHVDTLGAMVKEIKEDGRLAIELIGGFTYNAIEGEYCQIKTDAGQIYTGTICLHETSVHVYRNNHEIPRDQKHMEIRIDEVTTSEEDTKSLGISVGDFVSFDPRTVITSSGFIKSRHLDDKASVAMILKLLKKLKEEQIILPHTTQFYISNNEEIGYGANASIDSKIKEYIALDMGALGDGQASDEYTVSICAKDSSGPYHKQLKSHLVNLCKINNIPYKVDIYPYYGSDASAALHAGADIRHGLFGAGIESSHAMERTHIDSIKATEKLLYAYCLSPIE

SEQ ID NO: 74694 - DNA, 1050 bp, Bacillus cereus E33L
  CDS (1)..(1050): transl_table=11
atggcacatcatgcgaaagaaacgatggaacttattaaggagcttgtctctattccgagtccgtctggaaatacagagaaaatcattcgttttattgaaaactatgtaagtgagtggaatgtagaaacgaagcgtaacaataaaggcgctcttattttaacggtaaaagggaaaaatgatgcacagcaccgcttattaacagcacacgttgatacgttaggtgcgatggtgaaagaaattaagcctgacggtcgtctgagtctttctatgattggcggatttcgctggaactctgtcgaaggggaatattgtgaaattgaaacatcaagtggtaagacgtatacaggaacgattttgatgcatcaaacgtctgtacatgtatataaagatgcaggtgaagcgaaacgcgatgagaaaaatattgaggttcgcattgatgagcgcgtattttcagctgatgaagtacgtgaattaggaattgaagtaggagacttcgtttcatttgatccgcgcgttcaaattacagagagtggatacataaaatcacgtcatttagatgacaaagtaagtgttgcgattctattaaaattaattaagagattacaagatgaaaatgtaacattaccatatacaactcatttcttaatttctaacaatgaagagattgggtacggcggtaattctaacattccagaagaaacggttgaatatttagcagttgatatgggagcgttaggtgatggacaagaatctgacgagtatacagtatctatttgcgcaaaagactctagtggtccgtatcattatgcactgcgtaaacatttagtagagcttgcgaaaacgaacaatattgaatataaagtagatatttatccgtactatggatcggatgcatcagctgcaattcgcgctggatttgatgtgaaacatgcattaattggagcaggtattgattcttctcatgcatttgagcgtacgcatgaaagttcgattgctcatacagaagcacttgtttatgcatatgtattatcagagatgattgcagaataa

SEQ ID NO: 74695 - protein, 349 aa, Bacillus cereus E33L
MAHHAKETMELIKELVSIPSPSGNTEKIIRFIENYVSEWNVETKRNNKGALILTVKGKNDAQHRLLTAHVDTLGAMVKEIKPDGRLSLSMIGGFRWNSVEGEYCEIETSSGKTYTGTILMHQTSVHVYKDAGEAKRDEKNIEVRIDERVFSADEVRELGIEVGDFVSFDPRVQITESGYIKSRHLDDKVSVAILLKLIKRLQDENVTLPYTTHFLISNNEEIGYGGNSNIPEETVEYLAVDMGALGDGQESDEYTVSICAKDSSGPYHYALRKHLVELAKTNNIEYKVDIYPYYGSDASAAIRAGFDVKHALIGAGIDSSHAFERTHESSIAHTEALVYAYVLSEMIAE

SEQ ID NO: 74696 - DNA, 1272 bp, Azoarcus sp. EbN1
  CDS (1)..(1272): transl_table=11
atgattccgcttgccaatgcattgccggatatcgactacgactacctcgaggagacgatgctgcagctcctcgcgatcccgagcccggtcgggctgaccgatgcggtcgtgcgctataccgccgcccggctcgaggcgctcgggattgagtacgagctcacgcggcgtggcgccatccgcgcgacgctgcgcggtcgcgaggcgcaaccggcgcgcgcggtcgtcacgcacctcgacaccctgggcgcgatggtccgggagatcaagccgaacgggcggctggccatcgccccgatcggacactggtcggcgcgattcgccgagggttcgcgcgtgacggtgttcaccgaccaccgccagctgcgcggcacctgcctgccgttgaagacttcgggtcacgcattcggcagcgagatcgacagccagccggtcggttgggaccatgtcgaggtgcgggtcgacgtgccggcaacgacggcgctggaactcgaacaggccggcctgcatgtcggtgactggatcgcgttcgatccgcagaccgaggtgctgcccggcggctacatcaattcgcgctacctcgacgacaaggccgccgtcgcggccctgctcgccgcatgcaaggcgatcggcgaccatcgcctgcccctcgcagtcgacgtccaccccttgttcacgatcaccgaggaggtcggctcgggcgcgtccgcggcgctgcacggcgagatcgcggagatggtaagcctcgacatctcgatcgccgcgccgggccagaacacgtccgagcatgccgcgacgatctgcgtacaggacatgtcggggccgttcgactaccacctcacgcacaagctgatcgcgctcgcgcgcgagcacggcattccgcaccgccgcgacgtgttccgcttctaccgctcggattccgccgccgcagtcgaggcgggcaacgacattcgtacggccctgatcggcttcggcggcgacgcgtcgcacgcgcaggaacgcacgcaccgcgacgcgctggtggcgctgacgcagctcgtggtcgcctacatgacgagcgaacccgtgacgcggcgcgaccggcgcacgatgagttcgctggcgggcttcaccgagcagctgcggcccgaggacatggtggtgccgtcgacgccgctgccgcttccgggcgaatttctcgactgcggccgggaggacgacggggtgggcagcggcggcgaggcgcaggattgtggcgcgctgcaacgcgagccggggagcgatccggaggcttga

SEQ ID NO: 74697 - protein, 423 aa, Azoarcus sp. EbN1
MIPLANALPDIDYDYLEETMLQLLAIPSPVGLTDAVVRYTAARLEALGIEYELTRRGAIRATLRGREAQPARAVVTHLDTLGAMVREIKPNGRLAIAPIGHWSARFAEGSRVTVFTDHRQLRGTCLPLKTSGHAFGSEIDSQPVGWDHVEVRVDVPATTALELEQAGLHVGDWIAFDPQTEVLPGGYINSRYLDDKAAVAALLAACKAIGDHRLPLAVDVHPLFTITEEVGSGASAALHGEIAEMVSLDISIAAPGQNTSEHAATICVQDMSGPFDYHLTHKLIALAREHGIPHRRDVFRFYRSDSAAAVEAGNDIRTALIGFGGDASHAQERTHRDALVALTQLVVAYMTSEPVTRRDRRTMSSLAGFTEQLRPEDMVVPSTPLPLPGEFLDCGREDDGVGSGGEAQDCGALQREPGSDPEA

SEQ ID NO: 74698 - DNA, 1050 bp, Bacillus clausii KSM-K16
  CDS (1)..(1050): transl_table=11
atgtatgataaagaactccaggggatcatttccattttgaaagacttggtccacattccaagtccttcagggtacaccggcgaagcgatcgcctatattaggcgttttttggaggatgtcggaatccagactcaattgttaaataaaggggcgctccttgccacgattgatgggaaaaacaatgataagcagcgaatgctcactgcccatgttgatacattaggggcgatcgtgaaagacattaaagagaacgggcgattggcgattgacaaaattggcggatacgcgtttcactccattgaaggggaatattgcctcatccataaatcagacaaaagcacggtgtcaggaacgattgtcatgcatcaatcttctgtccatgtttacaaggacgcagacactgcaaaacggaatgaagaaaatattgaagtacgaattgatgccgctgtccatgatgaaaaagacacggaagcattaggaattgccgtaggagatttcattagttttgctcctcgttttgagcaaacgccgtctggttttattaaatcgcgccatttggatgataaagcgagtgtggccttgcttttgcagttaatgaaacaacttgcaggcagcaagataaagcttccttatacgacccatttcctcatttcaaacaatgaagaaattggattcggcggaaacgctgggattcccgaaaaggtgattgaatatgttgccgtcgatatgggtgccattggcgacggccagcaaaccgatgaatttactgtttccatttgtgcgaaagacggaagcggcccgtaccattatggattgcggacacaccttgtttcgctatgcaaacaagagtcgattccatacaaattagacatttatccttactatagctcagatgcatctgctgctattaaggcaggccatgatttagtccatggcttaattgggccaggcattgaaggttcccattcgatggaacggacccatcaatcttcactggaagccacctatcgccttctatgtgcatacacttattcggagatgaaccattaa

SEQ ID NO: 74699 - protein, 349 aa, Bacillus clausii KSM-K16
MYDKELQGIISILKDLVHIPSPSGYTGEAIAYIRRFLEDVGIQTQLLNKGALLATIDGKNNDKQRMLTAHVDTLGAIVKDIKENGRLAIDKIGGYAFHSIEGEYCLIHKSDKSTVSGTIVMHQSSVHVYKDADTAKRNEENIEVRIDAAVHDEKDTEALGIAVGDFISFAPRFEQTPSGFIKSRHLDDKASVALLLQLMKQLAGSKIKLPYTTHFLISNNEEIGFGGNAGIPEKVIEYVAVDMGAIGDGQQTDEFTVSICAKDGSGPYHYGLRTHLVSLCKQESIPYKLDIYPYYSSDASAAIKAGHDLVHGLIGPGIEGSHSMERTHQSSLEATYRLLCAYTYSEMNH

SEQ ID NO: 74700 - DNA, 1014 bp, Thermococcus kodakarensis KOD1
  CDS (1)..(1014): transl_table=11
atggagcgcgtcgttgagattctgaaggagatacttgagataccgtccccaacaggctacacaagggaagttatggagcacattgagaaaaagcttaccgaggcagggattaagacctactacaccaacaagggcgccctgatagcgggcaaccaccccgagcctgaactcgtgattgcggcacacgttgacactctaggtgcgatggtaaagggcatcctccccgacggacatctgagcttcacgagaataggcggccttctccttcctgccttcgagggggagtactgcacgataatcacccgctcaggaaagcgctaccgcgggacgctcctcctcaagaacccgagcgttcacgtgaacaaagaggcaggaaagaaggagagaacagaggagaacatgtacatccgcctcgatgcagaggtggagaagaaagaagacactgaaaagctcggcataaggcccggcgacttcattgccttcgacccgaagttcgagtacgtgaacggcttcgtcaaggcccacttcttggacgacaaggcgagcgtggcagtgctaattgacctcatgctcgaccttagtcagacccttgaaaagctcccggttgcgttcttcttctcgccgtacgaggaggtcggccacggcggttcggcaggctatcccaagagcacgaaggaactcctagtcgttgatatgggagtagttggcgaaggcgtggctggaaaggagacggccgtctcaatagcggccaaagattcgagcggcccctacgactacgagatgacgaccaaactaatcgaacttgccgagaagaggggaatcccttacaccgtggacgtcttcccatactacggctcggacgggagcgcggccttgagggctggctgggacttcagggttgccctcatcggccagggagtccacgccagccacggcatggagagaacacacgttaagggaatgctcgccacgaaggagctgataagggcatacatcgaggagaagttcctctga

SEQ ID NO: 74701 - protein, 337 aa, Thermococcus kodakarensis KOD1
MERVVEILKEILEIPSPTGYTREVMEHIEKKLTEAGIKTYYTNKGALIAGNHPEPELVIAAHVDTLGAMVKGILPDGHLSFTRIGGLLLPAFEGEYCTIITRSGKRYRGTLLLKNPSVHVNKEAGKKERTEENMYIRLDAEVEKKEDTEKLGIRPGDFIAFDPKFEYVNGFVKAHFLDDKASVAVLIDLMLDLSQTLEKLPVAFFFSPYEEVGHGGSAGYPKSTKELLVVDMGVVGEGVAGKETAVSIAAKDSSGPYDYEMTTKLIELAEKRGIPYTVDVFPYYGSDGSAALRAGWDFRVALIGQGVHASHGMERTHVKGMLATKELIRAYIEEKFL

SEQ ID NO: 74702 - DNA, 1197 bp, Pseudomonas syringae pv. syringae B728a
  CDS (1)..(1197): transl_table=11
atgacccctgcaaatatccccgatccggatctgaaatacctgcagaaagttctgttggaaatgctcgcgatcccaagccctaccggcttcaccgacactattgtgcgttacgtggccgagcgtctcgaagagctgggcatcccgttcgaactgacccgccgcggcacgatccgcgccacgctgaagggcaagcagaacagccccgaccgcgccgtatcggcgcacctggacaccatcggtgccagcgttcgggaagttaaagaaaacggccgcctgtcactggctgcggtcggctgctggtcgagccgctttgccgaaggcagccgggtcagcgtgttcaccgacaccggcgtgatccgtggcagcgttttgccgctgatggcttccggtcacgcgttcaacaccgccgtggatgaaatgccgatcagttgggaccacgtcgagttgcgcctggatgcctattgcaccacccgcgccgactgcgaatcgctgggtatcggcatcggtgacttcgtcgccttcgacccgctgccggagttcaccgagagcggacacatcagtgcccgccacctggatgacaaggctggtgtcgcggcactgctcgccgccctgaaatccattgtcgacagcggtgccgagccgttgatcgactgtcacccgctgttcaccatcaccgaagaaaccggtacgggcgcggctggcgtgctgccttgggacgtgagcgagttcgtcggcatcgacatcgcgccggttgcgccaggtcagcattccagcgaacacgccgtcagcgtggcgatgcaggactcgggcggtccttacgactaccacctgtcccgccatctgctgcggctgggtgtggaaaacgagttgccggtgcgtcgtgacctgttccgctattactacagtgatgcgcactcggccgtgacttcggggcatgacatccgcaccgccctgctggccttcggctgtgacgcgacgcatggctacgagcgcacgcatatcgacagtctggcggcgctgagcaagttgctgggtgcctacatactcagcccaccggtattcgccagcgatgccaaaccggcgcagagctcgctggagcgcttcagccatcagatcgagcacgatgcgcagatggaatccgatacccgcgtgccaccggtcgacagcctgatcgggcagaatcgcgaagagagctga

SEQ ID NO: 74703 - protein, 398 aa, Pseudomonas syringae pv. syringae B728a
MTPANIPDPDLKYLQKVLLEMLAIPSPTGFTDTIVRYVAERLEELGIPFELTRRGTIRATLKGKQNSPDRAVSAHLDTIGASVREVKENGRLSLAAVGCWSSRFAEGSRVSVFTDTGVIRGSVLPLMASGHAFNTAVDEMPISWDHVELRLDAYCTTRADCESLGIGIGDFVAFDPLPEFTESGHISARHLDDKAGVAALLAALKSIVDSGAEPLIDCHPLFTITEETGTGAAGVLPWDVSEFVGIDIAPVAPGQHSSEHAVSVAMQDSGGPYDYHLSRHLLRLGVENELPVRRDLFRYYYSDAHSAVTSGHDIRTALLAFGCDATHGYERTHIDSLAALSKLLGAYILSPPVFASDAKPAQSSLERFSHQIEHDAQMESDTRVPPVDSLIGQNREES

SEQ ID NO: 74704 - DNA, 1191 bp, Pseudomonas fluorescens PfO-1
  CDS (1)..(1191): transl_table=11
atgaccacccaaattcccgaaccggatctgaactacctgcagaaagtcctgctggaaatgctcgccatcccgagcccgaccgggttcaccgacaccatcgtgcgctacgtcgccgagcgtctggaagaactcggcattcccttcgagatgacccgtcgcggcacgatccgcgccacccttaaaggcaagaaaaacagccccgaccgtgcggtctcggcgcacctggacaccatcggcgccgccgtgcgcgcggtgaaggacaacgggcgtctgaccctggcgccggtgggttgctggtcgagccgattcgccgagggcagccgcgtcagcctgttcaccgacaacggtgtgattcgcggcagcgtgttgccgctgatggcgtccgggcatgccttcaacacggccgtggacgagatgccgatcagttgggatcacgtcgagctgcgtctggacgcctactgcgcgacccgtgccgattgcgattcgctgggtatcagcgtcggcgacgtggtggccttcgatccgctgccggagttcaccgaaagcggccacatcagcgcccgtcacctggacgacaaggccggcgtcgcggcgctgctggccgcgttgaaagccatcgtcgacagcggccaggaactgatgatcgactgccatccgctgttcaccatcaccgaagaaaccggcagcggcgcagcggcggcgttgccgtgggacgtcagcgaattcgtcggcatcgacatcgccccggtcgcgccgggccagcactccagcgaacacgcggtgagcgtggcgatgcaggattccggcgggccctacgactatcacttgtcgcggcacttgttgcgtctggcgggtgagcacgaactgcctgtgcgccgcgacctgttccgctattacttcagtgacgcccactcggcggtcaccgccggtcacgacattcgcaccgccctgctcgccttcggctgcgacgcgacccacggctacgagcgcacgcacatcgacagcctggcggcgctcagtcgcttgctgggggcgtacatcctgagtccgccggtgttcgccagcgatgcgcaaccggccaccgggtcactggatcgcttcagtcaccagatcgaacacgagacacaaatggaaagcgacacccgtgtgccgtcggtggacagcctggtggggcaacgctcggacagttga

SEQ ID NO: 74705 - protein, 396 aa, Pseudomonas fluorescens PfO-1
MTTQIPEPDLNYLQKVLLEMLAIPSPTGFTDTIVRYVAERLEELGIPFEMTRRGTIRATLKGKKNSPDRAVSAHLDTIGAAVRAVKDNGRLTLAPVGCWSSRFAEGSRVSLFTDNGVIRGSVLPLMASGHAFNTAVDEMPISWDHVELRLDAYCATRADCDSLGISVGDVVAFDPLPEFTESGHISARHLDDKAGVAALLAALKAIVDSGQELMIDCHPLFTITEETGSGAAAALPWDVSEFVGIDIAPVAPGQHSSEHAVSVAMQDSGGPYDYHLSRHLLRLAGEHELPVRRDLFRYYFSDAHSAVTAGHDIRTALLAFGCDATHGYERTHIDSLAALSRLLGAYILSPPVFASDAQPATGSLDRFSHQIEHETQMESDTRVPSVDSLVGQRSDS

SEQ ID NO: 74706 - DNA, 1164 bp, Rhodospirillum rubrum ATCC 11170
  CDS (1)..(1164): transl_table=11
atgacgcgtctggcgatcgatacggactatctggcccggactctggttcgcttgttagccacccccagcccgaccggctataccgataccgtcgtccgcgaaacctgtgccgagttggaaagcctgggcctgaccccgaccctgacccgacggggggcggtttgcgtggtgttgcgcggacgggaagcccggccggcccgcgccatcgtttcccatctcgacacgctgggcgctcaggtcaagcagctcaaagacaacggccgcctggaactggtgccgatcggcacctggtcggcgcgcttcgccgagggggcgcgggtcacggtgttcaccgatcgcggcgcggttcgcggcacgattttgccgctgaaggcctcgggccacatctttaacgaagagatcgacagcctgccgatcggctggccgatgaccgagttgcgggtcgatgcccgggttcatagcaaggccgatctgatcgccctgggtatcgaggttggcgatatcgtcgccatcgacccccagccggaattcctagccaacggctatatcgtgtcccgccatcttgatgacaaagccggggtggcgctgatgctcgcggctttgaaggccctgaccgcccataacgaaccgccgcccgtcgatgtccatttcatcttcaccatcgccgaggaagtcggcgtcggcgcgtcttcggcgctgaccgatgacgtcgcctcggtggtcgccgtcgataacggcaccagcggacccggccagaactcggccgaattcggcgttaccatcgccatggccgaccagaccggcccctttgattatcatctgacccgggcgctgatccggctctgccgcgacgaggacatcatctttcgcaaggatgtgttccgctactaccgctccgacgccgcctcggcggtggtcgccggccacgatgtgcgcaacgcgctggtcacctttggcatcgacgcctcgcatggctatgagcgcatccatatgcacgccctgcggtcggtggccgaattgctgagcgcctatgcgctgagcccggtggagatccgccgagacgccgtggagaccgcccgcggtctggccggcttcacccgccagccaccccccgaacccatcgccgaggacctagccgtttcgcaagagggccctcttgcgtga

SEQ ID NO: 74707 - protein, 387 aa, Rhodospirillum rubrum ATCC 11170
MTRLAIDTDYLARTLVRLLATPSPTGYTDTVVRETCAELESLGLTPTLTRRGAVCVVLRGREARPARAIVSHLDTLGAQVKQLKDNGRLELVPIGTWSARFAEGARVTVFTDRGAVRGTILPLKASGHIFNEEIDSLPIGWPMTELRVDARVHSKADLIALGIEVGDIVAIDPQPEFLANGYIVSRHLDDKAGVALMLAALKALTAHNEPPPVDVHFIFTIAEEVGVGASSALTDDVASVVAVDNGTSGPGQNSAEFGVTIAMADQTGPFDYHLTRALIRLCRDEDIIFRKDVFRYYRSDAASAVVAGHDVRNALVTFGIDASHGYERIHMHALRSVAELLSAYALSPVEIRRDAVETARGLAGFTRQPPPEPIAEDLAVSQEGPLA

SEQ ID NO: 74708 - DNA, 1197 bp, Pseudomonas aeruginosa UCBPP-PA14
  CDS (1)..(1197): transl_table=11
atgacccctctgccacaaccggacctcaactacctgcaacgggtgctgctggagatgctcgccatccccagccccaccggcttcaccgataccatcgtgcgctatgtcgccgagcagctcgacgaacttggcgtgcccttcgagatgactcgccggggaaccatccgggcgaccctccagggccgcctgaataccccggaccgggcggtttccgcgcacctcgacacgatcggcgcgctggtccgcgagatcaagcccaacggccgcctcggcctggccccggtaggctgctggtcgagccgcttcgccgagggtagccgggtcacggtgttcaccgaacagggcgtgttccgtggcagcgtgctgccgctgctggcctcaggccacgccttcaataccgaggtggacaacctgaagatcagctgggacaacatcgagctgcgtctcgacgcctataccgccagccgcgccgacagcgagagcctgggcatctcggtgggtgactacgtggccttcgatccgttgccggagttcaccgagagcggccatatcagcgcccgccacctggacgacaaggccggggtcgcggcgctgctggcggcgctgaaggcggtcaaggaaagcgggcaggagccgccgatcgactgccacccgctgttcaccatcaccgaggaagtcggctccggcgccgccggcgccctgccctgggacgtcagcgagttcgtcggcatcgacatcgccccggtggccgaaggccagaattccaacgagcacagcgtcagcgtggccatgcaggactccggcgggccctacgacttccatctgtcccggcacctgctgcggctcggcgagcgccacgacatcgccctgcgccgcgacctgttccgctactaccacagcgacgcgcagtcggcgatcgccgccggccacgacacccgcgccgcgctgctggcgttcggctgcgacgccacccacggctacgagcgcacgcacatcgacagcctcgccgcgctgagccgcctgctcactgcctacatcctcagcccgccggtcttcgccagcgacgccaagccccgggaaacctcgctggaacgtttcaacaagcagctcgagcatccggtgcacatggaaagctgcacccacgtcccgccagtggacgaagtgctcgacagcagcaacaacagcgacaagggctga

SEQ ID NO: 74709 - protein, 398 aa, Pseudomonas aeruginosa UCBPP-PA14
MTPLPQPDLNYLQRVLLEMLAIPSPTGFTDTIVRYVAEQLDELGVPFEMTRRGTIRATLQGRLNTPDRAVSAHLDTIGALVREIKPNGRLGLAPVGCWSSRFAEGSRVTVFTEQGVFRGSVLPLLASGHAFNTEVDNLKISWDNIELRLDAYTASRADSESLGISVGDYVAFDPLPEFTESGHISARHLDDKAGVAALLAALKAVKESGQEPPIDCHPLFTITEEVGSGAAGALPWDVSEFVGIDIAPVAEGQNSNEHSVSVAMQDSGGPYDFHLSRHLLRLGERHDIALRRDLFRYYHSDAQSAIAAGHDTRAALLAFGCDATHGYERTHIDSLAALSRLLTAYILSPPVFASDAKPRETSLERFNKQLEHPVHMESCTHVPPVDEVLDSSNNSDKG

SEQ ID NO: 74710 - DNA, 1092 bp, Magnetococcus sp. MC-1
  CDS (1)..(1092): transl_table=11
atgagcgatcaacacgcgagtaacgcgcctatcatcaatacagactatctgcttgaaacgctgctgacactgttgaccattcccagtccatcgggcatgaccgataaagtggtgcggtgggtgtgccatgagttaacccaattgggggtggagtatgagttgacccaccggggggcgattcgcgccacgctaccgggtaaggatgaaaagcgggtgcgcggcgtggtggcgcatctggataccctgggcgctatggtgcgggagctcaaaggcaatgggcgtttaagtgtttcgcccattggtcattggaatggccgttttgccgaaggggcacgggtgacattaatggcggaatcgggccgccatatgcggggtacgctgctgcccttaaaggcatcggggcatgtctataatgaggcgattgatagccaacctgccggttgggactatgtagagttacggctggatgagcgggcgcaatgcgttgcagatttgatgaagctgggtgtccatgtgggggattatgtggcggtggactcggcaccggaggtgagtgcgtccggttttgtcaacgcccgccatctggatgacaaggcgggggttgcggcgatgctggcggctgtacgaaccattatggcacaggatatcaccttaccagccccggtctacgtcatgtttaccatctcggaagaggtgggggtgggggcctcccatattctgcatggagatatctcggagttggtgtcggtggataatggcaccctggccccgggacagaacacctgtgagtttggggtgaccattgccatgaaagactccagtggtccctttgactaccacctgacccaccatctgctggatctgtgcaaagagcacgcgattatgcacagccgtgacgtgtttcggtattaccgtagcgatgccgccgcagctttggaagcggggaatgatatccgtacggcgttggtctgttttgggctggatgcctcccacggttatgagcgtattcatatggattcgttgcatgccttggccgcgctgctcttttactatatgaaccaccagttgcctgtgccagatcgcggtatgtaa

SEQ ID NO: 74711 - protein, 363 aa, Magnetococcus sp. MC-1
MSDQHASNAPIINTDYLLETLLTLLTIPSPSGMTDKVVRWVCHELTQLGVEYELTHRGAIRATLPGKDEKRVRGVVAHLDTLGAMVRELKGNGRLSVSPIGHWNGRFAEGARVTLMAESGRHMRGTLLPLKASGHVYNEAIDSQPAGWDYVELRLDERAQCVADLMKLGVHVGDYVAVDSAPEVSASGFVNARHLDDKAGVAAMLAAVRTIMAQDITLPAPVYVMFTISEEVGVGASHILHGDISELVSVDNGTLAPGQNTCEFGVTIAMKDSSGPFDYHLTHHLLDLCKEHAIMHSRDVFRYYRSDAAAALEAGNDIRTALVCFGLDASHGYERIHMDSLHALAALLFYYMNHQLPVPDRGM

SEQ ID NO: 74712 - DNA, 1134 bp, Mycobacterium avium 104
  CDS (1)..(1134): transl_table=11
atggcgcaccgcgaccgcgactcgaccgacgagctgctgcaagaactgttgtggacctacgggccgtgcgggcaggaggacgcggtgcgcgccgtcatcgcccgcgaattggaacccatcgtcgacgacctgtggaccgacgacgccggcaacctgatcggctacatcgccgccgacgcatcgcgcggcgatgccggggcgcccgaccaccggcaccggaccgcggcgatccccggcaccgccacccgggtcatggcccacatggacgagctgtccatgatcgtcaaacgggtagaacccgatggcacactgcatttgacgcagctgggcaccatgtacccgggcaacttcgggctgggtccggtcgccgtgctcggcgacaacgaaaccctcaccgcggtactgactctcggctccgaacacaccactaaggaaagctcacgaatctgggagaccaagcccgatcagggcgaccgatcgctggactggcatcacgtctacgtcttcaccggccgcagcaccgacgaattggccgccgcgggagtgcacgccggcacccgggtgtgcgtggaccgcagcaagagatcggtggtcgagatcggcgactacgtcggcgcctacttcctcgatgaccgcgccgcagtgaccgcgctgctcaacgccgcccggatgctgcgcgaacgcggacaacgccccgccgacgacgtgtacctggtgttcaccaccaacgaagagatcggcggggtgggcggcgcctacgccagcggcaccctgcccggcgacctgaccctcgcgctggaagtcggccccaccgaacgcgaatacaccaccagcgtcgccggcggcccgatcgtcggttacagcgacgcgctgtgcgtctacgacaaaagcgtcgccgaccggctgctgaaaatcgccaccgaccgcggactgtcgccgcagccggcggcgctgggcgccttcgaatccgacgcgtcgcacgccaaggcaagcgggctgaccgcccgcgccggcctgctgtgcctgcccacgctgagcacccacggctacgaggtggtcgcgcgcagcgcgatcgacgacatggccgccatcgtggtcgatttcgtgctgcagccgggccggccgaacggctga

SEQ ID NO: 74713 - protein, 377 aa, Mycobacterium avium 104
MAHRDRDSTDELLQELLWTYGPCGQEDAVRAVIARELEPIVDDLWTDDAGNLIGYIAADASRGDAGAPDHRHRTAAIPGTATRVMAHMDELSMIVKRVEPDGTLHLTQLGTMYPGNFGLGPVAVLGDNETLTAVLTLGSEHTTKESSRIWETKPDQGDRSLDWHHVYVFTGRSTDELAAAGVHAGTRVCVDRSKRSVVEIGDYVGAYFLDDRAAVTALLNAARMLRERGQRPADDVYLVFTTNEEIGGVGGAYASGTLPGDLTLALEVGPTEREYTTSVAGGPIVGYSDALCVYDKSVADRLLKIATDRGLSPQPAALGAFESDASHAKASGLTARAGLLCLPTLSTHGYEVVARSAIDDMAAIVVDFVLQPGRPNG

SEQ ID NO: 74714 - DNA, 1038 bp, Exiguobacterium sibiricum 255-15
  CDS (1)..(1038): transl_table=11
atgcaggcagttgttcagacgattcgtgacttagtggagattcctagtccgaccggattcaccgctcacgcacttacatatgtagaaaaccggttcaaagaagaaggtatttcatataaaaaattagaaaaaggggcattgcttgcgatgttgccgggcgagtcggcgcgaatccggctgttaacggcgcatgtcgatacgctaggagcaatggtaaaagaaatcttaccgaccgggcgcctcagtctttcgcagctcggcggctatgcctggacagcaattgagggggaaaactgtttagttcacaagatggacggacagacggtttccggaacgatcgtgttccatcattcaagcgtccacacgtcacgtgtgacaaatacggaagagcggagcgcgacgaatatcgaggtccgtcttgacatccgttcgacgacggcagaagaaacgcgggtttccggaattgaagtaggggatatcgtgacgttcgatccgcgattcgtccatacggagacaggattcgtcaaatcacgtcatcttgatgacaaagcgtccgtcgctttattactggagctcgtcaaaaaatggaaaaccctgacgctgccacatcctgtccatattctgatttcgaactatgaagaagttggatttggaggtaatgccggtttttctgaagatgtcgccgaatatatcgcagtcgatatgggagcactcggagaaggacaacattcggatgagtacacggtttcgatttgtgcaaaagatggttcaggtccgtacgatcttgccttacgtcaccagttcacacgtttagcgcaacagcattcgattccgtacaaagtggatatctatccgtattacagctcggatgcttcagcagcggttcatgccggacatgatgtccgacacggtttactcggtcctggaattgaatcgagtcattcttatgagcggacacatgaaacgtcacttcaagcgacctacgatttactggacgcatttgtaaaggagccgatgaacgatgaaaacactttatga

SEQ ID NO: 74715 - protein, 345 aa, Exiguobacterium sibiricum 255-15
MQAVVQTIRDLVEIPSPTGFTAHALTYVENRFKEEGISYKKLEKGALLAMLPGESARIRLLTAHVDTLGAMVKEILPTGRLSLSQLGGYAWTAIEGENCLVHKMDGQTVSGTIVFHHSSVHTSRVTNTEERSATNIEVRLDIRSTTAEETRVSGIEVGDIVTFDPRFVHTETGFVKSRHLDDKASVALLLELVKKWKTLTLPHPVHILISNYEEVGFGGNAGFSEDVAEYIAVDMGALGEGQHSDEYTVSICAKDGSGPYDLALRHQFTRLAQQHSIPYKVDIYPYYSSDASAAVHAGHDVRHGLLGPGIESSHSYERTHETSLQATYDLLDAFVKEPMNDENTL

SEQ ID NO: 74716 - DNA, 1119 bp, Prosthecochloris aestuarii DSM 271
  CDS (1)..(1119): transl_table=11
atgatcactatcgataccgaatacctcaaaacaaccctcctgaaactgctcgacattccaagcccgaccggctataccgatgaaatcgtccacgctgtcggcagggagctggaacgcatgggggtcccgttcgaactcacccgccgcggagcgatccgtgcaacgctcaagggggcgcagccaaaacttgacagggctatcgtctcgcacctcgacacactcggcgccatggtgagagaactcaaacccaatggcaggctgggaatcatgatgataggccactggtcggccagatttgctgaaggcgcgagagtcaccatctttaccgataaacgctccttccgcggcacgatccagcctctcaaggcatccgggcacgtctacaacgacgagatagatacccagccagtctcatgggacaatcttgaggtacggatcgatgaaaaactctctacccgggaagatctcgaagcgctcggcttcaatgtaggcgacttcattgccgtggacagcagcccggaactcacctccagcggattcatcaaggcacgccatctcgacaacaaagccggtgttgcctgccagctcacgacaatcaaggcgatcgttgacgcaggcataacacttcctgtcacctgccacccgctctttaccatctccgaagaagaagggacaggcgcctcgtcgattctgcacggcgatgtcgccgccatggtcgctatagacaattcaacggtcgcaccggggcagaactccagggaagacagcgttaccatcgccatgcgcgatcagggcgcgatctacgattaccacctcacccatcgtcttatcagcctctgcgaagacaacgccattccctatgtccgcgatgttttccgccattacaggtctgacgctgcttctgcactctctgccggaaacgatatccgcaccgggcttatctgcttcgggctggatgcttcgcacggccatgaaagaacccatatcgattcactcatagccatctcccggcttctatgcgcctacctgcaaagcaccccgagaatcaagcacgacagcaacaaactcgggccgctggaaggctttccaatgctttcagtcaacaaaaaaacgcgttaa

SEQ ID NO: 74717 - protein, 372 aa, Prosthecochloris aestuarii DSM 271
MITIDTEYLKTTLLKLLDIPSPTGYTDEIVHAVGRELERMGVPFELTRRGAIRATLKGAQPKLDRAIVSHLDTLGAMVRELKPNGRLGIMMIGHWSARFAEGARVTIFTDKRSFRGTIQPLKASGHVYNDEIDTQPVSWDNLEVRIDEKLSTREDLEALGFNVGDFIAVDSSPELTSSGFIKARHLDNKAGVACQLTTIKAIVDAGITLPVTCHPLFTISEEEGTGASSILHGDVAAMVAIDNSTVAPGQNSREDSVTIAMRDQGAIYDYHLTHRLISLCEDNAIPYVRDVFRHYRSDAASALSAGNDIRTGLICFGLDASHGHERTHIDSLIAISRLLCAYLQSTPRIKHDSNKLGPLEGFPMLSVNKKTR

SEQ ID NO: 74718 - DNA, 1035 bp, Streptococcus suis 89/1591
  CDS (1)..(1035): transl_table=11
atgaagacacttgattacattgttacattgaccaatactccgtcgccaactggttttacgacggatattatgaattacatcaaggcagaggttgaaagtttcggctatgctgctagtaagaccgctaaaggtggtgttttggtgacagttccgggggaaaatgaccaggaacaccgcatggtgactgctcacctagacacactgggggccatggttcgtgcagtgaaaccggatggccgactcaaaatggatttggtgggaggatttggatacccttctattgagggagaaaactgcttaattcattgtgctaaaaatagcaagactttcacaggtactattctcatgcaccagacctctgtccatgtctatcgggatgccagtaccgctgagcgcaatcagaccaacatggaaattcgtttggacgaaaaagtgaccaatgcggacgagacgcgggccttgggtattgaagtcggagattttatctcctttgatcctcgtaccgtcgtgacagaaactggctttatcaagagtcgtcacttggatgataaggtatccgcagctatcttgctccatctattgaaggtctataaggaagagggagcgaccttgccttatacgacacatttctatttttcaaacaatgaagagattggctacggtgccaactccagcattcctgctcaggtggttgaatatttggcagtcgatatgggggcaatgggagatgaccagcaaactgacgaatacacagtttctatctgtgtcaaggacggatcaggtccctaccattatgaacttcgtcagcacttggtagcattggctgagagggatggtattccttacaagctggatatttatccttactatggttccgatgcttcggcagctatgcgagcaggtgcagatgtcaagcacgccctgcttggtgctggcattgagtctagccattcctacgagcggacgcatttggattctgtagttgcgactgagcggatggtagatgcctatttgaaatcagcaatggtagattaa

SEQ ID NO: 74719 - protein, 344 aa, Streptococcus suis 89/1591
MKTLDYIVTLTNTPSPTGFTTDIMNYIKAEVESFGYAASKTAKGGVLVTVPGENDQEHRMVTAHLDTLGAMVRAVKPDGRLKMDLVGGFGYPSIEGENCLIHCAKNSKTFTGTILMHQTSVHVYRDASTAERNQTNMEIRLDEKVTNADETRALGIEVGDFISFDPRTVVTETGFIKSRHLDDKVSAAILLHLLKVYKEEGATLPYTTHFYFSNNEEIGYGANSSIPAQVVEYLAVDMGAMGDDQQTDEYTVSICVKDGSGPYHYELRQHLVALAERDGIPYKLDIYPYYGSDASAAMRAGADVKHALLGAGIESSHSYERTHLDSVVATERMVDAYLKSAMVD

SEQ ID NO: 74720 - DNA, 1185 bp, Pseudomonas putida GB-1
  CDS (1)..(1185): transl_table=11
atgtccgaacgactccccgaacccgatctcgactacctcaaacgtgtgctcctggaaatgctcgccatccccagccccaccgggttcaccgataccatcgtgcgctacgttgccgaacgcctggacgaactgggcatccccttcgagctgacccgccgtggcaccatccgcgccaccctcaagggccggcaaacttcacccgaccgggccgtgtccgcccacctcgacaccatcggcgccagtgtgcgccagctgcaggacaacggccgcctggccctggcgccagtgggttgctggtccagccgcttcgccgaaggcagtcgcgtcagcgtgttcaccgataccggggtgttccgcggcagcgttctgccgctgatggccagcgggcatgccttcaacaccgccatcgaccagatgcctatcagctgggatcatgtggaagtacgcctggacgcctactgcgccacccgcgccgactgcgaggcactgggcgtgagcatcggtgacttcgtggccttcgaccctttgcccgagttcaccgaaagcggccacatcagcgcccgccatctggacgacaaggctggcgtagccgcattgctggcagcattgaaggccgtggtggaaagcggccggcaacctttgatcgattgccacccgctgttcaccatcaccgaagaaaccggctcaggggcagccggtgccctgccttgggacgtcagcgagttcgtcggcatcgacatcgccccggtggcgcccgggcaggcgtccagcgagcatgccgtgagcgtggccatgcaggactcgtcggggccttacgactaccacctgtcccggcacctgctgaaactggccggcgaccacgacttgcccgtgcggcgtgacctgttccgctattacttcagcgacgcccattcggccgtgacggcggggcacgatattcgcactgcgctggtggcgtttggctgcgatgccacccatgggtacgagcgtacccatatcgacagcctggcagcgctgagccggttgttgtcggcgtacctgttgagcccaccggtgttcgccagcgattcgcaaccggccaatgcgtcgcttgaacgcttcagccatcagctggagcatgatgcgcagatggagagcgatacgcgggtgccgacggtggatagcctggttggcaataaaggctga

SEQ ID NO: 74721 - protein, 394 aa, Pseudomonas putida GB-1
MSERLPEPDLDYLKRVLLEMLAIPSPTGFTDTIVRYVAERLDELGIPFELTRRGTIRATLKGRQTSPDRAVSAHLDTIGASVRQLQDNGRLALAPVGCWSSRFAEGSRVSVFTDTGVFRGSVLPLMASGHAFNTAIDQMPISWDHVEVRLDAYCATRADCEALGVSIGDFVAFDPLPEFTESGHISARHLDDKAGVAALLAALKAVVESGRQPLIDCHPLFTITEETGSGAAGALPWDVSEFVGIDIAPVAPGQASSEHAVSVAMQDSSGPYDYHLSRHLLKLAGDHDLPVRRDLFRYYFSDAHSAVTAGHDIRTALVAFGCDATHGYERTHIDSLAALSRLLSAYLLSPPVFASDSQPANASLERFSHQLEHDAQMESDTRVPTVDSLVGNKG

SEQ ID NO: 74722 - DNA, 22 bp, Artificial sequence
  primer
atgtccagcccactcccagaac

SEQ ID NO: 74723 - DNA, 22 bp, Artificial sequence
  primer
tcaagcatccggttcgtgcttg

SEQ ID NO: 74724 - protein, 351 aa, Artificial sequence
  consensus sequence
  Variant (5)..(5): Xaa in position 5 is any amino acid
  Variant (7)..(7): Xaa in position 7 is any amino acid
  Variant (9)..(22): Xaa in position 9 to 22 is any amino acid
  Variant (24)..(31): Xaa in position 24 to 31 is any amino acid
  Variant (33)..(39): Xaa in position 33 to 39 is any amino acid
  Variant (41)..(43): Xaa in position 41 to 43 is any amino acid
  Variant (44)..(63): Xaa in position 44 to 63 is any or no amino acid
  Variant (65)..(68): Xaa in position 65 to 68 is any amino acid
  Variant (70)..(70): Xaa in position 70 is any amino acid
  Variant (73)..(73): Xaa in position 73 is any amino acid
  Variant (76)..(76): Xaa in position 76 is any amino acid
  Variant (78)..(83): Xaa in position 78 to 83 is any amino acid
  Variant (87)..(91): Xaa in position 87 to 91 is any amino acid
  Variant (93)..(99): Xaa in position 93 to 99 is any amino acid
  Variant (102)..(114): Xaa in position 102 to 114 is any amino acid
  Variant (115)..(119): Xaa in position 115 to 119 is any or no amino acid
  Variant (121)..(127): Xaa in position 121 to 127 is any amino acid
  Variant (129)..(129): Xaa in position 129 is any amino acid
  Variant (131)..(145): Xaa in position 131 to 145 is any amino acid
  Variant (146)..(146): Xaa in position 146 is any or no amino acid
  Variant (148)..(148): Xaa in position 148 is any amino acid
  Variant (150)..(150): Xaa in position 150 is any amino acid
  Variant (152)..(161): Xaa in position 152 to 161 is any amino acid
  Variant (162)..(162): Xaa in position 162 is any or no amino acid
  Variant (165)..(167): Xaa in position 165 to 167 is any amino acid
  Variant (170)..(173): Xaa in position 170 to 173 is any amino acid
  Variant (175)..(181): Xaa in position 175 to 181 is any amino acid
  Variant (182)..(184): Xaa in position 182 to 184 is any or no amino acid
  Variant (186)..(189): Xaa in position 186 to 189 is any amino acid
  Variant (197)..(197): Xaa in position 197 is any amino acid
  Variant (200)..(201): Xaa in position 200 to 201 is any amino acid
  Variant (203)..(224): Xaa in position 203 to 224 is any amino acid
  Variant (225)..(226): Xaa in position 225 to 226 is any or no amino acid
  Variant (229)..(229): Xaa in position 229 is any amino acid
  Variant (231)..(231): Xaa in position 231 is any amino acid
  Variant (233)..(241): Xaa in position 233 to 241 is any amino acid
  Variant (242)..(242): Xaa in position 242 is any or no amino acid
  Variant (244)..(247): Xaa in position 244 to 247 is any amino acid
  Variant (249)..(254): Xaa in position 249 to 254 is any amino acid
  Variant (257)..(259): Xaa in position 257 to 259 is any amino acid
  Variant (261)..(262): Xaa in position 261 to 262 is any amino acid
  Variant (264)..(268): Xaa in position 264 to 268 is any amino acid
  Variant (269)..(271): Xaa in position 269 to 271 is any or no amino acid
  Variant (273)..(274): Xaa in position 273 to 274 is any amino acid
  Variant (278)..(284): Xaa in position 278 to 284 is any amino acid
  Variant (286)..(287): Xaa in position 286 to 287 is any amino acid
  Variant (289)..(298): Xaa in position 289 to 298 is any amino acid
  Variant (300)..(303): Xaa in position 300 to 303 is any amino acid
  Variant (305)..(305): Xaa in position 305 is any amino acid
  Variant (309)..(310): Xaa in position 309 to 310 is any amino acid
  Variant (312)..(314): Xaa in position 312 to 314 is any amino acid
  Variant (316)..(316): Xaa in position 316 is any amino acid
  Variant (318)..(321): Xaa in position 318 to 321 is any amino acid
  Variant (323)..(325): Xaa in position 323 to 325 is any amino acid
  Variant (327)..(330): Xaa in position 327 to 330 is any amino acid
  Variant (332)..(333): Xaa in position 332 to 333 is any amino acid
  Variant (338)..(346): Xaa in position 338 to 346 is any amino acid
  Variant (348)..(350): Xaa in position 348 to 350 is any amino acid
IPSPXGXTXXXXXXXXXXXXXXGXXXXXXXXGXXXXXXXGXXXXXXXXXXXXXXXXXXXXXXXRXXXXHXDTXGAXVXXXXXXGRLXXXXXGXXXXXXXEGXXXXXXXXXXXXXXXXXXGXXXXXXXSXHXXXXXXXXXXXXXXXXEXRXDXXXXXXXXXXXLGXXXGDXXXXDXXXXXXXXXXGXXXXRHLDDKAXVAXXLXXXXXXXXXXXXXXXXXXXXXXXXEEXGXGXXXXXXXXXXEXXXXDXXXXXXGQXXXEXXVXXXXXXXXDXXGPYXXXXXXXLXXLXXXXXXXXXXDXXXXYXSDAXXAXXXGXDXXXXLXXXGXXXXHXXERTHXXXXXXXXXLXXXY

SEQ ID NO: 74725 - protein, 32 aa, Artificial sequence
  protein pattern
  Variant (3)..(3): Xaa in position 3 is Ala or Gly
  Variant (4)..(4): Xaa in position 4 is any amino acid
  Variant (5)..(5): Xaa in position 5 is Ala or Ser
  Variant (7)..(8): Xaa in position 7 to 8 is any amino acid
  Variant (9)..(9): Xaa in position 9 is Ala or Ser
  Variant (11)..(11): Xaa in position 11 is any amino acid
  Variant (13)..(15): Xaa in position 13 to 15 is any amino acid
  Variant (16)..(16): Xaa in position 16 is Ala or Gly
  Variant (18)..(18): Xaa in position 18 is Phe, Ile, Leu or Val
  Variant (19)..(19): Xaa in position 19 is Ala, Cys, Gly or Thr
  Variant (20)..(20): Xaa in position 20 is any amino acid
  Variant (22)..(23): Xaa in position 22 to 23 is any amino acid
  Variant (24)..(24): Xaa in position 24 is Ala, Gly or Ser
  Variant (25)..(25): Xaa in position 25 is Ser or Thr
  Variant (27)..(27): Xaa in position 27 is Ala, Gly or Ser
  Variant (28)..(28): Xaa in position 28 is any amino acid
  Variant (31)..(31): Xaa in position 31 is any amino acid
SDXXXAXXXGXDXXXXLXXXGXXXXHXXERXH

SEQ ID NO: 74726 - protein, 28 aa, Artificial sequence
  protein pattern
  Variant (2)..(7): Xaa in position 2 to 7 is any amino acid
  Variant (9)..(10): Xaa in position 9 to 10 is any amino acid
  Variant (11)..(11): Xaa in position 11 is Gly, Ser or Thr
  Variant (12)..(12): Xaa in position 12 is any amino acid
  Variant (14)..(15): Xaa in position 14 to 15 is any amino acid
  Variant (16)..(16): Xaa in position 16 is Ala, Thr or Val
  Variant (17)..(17): Xaa in position 17 is Cys, Ser or Thr
  Variant (18)..(18): Xaa in position 18 is Ile, Leu or Val
  Variant (19)..(19): Xaa in position 19 is Ala, Cys, Gly or Pro
  Variant (20)..(21): Xaa in position 20 to 21 is any amino acid
  Variant (23)..(24): Xaa in position 23 to 24 is any amino acid
  Variant (27)..(27): Xaa in position 27 is Phe or Tyr
  Variant (28)..(28): Xaa in position 28 is Asp or His
DXXXXXXGXXXXEXXXXXXXXDXXGPXX

SEQ ID NO: 74727 - protein, 18 aa, Artificial sequence
  protein pattern
  Variant (2)..(2): Xaa in position 2 is Phe, His or Tyr
  Variant (3)..(3): Xaa in position 3 is Ile, Leu or Val
  Variant (4)..(4): Xaa in position 4 is any amino acid
  Variant (5)..(5): Xaa in position 5 is Ala or Ser
  Variant (10)..(10): Xaa in position 10 is Asp, Gly or Asn
  Variant (12)..(14): Xaa in position 12 to 14 is any or no amino acid
  Variant (16)..(17): Xaa in position 16 to 17 is any amino acid
  Variant (18)..(18): Xaa in position 18 is Ala, Gly or Leu
GXXXXRHLDXKXXXAXXX

SEQ ID NO: 74728 - protein, 37 aa, Artificial sequence
  protein pattern
  Variant (2)..(4): Xaa in position 2 to 4 is any amino acid
  Variant (5)..(5): Xaa in position 5 is any or no amino acid
  Variant (8)..(8): Xaa in position 8 is Ser or Thr
  Variant (10)..(10): Xaa in position 10 is any amino acid
  Variant (12)..(13): Xaa in position 12 to 13 is any amino acid
  Variant (14)..(14): Xaa in position 14 is Ala, Ile or Val
  Variant (15)..(15): Xaa in position 15 is Ile, Leu, Met or Val
  Variant (16)..(21): Xaa in position 16 to 21 is any amino acid
  Variant (22)..(22): Xaa in position 22 is Phe, Leu or Val
  Variant (23)..(33): Xaa in position 23 to 33 is any amino acid
  Variant (34)..(34): Xaa in position 34 is Lys or Arg
  Variant (36)..(36): Xaa in position 36 is any amino acid
  Variant (37)..(37): Xaa in position 37 is Ile, Leu or Val
LXXXXSPXGXTXXXXXXXXXXXXXXXXXXXXXXXGXX

SEQ ID NO: 74729 - DNA, 750 bp, Azotobacter vinelandii
  CDS (1)..(750): transl_table=11
atgaaggttcttgtagctgtcaaacgcgtggtcgactacaacgtcaaggtgcgcgtcaagcccgaccagagcggtgtcgacctggccaacgtcaagatgtcgatgaaccccttctgcgagatcgccgtggaggaagccgtgcgcctgaaggagcgcggcatcgccagcgagatcgtcgccgtgtccgtcggcccggccgccgcccaggaacagttgcgcaccgccctggccctcggcgccgaccgcgccatcctggtcgagaccgacgaggagctgggctcgctggcggtggccaagctgctcaaggcggtggtcgacaaggagcagccgcaactggtcatcaccggcaagcaggcgatcgacagcgacaacaaccagaccgggcagatgctcgccgcgctgaccggctacgcccagggcaccttcgcctccaaggtcgagcaggccggcgacaagctcaaggtcacccgcgagatcgacggcgggctacagaccctggaactgagcctgccggccatcgtcaccaccgacctgcgcctgaacgagccgcgctacgcctcgctgccgaacatcatgaaggccaagaagaaaccgctggagacggtgaagccggcggacctgggcgtgtccgtggcctcgactctcaaggtgctcaaggtcgaggcgccggccgaacgccaggccggtatcaaggtgggctcggtggccgaactggtcgagaaactgaagaacgaagcgaaggtgatctga

SEQ ID NO: 74730 - protein, 249 aa, Azotobacter vinelandii
MKVLVAVKRVVDYNVKVRVKPDQSGVDLANVKMSMNPFCEIAVEEAVRLKERGIASEIVAVSVGPAAAQEQLRTALALGADRAILVETDEELGSLAVAKLLKAVVDKEQPQLVITGKQAIDSDNNQTGQMLAALTGYAQGTFASKVEQAGDKLKVTREIDGGLQTLELSLPAIVTTDLRLNEPRYASLPNIMKAKKKPLETVKPADLGVSVASTLKVLKVEAPAERQAGIKVGSVAELVEKLKNEAKVI

SEQ ID NO: 74731 - DNA, 1010 bp, Sorghum bicolor
  CDS (52)..(819)
  misc_feature (988)..(988): n is a, g, c or t
gcacgagggagaggccgagagagagagaggccgagagccgccgccgccgccatgaagatcctggtcgcggtgaagcgggtggtggactacgccgtcaaggtgcgcgtgaggcccgaccggacgggcgtggagacggccaacgtcaagatgtcgatgaaccccttctgcgagatcgccgtcgaggaggcgctccggctccgcgaggccggcgccgccgccgaggtcgtcgccgccaccgtcggccccgcccagtccgccgacacgctccgcaccgcgctcgccgccggccgcgaccgcgagaacggagcgagagagagaggccgagagagagagaggccgagagccgtcgccgtcgccaagatcctccgcgccgtcgcgctccaggagaagcccggactcgtcatcctcggcaagcaggcaattgatgacgattgcaaccaaactggacaaatgctagctggattgcttcagtggccacaaggaacctttgcctccaaggttatattggacacagaaaaacaaaaagctactgttgagcgagaagttgatggtggaattgaaaccatctgccttgatttgccagcagtgatcaccacggatttgagacttaaccagccaagatatgcaactttgcccaacataatgaaggcaaaatccaaagttattaagaaagtcgccacgcgtccgctcggtgtagatattagatcagacatggaggtcattgaggtcaatgaaccaccaaaacggaaagcaggggtgatactttcatctgttgacgaactccttgacaagttaaaaaatgaagcaggtgtcttgtaacaatttgtatattattcctcactgaatgtggtctgacgttcatttgtataagttacaataaagatgtctctccaaaagttcagaccatttacaaataaaataagtgtttccatgaactaattaagacgctatttcaactacccattacctgctgaattagctacaaaanaaaaaaaaaaaaaggcccctaa

SEQ ID NO: 74732 - protein, 255 aa, Sorghum bicolor
MKILVAVKRVVDYAVKVRVRPDRTGVETANVKMSMNPFCEIAVEEALRLREAGAAAEVVAATVGPAQSADTLRTALAAGRDRENGARERGRERERPRAVAVAKILRAVALQEKPGLVILGKQAIDDDCNQTGQMLAGLLQWPQGTFASKVILDTEKQKATVEREVDGGIETICLDLPAVITTDLRLNQPRYATLPNIMKAKSKVIKKVATRPLGVDIRSDMEVIEVNEPPKRKAGVILSSVDELLDKLKNEAGVL

SEQ ID NO: 74733 - DNA, 1085 bp, Zea mays
  CDS (135)..(902)
ggccggggatgaggccggctgcttagtcagaaatagtgagaggctccaactcgcaactccgcagctgagcacgccgaaaagctcatcagtgctcatcccctgctggcccgttctcagtcccagtgagaggctccatgaagatcctggtcgcggtgaagcgggtggtggactacgctgtcaaagtgcgcgtgaggccggacgggaggggcgtggagacggccaacgtgaagatgtccatgaatccattctgcgagatcgccgttgaggaggcgctgcggctccgggaggccggcgtcgccgctgaggtcgtcgccgccaccgtaggccctgcccagtccgccgacacgctccgcaccgcactcgccatgggcgccgatcgcgccgtccacgtgctccacgacccggaccctgcgcggcccctcctccctctcgccgttgccaagatccttcgcgccgtcgcgctccaggagaagcccggcctcgtcatcctcggcaagcaggcaattgatgatgattgcaaccaaactggacaaatgttagctggattgctcaagtggccacaaggaacctttgcctccaaggttacattggacacagaaaaacaaaaagctactgttgagcgagaagttgatggtggaattgaaaccatctgccttgatctgccagcagtgatcaccacggatttaagacttaaccagccaagatatgcaactttgcccaacataatgaaggcaaaatccaaagttattaagaaagtcgccgctgaagaccttggcgtagatattagatcagacatggaggtgattgaggtcaatgaaccaccaaaacgaaaagcaggggtgattctttcatgtgtcgacgagctccttgacaagttgaaaaatgaagcacgtgtcctttaaccatttgtatattattcctcgctgaatatggtctgacgttcatttatttaagttctctctccaaatgttcagacttcagaccatttacaaataaaataagtgttaacatgaaccaattaagatactacccctgaaacatttacctggtggattccttccaaatagcgatttacttgattgtgt

SEQ ID NO: 74734 - protein, 255 aa, Zea mays
MKILVAVKRVVDYAVKVRVRPDGRGVETANVKMSMNPFCEIAVEEALRLREAGVAAEVVAATVGPAQSADTLRTALAMGADRAVHVLHDPDPARPLLPLAVAKILRAVALQEKPGLVILGKQAIDDDCNQTGQMLAGLLKWPQGTFASKVTLDTEKQKATVEREVDGGIETICLDLPAVITTDLRLNQPRYATLPNIMKAKSKVIKKVAAEDLGVDIRSDMEVIEVNEPPKRKAGVILSCVDELLDKLKNEARVL

SEQ ID NO: 74735 - DNA, 982 bp, Zea mays
  CDS (102)..(869)
tcggccgagagcagagcacgcacgcagagaagctcatcagtgcccatcccctgctccagtgaggagagagatagagagtcgccgccgccgccgctgccgccatgaagatcctagtcgcggtgaagcgggtggtggactacgccgtcaaggtgcgcgtgaggccggaccggacgggcgtggagacggccaacgtcaagatgtcgatgaaccccttctgcgaaatcgccgtcgaggaggcgctccggctccgcgaggccggcgctgctgctgaggtcgtcgcggccactgtgggccccgcccagtccgctgaaacgctccgcaccgcgctcgccaatggtgcggaccgcgccatccacgtgctccacgatccggaccccgcgcggcccctcctcccgctcaccgtcgccaagatcctccgcgctgtcgcgctccaggagaagcctggcctcgtcatcctcggcaagcaggcgattgatgatgattgcaaccaaacaggacaaatgctagctggattgcttcagtggccacaaggaacctttgcctccaaggttatattggacaccgagaaacaaaaagctactgttgagcgagaagttgatggtggaattgaaaccatatgccttgatttgccagcagtgatcaccacggatttgagacttaaccagccaaggtatgcaactttgccgaacataatgaaggcaaagtccaaagttattaagaaagttgtccctaaagacctcggtgtagacattagatcagacatggaggttattgaggtcaacgaaccaccaaaacggaaggcaggggtgattctttcgtctgtcgacgagctcattgacaggttgaaaaatgaagcacgtgtcttgtaacaatttgtatattattccgactgaatatggtctgacgttcatttatgtaagttataataaaagcgttctccaaatgttcagaccatatttacaaataagagaagtgtttctac

SEQ ID NO: 74736 - protein, 255 aa, Zea mays
MKILVAVKRVVDYAVKVRVRPDRTGVETANVKMSMNPFCEIAVEEALRLREAGAAAEVVAATVGPAQSAETLRTALANGADRAIHVLHDPDPARPLLPLTVAKILRAVALQEKPGLVILGKQAIDDDCNQTGQMLAGLLQWPQGTFASKVILDTEKQKATVEREVDGGIETICLDLPAVITTDLRLNQPRYATLPNIMKAKSKVIKKVVPKDLGVDIRSDMEVIEVNEPPKRKAGVILSSVDELIDRLKNEARVL

SEQ ID NO: 74737 - DNA, 747 bp, Caulobacter crescentus
  CDS (1)..(747): transl_table=11
atgaaggtcctagtcccggttaaacgggtgatcgattataacgtgaaggcccgcgtaaaggcggaccagacgggcgtcgacctggcgaacgtcaagatgtccatgaaccccttctgtgagatcgcggtcgaagaagccgtgcgtctcaaggaaaagggtgtggcgaccgaggtcgtcatcgtcagcatcggtccggcgcaggcccaggaaaccatccgtacggcgctggccatgggcggcgaccgcggggtgctgatcaccaccgacgccgatcccgagccgctggccgtggccaagctgctggccgccgtggtggccgaagaaaatcccaacctcgtcctgatgggcaagcaggccatcgacggcgacaacaacgccgtgggccagatgctgtcggccctgctgggctggccgcaggccacctacgcctcggcgatcgaggtctcggccaccagcgccaaggtcacccgtgaagtcgacggcggcctgcagacggtcgatgtcgacctgccggccgtgatcaccgccgacctgcgcctgaacgagccgcgctatgcgtctctgcccaacatcatgaaggccaagaagaaggagatcgtcagcaagacggtcgccgactacggcgtcgacatcgcgccgcgcctgaaggtcctgaaggtcaccgagcccgccaagcgctcggccggcatcaaggtcgagacggcttctgacctcgtgtccaagctcaacaccgcgggggtgctgtaa

SEQ ID NO: 74738 - protein, 248 aa, Caulobacter crescentus
MKVLVPVKRVIDYNVKARVKADQTGVDLANVKMSMNPFCEIAVEEAVRLKEKGVATEVVIVSIGPAQAQETIRTALAMGGDRGVLITTDADPEPLAVAKLLAAVVAEENPNLVLMGKQAIDGDNNAVGQMLSALLGWPQATYASAIEVSATSAKVTREVDGGLQTVDVDLPAVITADLRLNEPRYASLPNIMKAKKKEIVSKTVADYGVDIAPRLKVLKVTEPAKRSAGIKVETASDLVSKLNTAGVL

SEQ ID NO: 74739 - DNA, 750 bp, Neisseria meningitidis
  CDS (1)..(750): transl_table=11
atgaaagcactggtcgcagtaaagcgcgtagtggactacaacgtcaaagttcgtgtaaaagccgatggttcggatgtggatatcggcaatgtcaaaatgtcgatgaatccgtttgacgaaatcgctgtggaagaagctgtccgtttgaaagaagccggaaaagtaagcgaaatcgtagcggtttctttgggtgagaaaaaacccgaagaaaccttgcgtacagctttggcgatgggtgccgaccgtgccattcatgttgaaaccgatactaaactggagtctctggccgttgctaagttgctgaaagccgttgcggacaaagaaaatccgcaaattttctttttgggcaaacaagcgattgatgatgatgccaatcaagtggcgcaaatgctggcagctttgctgaatgcggcgcaaggtacgtttgcttcaaaagtacacattgaatgtggtgaagtacagattgtgcgcgaaattgatggcggcgaagaaaccatagcattaaaactgcctgctgttatcagtgctgatttgcgtttgaacgagccgcgctttgtcaaactccccaatattatggcggcaaagaaaaaacctttggaaaaactgactcctgacgatttggttgccgacatttcacctcgtttgaaaacggtgaaatttgccgaacctaaggcgcgtcaggcaggcgtaaaagtagcaagcgttgccgaattggttgaaaaattgaaaaacgaagccaaagtgatttga

SEQ ID NO: 74740 - protein, 249 aa, Neisseria meningitidis
MKALVAVKRVVDYNVKVRVKADGSDVDIGNVKMSMNPFDEIAVEEAVRLKEAGKVSEIVAVSLGEKKPEETLRTALAMGADRAIHVETDTKLESLAVAKLLKAVADKENPQIFFLGKQAIDDDANQVAQMLAALLNAAQGTFASKVHIECGEVQIVREIDGGEETIALKLPAVISADLRLNEPRFVKLPNIMAAKKKPLEKLTPDDLVADISPRLKTVKFAEPKARQAGVKVASVAELVEKLKNEAKVI

SEQ ID NO: 74741 - DNA, 750 bp, Pseudomonas syringae
  CDS (1)..(750): transl_table=11
atgaaggttcttgtagctgtcaaacgagtggtcgactacaacgtcaaggttcgcgtcaaggcggacaactccggcgtcgatcttgccaacgtcaaaatgtccatgaacccgttctgcgaaatcgctgttgaagaagcggtgcgcttgaaagagaagggcgtggcaacggaaatcgtggtcgtgaccattgggccgaccaccgctcaggaacaattgcgtacggctctggcgctgggtgcagaccgtgccgtgctggtcgagtccgcagaagaactcacttcgcttgccgtggccaagctgctcaaggccgtggtcgataaggagcagccacacctggtgatcctcggtaaacaggcgatcgacagcgacaacaaccagaccggccagatgctggctgcgctgagcggctacccgcaaggtactttcgcgtcgaaagtcgaagtgaccggcgacaaggttgccgtgacccgcgaaatcgacggcggcctgcagaccgtttccctgagcctgcccgccatcgtgaccacagacctgcgtctgaacgagccgcgctacgcctcgctgcccaacatcatgaaggccaagaaaaagccgcttgaagtgctgacgcccgatgcgcttggcgtgtccacggcctcgaccaacaagaccctcaaggtcgaagcgccggctgcacgcagcgccggtatcaaggtcaagtcggtggctgaactggtcgagaaactgaaaaacgaagcgaaggtaatctaa

SEQ ID NO: 74742 - protein, 249 aa, Pseudomonas syringae
MKVLVAVKRVVDYNVKVRVKADNSGVDLANVKMSMNPFCEIAVEEAVRLKEKGVATEIVVVTIGPTTAQEQLRTALALGADRAVLVESAEELTSLAVAKLLKAVVDKEQPHLVILGKQAIDSDNNQTGQMLAALSGYPQGTFASKVEVTGDKVAVTREIDGGLQTVSLSLPAIVTTDLRLNEPRYASLPNIMKAKKKPLEVLTPDALGVSTASTNKTLKVEAPAARSAGIKVKSVAELVEKLKNEAKVI

SEQ ID NO: 74743 - DNA, 962 bp, Phytophthora infestans
  CDS (42)..(797)
accaagtcaaagattcggatctccccactacaactactgctatgaaggttctggtacccgtaaagcgcgtggtggactacgccgtcaagatccgtgtggagcccaagggcgtggatcttaagaacgttaagatgagcatgaaccccttctgtgagatcgccgtggaggaggccatccgcctcaaggagaagaaggtggcgtccgagatcgtcgccgtttcgatcggcccgaagcagagccaggagaccctccgaacggccctcgctatgggtgctgaccgtggtattcacattacgacggacatgcgcacggaccaggagctgcagccgctagccgttgccaagctgctcaaggaggtcgtggccaaggagggccccaagctcgtcatctgtggcaagcagagtatcgacgccgacgccgcccagacgggccctatgcttgccggtctgctggactggagccaaggcacgttcgcctcggatgtcgctgtggacggtgacgccgtcaacatcacccgtgagactgactctggtgtggagacgctcaagctcggtctgcccgccgtggtgaccgccgacttgcgtcttaacgagcctcgctacgccacgctgcctaacattatgaaggccaagaagaaaaaaatcgagacccttgcagccgacagcttcggcgtggacctcgccccgcgcatcgacgtggtggaggtcaaggaccccgcctcacgcaaggccggtatcaaggtggctagcgtggacgaactcgtggacaagctgaagaatgaggccggtgtgatctagagcggcaaacgaaaatgcagtttagtagcactgcgggttatatacacgtagttgagttgcaccaagttcaacgttgtgcataatctgcaaatcgtgacctttattgcaagtacagatggaccggcaactttggtgatgtgaaaaaaaaaaaaaaaaaaaaaaaaa

SEQ ID NO: 74744 - protein, 251 aa, Phytophthora infestans
MKVLVPVKRVVDYAVKIRVEPKGVDLKNVKMSMNPFCEIAVEEAIRLKEKKVASEIVAVSIGPKQSQETLRTALAMGADRGIHITTDMRTDQELQPLAVAKLLKEVVAKEGPKLVICGKQSIDADAAQTGPMLAGLLDWSQGTFASDVAVDGDAVNITRETDSGVETLKLGLPAVVTADLRLNEPRYATLPNIMKAKKKKIETLAADSFGVDLAPRIDVVEVKDPASRKAGIKVASVDELVDKLKNEAGVI

SEQ ID NO: 74745 - DNA, 750 bp, Ralstonia solanacearum
  CDS (1)..(750): transl_table=11
atgaaagtcctggtcgcagtcaagcgcgtgattgactacaacgtgaaggttcgcgtgaaggcggacggcagcggtgtcgatcttgccaacgtcaagatgagcatgaacccgttcgacgaaatcgccgtggaagaggcggtgcgcctgaaggaagcgggcgtggccaccgaagtgatcgccgtgtcgtgcggcgtggcgcagtgccaggagaccctgcgcaccgccatggccatcggcgccgaccggggcatcctggtcgagaccggcgaagagctgcagccgctggccgtggccaagctgctcaaggcgctgatcgacaaggaacagccgcagctgatcatcctgggcaagcaggcgattgacgacgacgcgaaccagaccggccagatgctggcggcgctggccggcctgccgcaagccaccttcgcctcgaaggtgcagatcgacgacggccgcgcttcggtcacgcgtgaagtggacggtggcctggaaacgctgtcggtcaagctgccggcggtggtcaccaccgacctgcgcctgaacgagccgcgctacgtgacgctgccgaacatcatgaaggccaagaagaagcaactggacacggtcaagccggaagacctgggcgtggacgtggcgccgcgtctgaagacgctcaaggtggccgagccgcccaagcgcagcgccggcgtgatggtgcccgatgtggcgacgctggtggccaagctcaagacggaagccaaggtgctgtga

SEQ ID NO: 74746 - protein, 249 aa, Ralstonia solanacearum
MKVLVAVKRVIDYNVKVRVKADGSGVDLANVKMSMNPFDEIAVEEAVRLKEAGVATEVIAVSCGVAQCQETLRTAMAIGADRGILVETGEELQPLAVAKLLKALIDKEQPQLIILGKQAIDDDANQTGQMLAALAGLPQATFASKVQIDDGRASVTREVDGGLETLSVKLPAVVTTDLRLNEPRYVTLPNIMKAKKKQLDTVKPEDLGVDVAPRLKTLKVAEPPKRSAGVMVPDVATLVAKLKTEAKVL

SEQ ID NO: 74747 - DNA, 750 bp, Xanthobacter autotrophicus Py2
  CDS (1)..(750): transl_table=11
atgaagatcctggtgcccgttaagcgggtggtggattacaacgtgaaggtccgggtgaaatcggacgggtcgggcgtagagctcgccaacgtcaagatgtccatgaacccgttcgacgagatcgcggtagaagaggcgctgcgcctgaaggaagccggcaaggccaccgaggtgatcgccgtctccatcggcccggcgcaggcctccgagaccctgcgcaccgccctcgccatgggcgccgaccgcggcatcctggtgaaggtggacggggtggtggagcccctcgccgtcgccaagatcctcaagggcgtggtgggcgaggaaacccccggcctcgtcatcctcggcaagcaggccatcgacgacgactgcaaccagaccggccagatgctggccgccctcctggggtggccgcagggcaccttcgcctccaaggtcgtgatcgaggacggcggcgtcgctgtcacccgcgagatcgacggcggcctgcagaccgtcaagctcaacggcccggccatcgtcacgacggacctgcgcctcaacgagccgcgctacgcctcgctgcccaacatcatgaaggcgaagaagaagcccatcgccgagaagacgcccgccgactatggcgtggacgttgccccgcgcctcaccgtgctttccaccgcggaacccgcgggccgcaaggcgggcgtgaaggtgggctcggtggccgagctggtggcgaagctcaaggatgaggcgggggtgatctga

SEQ ID NO: 74748 - protein, 249 aa, Xanthobacter autotrophicus Py2
MKILVPVKRVVDYNVKVRVKSDGSGVELANVKMSMNPFDEIAVEEALRLKEAGKATEVIAVSIGPAQASETLRTALAMGADRGILVKVDGVVEPLAVAKILKGVVGEETPGLVILGKQAIDDDCNQTGQMLAALLGWPQGTFASKVVIEDGGVAVTREIDGGLQTVKLNGPAIVTTDLRLNEPRYASLPNIMKAKKKPIAEKTPADYGVDVAPRLTVLSTAEPAGRKAGVKVGSVAELVAKLKDEAGVI

SEQ ID NO: 74749 - DNA, 762 bp, Bombyx mori
  CDS (1)..(762)
atgtctcgtgttcttgttggcgttaagagagttatcgactatgctgtaaaaattcgtgtgaagccagacaagtctggtgtagtcacagatggggtgaagcactcaatgaatccttttgatgagatagcagtagaggaggctgttcgaatgaaagaaaaaaagttagcaagcgaagtcattgcagtctcttgtggaccatcacaagcacaggaaactctcagaactgctcttgcgatgggtgcagatcgagctattcatgttgaagtggctggggctgaatatgacacattacagcccattcatgttgcaaaaatcttagcaaaactgtcacaagatgagaaggcagacttagttattgttggcaaacaggccatagatgatgactccaaccagacagcacagatgactgctgctttattagattggccacaaggaacatttgcatcaaagatagaaaagactgatggtgctctaactataacccgtgaaattgatggaggtttagaggttatcaagacaaaaatcccagctgtactgagtgctgatctgcgactgaatgaaccacgatatgctacactgcctaacatcatgaaagcaaagaagaagcctctcaaaaaagtaagtgccaaagaccttggggtggacctggcacctcgtatcaaggtggtctctgtggaagatcctccagtccgacaggctggctccatcatacctgatgtcgacactctcgttgctaagcttaaggaaggcggacatgtgtaa

SEQ ID NO: 74750 - protein, 253 aa, Bombyx mori
MSRVLVGVKRVIDYAVKIRVKPDKSGVVTDGVKHSMNPFDEIAVEEAVRMKEKKLASEVIAVSCGPSQAQETLRTALAMGADRAIHVEVAGAEYDTLQPIHVAKILAKLSQDEKADLVIVGKQAIDDDSNQTAQMTAALLDWPQGTFASKIEKTDGALTITREIDGGLEVIKTKIPAVLSADLRLNEPRYATLPNIMKAKKKPLKKVSAKDLGVDLAPRIKVVSVEDPPVRQAGSIIPDVDTLVAKLKEGGHV

SEQ ID NO: 74751 - DNA, 744 bp, Archaeoglobus fulgidus DSM 4304
  CDS (1)..(744): transl_table=11
atgaaaataatcgtgctcgcaaagcacgctccagatccggagtcggagattagcgttgccagcgatggcaaaagcataagccagagcggattggtttacgacatcaacgactgggacaggtatgctgttgaggaggccataagaatcaaagaggaaaagggcggagaggttgtggtggtaggtgtaggcacgaactgcgacgacacgctgagaaaatgcctcgccatgggtgctgacagggcaataaagattcccgttgacacgtcctttgacgcgtaccagacggctgaagtgataaaggaggcaataaaggacgagcagttcgacatgatttttgcagggctcatgagccaagacttgaacaacgcacaggtaggtgtactgctcgctgcaatgctggatttgccggttgctaccgccgttgctgagcttaaggttgaggacggaaaggttatagcaaggagagagcttgaaggaggctatcttgaggaagtggagcttcccactccgtgcgttctcacaattcagagcggtatcaacgagccaagatacgtgtcgattatgggtataaagagggccaagtcgaaggagatgaaggaagtcagcgttacgccaagcatctcaacgctcgaaatagagaaaatgtatctcccgccggtcaagaaggcagagatgattgagggtgatccgtcacagatagctgagaagattatccagatactgaaggagagggggttgatataa

SEQ ID NO: 74752 - protein, 247 aa, Archaeoglobus fulgidus DSM 4304
MKIIVLAKHAPDPESEISVASDGKSISQSGLVYDINDWDRYAVEEAIRIKEEKGGEVVVVGVGTNCDDTLRKCLAMGADRAIKIPVDTSFDAYQTAEVIKEAIKDEQFDMIFAGLMSQDLNNAQVGVLLAAMLDLPVATAVAELKVEDGKVIARRELEGGYLEEVELPTPCVLTIQSGINEPRYVSIMGIKRAKSKEMKEVSVTPSISTLEIEKMYLPPVKKAEMIEGDPSQIAEKIIQILKERGLI

SEQ ID NO: 74753 - DNA, 750 bp, Mesorhizobium loti MAFF303099
  CDS (1)..(750): transl_table=11
atgaagatccttgtgcccgtgaagcgggttgtggatgcgaacgtcaaggttcgcgtgaaggccgacggttcggcggtggaactcgccaacgtcaagatggcgatgaacccgttcgacgagatcgcggtggaagaggcgatccggctcaaggaagccggcaaggcagaagaaatcatcgtcgtctcgatcggcccgcagcaggcgcaggaaaccctgcgcaccgcgctcgccatgggcgccgaccgcgccatcctggtcaagaccgacgagcagaccgagccgcttggcgtcgccaaggtgctgaagggtgtcgtcgatgccgaacagcccggcctcgtcatcctcggcaagcaggcgatcgacgacgattccaatcagaccggccagatgctggcggccctgctcggctgggcgcaaggcacgttcgcttccaaggtggtgctcgatggcgacaaggccaaggtgacccgcgaagtcgacggcggcctgcaaacggtggaactgaagatgccggcgatcatcaccgccgaccttcgcctcaaccagccgcgctatgcctcgctgcccaacatcatgaaggccaagaagaagcagctcgacgaaaagaccccggccgactacggcgccgacgtcaagccgcgcctcaaggtcatcaagaccgaggagcccggcggccgcaaggcgggcgtcaaggtcaagagcgtcgccgaactggtcgacaagctcaagaacgaagccggcgttttgtaa

SEQ ID NO: 74754 - protein, 249 aa, Mesorhizobium loti MAFF303099
MKILVPVKRVVDANVKVRVKADGSAVELANVKMAMNPFDEIAVEEAIRLKEAGKAEEIIVVSIGPQQAQETLRTALAMGADRAILVKTDEQTEPLGVAKVLKGVVDAEQPGLVILGKQAIDDDSNQTGQMLAALLGWAQGTFASKVVLDGDKAKVTREVDGGLQTVELKMPAIITADLRLNQPRYASLPNIMKAKKKQLDEKTPADYGADVKPRLKVIKTEEPGGRKAGVKVKSVAELVDKLKNEAGVL

SEQ ID NO: 74755 - DNA, 756 bp, Arabidopsis thaliana
  CDS (1)..(756)
atgaagattctcgtcgccgttaaacgtgtcgtcgactacgccgtcaagatccgagtcaaacccgataagactggtgtagaaacccaaaatgtgaagatgtcaatgaatccattttgtgagatcgcgcttgaggaagcgcttcgaatcaaagaagctggttttgctaaagaggttattgcagtgagtattggaccttcacaatgtgtggatacacttcgtactggtttagctatgggtgctgatcgaggaatccatgttgagaccaattctatttttcttcctttgacgattgctaagatcttgaagagtttagctgatgttgagaatcctggattgattttcttagggaaacaggcgatagatgatgattgcaatcaaacaggacagatggttgcagctttacttggttggccacaagcaacgtttgcatcgaaggttgtgttggataaagataagaatgttgcaaccgtggatagagaagtggatggaggtcttgagactcttaatgtagacttacccgctgtgataacaactgatttgaggctgaaccaaccaagatatgcatcactccctaacataatgaaggcaaaatcaaagcctataaagaaaatgacggtgcaagatctgaaagtagacattaaatccgacatagagatcttggaagtcacggagcctccaaagaggaaatctggggttatggtttcttcggtggatgagttgatagataaacttaaaaatgaagctcatgttgtttga

SEQ ID NO: 74756 - protein, 251 aa, Arabidopsis thaliana
MKILVAVKRVVDYAVKIRVKPDKTGVETQNVKMSMNPFCEIALEEALRIKEAGFAKEVIAVSIGPSQCVDTLRTGLAMGADRGIHVETNSIFLPLTIAKILKSLADVENPGLIFLGKQAIDDDCNQTGQMVAALLGWPQATFASKVVLDKDKNVATVDREVDGGLETLNVDLPAVITTDLRLNQPRYASLPNIMKAKSKPIKKMTVQDLKVDIKSDIEILEVTEPPKRKSGVMVSSVDELIDKLKNEAHVV

SEQ ID NO: 74757 - DNA, 750 bp, Neisseria meningitidis MC58
  CDS (1)..(750): transl_table=11
atgaaagcactggtcgcagtaaagcgcgtagtggactacaacgtcaaagttcgtgtaaaagccgatggttcggatgtggatatcggcaatgtcaaaatgtcgatgaatccgtttgacgaaatcgctgtggaagaagctgtccgtttgaaagaagccggaaaagtaagcgaaatcgtagcggtttctttgggtgagaaaaaatgcgaagaaaccttgcgtacagctttggcgatgggtgccgaccgtgccattcatgttgaaaccgatactaaactggagtctctggccgttgctaagttgctgaaagccgttgcggacaaagaaaatccgcaaattttctttttgggcaaacaagcgattgatgatgatgccaatcaagtggcgcaaatgctggcagctttgctgaatgcggcgcaaggtacgttcgcgtccaaagtacaaattgaaggcgacgaagtgcagattgtgcgggaaatcgatggcggcgaagaaaccatcgcattgaaactgcctgctgttatcagcgcggatttgcgtttgaacgagccgcgctttgtcaaactccccaatattatggcggcaaagaaaaaacctttggaaaaactgactcctgacgatttggttgccgacatttcacctcgtttgaaaacggtgaaatttgccgaacctaaggcgcgtcaggcaggcgtaaaagtagcaagcgttgccgaattggttgaaaaattgaaaaacgaagccaaagtgatttga

SEQ ID NO: 74758 - protein, 249 aa, Neisseria meningitidis MC58
MKALVAVKRVVDYNVKVRVKADGSDVDIGNVKMSMNPFDEIAVEEAVRLKEAGKVSEIVAVSLGEKKCEETLRTALAMGADRAIHVETDTKLESLAVAKLLKAVADKENPQIFFLGKQAIDDDANQVAQMLAALLNAAQGTFASKVQIEGDEVQIVREIDGGEETIALKLPAVISADLRLNEPRFVKLPNIMAAKKKPLEKLTPDDLVADISPRLKTVKFAEPKARQAGVKVASVAELVEKLKNEAKVI

SEQ ID NO: 74759 - DNA, 801 bp, Halobacterium sp. NRC-1
  CDS (1)..(801): transl_table=11
atgaaggttctcgtcaccgtcaaggaggtggctgccgtcgaggacgacttcgagatctcgggaacggagatcgagagtacgtacctggattacgacctcaacgagtgggacgactacgccgtcgaggaggccgtccagcttgctgaggccggcgacgacgtcgaggtcgtcgcggtcaccatcggcccggagcgcgccgaggagacgatccggatggcgctggcgaagggcgcggaccgcgcggtccgggtctgggacgacgccatcgaggagaccgagctgctcgacgtggagacgaaggcccggctgctggcggccgtcgtcgaggacgaagaccccgaactggtgttttccggggtgcaggccaacgacgacagcttcggcgcgaccgggatcgcgctggccgagacgctcggcgtccagtgggcggcggtcgtgaacgacctcgacaccgcgggcgtgctcgacgagggcgtggcgtcggtgcgccgcgaactggagggcggcgtcgaggagctcaccgacgtcgagttgccggcggtgctcaccatccagacggggatcaacgagccgcggtacgcgagcctgcgtggcatccgtcaggcgcagtccaaggagatcgcgccgaagagcctcgacgacctcgggctggacgcggacatcgttgcgtccagcctcgacatcaccgcgatgtacgagcccgagaccgagagcgacgccgagtacatcgagggcgacgccggcgaacaggccagtggcgtggctgacgtgctccgcgacgcgggggtggtcggcgaatga

SEQ ID NO: 74760 - protein, 266 aa, Halobacterium sp. NRC-1
MKVLVTVKEVAAVEDDFEISGTEIESTYLDYDLNEWDDYAVEEAVQLAEAGDDVEVVAVTIGPERAEETIRMALAKGADRAVRVWDDAIEETELLDVETKARLLAAVVEDEDPELVFSGVQANDDSFGATGIALAETLGVQWAAVVNDLDTAGVLDEGVASVRRELEGGVEELTDVELPAVLTIQTGINEPRYASLRGIRQAQSKEIAPKSLDDLGLDADIVASSLDITAMYEPETESDAEYIEGDAGEQASGVADVLRDAGVVGE

SEQ ID NO: 74761 - DNA, 765 bp, Escherichia coli O157:H7 EDL933
  CDS (1)..(765): transl_table=11
atgaaaataataacctgctttaagctggtgcctgaagaacaggacattgttgtcactccagaatacaccctgaatttcgacaatgccgacgccaaaatcagccagttcgatctcaatgccattgaagctgcaagccagcttgcaacagatgacgatgagatagccgcgctgaccgttggcggctcattgttgcagaactcgaaagtgcgcaaagacgtgctatcccgcgggccgcacagcctgtatatggtgcaggatgcacaacttgagcatgcactgcctctcgataccgcaaaagcgctggcggcagcagttgaaaagatcggcttcgatttactgatctttggtaaaggttccggcgacctttatgcccagcaggttggcttgctggtcggagaaattctgcaacttccggtgattaatgcagtgagtgctattcagcgtcagggcaatacactggtgattgaacgcacgcttgaagatgacgttgaagttattgaactctctgttccagccgtgctctgcgtcacctccgatattaacgtgccacgcattccttcgatgaaagccattctcggcgcgggtaaaaaaccggtaaatcagtggcaggcaagtgatattggctggagccagagcgcaccacttgctgaactgaccggcattcgcgtaccgccgcaaacagaacgtaagcacatcattctcgataacgattcgccggaggccattgccgagctggcggaacatctgaagaaagccctgaactga

SEQ ID NO: 74762 - protein, 254 aa, Escherichia coli O157:H7 EDL933
MKIITCFKLVPEEQDIVVTPEYTLNFDNADAKISQFDLNAIEAASQLATDDDEIAALTVGGSLLQNSKVRKDVLSRGPHSLYMVQDAQLEHALPLDTAKALAAAVEKIGFDLLIFGKGSGDLYAQQVGLLVGEILQLPVINAVSAIQRQGNTLVIERTLEDDVEVIELSVPAVLCVTSDINVPRIPSMKAILGAGKKPVNQWQASDIGWSQSAPLAELTGIRVPPQTERKHIILDNDSPEAIAELAEHLKKALN

SEQ ID NO: 74763 - DNA, 747 bp, Agrobacterium tumefaciens str. C58
  CDS (1)..(747): transl_table=11
atgaaaatccttgtccccgttaaacgagtcgtcgactacaacgtgaaaatccgcgtgaagtcggatggttctggcgttgagcttgccaatgtgaagatgtcgatgaacccgttcgacgaaatctcggtggaagaggcccttcgcctgaaggaagccggcaaagccgaagaggtcgtggtcgtctccatcggcccggccaaggcggaagaaacgctgcgcaccgcgcttgccatgggcgccgaccgcgccatcctgatcgagaccgacgaaaccgtcgagccgctcgccgtcgccaagctcctgaagggcgtggccgaggctgagcagcccggtctcgtcatcgtcggcaagcaggcgatcgatgacgattcgaaccagaccggccagatgctggcagccctgctcggctggggccagggcacgtttgcctccaaggtcgtaccggctgacggcaaggtcgcggtcacccgtgaagtcgatggcggcctgcagactgtcgagctgaaactgccagccgtcgtcaccaccgatcttcgtctgaacgagccgcgttacgcctcgctgccgaacatcatgaaggcaaaaaagaagccgctcgacaaaaaggctccggccgatttcggcgtcgatgtctcgccgcgcctgaaggtgctgaagaccgaggagcccgcgggccgcaaggccggcatcaaggtcggctcggttgccgaactggtcgaaaagctcaaagccgacggcgtcctctaa

SEQ ID NO: 74764 - protein, 248 aa, Agrobacterium tumefaciens str. C58
MKILVPVKRVVDYNVKIRVKSDGSGVELANVKMSMNPFDEISVEEALRLKEAGKAEEVVVVSIGPAKAEETLRTALAMGADRAILIETDETVEPLAVAKLLKGVAEAEQPGLVIVGKQAIDDDSNQTGQMLAALLGWGQGTFASKVVPADGKVAVTREVDGGLQTVELKLPAVVTTDLRLNEPRYASLPNIMKAKKKPLDKKAPADFGVDVSPRLKVLKTEEPAGRKAGIKVGSVAELVEKLKADGVL

SEQ ID NO: 74765 - DNA, 750 bp, Sinorhizobium meliloti 1021
  CDS (1)..(750): transl_table=11
atgaaaatacttgtgacggtgaaacgggtggtcgactacaacgtcaagatccgggtcaaagcggatggatcgggcgtcgagcttgccaatgtgaagatgtcgatgaacccgttcgacgagatctcggtcgaagaggcgctgcggctgaaggaagccggcaaggcgagtgaagtggtggtcgtgtcgatcggcccggccaaggcggaagagacgctcaggaccgcgctcgccatgggcgccgaccgggcgatcctggtcgagacggaggaccaggtcgagccgctcgccgtcgccaagatcgtcaagggcgtggccgaggccgaacagccggggctgatcatcgtcggcaagcaggcgatcgacgacgattccaaccagaccggccagatgctgtcggcattgctcggctgggcccagggcacctttgcctccaaggtcgagatcggcgacggcaaggtcaacgtcacccgcgaggtcgacggcggcctgcagacggtcgaactgaagctgccggcggtggtcaccaccgatctcaggctcaacgaaccgcgctatgcctcgctgccgaacatcatgaaggcgaagaagaagccgctcgacaagaagaccccggccgacttcggcgtcgacaccagcccgcggctgaaagtcttgaagacggaagagccgtccggccgcaaggccggcgtcaaggtgaagacggtcgccgagctcgtcgagaagctcaagaccgaagccggcgtgctttaa

SEQ ID NO: 74766 - protein, 249 aa, Sinorhizobium meliloti 1021
MKILVTVKRVVDYNVKIRVKADGSGVELANVKMSMNPFDEISVEEALRLKEAGKASEVVVVSIGPAKAEETLRTALAMGADRAILVETEDQVEPLAVAKIVKGVAEAEQPGLIIVGKQAIDDDSNQTGQMLSALLGWAQGTFASKVEIGDGKVNVTREVDGGLQTVELKLPAVVTTDLRLNEPRYASLPNIMKAKKKPLDKKTPADFGVDTSPRLKVLKTEEPSGRKAGVKVKTVAELVEKLKTEAGVL

SEQ ID NO: 74767 - DNA, 750 bp, Sinorhizobium meliloti 1021
  CDS (1)..(750): transl_table=11
atgaaaatacttgtgacggtgaaacgggtggtcgactacaacgtcaagatccgggtcaaagcggatggatcgggcgtcgagcttgccaatgtgaagatgtcgatgaacccgttcgacgagatctcggtcgaagaggcgctgcggctgaaggaagccggcaaggcgagtgaagtggtggtcgtgtcgatcggcccgggcaaggcggaagagacgctcaggaccgcgctcgccatgggcgccgaccgggcgatcctggtcgagacggaggaccaggtcgagccgctcgccgtcgccaagatcgtcaagggcgtggccgaggccgaacagccggggctgatcatcgtcggcaagcaggcgatcgacgacgattccaaccagaccggccagatgctgtcggcattgctcggctgggcccagggcacctttgcctccaaggtcgagatcggcgacggcaaggtcaacgtcacccgcgaggtcgacggcggcctgcagacggtcgaactgaagctgccggcggtggtcaccaccgatctcaggctcaacgaaccgcgctatgcctcgctgccgaacatcatgaaggcgaagaagaagccgctcgacaagaagaccccggccgacttcggcgtcgacaccagcccgcggctgaaagtcttgaagacggaagagccgtccggccgcaaggccggcgtcaaggtgaagacggtcgccgagctcgtcgagaagctcaagaccgaagccggcgtgctttaa

SEQ ID NO: 74768 - protein, 249 aa, Sinorhizobium meliloti 1021
MKILVTVKRVVDYNVKIRVKADGSGVELANVKMSMNPFDEISVEEALRLKEAGKASEVVVVSIGPGKAEETLRTALAMGADRAILVETEDQVEPLAVAKIVKGVAEAEQPGLIIVGKQAIDDDSNQTGQMLSALLGWAQGTFASKVEIGDGKVNVTREVDGGLQTVELKLPAVVTTDLRLNEPRYASLPNIMKAKKKPLDKKTPADFGVDTSPRLKVLKTEEPSGRKAGVKVKTVAELVEKLKTEAGVL

SEQ ID NO: 74769 - DNA, 855 bp, Salmonella typhimurium LT2
  CDS (1)..(855): transl_table=11
atggagcgttcagtcatgaagggcaaatggtggataaaccgttactggaaaaagcaaaaaggattttggctcatagcatttagtaaatatatgaaggagtcaccaatgaaagctttagtttgtgtaaaacaagttgtcgatcataacgttagaattagaataaagcgagatcattctgatgttgatatttctgattcaaaactcagtatcaatccatttgatgaaattgcagttgaagaagcagtacgtttaaaagaacggggattaatcagtgaggttgttgtagtgtctataggaaacacaggtgtaggggatgtattgcgtacagcactggcagcaggggcagacagggcaatacacatattaacaaaaaactctcttacaccactaattgtggccaaaactatcaccgctattacccggaatgaaaaacccgatattatattattaggcaagcaagctattgacgatgattgtaatcaggtaggccaaatgctggcagcattactcgatcttccccaagccactaatgttagtgaaattactatttctgataattcattaactgctgttcgtgaggttgatggaggattagaaacgttaaatttatccctgcctgcagtactcactacagatctacgtctgaatacaccgaggaatatcagcttgccgaatgttattaaagccaaaaagaaacctgttaaggagatagatttcgattcacttggtattaacccgtcatccagattgactattattaaagttgatgagccagcaagaaggaaagcaggcataatcgttccagatattaacacgctgctagataaattaaaaaacgaagaaaaagtaatttaa

SEQ ID NO: 74770 - protein, 284 aa, Salmonella typhimurium LT2
MERSVMKGKWWINRYWKKQKGFWLIAFSKYMKESPMKALVCVKQVVDHNVRIRIKRDHSDVDISDSKLSINPFDEIAVEEAVRLKERGLISEVVVVSIGNTGVGDVLRTALAAGADRAIHILTKNSLTPLIVAKTITAITRNEKPDIILLGKQAIDDDCNQVGQMLAALLDLPQATNVSEITISDNSLTAVREVDGGLETLNLSLPAVLTTDLRLNTPRNISLPNVIKAKKKPVKEIDFDSLGINPSSRLTIIKVDEPARRKAGIIVPDINTLLDKLKNEEKVI

SEQ ID NO: 74771 - DNA, 765 bp, Salmonella typhimurium LT2
  CDS (1)..(765): transl_table=11
atgaaaataataacctgctttaagttggtgcctgaagaacaggacattaccgtgaccccggagcattcgctcaattttgatcgtgccgaggccaaaatcagccagtttgatttaaatgcaattgaggccgccgcgcagttagctggcggtggcgacgagatcgccgcgctcaccgtcggcggctctctgttacaaaattcaaaagtccgcaaagatgtgttatcccgcgggccagatgcgcttttcatggttcaggatgcgcaaatggagcacgccctgcccaaagaaaccgcgctggcgctagcatccgcggcggagaaaatcggctttgacctgttgctctttggagagggctccggcgatatttatgcccaacaggtgggcctgctgactggcgaactcctgaaactccccgtcatcaacgcagtaagccatattcaacgcgacggcgacaaaatcatcgttgaacgcacactggaagaagacgttgaaattatcgagctcacgctgcccgcggtgctttgcgtgacctcagatattaacgttccacgcatcccgtcaatgaaagccattctcggcgccgggaaaaaagccgttacgtcgtggctggcgagcgatatccactggaccccaaccacgccaatggcggaactggtcgccatctcggtaccgccgcagacagaacgcaagcatatcattctcgataacgattcgccggaagccattaccgcactggccgaccatttgaaaaaatccctgaactaa

SEQ ID NO: 74772 - protein, 254 aa, Salmonella typhimurium LT2
MKIITCFKLVPEEQDITVTPEHSLNFDRAEAKISQFDLNAIEAAAQLAGGGDEIAALTVGGSLLQNSKVRKDVLSRGPDALFMVQDAQMEHALPKETALALASAAEKIGFDLLLFGEGSGDIYAQQVGLLTGELLKLPVINAVSHIQRDGDKIIVERTLEEDVEIIELTLPAVLCVTSDINVPRIPSMKAILGAGKKAVTSWLASDIHWTPTTPMAELVAISVPPQTERKHIILDNDSPEAITALADHLKKSLN

SEQ ID NO: 74773 - DNA, 747 bp, Brucella melitensis 16M
  CDS (1)..(747): transl_table=11
atgaaagtccttgtcgcagtcaaacgggttgtcgattacaacgtcaagatccgtgttaagggtgacggttcaggcgtcgagcttgcgaatgttaagatgtcgatgaaccccttcgacgagatcgcggttgaagaagcgatccggttgaaggaagcgggcaaggtgacggaaatcgtcgcggtttcggttggcccggcacaggcgcaggaaacgctgcgcaccgcacttgccatgggtgctgaccgcgccattctggtcaagaccgatgaaacggttgagccgctgggcgttgccaaggtgctgaagggcgttgtcgaagctgaaaagccggatctcgttttcctcggcaagcaggcgattgatgacgattcaaaccagaccgggcagatgctgtcggcccttctcaactggagccaggcaacctttgcctccaaggtggaactgggtgaggggtcggccaaggtaacgcgcgaagtcgatggcggtttgcagaccatcgatgtgaagcttccggccatcgtaacggtggatctgcgcctcaaccagccgcgctatgcttcgctgccgaacatcatgaaggccaagaagaagccgctcgacgaaaagtcgccggccgatttcggtgccgatattgccccgcgtctcaaggttctgaagaccgaggaacccggtggccgcaaggctggcgtgaaggtcggttcggtttccgaactggttgagaagctgaaggccgacggcgtactgtaa

SEQ ID NO: 74774 - protein, 248 aa, Brucella melitensis 16M
MKVLVAVKRVVDYNVKIRVKGDGSGVELANVKMSMNPFDEIAVEEAIRLKEAGKVTEIVAVSVGPAQAQETLRTALAMGADRAILVKTDETVEPLGVAKVLKGVVEAEKPDLVFLGKQAIDDDSNQTGQMLSALLNWSQATFASKVELGEGSAKVTREVDGGLQTIDVKLPAIVTVDLRLNQPRYASLPNIMKAKKKPLDEKSPADFGADIAPRLKVLKTEEPGGRKAGVKVGSVSELVEKLKADGVL

SEQ ID NO: 74775 - DNA, 789 bp, Corynebacterium glutamicum ATCC 13032
  CDS (1)..(789): transl_table=11
atgtccacaatcgtggttctggttaaaaatgttccagacacctggtctaagaggactctggaagctgatttcacccttgaccgtgagggtgtagatcgagtcttggatgagatcaatgagtttgctctggagcaggcactgcgcttgcgggagtccaacccggatgctggttaccgcgttgttgcgctgagcgccggccctgccggtggggaagaggcgctgcgtaaggcgctgtccatgggtgctgatgaagcaatccagctcagtgatgatgccttggctggttctgatcttttgggaaccgcttgggcgctgaacaacgctatcaacaccatcgcgggtgttgctctcatcgtgacgggttcggcttcttccgatggttccatgggtgcgcttcctggcgtgttagctgagtaccgccaggtcccagcgttgactaacttgtctgcgctgaaggtcgagggtgcatctattactgccactcgcattgataaccacggcacctatgagttgcaggctgcacttcctgcggttgtgtcgatttccgataaggctgacaagccacgtttccctaacttcaagggcatcatggctgctaagaaggctgagatcaagaagctttccttggctgaaatcggcgtggctccagagcaggttggtctgtctcacgcggcaactgctgttactgctgcagctgatcgtcctgagcgctcccaaggtgatgtcattggtgcatcgggtgctgctgaaaagattgctgagtacctcgcttcagagaacctcatctag

SEQ ID NO: 74776 - protein, 262 aa, Corynebacterium glutamicum ATCC 13032
MSTIVVLVKNVPDTWSKRTLEADFTLDREGVDRVLDEINEFALEQALRLRESNPDAGYRVVALSAGPAGGEEALRKALSMGADEAIQLSDDALAGSDLLGTAWALNNAINTIAGVALIVTGSASSDGSMGALPGVLAEYRQVPALTNLSALKVEGASITATRIDNHGTYELQAALPAVVSISDKADKPRFPNFKGIMAAKKAEIKKLSLAEIGVAPEQVGLSHAATAVTAAADRPERSQGDVIGASGAAEKIAEYLASENLI

SEQ ID NO: 74777 - DNA, 789 bp, Streptomyces coelicolor A3(2)
  CDS (1)..(789): transl_table=11
gtgagcttgaggatcgttgtcactgtgaagtacgtgcccgacgccactggcgaccggcacttcgccgatgacctgaccgtcgaccgggacgacgtggacggtctgctctccgagctggacgagtacgcggtcgagcaggcgctgcagatctccgagaattccgacgacgacgtcgaggtcaccgtcctgacggtgggcccggaggacgccaaggacgccctgcgcaaggcgctgtccatgggtgccgacaaggcgatccacgtcgaggacgacgacctgcacggcaccgacgccatcggcacctcgctggtcctggccaaggccgtcgagaaggccggctacgacctggtcgtctccggcatggcctccaccgacggcaccatgggcgtcgttcccgcgctgctcgcggagcgcctgggcgtgccgcaggtgacgctgctgtccgaggtctcggtcgagggcggcgtcgtcaagggccgccgcgacggcgactcggccacggagcagctggaggcctccctgccggcggtcgtgtcggtcaccgaccagtcgggcgaggcgcgttacccgtccttcaagggcatcatggcggccaagaagaagccggttcagtcctgggacctgtccgacctcgacatcgacgaggacgaggtcggtctggagaacgcctacacggtcgtcgagtccgccaccgagcgtccggcgcgcaccgcgggcacgatcgtcaaggacgagggcgagggcggcaagcagctcgccgagttcctcgcgggccagaagttcatctga

SEQ ID NO: 74778 - protein, 262 aa, Streptomyces coelicolor A3(2)
MSLRIVVTVKYVPDATGDRHFADDLTVDRDDVDGLLSELDEYAVEQALQISENSDDDVEVTVLTVGPEDAKDALRKALSMGADKAIHVEDDDLHGTDAIGTSLVLAKAVEKAGYDLVVSGMASTDGTMGVVPALLAERLGVPQVTLLSEVSVEGGVVKGRRDGDSATEQLEASLPAVVSVTDQSGEARYPSFKGIMAAKKKPVQSWDLSDLDIDEDEVGLENAYTVVESATERPARTAGTIVKDEGEGGKQLAEFLAGQKFI

SEQ ID NO: 74779 - DNA, 747 bp, Xanthomonas campestris pv. campestris str. ATCC 33913
  CDS (1)..(747): transl_table=11
atgaaaatcctcgtcgcctacaagcgcgtggtggactacaacgtccgcattcaggtcaagccggatggctccggtgtggtgaccgacggtgtcaagctctcgccgaacccgttcgacgaaatcgccctggaagaggcgttgcgcctgcgcgacgccggcatcgccaccgaggtggtggtcgccaccctggccccggccgacgcggccgcgcatctgcgcaacggcctggccatgggcgccaaccgcgccatccacgtggtgaccgacgcggcgattcaaccgttgaccgccgcccgcaccctgctcaagctggtcgagaaggaacagccggacctggtcatcctgggcaagcaggcgatcgacgacgacgccaaccagaccggccagatgctcgccacgttgtggggccgaccgcaggcgaccttcgccggcaagctggtcgtggccgatggcaaggctaccgtgacccgtgaggtcgatgccggcctggaaacgctggaagtggacctgccggccgtcattaccaccgatctgcgcctgaacgagccgcgtttcatcaagctgccggacatcatgaaggccaagagcaagccgctggaaacgctggcctttgcagacctggccgttgactcccacgacagtctgaccaccacgcactacgcagcgccggccaagcgcagccgcggcgtgatggtcaaggatgccgccgaactggtggccgcactcaagcagaaggggttgctgtaa

SEQ ID NO: 74780 - protein, 248 aa, Xanthomonas campestris pv. campestris str. ATCC 33913
MKILVAYKRVVDYNVRIQVKPDGSGVVTDGVKLSPNPFDEIALEEALRLRDAGIATEVVVATLAPADAAAHLRNGLAMGANRAIHVVTDAAIQPLTAARTLLKLVEKEQPDLVILGKQAIDDDANQTGQMLATLWGRPQATFAGKLVVADGKATVTREVDAGLETLEVDLPAVITTDLRLNEPRFIKLPDIMKAKSKPLETLAFADLAVDSHDSLTTTHYAAPAKRSRGVMVKDAAELVAALKQKGLL

SEQ ID NO: 74781 - DNA, 762 bp, Drosophila melanogaster
  CDS (1)..(762)
atggcgcgtgttttggttggagttaagcgtgtgatcgactacgccgtcaaggtgcgcgtcaagcccgacaagactggcgtggtcacccagggcgtgaagcactcgatgaatcccttcgacgagatcgccgtggaggaggcggtgaagctgaaggagaaaaagctggccgaggaggtgatcgccgtctccgtgggcccggcccagtcgcaggaggtgatccgcaccgccctggccatgggcgccgatcgcggcgtccacgtagagatcccggccgccgagtacgagcttctgcagcccatccacgtgtcgaagattctggccaagttggctcttgacgaaaaagccgacctggtcatccttggcaagcaggccatcgacgatgatgccaaccaaacggcccagatgaccgccgccgtgctcgactggccgcagggcaccttctgcaacaagatcgagaagacagacgccggtctgaccatcacgcgtgaaattgatggtggcctggagacaatcaagaccaagaccccggctgtgctgagcgccgatctccggctgaacacccctcgctacgccacgttgccgaacatcatgaaggccaagaagaagccgctgaagaaggttacggccaaggatctcggcgtggacacctcgccccgcatcgaggtcatctccgtggaggatcctcctgtgcgccaggccggcgccaccgtcgccgacgtggatgccctggtggccaagctaaaggagggcggccacatctag

SEQ ID NO: 74782 - protein, 253 aa, Drosophila melanogaster
MARVLVGVKRVIDYAVKVRVKPDKTGVVTQGVKHSMNPFDEIAVEEAVKLKEKKLAEEVIAVSVGPAQSQEVIRTALAMGADRGVHVEIPAAEYELLQPIHVSKILAKLALDEKADLVILGKQAIDDDANQTAQMTAAVLDWPQGTFCNKIEKTDAGLTITREIDGGLETIKTKTPAVLSADLRLNTPRYATLPNIMKAKKKPLKKVTAKDLGVDTSPRIEVISVEDPPVRQAGATVADVDALVAKLKEGGHI

SEQ ID NO: 74783 - DNA, 774 bp, Oceanobacillus iheyensis HTE831
  CDS (1)..(774): transl_table=11
atgaatatatatgtacttttaaagaaaacttttgatacagaagaaaaaattactgtttcaggcggtagaattgaagatgatagtgccgaattcatcataaatccttatgatgaatatgcagtggaagaagctatcgtgcagcgtgatgaacatggtggagaggttactgtagttacagttggtgatgaagagtctgaaaaacaattacgtactgctttagcaatgggtgctgataaagctgtcttgataaatacagaagaagatattgaaaatggagatcaatatactactgctaaaattttagaagcattttttgaagataaagaagtagacttaattctagcgggtaatgtagcaattgatgaagccagtgggcaagtcgggccacgtttagcagcactgttagatattccttacgtttctacaataactagcttaaagattgatgacgatacagcttcaattgaaaaagatgtagaaggggatgtggaaattattgaaacaagtttacccctgttagttacttgtcaacaaggtttaaacgaaccacgttatccttctttaccaggtataatgaaagcgaagaaaaaaccattggaagaaattgaaattgacgatttagatttggatgaagatgatgtggaagcaaaaacaaaaacagtagaagtatatcttccgccggaaaaagaagcgggtaaaattctcgaaggggaacctgctgatcaagtgaaagaattagtatccttattgaaaaacgagaaaaaagtactttaa

SEQ ID NO: 74784 - protein, 257 aa, Oceanobacillus iheyensis HTE831
MNIYVLLKKTFDTEEKITVSGGRIEDDSAEFIINPYDEYAVEEAIVQRDEHGGEVTVVTVGDEESEKQLRTALAMGADKAVLINTEEDIENGDQYTTAKILEAFFEDKEVDLILAGNVAIDEASGQVGPRLAALLDIPYVSTITSLKIDDDTASIEKDVEGDVEIIETSLPLLVTCQQGLNEPRYPSLPGIMKAKKKPLEEIEIDDLDLDEDDVEAKTKTVEVYLPPEKEAGKILEGEPADQVKELVSLLKNEKKVL

SEQ ID NO: 74785 - DNA, 750 bp, Shewanella oneidensis MR-1
  CDS (1)..(750): transl_table=11
atgaaagtattggtgcctgttaagcgcgtagttgatgccaatgtgaaggtcagggtaaaagctgacaacaccagcgttgataccgcaaacctcaaaatggcgttgaaccctttttgtgaaattgcagtagaagaagcggttcgtttaaaagaagcgggcagtgctacagaagtagtggtcgttagtatcggcaataaagccgttcaagaacaattacgtaccgcgttagccctaggtgctgaccgtgctatccatattgatactgaagaagagttagcgccagtatccattgctaaattacttaaagccgtacaagaaaaagaacaagcgcaattagtactgtttggtaagcaatccattgatggtgataacaaccaaacgggccaaatgtttgcggcattaaccgatatgccacaggcaacttttgcttcagcaatcaaagttgaaggtaattcaatccaagtggcccgtgaaatcgacggtggtatgcaaaccctgagtctgccattacctgcggtagtgacagccgatttacgtttaaacgagccacgttatgcttcattaccgaacatcatgaaagccaaacgtaagccattagatgtgctgacggtagcggatttaggtgtgacgctaaaagcccatcaaactgtagtcaaggtgacgccacctgctgaacgtaaggccggtatcatggttgcgtcggtagcagagctggttgaaaagttaaagaatgaagcgaaggtgatctaa

SEQ ID NO: 74786 - protein, 249 aa, Shewanella oneidensis MR-1
MKVLVPVKRVVDANVKVRVKADNTSVDTANLKMALNPFCEIAVEEAVRLKEAGSATEVVVVSIGNKAVQEQLRTALALGADRAIHIDTEEELAPVSIAKLLKAVQEKEQAQLVLFGKQSIDGDNNQTGQMFAALTDMPQATFASAIKVEGNSIQVAREIDGGMQTLSLPLPAVVTADLRLNEPRYASLPNIMKAKRKPLDVLTVADLGVTLKAHQTVVKVTPPAERKAGIMVASVAELVEKLKNEAKVI

SEQ ID NO: 74787 - DNA, 750 bp, Pseudomonas putida KT2440
  CDS (1)..(750): transl_table=11
atgaaggttcttgtagctgtcaaacgagtggtcgactacaacgtcaaggttcgcgtcaaagcggacaactccggcgtcgaccttgctaacgtcaagatgtccatgaaccccttctgcgaaatcgccgtggaagaagccgtacgcctgaaggaaaaaggcgttgcgaccgagatcgtcgtggtttccgtcggcccgaccactgcccaggagcaactgcgtactgccctggccctgggtgccgaccgtgccatcctggtagaagccgctgacgaactgaactccctggccgtggccaaggcgctgaaggccgttgtcgacaaggagcagccgcagctggtcatcctcggcaagcaggccatcgacagtgacaacaaccagaccggccagatgctggccgcgctgactggcttcgcccagggtacctttgcgtccaaggtcgaagtcgctggcgacaagcttaatgtcacccgtgaaatcgatggcggcctgcagaccgttgcactgaacctgcctgcgatcgtcaccaccgacctgcgcctgaacgagccacgctacgcgtcgctgccgaacatcatgaaggccaagaagaagccgctggagactgttactccagacgcactgggcgtttccctcgcctccaccaacaagaccgtgaaggttgaagccccggctgcccgcagcgcgggcatcaaggtcaaatcggtggccgaactggtcgagaagctgaagaacgaagcgaaggtaatctaa

SEQ ID NO: 74788 - protein, 249 aa, Pseudomonas putida KT2440
MKVLVAVKRVVDYNVKVRVKADNSGVDLANVKMSMNPFCEIAVEEAVRLKEKGVATEIVVVSVGPTTAQEQLRTALALGADRAILVEAADELNSLAVAKALKAVVDKEQPQLVILGKQAIDSDNNQTGQMLAALTGFAQGTFASKVEVAGDKLNVTREIDGGLQTVALNLPAIVTTDLRLNEPRYASLPNIMKAKKKPLETVTPDALGVSLASTNKTVKVEAPAARSAGIKVKSVAELVEKLKNEAKVI

SEQ ID NO: 74789 - DNA, 789 bp, Clostridium tetani E88
  CDS (1)..(789): transl_table=11
atgaacatagtagtttgtataaaacaagtaccagataccacagaggtaagaatagatcctataaaaggaacattaataagagatggaattcctagcataataaatcctgatgataaaaatgctatagaagaggcattaaaaataaaagataaaataaaaggcactaaagtaatagcaataactatgggcccccttcaatcggaaagtgcactaagagaagctttagctatgggagttgataaggggattttattaagtgatagaaaatttgcaggttcagatacattagctacatcctatatattatcttcagtcattaaaaagataggagactatgacataatattttgtggaagacaagcaatagatggagatacagcacaggtaggaccaggtattgcagaacatttaaagatacctcaaataacttatgtaagtggattggatgtaaatggaagagagctaattgttaatagggatatagaggaaggttcatatgtaataaaatcgaaaatgccaatacttttaacggctataaaagaattaaatgaaccaagatatccatccattgctggaatatataaagctcatagagaaaaaagaattgatatatggacagcaaatgatttagaaatagatgaggagaaaataggacttaatggatcccctactaaagtaaaaaaatcctttactccttcaataagttctcaaggggaaataatagaaggaacagctgaggaagcttcatataaattagtttcaaagcttagagaaaaacaaataatatag

SEQ ID NO: 74790 - protein, 262 aa, Clostridium tetani E88
MNIVVCIKQVPDTTEVRIDPIKGTLIRDGIPSIINPDDKNAIEEALKIKDKIKGTKVIAITMGPLQSESALREALAMGVDKGILLSDRKFAGSDTLATSYILSSVIKKIGDYDIIFCGRQAIDGDTAQVGPGIAEHLKIPQITYVSGLDVNGRELIVNRDIEEGSYVIKSKMPILLTAIKELNEPRYPSIAGIYKAHREKRIDIWTANDLEIDEEKIGLNGSPTKVKKSFTPSISSQGEIIEGTAEEASYKLVSKLREKQII

SEQ ID NO: 74791 - DNA, 753 bp, Vibrio parahaemolyticus RIMD 2210633
  CDS (1)..(753): transl_table=11
gtgaaaatactagtgccaattaaaagggtcattgatccctacattaaggtccgtgttaaaccggacaacagcgatgttgaaaccaataacgtcaagatgactatcaacccgttttgcgaaatcgccgttgaagaagcggtgcgactaaaagagcaagggattgcagaagaagtcatcgttgtgagtgctggcggcacacaatgtcaggaacaattgcgcacggccctagcactaggagcagatcgcgcaattcatatcgaaacggcagacaagattgagccgctcgtggtgtccaagttgctcaaagcgattgttgaacaagagcaagcccaactggtgctcaccggcaaacaatcgatcgatacggacaacaaccaagtcgcgcagatgctggccgctttgcttgactggcctcaggcgacttttgcatcggatgtaaaaattgaagaccgcaaagtgcaggtggtgcgagaagtcgatggtggattgatgacagtagcaatgaacttgccagcggtgatcagcactgatttgcgtttaaacgagcctcgcttcgcttccctgccaaacatcatgaaagccaaacgtaagcccctcgatacgatcacaccagagagcttgggcgttgaagttgtgtttagccaaaccatcacggaagttaccccaccagcgcaaagaaaagccggtatcaaagtggagtctgtttcagaacttctcgataagctacgtaacgaagcgaaggtgatttcatga

SEQ ID NO: 74792 - protein, 250 aa, Vibrio parahaemolyticus RIMD 2210633
MKILVPIKRVIDPYIKVRVKPDNSDVETNNVKMTINPFCEIAVEEAVRLKEQGIAEEVIVVSAGGTQCQEQLRTALALGADRAIHIETADKIEPLVVSKLLKAIVEQEQAQLVLTGKQSIDTDNNQVAQMLAALLDWPQATFASDVKIEDRKVQVVREVDGGLMTVAMNLPAVISTDLRLNEPRFASLPNIMKAKRKPLDTITPESLGVEVVFSQTITEVTPPAQRKAGIKVESVSELLDKLRNEAKVIS

SEQ ID NO: 74793 - DNA, 756 bp, Bordetella bronchiseptica RB50
  CDS (1)..(756): transl_table=11
atgaagattctcgttcccgtcaagcgcgtggtggactacaacgtgaaggtccgcgtgaagtcggacaacacgggcgtggacatcgccaacgtcaagatgagcatgaatcccttcgacgaaatcgccgtcgaggaagccgttcggctgaaggaaaagggcgcggccagcgaggtgatcgcggtgtcgtgcggggtggcgcagtgccaggaaaccttgcgcacggccctggccatcggcgccgaccgggccatcctggtcgagacggcggccgagctgcagccgctggcggtggccaagctgctcaaggccctggtggaccgggaacagcccggcctggtcatcctgggcaagcaggcgatcgacgacgacgccaaccagacgggccagatgctggccgccctggccgatctgccgcaggcgaccttcgcgtccaaggtcgagctcgccggcgacaaggtcagcgtgacgcgcgaggtcgacggcgggctggaaaccctgtcgctggacacgccggccgtcatcaccaccgatctgcgcctgaacgagccgcgctatgtcaccttgcccaacatcatgaaggccaagaagaagccgctcgacacgatcaagccggaggacctgggtgtggacgtcgcgccgcgcctgaagacgctcaaggtgtccgagccgccgcagcgcgccgccggcgtgaaggtgcccgatgtcgccgccctggtggaaaagctgaagaacgaagcaaaagtgatccaaggatag

SEQ ID NO: 74794 - protein, 251 aa, Bordetella bronchiseptica RB50
MKILVPVKRVVDYNVKVRVKSDNTGVDIANVKMSMNPFDEIAVEEAVRLKEKGAASEVIAVSCGVAQCQETLRTALAIGADRAILVETAAELQPLAVAKLLKALVDREQPGLVILGKQAIDDDANQTGQMLAALADLPQATFASKVELAGDKVSVTREVDGGLETLSLDTPAVITTDLRLNEPRYVTLPNIMKAKKKPLDTIKPEDLGVDVAPRLKTLKVSEPPQRAAGVKVPDVAALVEKLKNEAKVIQG

SEQ ID NO: 74795 - DNA, 801 bp, Bordetella bronchiseptica RB50
  CDS (1)..(801): transl_table=11
atgcggtcccgggtttcgccgggtaattattgttattttggagactgctggatgaaggttctggtaccagtcaagcgcgtggtcgactacaacgtcaaggtgcgcgtcaaatcggatcaaacgggggtggacatcgccaacgtgaagatgtccatgaacccgttcgacgagatagcggtcgaggaggccacgcggctcaaggagaagggcgcggtggcggaggtggtggcggtttcttgcggcgccgcacaatgccaggagacgctgcgcacggcgatggcgatcggggcggaccgcgcggtgctggtgcagaccgacgcggagctgcagccgctggcggtggccaagctgctcaaggcgctggtggacaaggagcagccgcagctggtgattctgggcaagcaggcgatcgacgacgacgccaaccagacggggcagatgctggcggcgctgctggattggccgcaggcgacgtttgcgagcaaggtggagctgggcgatggtcaggtgacggtgacgcgcgaggtcgatggggggctggagacgctgtcgctgaatctgccggcgatcgtgaccacggacctgcggctgaacgagccgcgctacgtgacgctgcccaacatcatgaaggccaagaagaagccgctggagacggtgagcccgcaggatctgggggtggatccggcgccgcgcctgaagacgctgaaggtgagcgagccgccggcgcgccaggccggcatcaaggtgcctgatgtggccacgctggtggacaaactgaagaacgaagcgaaggtggtgtga

SEQ ID NO: 74796 - protein, 266 aa, Bordetella bronchiseptica RB50
MRSRVSPGNYCYFGDCWMKVLVPVKRVVDYNVKVRVKSDQTGVDIANVKMSMNPFDEIAVEEATRLKEKGAVAEVVAVSCGAAQCQETLRTAMAIGADRAVLVQTDAELQPLAVAKLLKALVDKEQPQLVILGKQAIDDDANQTGQMLAALLDWPQATFASKVELGDGQVTVTREVDGGLETLSLNLPAIVTTDLRLNEPRYVTLPNIMKAKKKPLETVSPQDLGVDPAPRLKTLKVSEPPARQAGIKVPDVATLVDKLKNEAKVV

SEQ ID NO: 74797 - DNA, 750 bp, Bordetella bronchiseptica RB50
  CDS (1)..(750): transl_table=11
atgaaaatactggtaccagtcaagcgcgtggtcgactacaacgtcaaggtgcgcgtcaaatcggatcaaacgggggtggacatcgccaacgtgaagatgtccatgaacccgttcgacgagatagcggtcgaggaggccacgcggctcaaggagaagggcgcggtggcggaggtggtggcggtttcttgcggcgccgcacaatgccaggagacgctgcgcacggcgatggcgatcggggcggaccgcgcggtgctggtgcagaccgacgcggagctgcagccgctggcggtggccaagctgctcaaggcgctggtggacaaggagcagccgcagctggtgattctgggcaagcaggcgatcgacgacgacgccaaccagacggggcagatgctggcggcgctgctggattggccgcaggcgacgtttgcgagcaaggtggagctgggcgatggtcaggtgacggtgacgcgcgaggtcgatggggggctggagacgctgtcgctgaatctgccggcgatcgtgaccacggacctgcggctgaacgagccgcgctacgtgacgctgcccaacatcatgaaggccaagaagaagccgctggagacggtgagcccgcaggatctgggggtggatccggcgccgcgcctgaagacgctgaaggtgagcgagccgccggcgcgccaggccggcatcaaggtgcctgatgtggccacgctggtggacaaactgaagaacgaagcgaaggtggtgtga

SEQ ID NO: 74798 - protein, 249 aa, Bordetella bronchiseptica RB50
MKILVPVKRVVDYNVKVRVKSDQTGVDIANVKMSMNPFDEIAVEEATRLKEKGAVAEVVAVSCGAAQCQETLRTAMAIGADRAVLVQTDAELQPLAVAKLLKALVDKEQPQLVILGKQAIDDDANQTGQMLAALLDWPQATFASKVELGDGQVTVTREVDGGLETLSLNLPAIVTTDLRLNEPRYVTLPNIMKAKKKPLETVSPQDLGVDPAPRLKTLKVSEPPARQAGIKVPDVATLVDKLKNEAKVV

SEQ ID NO: 74799 - DNA, 750 bp, Chromobacterium violaceum ATCC 12472
  CDS (1)..(750): transl_table=11
atgaaagttctagtcgcagtgaaacgcgttgtcgattacaacgtgaaagtccgcgtcaaagccgacggcagcgacgttgatatcgccaacgtcaagatgtcgatgaatcccttcgacgagatcgccgtggaagaggcggtgcgtctgaaggaagccggcaaggtgagcgagatcgtcaccgtgtccatgggcgtcaagcagtgcgaggaaacgctgcgcaccgcgctggcgatgggcgccgaccgcgccatcctggtggaaaccgacgtcgagctgcagccgctggccgtggccaagctgctgaaggccgtcgccgacaaggagcaaccgcaactggtgatcctgggcaagcaggcgatcgacgacgacgccaaccagaccggccagatgacttccgcgctgctgggctggtcccagggcacgttcgcctccaaggtcgacctggcggccgagaccgtggacgtgatccgcgagatcgacggtggcctggaaaccgtcaagctgcgcctgccggccgtggtcaccgccgacctgcgcctgaacgagccgcgcttcatcaagctgcccaacatcatggccgccaagaagaagccgctggacaagaccacgccggccgaactgggcgtcgacgccgcgccgcgcctgaagacgctgaaagtggccgaaccggccaagcgttccgccggcatcaaggtggccaacgccgccgaactggtcgccaaactcaagaacgaagcaaaggtgctgtaa

SEQ ID NO: 74800 - protein, 249 aa, Chromobacterium violaceum ATCC 12472
MKVLVAVKRVVDYNVKVRVKADGSDVDIANVKMSMNPFDEIAVEEAVRLKEAGKVSEIVTVSMGVKQCEETLRTALAMGADRAILVETDVELQPLAVAKLLKAVADKEQPQLVILGKQAIDDDANQTGQMTSALLGWSQGTFASKVDLAAETVDVIREIDGGLETVKLRLPAVVTADLRLNEPRFIKLPNIMAAKKKPLDKTTPAELGVDAAPRLKTLKVAEPAKRSAGIKVANAAELVAKLKNEAKVL

SEQ ID NO: 74801 - DNA, 750 bp, Rhodopseudomonas palustris CGA009
  CDS (1)..(750): transl_table=11
atgaaggttctggtgccggtcaagcgcgtggtcgactacaacgtcaagatccgcgtcaagagcgacgggtcgggcgttgaactcgccaacgtcaagatgtcgatgaatccgttcgacgagatcgccgtcgaagaagcgctgcgcctcaaagaggccggcaaggcgaccgaagtcgtcgtggtctcgatcggaccggcgcaggcgtcggaaaccctgcgcaccggcctcgccatgggcgcggaccgcggcatcctggtcaaggtcgacggcgtcgtcgaaccgctggcggtcgccaagatcctcaagggcatcgccgacgaggaaaagccgggactgatcattctcggtaagcaggcgatcgacgacgacagcaaccagaccggccagatgctggccgcgctgctcggctgggcgcaggcgaccttcgcctccaagctcgaagtcgaaggctcggacttcaccgtcgcgcgtgaagtcgatggcggctcgcagaccgtcaagctcaagggcccggcgatcgtcaccaccgatctgcgtctcaacgagccgcgctacgcttcgctgccgaacatcatgaaggccaagaagaagccgatcgcggagaagaccgcggccgacttcggcgtcgacgtttcgccgcgcctggaagttctgaagaccgtcgagccgggtggccgcaaggccggcgtcaaggtcaaggacgtcgccgaactggtttcgaagctcaagaacgaggcgggtgtactctga

SEQ ID NO: 74802 - protein, 249 aa, Rhodopseudomonas palustris CGA009
MKVLVPVKRVVDYNVKIRVKSDGSGVELANVKMSMNPFDEIAVEEALRLKEAGKATEVVVVSIGPAQASETLRTGLAMGADRGILVKVDGVVEPLAVAKILKGIADEEKPGLIILGKQAIDDDSNQTGQMLAALLGWAQATFASKLEVEGSDFTVAREVDGGSQTVKLKGPAIVTTDLRLNEPRYASLPNIMKAKKKPIAEKTAADFGVDVSPRLEVLKTVEPGGRKAGVKVKDVAELVSKLKNEAGVL

SEQ ID NO: 74803 - DNA, 774 bp, Bdellovibrio bacteriovorus HD100
  CDS (1)..(774): transl_table=11
atgaagatttttgtgtgtatcaagcaggtgcctgacaccgaaacaaagattaagatctctcccgaccagactggtatcgacacggcgggtattaaatgggttatgaacccttatgacgaatatgcagttgaggaagccaacaagcttcgcgatgcaaatccgggatcccaagtatgggttctgtctgttggaccaaaggctcgtgtcgttgaatccttgcgtacggctttggctatgggcgctgacgaagcgatcgtggtgaacggcgaaggcctggacaactttgccacggcaaaagctttggctgaagtgatcaaagctgaaggcggcgcaaaagtcatcttctccggcaaacttgcaattgatgacaatgcttcctctgtcagccagatgatggctgaattcctgaacgttcctcacaccacagtggtatcgaaattcaatttcaatggcgaaaacgttgtggttgagcgcgatatcgaaggtggcgcgaaagaagttgtgcaaatgatgactccggcggttgtggcggcgaacaagggtttgaacatgcctcgttacgcaagtcttccaggcatcatgaaagccaaaaagaaagtgatcaaagaaatcgaattcgcttctttgaacatcccggcttctgacatcaaaatcaaatactccggctttgctcttccggctgataaaccagctgtaaaaatgctttctggcgatgcttctgcacaagcgtccgagctggttaaacttcttcgcgatgaagcgaaggttctgtaa

SEQ ID NO: 74804 - protein, 257 aa, Bdellovibrio bacteriovorus HD100
MKIFVCIKQVPDTETKIKISPDQTGIDTAGIKWVMNPYDEYAVEEANKLRDANPGSQVWVLSVGPKARVVESLRTALAMGADEAIVVNGEGLDNFATAKALAEVIKAEGGAKVIFSGKLAIDDNASSVSQMMAEFLNVPHTTVVSKFNFNGENVVVERDIEGGAKEVVQMMTPAVVAANKGLNMPRYASLPGIMKAKKKVIKEIEFASLNIPASDIKIKYSGFALPADKPAVKMLSGDASAQASELVKLLRDEAKVL

SEQ ID NO: 74805 - DNA, 762 bp, Unknown
  Unidentified
  CDS (1)..(762)
atggcccgtgttctcgttggagtgaaaagagtcattgattatgccgttaaaatacgagtcaagccagataaatctggagtcatcacagatggagttaaacactccatgaacccatttgatgagattgcaattgaagaggcagtacgcatgaaggagaaaaagttggcacaagaagtcattgcagtcagctgtggtcctgctcaagctcaggagacgcttagaactgctcttgcaatgggtgccgacaagggtattcatgtagaaatttcaggtcccgagtatgaaactctccagccgattcatgtatcaaagatcttggctaaactggcacaagatgaaaaagcagatttggtaatagtaggaaagcaggctattgatgatgattgcaaccaaacggctcagatgactggtggagttctaggctggcctactgccacattctgtagcaagatcgaacatggcaagggagaaatgactgttactagagaaattgatggtggtttagaagttatcaaagtcaaaactcctgctgtgcttagcgctgatttgcgtttgaacgagcctagatatgcaaccttaccaaatatcatgaaagcaaaaaagaaacctgtgaagaaagtttcacccaaagatttaggtgtggacattgcatccagaattgaagttatttcggtagaagatccaccggttcgtcaagctggttctattcttcctgatgttgacaccttagttgctaaattaaaagagggaggtcattgttaa

SEQ ID NO: 74806 - protein, 253 aa, Unknown
  Unidentified
MARVLVGVKRVIDYAVKIRVKPDKSGVITDGVKHSMNPFDEIAIEEAVRMKEKKLAQEVIAVSCGPAQAQETLRTALAMGADKGIHVEISGPEYETLQPIHVSKILAKLAQDEKADLVIVGKQAIDDDCNQTAQMTGGVLGWPTATFCSKIEHGKGEMTVTREIDGGLEVIKVKTPAVLSADLRLNEPRYATLPNIMKAKKKPVKKVSPKDLGVDIASRIEVISVEDPPVRQAGSILPDVDTLVAKLKEGGHC

SEQ ID NO: 74807 - DNA, 1004 bp, Anopheles gambiae str. PEST
  CDS (106)..(870)
tggacatacaatttgccaacatccaacttgcggtagctctggggtgtttaattgacgccaatttatttgtgctgaagtttctagtgagcagaaagaaatttcaccatgtcccgagtattagttggagtaaagcgtgttattgactatgccgtgaagattcgcgttaagccggacaaatccggtgtcgtcactgaaggggtcaagcactccatgaacccttttgatgaaattgctgtagaagaagcagtcaaattgaaagagaaaaaaatcgccactgaggtggtggttgtttcggttggtccttctcaatcccaggaagtactccgtacggcccttgccatgggggcagatcgtggaatacatgtagaggtagcaggcaaggagtttgatcttcttcagcctattcatgtttcgaaaatactggccaaactcgcacaagatgagaaagcggatctagtgattctcggtaagcaagccatcgatgatgattgcaatcagacggcgcagatgactgccgctgtgttagattggccacaggctactttcgcctctaaggtcgaaaaagaaggagatacattaaaggtcgtgcgcgaggtggacggtggactggaaaccattaagactaagatgccggcagtagttagtgctgacttgcgtctaaataccccacgctatgctacccttcccaacatcatgaaggcaaagaagaaaccgataaagaaacttgcaccgaaagatttgggagttgacacaacgccccgtatcgaaattgtctccatcgaagatcctcctgtcagacaagctggatccatactgccggacgtggacactttgttgaccaaactgcgtgacggcggtcatatcaagtaggagtctctgagtggatttaggtaaacttcacagtgaatgttgccgaggtagtaatgtttcaaggttttgggggttattagcttgtcaatcaaattgagaataaaaattaaactgctatagtttatccgtttcgc

SEQ ID NO: 74808 - protein, 254 aa, Anopheles gambiae str. PEST
MSRVLVGVKRVIDYAVKIRVKPDKSGVVTEGVKHSMNPFDEIAVEEAVKLKEKKIATEVVVVSVGPSQSQEVLRTALAMGADRGIHVEVAGKEFDLLQPIHVSKILAKLAQDEKADLVILGKQAIDDDCNQTAQMTAAVLDWPQATFASKVEKEGDTLKVVREVDGGLETIKTKMPAVVSADLRLNTPRYATLPNIMKAKKKPIKKLAPKDLGVDTTPRIEIVSIEDPPVRQAGSILPDVDTLLTKLRDGGHIK

SEQ ID NO: 74809 - DNA, 774 bp, Magnaporthe grisea 70-15
  CDS (1)..(774)
atgtctgcattgaggatattagtgcccgtcaagcgggtgattgactatgccgtcaagcctcgagtgaacaaagcccagacgggcgtcgagactgccggagtcaagcacagcatgaacccattcgatgagctctcggtcgaggaggcggtgcggatccgcgagaagaagtcggcaccgggcggcgtggaggacatctgcgtcatctctgccggcccgtccaaggcgcaggacgtgctgcggacggcgctggcgatgggtgcggaccgcggcgtgcacgtcgagaccggggaggagcagctggagccgctcggcgtggctaagctgctgcgcaaggcggccgaggagcacaagagcaacctggtgatcctgggcaagcagagcatcgacgacgactcggcgcagacgggccagatgctcgccgcgctgctgggctggcctcaggcgacgcaggctagcaaggtcgagtttggcgagggcgactcggtcagcgtcacgtgtgaggtcgacggcggcgtcgagacggtcaaggccaagctgcccatgatcatcaccacggacctgcgtctgaacgagccgcggtacgccagcttgcccaacatcatgaaggccaagaagaagccgtttgagaagaagaagctgtcggactatggcgtctcggccgagagcaggctcaaagtcctcaaggttactgagcctccgccaagaaagggcggcggcaaggttgaggatgtcgatggactgattggcaagctcaaggaactgggggcattgtaa

SEQ ID NO: 74810 - protein, 257 aa, Magnaporthe grisea 70-15
MSALRILVPVKRVIDYAVKPRVNKAQTGVETAGVKHSMNPFDELSVEEAVRIREKKSAPGGVEDICVISAGPSKAQDVLRTALAMGADRGVHVETGEEQLEPLGVAKLLRKAAEEHKSNLVILGKQSIDDDSAQTGQMLAALLGWPQATQASKVEFGEGDSVSVTCEVDGGVETVKAKLPMIITTDLRLNEPRYASLPNIMKAKKKPFEKKKLSDYGVSAESRLKVLKVTEPPPRKGGGKVEDVDGLIGKLKELGAL

SEQ ID NO: 74811 - DNA, 777 bp, Gibberella zeae PH-1
  CDS (1)..(777)
atgtcagcactacggattcttgtccccgtgaagcgggtaatcgactatgctgtcaagccccgagtcaacaagtcccagacgggcgtcgagaaagccggtgtcaagcactccatgaacccattcgatgaactctcagtcgaagagtcagtgcgaatccgagagaagaagcgcgcccccggtggtgtcgaggacatttgcgtcatctctgcaggcccacccaaagcgcaagatgtgctacgaacagccatggccatgggcgcagaccgtgccatccacgttgagctcaaggagggcgaggaaatcgagcctctgacagtggccaagcttctccagaaggccgtggaacaacagaagagcaatctggtggtcctgggcaagcagagcatcgacgacgatgccaatcagacgggtcagatgttggcgggtctcttgggatggccacaggctacacaggcgagcaaggtcgaattcggcgccaacgacgaggttactgttacaaaggaggtggacggtggtgtcgaaacggtgcgcgccaagctgcccatgattatcactacagatctccgactcaacgagcctcgatacgcaagtctgcccaacattatgaaggctaagaagaagaatctgcaaaagacaaagctcgaggattttggattggatggagtgaatcgtctcaagacactcaaggttgtcgagcctcccgctcgacagggtggtggcaaggtggaggatgttggtggcctggttagcaagctcaaggagcttggtgctctgtaa

SEQ ID NO: 74812 - protein, 258 aa, Gibberella zeae PH-1
MSALRILVPVKRVIDYAVKPRVNKSQTGVEKAGVKHSMNPFDELSVEESVRIREKKRAPGGVEDICVISAGPPKAQDVLRTAMAMGADRAIHVELKEGEEIEPLTVAKLLQKAVEQQKSNLVVLGKQSIDDDANQTGQMLAGLLGWPQATQASKVEFGANDEVTVTKEVDGGVETVRAKLPMIITTDLRLNEPRYASLPNIMKAKKKNLQKTKLEDFGLDGVNRLKTLKVVEPPARQGGGKVEDVGGLVSKLKELGAL

SEQ ID NO: 74813 - DNA, 762 bp, Apis mellifera
  CDS (1)..(762)
atggcacgagcacttgtaggtgtaaaaagagttatcgattatgcagttaagattcgtgttaaatcagataaaacaggtgttgtaacagatggagtaaaacatgcaatgaatccttttgatgaaattgcaattgaagaagctatacgaatgaaagaaaagaaattagtacaagaaataattgcagtttcatgtggacctccacaatgtcaagatgtgataagaactgcccttgcaatgggtgctgataaaggaattcatgttgaaatatctggatctgaatatgaaactttacaacctattcatgtttctaaacttatagccaaattagctcaagaagagaaagcagatttaattattgttggaaaacaagctatagatgatgatagtaatcaaactgcacaaatgattggaggtattttagattggccaactggaacattttgtagtaaaattgaaaaaaataatgatgatttaactgttacacgtgaagttgatggaggtttagaggttgttaaaataaaaatgccaacagttttaagtgctgatctacgacttaatgaaccacgatatgctacattgccaaatattatgaaagctaagaaaaaaccaattaaaaaagtaacagcaaaagatcttggtgtagatactacagcaagaattgaaattttatcagttgaagaaccaccagttagacaagctggaagtattgtaccagatgttgatacattaattgcaaaactaaaggaaagtggacatatataa

SEQ ID NO: 74814 - protein, 253 aa, Apis mellifera
MARALVGVKRVIDYAVKIRVKSDKTGVVTDGVKHAMNPFDEIAIEEAIRMKEKKLVQEIIAVSCGPPQCQDVIRTALAMGADKGIHVEISGSEYETLQPIHVSKLIAKLAQEEKADLIIVGKQAIDDDSNQTAQMIGGILDWPTGTFCSKIEKNNDDLTVTREVDGGLEVVKIKMPTVLSADLRLNEPRYATLPNIMKAKKKPIKKVTAKDLGVDTTARIEILSVEEPPVRQAGSIVPDVDTLIAKLKESGHI

SEQ ID NO: 74815 - DNA, 780 bp, Candida glabrata CBS 138
  CDS (1)..(780)
atgtcgaagccattgcgtattttagttccagtcaagcgtgtggttgatttccagatcaaaccacgggtgaacaagacactcactgggatagagaagagtggcatcaagtttagtataaacccattcgatgatatagctgtcgaagagactgtgaggattaaggagaaacatggtgatctggttgagcacacgcaagcggtgtctatcgggccagctaaagcccaggacatcttaagaaattgtcttgccaagggtatagataatgtgtccttgatagattgcaaggatcttgagttggaaccattggctgtcgcaaaagtattgaagaacatagtcgaaaagcagaacattaacttgattatcatgggtaaacaggccatcgatgacgatttcaaccatacgggtcaaatgttggcaggtctcttgaactggcctcaggcaactaatgctgcaaaagttgatattctagctgatgagggtaaagtgagaattacccgtgagatagacggtggtgaagagaccctaaaggcctcactaccactgattataaccactgatctgagactaaatactcctagatacgtcggtttgccaaatctgatgaaagcaaagaagaaacctatggaaaaacttacattagagaaagactttgctgacattgataccaaacctagactagagatcttatcagtgaacgagccaaatgccaaagaacctggtattactgttggctctgtcgatgaactagtccagaaactaaaggactcaaaagtcttgtaa

SEQ ID NO: 74816 - protein, 259 aa, Candida glabrata CBS 138
MSKPLRILVPVKRVVDFQIKPRVNKTLTGIEKSGIKFSINPFDDIAVEETVRIKEKHGDLVEHTQAVSIGPAKAQDILRNCLAKGIDNVSLIDCKDLELEPLAVAKVLKNIVEKQNINLIIMGKQAIDDDFNHTGQMLAGLLNWPQATNAAKVDILADEGKVRITREIDGGEETLKASLPLIITTDLRLNTPRYVGLPNLMKAKKKPMEKLTLEKDFADIDTKPRLEILSVNEPNAKEPGITVGSVDELVQKLKDSKVL

SEQ ID NO: 74817 - DNA, 780 bp, Kluyveromyces lactis NRRL Y-1140
  CDS (1)..(780)
atgtcgtccaagctaagaattttggtgccagtgaagcgtgttgtggatcatgccatcagacctcgtgtcaacaagcagtttaccaacgttgagaccaagaacttgaagttctctatcaatccgtttgacgatattgcagtggaagaatctgtgaaattgaaggaaactcatcctgatgccgtcgaatcaatccatgccgtttccgttggcccactgaaggcccaagatgtgttgaggacagctttagccaaaggttgtgattcttcaactttggttgagcatgattctaccgaattggagccattggtgatcagcaaggtgttgaagaaaattgttgaagacaagaatgctaacttggttgtgctcggaaagcaagccatcgatgatgatagcaacaacactggtcaaatgctcgctggtttgttgaactggccacaagctaccaacgcttgtaaagtagaattgttagaagacggcgccagtgtcagagtcaccaaggaaatcgacggtggtgaagaaatcgtggtcgcaaaattacctatgatcatcaccactgatctacgtttgaatacgccaagatacgctacgttaccaaatttgatgaaagccaagaagaagcctttggagaagttgaagttgaagaaagattttgaagggatcaatttggacccccaattgaaactgctaaaggtcgaagaacctccagtcaagagtgctggtatcaaggtttcctctgtcgatgaattggtctcaaagctaaaggaagccaaactggtttga

SEQ ID NO: 74818 - protein, 259 aa, Kluyveromyces lactis NRRL Y-1140
MSSKLRILVPVKRVVDHAIRPRVNKQFTNVETKNLKFSINPFDDIAVEESVKLKETHPDAVESIHAVSVGPLKAQDVLRTALAKGCDSSTLVEHDSTELEPLVISKVLKKIVEDKNANLVVLGKQAIDDDSNNTGQMLAGLLNWPQATNACKVELLEDGASVRVTKEIDGGEEIVVAKLPMIITTDLRLNTPRYATLPNLMKAKKKPLEKLKLKKDFEGINLDPQLKLLKVEEPPVKSAGIKVSSVDELVSKLKEAKLV

SEQ ID NO: 74819 - DNA, 768 bp, Debaryomyces hansenii CBS767
  CDS (1)..(768)
atgtcgtcaaaattgaaaattttagtaccagtcaaaagagtgattgactttgcaatcaaaccaagaattaataaagcacaaactggagtggaaactaagggagttaagttcagtatcaatccattctgtgatattgcattagaagagtcaattaggatcagagaggcccacaagggtttagttgaaaagatccatgctgtttctattggaccaaccaaggcacaagatatattaagaactgcattggctaagggtgctgactccaccacgttgatagacgtaggcgacgaagaagtcgagccattaactgtggccaagctcttacaaaagacagttgaaaaggaggactccaacttagttattttgggaaaacaggccattgacgacgattctaatcaaaccgggcaaatgttagcaggtttgttgaactggccccaagccaccaatgcttcaaaggttgaaattgacggtgataacatcactgtaacccgtgaaattgatggaggttcggatactttgcgtgccaagttgccaatgattgtcactacagatttaagattgaacgagccaagatacgcttctttgccaaatatcatgaaggccaagaagaagccattagaaaaattgaaagtcagcgatttaggtattgaattatccaagagattagaaaccttaaaggttgaagaaccacctcagagagaggctggtgttaaagtggaatcagttgatgaattgatcagtaaattgaaagaattgaaggccatttaa

SEQ ID NO: 74820 - protein, 255 aa, Debaryomyces hansenii CBS767
MSSKLKILVPVKRVIDFAIKPRINKAQTGVETKGVKFSINPFCDIALEESIRIREAHKGLVEKIHAVSIGPTKAQDILRTALAKGADSTTLIDVGDEEVEPLTVAKLLQKTVEKEDSNLVILGKQAIDDDSNQTGQMLAGLLNWPQATNASKVEIDGDNITVTREIDGGSDTLRAKLPMIVTTDLRLNEPRYASLPNIMKAKKKPLEKLKVSDLGIELSKRLETLKVEEPPQREAGVKVESVDELISKLKELKAI

SEQ ID NO: 74821 - DNA, 771 bp, Yarrowia lipolytica CLIB122
  CDS (1)..(771)
atgtccaacaagctgcgtatctttgtgcccgtcaagcgagtaattgatttcgctgtcaagccccgagtcaacaaggccggcaccggcgtcgagaccactggagtcaagttctccatcaaccccttctgtgatattgctgtcgaggaggctcttctgctcaaggagggaaacaaggatctggttgagaacattcacgtggcctccgtcggtccctccaaggcccaggatatcctgcgacaggctctggccaagggtgctgacgactccactctggtggagatgggtcccaaggacaccgagcttgagcctctgggtgtggccaaggtgctcaagaagctgattgaggaacagaagtccaacctggtcattctcggaaagcaggccattgacggcgacaacggccagaccggtcagattctcgctggtctgctcaagtggccccaggccacccaggcctccaaggtgtctgtcaacggcgacaaggtcgaggtcacccgagaggtcgatggtggtgtcgagaccgtcgctgccaaactgcccatgatcattaccaccgatctgcgactcaacgagcctcgatacgtgactctgcccaacatcatgaaggccaagaagaagcccctcaaggtggtcaagatcaaggactttgacggcgttgccaaccgactcgagaccctcaaggttgccgagcctgccaagcgacaggccggtgtcaaggtcgagaacgttgatgagctggtcggcaagctcaaggagactggtactctttaa

SEQ ID NO: 74822 - protein, 256 aa, Yarrowia lipolytica CLIB122
MSNKLRIFVPVKRVIDFAVKPRVNKAGTGVETTGVKFSINPFCDIAVEEALLLKEGNKDLVENIHVASVGPSKAQDILRQALAKGADDSTLVEMGPKDTELEPLGVAKVLKKLIEEQKSNLVILGKQAIDGDNGQTGQILAGLLKWPQATQASKVSVNGDKVEVTREVDGGVETVAAKLPMIITTDLRLNEPRYVTLPNIMKAKKKPLKVVKIKDFDGVANRLETLKVAEPAKRQAGVKVENVDELVGKLKETGTL

SEQ ID NO: 74823 - DNA, 801 bp, Candida albicans SC5314
  CDS (1)..(801): transl_table=12
atgtcttctaaattaaggattttagttcctgtgaaaagagttattgattttgccattaaaccaagaattaataaaaccggtactggaatagaaactaagggagttaaattcagtattaatccattttgtgatattgctttagaagaatcattaagacttcgagaaaataataaagatttagtagaaaacattcatgcggtatcaattggtccattaaaatcacaagacattttacgtactgcattagctaaaggagctgataattcaacattaattgaaacatcaaatgattcagttaataatgatgttgaaccattacaagttgctaaattgattaaaaaaattgttgaaaaagataattctaatttagtcatattagggaaacaatcaattgatgatgattttaatcaaactggacaaatattagcaggattattaaattggcctcaagctaccaatgcatcgaaaattgaaattgaaattgataatgataatgaaaataatcaagttttagttacgagagaaattgatggtggtgaagatattttgaaaagtaaattaccaatgattataactactgatttaagattaaatgaaccaagatatgcatcattacaaaatattatgaaagctaaaaagaaaccattaacaaaattgaaacctcaagatttaggtattgataaaattgaaaataaattggaaattttgaaaattgaagaaccaccaattagacaagcaggtgttaaagttgataatgttgatcaattgattgaaaaattaaaagaattaaaagccatttaa

SEQ ID NO: 74824 - protein, 266 aa, Candida albicans SC5314
MSSKLRILVPVKRVIDFAIKPRINKTGTGIETKGVKFSINPFCDIALEESLRLRENNKDLVENIHAVSIGPLKSQDILRTALAKGADNSTLIETSNDSVNNDVEPLQVAKLIKKIVEKDNSNLVILGKQSIDDDFNQTGQILAGLLNWPQATNASKIEIEIDNDNENNQVLVTREIDGGEDILKSKLPMIITTDLRLNEPRYASLQNIMKAKKKPLTKLKPQDLGIDKIENKLEILKIEEPPIRQAGVKVDNVDQLIEKLKELKAI

SEQ ID NO: 74825 - DNA, 798 bp, Cryptococcus neoformans var. neoformans B-3501A
  CDS (1)..(798)
atgcgtcccactctcccatctcttatcaacattcttgtccccgtcaagaggtccatcgactatgctgtcaaaatccgagtggcttctgacggcaagggagtggacaccaatgtcaagcactctatgaacccctttgacgaaatcgccgtggaggaggctattcgtcagcgagacaagtctggcgagaaggtcgaatctatcactgccctttccattggccctcctaaggctgccgacaccatccgtaccgccctcgccatgggtgctgacactggtattcacatcaccacccccgaaaacactattgtcgagcctctctccgttgctcatgctatcaaggccattatcgaacgctcagaaaaagctggaaagaaatttgacctcgtctttatgggtaagcaggcaatcgacgatgacagcggtgccaccggaggtatgcttgctggtctgcttggatggggacaagcatctttcgctagcaaggttgtgatcgaaaaaggcggcaggatagaggtcacaagggaaattgatggtggtttggaagttgtcgagagcaagattcctatggtcgtcactactgacctccgattgaacgagcctcggtatgcctccttgcctaacatcatgaaggctaagaagaagaagattgaaactctcaagcctgaggacctcggtcttgactttactccccgacttgagactgtttccgtttctgaacctcctaaacgaaaaggcggtagcaaggttgagactgtccaggagcttgtcgccaagatgaaggaagcgggtgttctgtaa

SEQ ID NO: 74826 - protein, 265 aa, Cryptococcus neoformans var. neoformans B-3501A
MRPTLPSLINILVPVKRSIDYAVKIRVASDGKGVDTNVKHSMNPFDEIAVEEAIRQRDKSGEKVESITALSIGPPKAADTIRTALAMGADTGIHITTPENTIVEPLSVAHAIKAIIERSEKAGKKFDLVFMGKQAIDDDSGATGGMLAGLLGWGQASFASKVVIEKGGRIEVTREIDGGLEVVESKIPMVVTTDLRLNEPRYASLPNIMKAKKKKIETLKPEDLGLDFTPRLETVSVSEPPKRKGGSKVETVQELVAKMKEAGVL

SEQ ID NO: 74827 - DNA, 1305 bp, Strongylocentrotus purpuratus
  CDS (1)..(1305)
atggctcttcgtgttcttgttggcgtaaaaagagtgatagattatgcagttaagatccgcgtcaaaccggacaacatgggggtggtgacggagggggtgaaacacagtatgaacccatttgatgagattgctgtagaagaagctgtaaggctgagagaaaagaagcttgtcaaggaaatcattgcagtcagctgtggaccaaaacaatctcaggaaacattacggacagcactagccatgggtgtagacagaggtattcacgttgaagtgagcggagcagagtatgagggcctcgctccattccatgtttccaagatcattgcaaaactagctcaagaagaggatgttaacttagtcattctgggcaaacaggcaattgacgatgactgcaatcagaccggtcaaatgaccgcagcccttctggactggcctcaagcgacctttgcatccgaggtcaaagttgaagacagcaagatggaagtgacgagggaggtcgacggtggactagaaacgatccaggtttccctaccagcggtcctcactgcagatctaaggttaaatgagccacggtatgctacactacctaacattatgaaagccaagaagaagcctattgcaaagaagacaccaagtgacctaggagttgatgtgagcccgagggtagagacggtcagagtagaggatccaccggtcagagacgctggccagaaggtggagaatgtggaggaactggtcagcaaactcaaagaagcaggattctatggtgagctgaccgttgaggataaatacaagaagacattgctggagatagatgctttgaaagaccatttagataacaggagggatatttcgcgccgctcccaggcccaatctgaagaatggaagacacgcatgaaggcagcggagggagacgtggagcagcaaaaatcagaccaaaaagatgtaatggctgatatgactcgtcagtataagacaaagcaaactgaaatggacgctcatgtgagaaggctagaggttgagctgcaaaaggtcacaagtgcattgacaaaaactagtgaaaacctaaaggcaaccacagcagagaaagagaagataacaaaggagaaaaacgagacgatcggagagttggaggagaagataaagacgatggaatattcgtacgagaatatgctggaggaagcaatggataacatggttgacaagttgaacaacgccaagatacgatggctagatgaatccaggaccattcacatgcagcacaaacaaaagttattagaatttggtttaaatcctctagatatttag

SEQ ID NO: 74828 - protein, 434 aa, Strongylocentrotus purpuratus
MALRVLVGVKRVIDYAVKIRVKPDNMGVVTEGVKHSMNPFDEIAVEEAVRLREKKLVKEIIAVSCGPKQSQETLRTALAMGVDRGIHVEVSGAEYEGLAPFHVSKIIAKLAQEEDVNLVILGKQAIDDDCNQTGQMTAALLDWPQATFASEVKVEDSKMEVTREVDGGLETIQVSLPAVLTADLRLNEPRYATLPNIMKAKKKPIAKKTPSDLGVDVSPRVETVRVEDPPVRDAGQKVENVEELVSKLKEAGFYGELTVEDKYKKTLLEIDALKDHLDNRRDISRRSQAQSEEWKTRMKAAEGDVEQQKSDQKDVMADMTRQYKTKQTEMDAHVRRLEVELQKVTSALTKTSENLKATTAEKEKITKEKNETIGELEEKIKTMEYSYENMLEEAMDNMVDKLNNAKIRWLDESRTIHMQHKQKLLEFGLNPLDI

SEQ ID NO: 74829 - DNA, 762 bp, Tribolium castaneum
  CDS (1)..(762)
atggctcgtgtgttagttggggttaaaagagtcatcgactatgccgttaagattcgggttaagcccgataaaaccggggttgtcaccgatggggtgaaacactcgatgaaccccttcgacgaaatagccgtggaggaggccgtccgtatgaaagaaaagaaactagcgtctgaaatcatcgcagtttcttgtggtccaactcaggcccaagacgtgatcagaacggcccttgccatgggtgtggacaaaggcattcacgtcgaggtctcaggggctgaatacgaaaccctccaaccgatccacgtttcaaaaattttggccaaactgaccgagaaggaaaaagccgacatgatcatagttggcaagcaggcaattgatgacgactcgaatcagacggctcagatgactgccgccgccttagattggccccaagctacgtttgcttcaaagatagaaaatggtgataaggaaatcaccgtgaccagggaggttgatgggggtttggagacaatcaagtgcaagctcccggctgtgataagcgccgacttgcgtttgaacgagccacgatatgctactctgccaaatattatgaaagcgaagaagaagccaattactaaaatgactccaaaggatttgggggttgatgtgtctcctaggatcactgtggtcagtgtggaagacccgccagtgcgtcaagccggagctattttgcctgatgtggacgcacttgttggaaaattgaaagaaggaggtcatatttaa

SEQ ID NO: 74830 - protein, 253 aa, Tribolium castaneum
MARVLVGVKRVIDYAVKIRVKPDKTGVVTDGVKHSMNPFDEIAVEEAVRMKEKKLASEIIAVSCGPTQAQDVIRTALAMGVDKGIHVEVSGAEYETLQPIHVSKILAKLTEKEKADMIIVGKQAIDDDSNQTAQMTAAALDWPQATFASKIENGDKEITVTREVDGGLETIKCKLPAVISADLRLNEPRYATLPNIMKAKKKPITKMTPKDLGVDVSPRITVVSVEDPPVRQAGAILPDVDALVGKLKEGGHI

SEQ ID NO: 74831 - DNA, 762 bp, Leptospira interrogans serovar Copenhageni str. Fiocruz L1-130
  CDS (1)..(762): transl_table=11
atgaaaatcatcgtattagtgaaacaggtacctgacaccgaaacgagtattaaagtaggggacaaatccattaacgaaactggaattaaatggattatctctccttatgatgaatttgccattgaagaaggaatcagacttcgtgaaaaacacggtggagaagtcatcgccgtttccctcggaccagacagagtcgtagaagctcttcgaaccgcttacgcaatgggcgcagaccgcgcggttcatatcaaagtggataactacgttcctttcgacacgaacaatacagcagaactgatttcaaactttgcaaaagcagaaaacgcagacgtaattatcggaggaagacaatccatcgatacggattcttctcaagttgtcatccaagttgcagaacttttaggaattcctcatattgcatttgcaatcaatcttgaaattaatggaaccgcggttaaagctacaaaagaagtagaaggtggaactcaaaccgtcgaaacttctactccagtggctcttacagcacagaaaggattgaacgaacctcgttatccttctctcaaagggatcatgaccgctaagaaaaaacctgtggaaactaaatctgcagcagatctaggtagccccgctagtaaaatcgaaattgttggactggagcctcctcctccaagaattccaggtagaaaactagaagctgcagatgcgaacgcatttgcagctcaactcgtgaaggctcttagagaagaagctaaggttatataa

SEQ ID NO: 74832 - protein, 253 aa, Leptospira interrogans serovar Copenhageni str. Fiocruz L1-130
MKIIVLVKQVPDTETSIKVGDKSINETGIKWIISPYDEFAIEEGIRLREKHGGEVIAVSLGPDRVVEALRTAYAMGADRAVHIKVDNYVPFDTNNTAELISNFAKAENADVIIGGRQSIDTDSSQVVIQVAELLGIPHIAFAINLEINGTAVKATKEVEGGTQTVETSTPVALTAQKGLNEPRYPSLKGIMTAKKKPVETKSAADLGSPASKIEIVGLEPPPPRIPGRKLEAADANAFAAQLVKALREEAKVI

SEQ ID NO: 74833 - DNA, 750 bp, Herminiimonas arsenicoxydans
  CDS (1)..(750): transl_table=11
atgaaagtgttggttccagtcaaacgtgtggtcgattacaacgtcaaggtccgcgtcaaatcggatcagtccggcgtcgatatcgccaacgtcaaaatgtcgatgaatccattcgatgaaatcgcagtggaagaagcgacgcgcctgaaggaagctggcaaggcgactgagatcattgctgtctcctgcggcatcctgcaatcgcaggaaaccctgcgtaccgcgatggccatcggtgccgatcgcggcattctggtggaaaccgatgtcgagttgcagccattggccgtcgccaaattgctcaaggccatcgccgacaaggagcagccgcaactgatcatcctcggcaagcaggcgatcgatgacgacgccaaccagaccggacagatgctggccgccttgctggactggccgcaagcgacctatgcgtcgaaagtggaagtcgatggcgacaaggtcaaagtcacgcgtgaagtcgacggcggactggaaatcgtttcgctgaccctgcctgcgatcattaccaccgatttgcgtctgaacgagccgcgttatgtgaccttgcccaacatcatgaaggcgaaaaagaaaacgctggataacatcaagcctgccgatctgggcgttgatgtgacgccgcgtttgaaaacgctgaaagtcagcgagccgcccaagcgctctgccggcatcatcgtgccggacgttgcgacgctggttgaaaagctccgcaacgaagccaaagtcatttaa

SEQ ID NO: 74834 - protein, 249 aa, Herminiimonas arsenicoxydans
MKVLVPVKRVVDYNVKVRVKSDQSGVDIANVKMSMNPFDEIAVEEATRLKEAGKATEIIAVSCGILQSQETLRTAMAIGADRGILVETDVELQPLAVAKLLKAIADKEQPQLIILGKQAIDDDANQTGQMLAALLDWPQATYASKVEVDGDKVKVTREVDGGLEIVSLTLPAIITTDLRLNEPRYVTLPNIMKAKKKTLDNIKPADLGVDVTPRLKTLKVSEPPKRSAGIIVPDVATLVEKLRNEAKVI

SEQ ID NO: 74835 - DNA, 750 bp, Bradyrhizobium sp. ORS278
  CDS (1)..(750): transl_table=11
atgaaggttctggtgccggtcaagcgggtggtcgactacaacgtcaaggtccgcgtcaagagcgacggatcgggcgttgagctcgccaacgtcaagatgtcgatgaatccgttcgacgagatcgccgtcgaggaagcgctgcggctgaaggaagccggcaaggcgaccgaggtcgtcgtggtctcgatcggacccgcgcaggcctccgagaccatccgcaccgcgctcgcaatgggcgcggaccgcggcatcctggtcaaggccgaaggcaatgtcgaaccgctcgcggtggccaagatcctcaaggctgtggcgcaggaagagcagcccgggctgatcattctcggcaagcaggcgatcgacgacgacagcaatcagaccggccagatgctggccgcgctgctcggctgggcgcaggcgaccttcgcttccaagctcgaggtcgaaggggccgacttcaaggtcacccgcgaggtcgatggcggcctgcagaccgtgatgctcaagggaccggcgatcgtcaccaccgatctgcgtctcaacgagccgcgctacgcgtcgctgccgaacatcatgaaggcgaagaagaagccgatcgccgagaagaccgccgccgacaccggcgtcgatctcaccccgcggctcgaagtgctcaagaccgcggagcccgcgggccgcaaggcgggcgtcaaggtgaaggacgtcgcggagctcgtttccaaactcaagaccgaggcgggggtgctctga

SEQ ID NO: 74836 - protein, 249 aa, Bradyrhizobium sp. ORS278
MKVLVPVKRVVDYNVKVRVKSDGSGVELANVKMSMNPFDEIAVEEALRLKEAGKATEVVVVSIGPAQASETIRTALAMGADRGILVKAEGNVEPLAVAKILKAVAQEEQPGLIILGKQAIDDDSNQTGQMLAALLGWAQATFASKLEVEGADFKVTREVDGGLQTVMLKGPAIVTTDLRLNEPRYASLPNIMKAKKKPIAEKTAADTGVDLTPRLEVLKTAEPAGRKAGVKVKDVAELVSKLKTEAGVL

SEQ ID NO: 74837 - DNA, 750 bp, Acinetobacter sp. ADP1
  CDS (1)..(750): transl_table=11
atgaaggctcttgttgctgtaaaacgtgtggttgatgccaacgttaaagttcgcgtaaagccggacaatagtggggttgacttaaccaatgttaaaatgtcaatcaacccattttgtgaaatcgcagtggaagaagcggttcgcttaaaagaaaaaggaacagtatctgaaatcgttgtggtttctatcggtcctaaagaagcacaggaacaaatccgttcctcaatggctctaggtgcagatcgtggtattttggtcgaaactgcggatgaaattggtgctttagaagttgctaaaattctaaaagggattgtagaacaagaaaaaccagaattgattcttcttggaaagcaagccattgacgatgactcaaatcaagtcggtcaaatgcttgcagctttattagatgcaggtcagggtacttttgcttctgaagttaaagtagacgctggaaaagttcaggttactcgtgaaattgacggtggtctacaaacggttgagctgacacttcctgccattattaccacagatttacgtttgaatgagcctcgttatgcggcacttccaaacattatgaaggcgcgcaaaaagccactagataccaaatctccagcagattatggtgttgcaacaggtacaaaacttaaaactgtaaaagttgagccacctgctgatcgtaaagctggcgtacaagtgaaatcagtcgatgaacttgttgaaaaattaaaaaatgaagcgaaagtgatctaa

SEQ ID NO: 74838 - protein, 249 aa, Acinetobacter sp. ADP1
MKALVAVKRVVDANVKVRVKPDNSGVDLTNVKMSINPFCEIAVEEAVRLKEKGTVSEIVVVSIGPKEAQEQIRSSMALGADRGILVETADEIGALEVAKILKGIVEQEKPELILLGKQAIDDDSNQVGQMLAALLDAGQGTFASEVKVDAGKVQVTREIDGGLQTVELTLPAIITTDLRLNEPRYAALPNIMKARKKPLDTKSPADYGVATGTKLKTVKVEPPADRKAGVQVKSVDELVEKLKNEAKVI

SEQ ID NO: 74839 - DNA, 756 bp, Symbiobacterium thermophilum IAM 14863
  CDS (1)..(756): transl_table=11
atggagattctggttctcctgaagcagacctttgacacagaagcaaaggtaaccgtgaaggatggccgcgtggtcgacgacgacgttacgctggtgatcaacccctacgatgagtacgccgtggaggaagccctgaagatccgtgaggccgtgggcggcacggtcacggtgctctccgtcggtcccgcccgggtggatgaggccctgcgccgggcgctggccatgggcgcggatgaggcggtggccatcgagccgccggccgatgccgacgagtacgtgacggccagcctgctggccgcctgggccaaggacaggaagttcgacctgatcctggccggcaacgtctcggtggacaccggcgccggccagaccgccctgcgggtggccgaggccctggggctgcctcacgtggccgccgccctcaagatcgagatcgcgggcaacacggcgacggtccaccgggatgccgagggagacaccgagatcgtgaccgtgcccctgccggcgctgatcaccgcccagcagggcctgaacgagccccggtatccgtcggtgccgggcatcatgaaggccaagcgcaagcagatcgcacggctgtccccggccgacctgggggtcgacgtcgcacccaagacggccgtcacgtcggtctaccaggccgagcagaaccggctcaacaagatgatcgccggcacgcctgaggagcaggcccgggagctggtccgcctgctccgcaacgaagccaaggttgtatag

SEQ ID NO: 74840 - protein, 251 aa, Symbiobacterium thermophilum IAM 14863
MEILVLLKQTFDTEAKVTVKDGRVVDDDVTLVINPYDEYAVEEALKIREAVGGTVTVLSVGPARVDEALRRALAMGADEAVAIEPPADADEYVTASLLAAWAKDRKFDLILAGNVSVDTGAGQTALRVAEALGLPHVAAALKIEIAGNTATVHRDAEGDTEIVTVPLPALITAQQGLNEPRYPSVPGIMKAKRKQIARLSPADLGVDVAPKTAVTSVYQAEQNRLNKMIAGTPEEQARELVRLLRNEAKVV

SEQ ID NO: 74841 - DNA, 750 bp, Legionella pneumophila subsp. pneumophila str. Philadelphia 1
  CDS (1)..(750): transl_table=11
atgaaaatactcgtggctgtaaaacgtgtgattgacccttatgtcaaaattcgagtgaaatcggataattcaggagttgaaactcaaaatatcaaaatggcgatgaatccatttgatgaaatagccattgaagaggcattgcgtttgcgagaaaaaaattgggcaacggaggttattgctgtaagcattggttcggatagctctcaggaaactttaaggcacgctttagctttgggtgcagataaggccattctggttcgaacagaaaaatcattcgagagccttaatatagccaagatattaaatagtatcgtagctaatgaaaaaccggatttggttttgatgggcaaacaatcgatagatggtgacaataaccaaacccctcaaatgttggctgcattattgaattggccacaggctaccaatgcgtcgaagatcattcccgataataataatcttgaagtggtgagagaaattgatggtggtttggaaacactcaaggtacagctgcctgcagtaatcagtaccgatcttcgtttaaatgagcccagatatgccagcttgccgaatattatgaaggccaaacgaaagcctcttgatatcattgatctggattcgcttggcttatctcttaaacaacacgttgaaatattaaaggttaatgccccggcaaccagaagtgctggtgtcatacttgattctgtggctgcattgttggataaattacaacatgaagccaaagtgctttaa

SEQ ID NO: 74842 - protein, 249 aa, Legionella pneumophila subsp. pneumophila str. Philadelphia 1
MKILVAVKRVIDPYVKIRVKSDNSGVETQNIKMAMNPFDEIAIEEALRLREKNWATEVIAVSIGSDSSQETLRHALALGADKAILVRTEKSFESLNIAKILNSIVANEKPDLVLMGKQSIDGDNNQTPQMLAALLNWPQATNASKIIPDNNNLEVVREIDGGLETLKVQLPAVISTDLRLNEPRYASLPNIMKAKRKPLDIIDLDSLGLSLKQHVEILKVNAPATRSAGVILDSVAALLDKLQHEAKVL

SEQ ID NO: 74843 - DNA, 750 bp, Azoarcus sp. EbN1
  CDS (1)..(750): transl_table=11
ttgaagatcctcgtacccgttaagcgcgtggtcgattacaacgtcaaggtgcgtgtcaagagcgacggcaccggcgtggatatcgccaacgtgaagatgtcgatgaatccgttcgacgagattgcaatcgaagaagcggtgcggctgaaggaagccggtattgcgaccgaagtggtggcggtgagctgcggcgtcgccgcgtgccaggagacgctgcgcgcggcgatggcgatcggcgcggaccgcggcatcctcgtcgagaccgacgtcgaactgcagccgctcgccgtcgcgaagctcctgaaagcgctgtgcgacaaggaagctccgcaggtggtgatttgcggcaagcaggcgatcgacgacgattcgaaccagaccggtcagatgctggccgcgttgatgagctggccgcaagccactttcgcgtcgaagctcgtcattgccggcggcgctgcgaccgtcacgcgcgagatcgacggcggcctcgaaaccctcgaaatcaagctgccggcagtcgtcacgaccgatctgcgcctgaacgagccgcgctacgcgacgctgccgaacatcatgaaagcgaagaaaaagccgctcgagacggtcaagcccgccgacctcggcgtcgatgtcgcaccgcgcctggcgacgctgaaagtcgtcgaacccgcgaagcgcagcgccggcgtacgcgttgccgacgttgcgcagctcgtcgacaagctcaagaacgaagcgaaggtgatctga

SEQ ID NO: 74844 - protein, 249 aa, Azoarcus sp. EbN1
MKILVPVKRVVDYNVKVRVKSDGTGVDIANVKMSMNPFDEIAIEEAVRLKEAGIATEVVAVSCGVAACQETLRAAMAIGADRGILVETDVELQPLAVAKLLKALCDKEAPQVVICGKQAIDDDSNQTGQMLAALMSWPQATFASKLVIAGGAATVTREIDGGLETLEIKLPAVVTTDLRLNEPRYATLPNIMKAKKKPLETVKPADLGVDVAPRLATLKVVEPAKRSAGVRVADVAQLVDKLKNEAKVI

SEQ ID NO: 74845 - DNA, 750 bp, Pseudomonas syringae pv. syringae B728a
  CDS (1)..(750): transl_table=11
atgaaggttcttgtagctgtcaaacgagtggtcgactacaacgtcaaggttcgcgtcaaggcggacaactccggcgtcgatcttgccaacgtcaaaatgtccatgaacccgttctgcgaaatcgccgttgaagaggcggttcgtcttaaagagaagggcgtagcaagcgaaatcgtcgtcgtcaccatcggcccgaccaccgctcaggaacaactgcgtaccgccctggcactgggtgccgaccgcgccgtgctggtcgagtccgccgaggagctgacttctctggccgtggccaagctgctcaaggccgtggtcgacaaggagcagccgcaactggtgatccttggcaaacaggccatcgacagtgataacaaccagaccggtcagatgctggctgcgttgagcggctacccgcagggtacgttcgcatccagggttgaagtgaccggtgacaaggttgccgtgacccgtgaaatcgacggcggcctgcaaaccgtttccctgagcctgccagccatcgtgaccacggacctgcgtctgaacgagccacgctacgcttcgctgcccaatatcatgaaggccaagaaaaagccgcttgaagtgctgaccccggatgcactgggcgtttccacggcctcgaccaacaagaccctcaaggtcgaagcgccggctgcacgcagcgccggcatcaaggtcaagtcggtggctgaactggtcgagaaactgaaaaacgaagcgaaggtaatctaa

SEQ ID NO: 74846 - protein, 249 aa, Pseudomonas syringae pv. syringae B728a
MKVLVAVKRVVDYNVKVRVKADNSGVDLANVKMSMNPFCEIAVEEAVRLKEKGVASEIVVVTIGPTTAQEQLRTALALGADRAVLVESAEELTSLAVAKLLKAVVDKEQPQLVILGKQAIDSDNNQTGQMLAALSGYPQGTFASRVEVTGDKVAVTREIDGGLQTVSLSLPAIVTTDLRLNEPRYASLPNIMKAKKKPLEVLTPDALGVSTASTNKTLKVEAPAARSAGIKVKSVAELVEKLKNEAKVI

SEQ ID NO: 74847 - DNA, 750 bp, Pseudomonas syringae pv. syringae B728a
  CDS (1)..(750): transl_table=11
atgaaaatgctggtagctgtgaaacgagtggtcgactacaacgtcaaggttcgcgtcaaggcggacaattccggcgtagacctcgccaacgtcaagatgtcgatgaacccgttctgcgaaatcgcagtggaagaagccgtacgcctgaaagaaaaaggcgttgcgactgaaatcgtcgtcgtctccatcggcccgtccaccgctcaggaacagctgcgtaccgcactggctctgggtgccgaccgcgccatcctcgtcgaatccgctgaagacctgacttccctggccgtggccaagctgctcaaggccgtggtcgacaaggaacagcctcagctggtgatcctgggcaaacaggccatcgacagcgacaacaaccagaccggccagatgctcgctgcactgagcggctacggtcagggcactttcgcctcgaaagtcgaagtttccggcgacagcgttgccgtgacccgcgaaatcgacggcggcgcgcagactgtctccctgaagttgccagcgatcgtcaccaccgacctgcgtttgaacgagccgcgctatgcgtccctgccaaacatcatgaaagccaagaagaagcctctcgagacgctgactccggacgctttgggcgtttccaccgcctccaccaacaagaccctgaaagtcgaagcgccggctgcacgcagcgcgggcatcaaggtcaagtcggtggctgaactggtcgagaaactgaaaaacgaagcgaaggtaatctaa

SEQ ID NO: 74848 - protein, 249 aa, Pseudomonas syringae pv. syringae B728a
MKMLVAVKRVVDYNVKVRVKADNSGVDLANVKMSMNPFCEIAVEEAVRLKEKGVATEIVVVSIGPSTAQEQLRTALALGADRAILVESAEDLTSLAVAKLLKAVVDKEQPQLVILGKQAIDSDNNQTGQMLAALSGYGQGTFASKVEVSGDSVAVTREIDGGAQTVSLKLPAIVTTDLRLNEPRYASLPNIMKAKKKPLETLTPDALGVSTASTNKTLKVEAPAARSAGIKVKSVAELVEKLKNEAKVI

SEQ ID NO: 74849 - DNA, 750 bp, Pseudomonas fluorescens Pf-5
  CDS (1)..(750): transl_table=11
atgaaggttcttgtagctgtcaaacgagtggtcgactataacgtcaaggttcgcgtcaaaacggacaactccggcgtcgacctcgccaacgtcaagatgtcgatgaaccctttctgcgaaatcgcagtggaagaagccgtacgcctgaaagagaaaggtgtagcgactgaaatcgtcgtcgtctccatcggtcctgctactgctcaagagcaactgcgtaccgccctggcactgggtgccgatcgcgcgatcctcgtcgagtccgctgaagagttgaactccctggccgtggccaagctgctcaaggccgtggtcgacaaggaacagccacagctggtgatcctcggcaaacaggccatcgatagcgacaacaaccagaccggccagatgctggcagccctgagcggctacgctcaaggcaccttcgcctccaaggtcgaagtgtccggcgacaaggtcaacgtcacccgtgaaatcgacggcggcctgcagaccgttgcgctgaacctgccagccatcgtcaccaccgacctgcgtttgaacgagccgcgctacgcgtctctgccaaacatcatgaaagccaagaagaagccgcttgaaacgctgactcctgatgctttgggcgtttccaccgcctccaccaacaagaccctgaaagtcgaagcgccggctgcacgcagcgcgggcatcaaggtcaagtcggtggctgaactggtcgagaaactgaaaaacgaagcgaaggtaatctga

SEQ ID NO: 74850 - protein, 249 aa, Pseudomonas fluorescens Pf-5
MKVLVAVKRVVDYNVKVRVKTDNSGVDLANVKMSMNPFCEIAVEEAVRLKEKGVATEIVVVSIGPATAQEQLRTALALGADRAILVESAEELNSLAVAKLLKAVVDKEQPQLVILGKQAIDSDNNQTGQMLAALSGYAQGTFASKVEVSGDKVNVTREIDGGLQTVALNLPAIVTTDLRLNEPRYASLPNIMKAKKKPLETLTPDALGVSTASTNKTLKVEAPAARSAGIKVKSVAELVEKLKNEAKVI

SEQ ID NO: 74851 - DNA, 753 bp, Colwellia psychrerythraea 34H
  CDS (1)..(753): transl_table=11
atgaaagtattagttccgataaaacgtgttattgactataacgtcaaagttcgggtaaaacccgatcaatcaaatgtagatcttgccaatacaaaaatggctataaaccccttttgtgaaattgccgttgaagaagctgttcgtttaaaagaagcgggtatagcaacagaagtaattgcaatttctgtcggtaataaatcttgtcaagagcagttgcgtactgcattagctttaggtgcagatcgcgccatacaaattgacactgatgaaagcttagacgcactaaatattgctaaattattacaaaaagttgttgaagaagaacaaccgcaacttataattttaggtaagcaatctattgatagtgataataaccaaacaggtcaaatgcttgctgctttaacaggtatgccacaaggcacatttgcttcagttgtaaaagttgaaggcgaaaaagttaatgttacccgtgaagtagatggcggtttacaaactgttgcgcttaacttacctgctattgtgaccacagatttacgtttaaatgaacctcgttacgcttcattacctaatattatgaaagctaaacgtaaaccattagcagtgaaacctgcagcagattttggcattgatttaacagctcgtactaaattattaaaagttactcctcctgcacagcgtcaagcaggtattgtagtagaaagcattgatgaattagttgaaaaattaaaaaatgaagccaaggtgatctcatga

SEQ ID NO: 74852 - protein, 250 aa, Colwellia psychrerythraea 34H
MKVLVPIKRVIDYNVKVRVKPDQSNVDLANTKMAINPFCEIAVEEAVRLKEAGIATEVIAISVGNKSCQEQLRTALALGADRAIQIDTDESLDALNIAKLLQKVVEEEQPQLIILGKQSIDSDNNQTGQMLAALTGMPQGTFASVVKVEGEKVNVTREVDGGLQTVALNLPAIVTTDLRLNEPRYASLPNIMKAKRKPLAVKPAADFGIDLTARTKLLKVTPPAQRQAGIVVESIDELVEKLKNEAKVIS

SEQ ID NO: 74853 - DNA, 750 bp, Pseudomonas syringae pv. phaseolicola 1448A
  CDS (1)..(750): transl_table=11
atgaaggttcttgtagctgtcaaacgagtggtcgactacaacgtcaaggttcgcgtcaaggcggacaactccggcgtcgatcttgccaacgtcaaaatgtccatgaacccgttctgcgaaatcgctgttgaagaagcggtgcgcttgaaagagaagggcgtggcaacggaaatcgtggtcgtcaccattggtcctaccactgctcaggagcaactgcgtactgcgctggcgctgggtgtagaccgtgccgtgctggtcgagtctgccgaagaactgacctctctggccgtggccaagctgctcaaggcagtggtcgacaaggagcagccacaactggttatccttggtaaacaggctatcgatagtgacaacaaccagaccggccagatgctggccgcactgagcggctacccgcaaggtacgttcgcctcgaaggttgaagtctccggtgacaaggttgccgtgacccgtgagatcgacggcggtctgcagactgtttccctgagcctgccagccatcgtgaccacggacctgcgtctgaacgagccacgctacgcttcgctgcctaacatcatgaaagccaagaagaagccgcttgaagtgctgaccccggatgcactgggcgtttccacggcctcgaccaacaagaccctcaaggttgaagcaccggctgcacgcagcgcgggcatcaaagtcaaatcggtggctgaactggtcgagaaactgaaaaacgaagcgaaggtaatctaa

SEQ ID NO: 74854 - protein, 249 aa, Pseudomonas syringae pv. phaseolicola 1448A
MKVLVAVKRVVDYNVKVRVKADNSGVDLANVKMSMNPFCEIAVEEAVRLKEKGVATEIVVVTIGPTTAQEQLRTALALGVDRAVLVESAEELTSLAVAKLLKAVVDKEQPQLVILGKQAIDSDNNQTGQMLAALSGYPQGTFASKVEVSGDKVAVTREIDGGLQTVSLSLPAIVTTDLRLNEPRYASLPNIMKAKKKPLEVLTPDALGVSTASTNKTLKVEAPAARSAGIKVKSVAELVEKLKNEAKVI

SEQ ID NO: 74855 - DNA, 750 bp, Dechloromonas aromatica RCB
  CDS (1)..(750): transl_table=11
gtgaagattctggttccggtgaaacgggtagtcgattacaacgtcaaggttcgcgtcaaggcggatggttcgggtgttgatctggccaacgtcaagatgagcatgaacccgtttgacgaaattgccattgaagaagcggtacgtctgaaggaagccggtgtggcgaccgaggtgatcgccgtctcctgtggcgttgctgcctgccaggaaacgctgcgtacggccatggcgatcggtgccgaccgcggcatcctggtcgaaaccgacgtcgaactccagccgctggccgtcgccaagctgctcaaggcactctgcgacaaggaacagccacaactcgtcatttgcggtaagcaggccatcgacgacgatgccaaccagaccggccagatgcttgccgccctgcaaaactggccacaagccacgtttgcctccaaggtggtcgtcgctgatggcaaggctacagtgacccgcgaaatcgacggcggcctcgagaccctggcgatcagcctgccggccgtggtttctaccgatctgcgcctgaacgaaccgcgctatgccacgctgccgaacatcatgaaggccaagaagaagccgctcgataccgtcaagccggccgatctaggcgtcgatgttgcgccacgcctgaccacgctcaaggtttccgaaccagccaagcgtagcgctggcgtcaaggtggccgatgtggccgaactcgtgaacaagcttcgcaatgaagcgaaagtgatctaa

SEQ ID NO: 74856 - protein, 249 aa, Dechloromonas aromatica RCB
MKILVPVKRVVDYNVKVRVKADGSGVDLANVKMSMNPFDEIAIEEAVRLKEAGVATEVIAVSCGVAACQETLRTAMAIGADRGILVETDVELQPLAVAKLLKALCDKEQPQLVICGKQAIDDDANQTGQMLAALQNWPQATFASKVVVADGKATVTREIDGGLETLAISLPAVVSTDLRLNEPRYATLPNIMKAKKKPLDTVKPADLGVDVAPRLTTLKVSEPAKRSAGVKVADVAELVNKLRNEAKVI

SEQ ID NO: 74857 - DNA, 750 bp, Ralstonia eutropha JMP134
  CDS (1)..(750): transl_table=11
atgaaagtactcgtcgcagtcaagcgggtggtggattacaacgtgaaggtgcgtgtcaaggccgacggcaccggcgtggatctggccaacgtcaagatgagcatgaaccccttcgacgaaatcgccgtcgaagaggccgtccgcctgaaggaagcaggtgttgtgaccgaagtcatcgccgtgtcgtgcggcgtggcccaatgccaggaaaccctgcgcacggccatggccatcggtgccgaccgtggcatcctggtggagtcgaacgaagacctgcagccgctggccgtggccaagctgctcaaggcgctgatcgacaaggaacagccgcaactggtgatcctgggcaagcaggccatcgatgacgactcgaaccagaccggccagatggtggccgcgctggcaggcctgccgcaggcaaccttcgcctcgaaggtggtcgtggctgatggcaaggcatcggtgacccgtgaagtcgacggtggcctggaaaccctgtcgctgaagctgccggccgtggtgacgaccgacctgcgcttgaacgagccgcgctacgtcacgctgccgaacatcatgaaggccaagaagaagcagctcgataccgtcaagccggaagacctcggcgtggacgtcaagccgcgcctgtcgaccgtgaaggtggtcgagcctgccaagcgcagcgcaggtgtgatggtgccggacgttgcgacgctggtgcagaagctgaagaacgaagccaaggttatctga

SEQ ID NO: 74858 - protein, 249 aa, Ralstonia eutropha JMP134
MKVLVAVKRVVDYNVKVRVKADGTGVDLANVKMSMNPFDEIAVEEAVRLKEAGVVTEVIAVSCGVAQCQETLRTAMAIGADRGILVESNEDLQPLAVAKLLKALIDKEQPQLVILGKQAIDDDSNQTGQMVAALAGLPQATFASKVVVADGKASVTREVDGGLETLSLKLPAVVTTDLRLNEPRYVTLPNIMKAKKKQLDTVKPEDLGVDVKPRLSTVKVVEPAKRSAGVMVPDVATLVQKLKNEAKVI

SEQ ID NO: 74859 - DNA, 762 bp, Rhodobacter sphaeroides 2.4.1
  CDS (1)..(762): transl_table=11
atgaaggttctggtgcctgtcaagcgcgtgatcgactacaacgtgaaggttcgcgtgaaggcggacgggagcggggtcgatcttgcgaacgtgaagatgtcgatgaacccgttcgacgaaatcgcggtcgaagcggcgatccgtctgcgcgaggccggcacggcgaccgaggtggtggtggtctcgatcggcgtgaagcaggcgcaggagacgctgcgcacggcgctcgccatgggggcggaccgcgcgatcctcgtcgaggccgcctcggacgtgcatcaggacatcgagccgctggcggtggcgaagatcctgaagggcgtggtcgaggccgaacagccgggcctcgtgatctgcggcaagcaggccatcgacaatgacatgaacgccaccgggcagatgctgtcggcgctgctcggctggagccaggcgaccttcgcctcggatctggccatcgagggcgatgcggccgtggtcacccgcgaggtggacggcggcatgcagaccatcaaggtcaagatgccgaccgtggtgacggtggatctgcggatgaacgagccgcgctatgcctcgctgcccaacatcatgaaggccaagaagaagccgctggaagaaaagaccgcggccgatttcggcgtcgacgtgacgccgcggctgtcggtcgtgaagacctccgagccggcgggccgcaaggccggcgtgatggtgggttcggtcgacgagctgatcgcgaaactgaaagacgaagcgggggtgatctga

SEQ ID NO: 74860 - protein, 253 aa, Rhodobacter sphaeroides 2.4.1
MKVLVPVKRVIDYNVKVRVKADGSGVDLANVKMSMNPFDEIAVEAAIRLREAGTATEVVVVSIGVKQAQETLRTALAMGADRAILVEAASDVHQDIEPLAVAKILKGVVEAEQPGLVICGKQAIDNDMNATGQMLSALLGWSQATFASDLAIEGDAAVVTREVDGGMQTIKVKMPTVVTVDLRMNEPRYASLPNIMKAKKKPLEEKTAADFGVDVTPRLSVVKTSEPAGRKAGVMVGSVDELIAKLKDEAGVI

SEQ ID NO: 74861 - DNA, 762 bp, Carboxydothermus hydrogenoformans Z-2901
  CDS (1)..(762): transl_table=11
gtgaaactggtagtccttttaaagcaaacctttgacaccgaagccaagatagtattaaaggacgggaaaattgacgacagcggggtaaccttaatcattaacccctacgacgaatttgcggtagaagaagcactaaggatcaaggaaaaacttgggcagggggaggtagtggtagtatcggcggggagtgatagggctcaggaagcattacggcaggccttagccatgggagccgaccgggcggtactggtcaaaaccgacggcctgcagttagatgaaatggtggtagccgaagtactggcgaaagtgctgcagcaaatggaatacgaccttattttagccggctggcgggccattgacgacagttccgcccaggtaggggtacgggtagccgagattttaggcttaccccaaattaaccttgtcaccaaattagaagtaggggaaggcaagattaccggccaccgggaaatcgaaggtggtaccgaagtggtagaagtgcctctaccggcccttgttaccgcccagcgggggttaaatgagccgcggtatccttccatgaaaggcatcatgcaggccaagaaaaaagagttaaaggtcataaacgccgcagacctgggggtaaatgccacgcccaaggtagagataaaagaaatctttcttcccaaaggcaagcaggcggggaaaatcttcaccgatgagccggcggtagcggtagccaagttagtcaaagccttacgggaagaagccaaggtaatatag

SEQ ID NO: 74862 - protein, 253 aa, Carboxydothermus hydrogenoformans Z-2901
MKLVVLLKQTFDTEAKIVLKDGKIDDSGVTLIINPYDEFAVEEALRIKEKLGQGEVVVVSAGSDRAQEALRQALAMGADRAVLVKTDGLQLDEMVVAEVLAKVLQQMEYDLILAGWRAIDDSSAQVGVRVAEILGLPQINLVTKLEVGEGKITGHREIEGGTEVVEVPLPALVTAQRGLNEPRYPSMKGIMQAKKKELKVINAADLGVNATPKVEIKEIFLPKGKQAGKIFTDEPAVAVAKLVKALREEAKVI

SEQ ID NO: 74863 - DNA, 750 bp, Burkholderia sp. 383
  CDS (1)..(750): transl_table=11
atgaaaatcctggtgccagtgaaaagagtggtcgattacaacgtgaaggtccgcgtgaagtcggacaacacgggtgtcgacatcgcgaacgtgaagatgtcgatgaacccgttcgacgaaatcgcggttgaagaagccgtgcgcctgaaggaagccggtgtggcgactgaagtgatcgccgtgtcggtgggcgtcgcgcaagcgcaggaaacgctgcgtacggcgctggcgatcggagcggatcgcgcgatcctcgtcgagtcgaacgatggcgtcgagccgctgggcgtcgcgaagatcctgaaggcgctggtcgacaaggaacagccgcaactggtgatcctcggcaagcaggccatcgacgacgattcgaaccagacgggccagatgctggccgcgctggcaggcctgccgcaagcgacgttcgcatcgaaggtcacggtggccgacggcaaggcaacggtcgcacgcgaagtcgacggcggcgcggaaacgctgtcgctgtcgctgccggcggtgatcacgaccgacctgcgcctgaacgagccgcgttacgtgacgctgccgaacatcatgaaggcgaagaagaagccgcttgaaaccgtgaagccggaagacctgggcgtggacgtcgcgccgcgtctgaagacgctgaaggtggtcgagccgccgaagcgcgcagccggcgtgaaggtgccggacgtgaagacgctggtcgagaagctgaagaccgaagccaaggtgctgtaa

SEQ ID NO: 74864 - protein, 249 aa, Burkholderia sp. 383
MKILVPVKRVVDYNVKVRVKSDNTGVDIANVKMSMNPFDEIAVEEAVRLKEAGVATEVIAVSVGVAQAQETLRTALAIGADRAILVESNDGVEPLGVAKILKALVDKEQPQLVILGKQAIDDDSNQTGQMLAALAGLPQATFASKVTVADGKATVAREVDGGAETLSLSLPAVITTDLRLNEPRYVTLPNIMKAKKKPLETVKPEDLGVDVAPRLKTLKVVEPPKRAAGVKVPDVKTLVEKLKTEAKVL

SEQ ID NO: 74865 - DNA, 750 bp, Rhodospirillum rubrum ATCC 11170
  CDS (1)..(750): transl_table=11
atgaaagtactggtcgccgtgaagcgggtcgtcgactataacgtgaaaatccgcgttaaagcggataacacgggggtcgaactggctaacgtgaagatgtcgatgaaccccttcgatgaaatcgccgtcgaggaagccatccggctgaaggaagcgggcaccgtgaccgaggtcgtggccgtctcgctgggggtggcgcaatgccaggaaaccttgcggaccgccctggcgatgggcgccgatcgcggtattctggtgcaaagcgatgtcgagctgcagccgctggccgtcgccaagatgctaaaggccctggtcgaaaaggaggctcccgatctgatccttctgggcaagcaggcgattgacgacgacgccaaccaaaccggtcagatgctggccgccctgctcggctggtcgcagggaaccttcctgtccaagctgaccctggccgaaggcaaggccacggtgacccgcgaagtcgacggcggccttgaaaccctgtcgctgaccctgccctcggtgctgaccgccgatctgcggctgaacacgccgcgctatgccagcctgcccaatatcatgaaggccaagaaaaagccgatcgagaccctgtctccggccgatctgggcgtcgatccggccccccggctgaccacgctgaaggtggaagagcccgccagccgcaaggccggcgtccgcgtgcccgacgtggccacattggtcgaaaagctcaagaccgaggcgaaggtgatctga

SEQ ID NO: 74866 - protein, 249 aa, Rhodospirillum rubrum ATCC 11170
MKVLVAVKRVVDYNVKIRVKADNTGVELANVKMSMNPFDEIAVEEAIRLKEAGTVTEVVAVSLGVAQCQETLRTALAMGADRGILVQSDVELQPLAVAKMLKALVEKEAPDLILLGKQAIDDDANQTGQMLAALLGWSQGTFLSKLTLAEGKATVTREVDGGLETLSLTLPSVLTADLRLNTPRYASLPNIMKAKKKPIETLSPADLGVDPAPRLTTLKVEEPASRKAGVRVPDVATLVEKLKTEAKVI

SEQ ID NO: 74867 - DNA, 771 bp, Syntrophus aciditrophicus SB
  CDS (1)..(771): transl_table=11
gtgaatattgttgcgtgtgtaaagcaggttccggatacggaagcccagatcaaggtaaagccggacggttcaggaatcgatgaatccggcatcaagtgggtcatgaacccctatgatgaatacggcgtggaagaagccttaaaactgaaggaaaagctcggtggagacgtcacgatcgtctgcgcaggtccggcaagagcgatggagacaatccgcactgccctggccatgggcgccgacaaaggcattcacatcgacgatcccgctcttgaaggcgcggatgcctatgcaacggcaacggcattggccgcggcgatcaaagggatcccctatgacgtcattttctgcggacagagagccatcgatgacgactccggacaggttggagccattctggcggaacttctcggccttccccagttgaccgtcgtcaccaaggaagaaaccgatggaaagaccgtcaaggtcgtccgtccggtggaaggcgcggcgtttgtcattgaaagttcactgccggccgtggtcacggcacagaaagggttgaacgaaccccgttatgcctccctgcctggaatcatgaaagccaagaagaagcctgttgacgttaaaaacctggctgccctgggtgtcagtgttgaatcgaagtctaaagtcgccaaaatggtaccgcctccggccagacctcctggaaagattatcgcgggcgacgatccggcggttaaggctgcggaactggccaaactgctgcgagaagaggcgaaggtcatctaa

SEQ ID NO: 74868 - protein, 256 aa, Syntrophus aciditrophicus SB
MNIVACVKQVPDTEAQIKVKPDGSGIDESGIKWVMNPYDEYGVEEALKLKEKLGGDVTIVCAGPARAMETIRTALAMGADKGIHIDDPALEGADAYATATALAAAIKGIPYDVIFCGQRAIDDDSGQVGAILAELLGLPQLTVVTKEETDGKTVKVVRPVEGAAFVIESSLPAVVTAQKGLNEPRYASLPGIMKAKKKPVDVKNLAALGVSVESKSKVAKMVPPPARPPGKIIAGDDPAVKAAELAKLLREEAKVI

SEQ ID NO: 74869 - DNA, 753 bp, Novosphingobium aromaticivorans DSM 12444
  CDS (1)..(753): transl_table=11
atgaaggccctggtctgcgtgaagcgcgtgattgactacaacgttaagcctcgagtgaaggcggatggttcgggtgttgatcttgcgaacgtgaagatgagcatgaacccgtttgacgagatcgcggtggaagaggccattcgcctgaaggagaagggcgttgtgaccgagatcgtggcggtttcggttgggcctgcgaaggcgcaggagacgctgcgcacggcgcttgcgatgggggcggaccgtgcggttctggtgcaggtggacgacggggtcgaggtcgagccgctggctgtggcgaagatcgtcaagggcattgccgacgaggagcagcctggcctgatcatcaccggcaagcaggcgatcgacgacgattcgaaccaggtcggccagatggttgcggcgctgctgggccgtccgcaggggacctttgccaacgaggtttcggtcgaaggcgacgcggtcgtggtcaagcgcgagatcgacggcggcttgcagacggtgcgcctggcgctgcccgcggtggtcaccaccgacctgcgcctgaacgagccgcgctatgcctcgctgccgaacatcatgaaggccaagtccaagccgctcgccaacaagacccccgccgattacggcgtggacgtcgcggcgcgcctcaagacgctgaaggtctccgaaccgccggtccgttcggccgggatcaaggtggccgacgtcgacgcgctcgtcgccaagctcaaggaaatgggagtcgcctga

SEQ ID NO: 74870 - protein, 250 aa, Novosphingobium aromaticivorans DSM 12444
MKALVCVKRVIDYNVKPRVKADGSGVDLANVKMSMNPFDEIAVEEAIRLKEKGVVTEIVAVSVGPAKAQETLRTALAMGADRAVLVQVDDGVEVEPLAVAKIVKGIADEEQPGLIITGKQAIDDDSNQVGQMVAALLGRPQGTFANEVSVEGDAVVVKREIDGGLQTVRLALPAVVTTDLRLNEPRYASLPNIMKAKSKPLANKTPADYGVDVAARLKTLKVSEPPVRSAGIKVADVDALVAKLKEMGVA

SEQ ID NO: 74871 - DNA, 783 bp, Desulfitobacterium hafniense Y51
  CDS (1)..(783): transl_table=11
atgaacatattggtttgtctgaaacaaacatttgacaccgaagcgaagattgtgatcaacccacagggtcaaatcgactcgaccggggtaaatctcattatgaatccctatgatgagtttgctgtggaagagggaatccgcctcaaagagaaattcggcggcgaagtaaccgtattgagcatgggtggccccaaagtcagtgaagtgctgcgcacagccctggctatgggagcggataaagcggttgccattcaggatcctgctttagagggcagtgacgaatttgttacggcggtcgttctcgctaaagctgttcagaacattccctatgatatcattctttccggacggattgccattgatgacggctccagccaggtgaccgcccgtctggcagagctgttgggcgtaccgtcggtttcaactgtctcagagttgaaggtggaaggcatgaccgccacagtgtcccgtgacatcgacgggggtacggaagttgtcgaagtgcccttgccggctgtgatcaccgcccaaaaagggttgaacgagccccgctatccttccgtggccggaattatgaaagccaagaaaaaggaattgaagactttgaccttggctgatcttggcctgacggcagctgaagccggcacccaaggggcgaagatgaaggtggtcaatatgagcctgcctcctgcccgccaagctggccgcctgattcagggagaacctcctcaggctgttgccgaattggtcaatgccttgatgaatgaagcaaaagtaatttag

SEQ ID NO: 74872 - protein, 260 aa, Desulfitobacterium hafniense Y51
MNILVCLKQTFDTEAKIVINPQGQIDSTGVNLIMNPYDEFAVEEGIRLKEKFGGEVTVLSMGGPKVSEVLRTALAMGADKAVAIQDPALEGSDEFVTAVVLAKAVQNIPYDIILSGRIAIDDGSSQVTARLAELLGVPSVSTVSELKVEGMTATVSRDIDGGTEVVEVPLPAVITAQKGLNEPRYPSVAGIMKAKKKELKTLTLADLGLTAAEAGTQGAKMKVVNMSLPPARQAGRLIQGEPPQAVAELVNALMNEAKVI

SEQ ID NO: 74873 - DNA, 750 bp, Saccharophagus degradans 2-40
  CDS (1)..(750): transl_table=11
atgaagattctcgtgccaataaaacgtgttgtggattacaacgtaaaggtgagacccaatggtgatggttctaacgtagacctcgcaaatgtaaaaatgtccatgaatccattttgcgaaattgctgtagaagaagccgtaagactcaaagaagccggcaaggcaacggaagtaattgtggtaagtattggcccagctaaagcgcaagagcaaatacgcgctgcaatggccattggcgccgaccgaggtattctcatcgaaacagacgagtcgcttgagccgctagctattgcgaaatgtttaaagaatgtggtcgaaaaagaatcacccgagatggtaatcctcggcaaacaatctatcgatggcgataacaaccaaacaggacaaatgctagccgcgttatgtaactgggggcagggcacctttgcttcagaggtggtgcttgcagatggaaaactgagcgtgacacgcgaaatagatggcggcttgcaaacagtacagcttgctttgccagcagttgttacaaccgacctacgcttaaacgaacctcgttacgccaagctaccagacattatgaaagcaaagaaaaagccgctagaaaccatagctctggccgacttgggcgtagataccaagcctcgcacacaattattaggtgtaacaccaccgccagagcgcagtggtggcgttaaagtcgccgatgtagatgcgttaatcgataaactaaagaacgaagcgaaggtgatataa

SEQ ID NO: 74874 - protein, 249 aa, Saccharophagus degradans 2-40
MKILVPIKRVVDYNVKVRPNGDGSNVDLANVKMSMNPFCEIAVEEAVRLKEAGKATEVIVVSIGPAKAQEQIRAAMAIGADRGILIETDESLEPLAIAKCLKNVVEKESPEMVILGKQSIDGDNNQTGQMLAALCNWGQGTFASEVVLADGKLSVTREIDGGLQTVQLALPAVVTTDLRLNEPRYAKLPDIMKAKKKPLETIALADLGVDTKPRTQLLGVTPPPERSGGVKVADVDALIDKLKNEAKVI

SEQ ID NO: 74875 - DNA, 747 bp, Methylobacillus flagellatus KT
  CDS (1)..(747): transl_table=11
atgaaagtcttagttgctgtaaagcatgtggtggattacaacatcaagccccgcgtgaagcaggacggctctgatgtcgatatcgccggcgtcaagatgggtatcaacccatttgacgaaattgccgtggaagaagcagtgcgcatgaaggaacgtggcattgtgactgaagtcgttgccgtgaccatcggcaagaccaacagccaggataccttgcgccatgcattggccatgggcgccgacagggtcatcttggtcgagaccgaggccgaattgcagcctttgggtgttgccaagctgctcaaggctgtggtggagcgcgagcagcctcgcctcatcattctcggcaagcaggccattgacgacgaccttggacagaccggccagatgctggctgccttgatcaatgcagggcagggcacttttgcctccgtgctcgaggtcaagggcgatgaaatcgaggtcacgcgcgaaatcgatggtggtactgacgtggtggcgctcaagctgcctgcggtcgtcacgactgatcttcgtctgaacgaacctcgcttcatcaagctgcccgcgatgatgatggcgaagaaaaagccgatcgaaaatatcaaggcagccgatctcggtatcgatattgcgccccgcctcaagcaactcaaagttgcagatcccgagccacgcaagcctggcatcaaggtggcgaacgtggccgaactcgttgaaaaactacgtcttgcggaagtcctgtaa

SEQ ID NO: 74876 - protein, 248 aa, Methylobacillus flagellatus KT
MKVLVAVKHVVDYNIKPRVKQDGSDVDIAGVKMGINPFDEIAVEEAVRMKERGIVTEVVAVTIGKTNSQDTLRHALAMGADRVILVETEAELQPLGVAKLLKAVVEREQPRLIILGKQAIDDDLGQTGQMLAALINAGQGTFASVLEVKGDEIEVTREIDGGTDVVALKLPAVVTTDLRLNEPRFIKLPAMMMAKKKPIENIKAADLGIDIAPRLKQLKVADPEPRKPGIKVANVAELVEKLRLAEVL

SEQ ID NO: 74877 - DNA, 804 bp, Ralstonia metallidurans CH34
  CDS (1)..(804): transl_table=11
atggcgagcgattcaaaaaaattttggactatcagctatcagtggagtgagcgcatgaaagtactcgtcgcagtcaagcgggtggtggactacaacgtcaaggtccgcgtgaagtcggatggcacgggcgtcgacctggccaacgtgaagatgagcatgaacccgttcgacgaaatcgccgtggaagaggccgtgcgcctgaaggaagccggcgtcgtcaccgaggtgattgccgtgtcgtgcggcgtggcgcaatgccaggagaccctgcgtaccgcgatggccatcggcgccgatcgtggcatcctggtcgagtcgaacgaagacctgcagccgctggccgtggccaagctgctcaaggccctgatcgacaaggagcagccgcaactggtgatcctgggcaagcaggccatcgacgatgactcgaaccagaccggccagatggtggccgcgctggccggcatgccgcaagctaccttcgcctcgaaggtcgtgctggctgacggcaaggcatcggtgacccgtgaagtggacggcggtctggagaccgtgtcgatcaagctgccggccgtggtgaccaccgacctgcgcctgaacgagccgcgctacgtcacgctgccgaacatcatgaaggccaagaagaagccgctggaaaccgtcaagccggaagatctcggcgtcgacgtgaagccgcgtctgtcgaccgtgaaggtcgtcgagcccgcgaagcgcagtgctggcgtgatggtcccggatgtggccacgctggtgcagaagctgaagacggaagccaaggttatctga

SEQ ID NO: 74878 - protein, 267 aa, Ralstonia metallidurans CH34
MASDSKKFWTISYQWSERMKVLVAVKRVVDYNVKVRVKSDGTGVDLANVKMSMNPFDEIAVEEAVRLKEAGVVTEVIAVSCGVAQCQETLRTAMAIGADRGILVESNEDLQPLAVAKLLKALIDKEQPQLVILGKQAIDDDSNQTGQMVAALAGMPQATFASKVVLADGKASVTREVDGGLETVSIKLPAVVTTDLRLNEPRYVTLPNIMKAKKKPLETVKPEDLGVDVKPRLSTVKVVEPAKRSAGVMVPDVATLVQKLKTEAKVI

SEQ ID NO: 74879 - DNA, 771 bp, Acidobacteria bacterium Ellin345
  CDS (1)..(771): transl_table=11
gtgaaaatcctggtctgcatgaagcaggtaccgcagaaagatgccccgctgaagctcaatgagtcgggtacctggatccgtgaagatgtttcgtacgaagtcaacgagccagatgcttacgcgctcgaagaggcacttcgtcaaaaggagaaaaacggcggcgaagttgtcgtaatcacctccggtccggcgcgtgcccagcaggtgctgcgcgaagcgctggccaagggtgcggaccgcgccattcacctcgaagacgacaaatttgtcggcctcgacgcctacaacaccgcgcgtgcgatctccgcagcagtcaaggacgagaattttgaccttgtctttactggcctgcaatccgacgactatggctacgcgcagactggcgtgatcctcgcggaacttttgggcgcgccccatgccacgatcatcatgcacatcgagaagaaagatgccggtattcgtgtgaaacgcgaactggaaagcggatacttccagtatgtggacatgccgcttcccgcggtgctgaccatccagtcgggcattaacaagctgcgttatgcgacgctgatcggcatcaagcaggcgaagaacaagccgctgaggaaagtttcgtacgccgaggtcgagagcgcactcggccagaacctgcagaagatcgaaaaactttatattccccagaaaacgaaacagaccgaaaagatcgaaggatcgccggccgaaatcgcgaaaaagctggtggacaagctgaagaacgaaattcgcgttttgtaa

SEQ ID NO: 74880 - protein, 256 aa, Acidobacteria bacterium Ellin345
MKILVCMKQVPQKDAPLKLNESGTWIREDVSYEVNEPDAYALEEALRQKEKNGGEVVVITSGPARAQQVLREALAKGADRAIHLEDDKFVGLDAYNTARAISAAVKDENFDLVFTGLQSDDYGYAQTGVILAELLGAPHATIIMHIEKKDAGIRVKRELESGYFQYVDMPLPAVLTIQSGINKLRYATLIGIKQAKNKPLRKVSYAEVESALGQNLQKIEKLYIPQKTKQTEKIEGSPAEIAKKLVDKLKNEIRVL

SEQ ID NO: 74881 - DNA, 759 bp, Silicibacter sp. TM1040
  CDS (1)..(759): transl_table=11
atgaaggtactcgtgcctgtcaaacgcgtgattgactacaacgttaaagttcgcgtgaaagcggatggcagcggtgtcgatctcgccaacgtcaagatgtcgatgaaccccttcgacgagattgccgtcgaggaggccattcgcctcaaggaagcaggcaaggcggatgaggttgtcgcagtctccatcggcgtcaagcaagctcaggaaaccctgcgcactgctctggccatgggtgccgaccgcgcgatcctcgtggttgccgcagatgatgttcaccaggacatcgagccgctcgcggttgcaaagatcctcgccaaagtggtcgaagaagagcagcccggccttgtgctggcaggcaagcaggcaatcgacaacgacatgaacgccaccggccagatgctttctgctctcctcgggtggagccaagcgaccttcgcgtctgaggtggacatcgatggcgacagcgccaaagtgacccgcgaagtcgacggcggcctgcagaccatctcggtcaagatgccgaccatcgtgaccgtggacttgcgcctcaacgagccgcgctatgcgtcgctgccgaacatcatgaaggcaaagaaaaagccgctcgacgagaagactgccgctgactacggcgttgacgtcacaccgcgtctcaccgtggtggagaccaaggaacccgaagcccgctccgcaggtgtcatcgtgggatccgtggacgagctggttgcgaaactcaaagaagcgggagctgtgtaa

SEQ ID NO: 74882 - protein, 252 aa, Silicibacter sp. TM1040
MKVLVPVKRVIDYNVKVRVKADGSGVDLANVKMSMNPFDEIAVEEAIRLKEAGKADEVVAVSIGVKQAQETLRTALAMGADRAILVVAADDVHQDIEPLAVAKILAKVVEEEQPGLVLAGKQAIDNDMNATGQMLSALLGWSQATFASEVDIDGDSAKVTREVDGGLQTISVKMPTIVTVDLRLNEPRYASLPNIMKAKKKPLDEKTAADYGVDVTPRLTVVETKEPEARSAGVIVGSVDELVAKLKEAGAV

SEQ ID NO: 74883 - DNA, 747 bp, Hyphomonas neptunium ATCC 15444
  CDS (1)..(747): transl_table=11
atgaaggtcctcgtgcccgtcaagcgcgtcatcgattataacgtgaaggtccgcgtcaagccggaccagaccggcgtcgatctcgccaacgtcaagatgtccatgaaccccttcgacgaaatctccgtcgaggaggccgttcgcctgaaagaagcaggcgttgccaccgagatcgtggttgtctccatcgggccgcaacaggcgcaggaaacgatccgcaccgccctcgccatgggtgccgatcgcggcatcctgatcaagactgacgcgacggttgagccgctggcggttgccaagctgctcgccaaggtcgccgaagaagaaaagcctgacctggttctggtcggcaagcaggcgattgacgacgattccaaccagaccggccagatgctggccgcgctgctggattggccgcagggcaccttcgcgttcaaggtcgagaaagacggcgacgcgctgaaggtgacccgcgaagtcgatggcggtctgcagactgtgaaacttgccctgccggcggttgtcactgttgacctgcgcctcaacgagccgcgctacgcttcgctgcccaacatcatgaaggcgaagaagaagccgatcgacgagaaagcgcctgacgcttacggtgttgacatttcgccgcgcctcacggttgtgaaggtcaccgagccgccgacacgcagcgccggtatcaaggttgaagacgtcgcgacgctggtttcgaaactcaagactgcgggagctgtttaa

SEQ ID NO: 74884 - protein, 248 aa, Hyphomonas neptunium ATCC 15444
MKVLVPVKRVIDYNVKVRVKPDQTGVDLANVKMSMNPFDEISVEEAVRLKEAGVATEIVVVSIGPQQAQETIRTALAMGADRGILIKTDATVEPLAVAKLLAKVAEEEKPDLVLVGKQAIDDDSNQTGQMLAALLDWPQGTFAFKVEKDGDALKVTREVDGGLQTVKLALPAVVTVDLRLNEPRYASLPNIMKAKKKPIDEKAPDAYGVDISPRLTVVKVTEPPTRSAGIKVEDVATLVSKLKTAGAV

SEQ ID NO: 74885 - DNA, 750 bp, Rhizobium leguminosarum bv. viciae 3841
  CDS (1)..(750): transl_table=11
atgaagatactcgtcccagtcaaacgggttgtcgactacaacgtgaagatccgggtgaagccggacggcacgggtgtcgagcttgccaatgtgaagatgtcgatgaacccgttcgacgagatctcggtggaagaggcgctgcggctgaaggaggccggcaaggccgaggaagtggtggtcgtctcgatcggccctgccaaggccgaagagacgctgcggacggcacttgccatgggcgccgaccgggcgatcctggtcgagaccgacgatcaaatcgagccgctcaccgtcgccaagatcttgaaggctgtcgccgatgccgaacagccggggctgatcatcgtcggcaagcaggcgatcgacgacgacagcaaccagaccggccagatgctggcggcattgatgggaattgcccaggcgaccttcgcctcgaagatcgagatcggtgacggcaaggctcaggtcacccgcgaagtcgatggcggtctgcagacgatcgagatcaagctgccggcggtcgtcaccaccgacctgcgcttgaacgaaccgcgttatgcctcgctgccgaatatcatgaaggcgaagaagaagccgctcgacaagaagagccctgatgatttcggcatctcgaccacgccacgcctcaaggtgttgaagaccgaggagccgtccggccgcaaggccggcgtcaaggtcaagtcggtcgccgaactcatcgacaagctcaaaaacgaagccggcgtgctgtaa

SEQ ID NO: 74886 - protein, 249 aa, Rhizobium leguminosarum bv. viciae 3841
MKILVPVKRVVDYNVKIRVKPDGTGVELANVKMSMNPFDEISVEEALRLKEAGKAEEVVVVSIGPAKAEETLRTALAMGADRAILVETDDQIEPLTVAKILKAVADAEQPGLIIVGKQAIDDDSNQTGQMLAALMGIAQATFASKIEIGDGKAQVTREVDGGLQTIEIKLPAVVTTDLRLNEPRYASLPNIMKAKKKPLDKKSPDDFGISTTPRLKVLKTEEPSGRKAGVKVKSVAELIDKLKNEAGVL

SEQ ID NO: 74887 - DNA, 750 bp, Rhizobium leguminosarum bv. viciae 3841
  CDS (1)..(750): transl_table=11
atgaagatactcgtcccagtcaaacgggttgtcgactacaacgtgaagatccgggtgaagccggatggcacgggtgtcgagcttgccaatgtgaagatgtcgatgaacccgttcgacgagatctcggtggaagaggcgctgcggctgaaggaggccggcaaggccgaggaagtggtggtcgtctcgatcggccctgccaaggccgaagagacgctgcgcaccgcacttgccatgggtgccgaccgggcgatcctggtcgagaccgacgatcagatcgagccgctcaccgtcgccaagatcctcaaggctgtcgccgatgccgaacagccggggctgatcatcgtcggcaagcaggcgatcgacgacgattcgaaccagaccggccagatgctggcggcattgatgggaattgcccaggcaaccttcgcttcgaagatcgagatcggtgacggcaaggctcaggtcacccgcgaagtcgatggcggtctgcagacgatcgagatcaagctgccggcggtcgtcaccaccgatctgcgcttgaacgaaccgcgttatgcctcgctgcctaatatcatgaaggcgaagaagaagccgctcgacaaaaagacgccaagcgacttcagcgtcgataccacgccacgcctcaaggtgttgaagaccgaggagccgtcgggccgcaaggccggcgtcaaggtcaagtcggtcgccgaactcatcgacaagctcaaaaacgaagccggcgtgctgtaa

SEQ ID NO: 74888 - protein, 249 aa, Rhizobium leguminosarum bv. viciae 3841
MKILVPVKRVVDYNVKIRVKPDGTGVELANVKMSMNPFDEISVEEALRLKEAGKAEEVVVVSIGPAKAEETLRTALAMGADRAILVETDDQIEPLTVAKILKAVADAEQPGLIIVGKQAIDDDSNQTGQMLAALMGIAQATFASKIEIGDGKAQVTREVDGGLQTIEIKLPAVVTTDLRLNEPRYASLPNIMKAKKKPLDKKTPSDFSVDTTPRLKVLKTEEPSGRKAGVKVKSVAELIDKLKNEAGVL

SEQ ID NO: 74889 - DNA, 750 bp, Azoarcus sp. BH72
  CDS (1)..(750): transl_table=11
ttgaagattcttgtccccgtcaagcgcgtggttgattacaacgtgaaagtccgcgtgaaggcggatggcagcggtgtcgatctggccaatgtgaagatgagcatgaacccgttcgacgagatcgcggttgaagaagcggtgcgtctgaaggaagcgggcgtggcgaccgaggtggtcgcggtgagctgcggcgtggtggcctgccaggagacgctgcgtgcggcgatggcgatcggcgcggaccgcggcattctggtggaaaccgatgtggagctgcagccgctggccgtggcgaagctgctgaaggcgctcgccgacaaggaagagccgacgctggtgatcctcggcaagcaggcgatcgacgacgactccaaccagactggccagatgctggcggcgctcaagggctggccgcaggcgaccttcgcctccaagctcacgctggcggatggcaaagcgacggtgacgcgcgaaatcgacggcggtttggagaccgtggcgatcagcctgccggcggtggtgaccaccgacctgcgcctgaacgagccgcgctacgcgacgctgcccaacatcatgaaggcgaagaagaagccgctcgacacggtgaagccggccgatctgggcgtcgatgtcgcgccgcgtctcgccacgctgaaagtgaccgagccgcccaagcgcagcgccggggtgcgggtcgccgatgtggcccagctggtcgacaaactgaagaacgaagcgaaggtgctctga

SEQ ID NO: 74890 - protein, 249 aa, Azoarcus sp. BH72
MKILVPVKRVVDYNVKVRVKADGSGVDLANVKMSMNPFDEIAVEEAVRLKEAGVATEVVAVSCGVVACQETLRAAMAIGADRGILVETDVELQPLAVAKLLKALADKEEPTLVILGKQAIDDDSNQTGQMLAALKGWPQATFASKLTLADGKATVTREIDGGLETVAISLPAVVTTDLRLNEPRYATLPNIMKAKKKPLDTVKPADLGVDVAPRLATLKVTEPPKRSAGVRVADVAQLVDKLKNEAKVL

SEQ ID NO: 74891 - DNA, 750 bp, Acidovorax sp. JS42
  CDS (1)..(750): transl_table=11
atgaaggttttggtccccgtcaagcgcgtggtggactacaacgtgaaggtccgggtgaagtcggacggcacgggcgtagacatcgcgaacgtgaagatgagcatgaacccctttgacgaaatcgccgtggaagaggcggtgcggctcaaagaaaaaggcgtggccacggaagtgatcgcggtgagctgcggcgtggcgcaatgccaggaaacgctgcgcacggcgatggccattggcgccgaccgcggcatcctggtggaaaccgatgccgagctgcaacccctggccgtggccaagctgctcaaggccctggtggacaaagagcaaccgggcctgatcatcctgggcaagcaagccatcgacgacgacgccaaccagaccggccagatgctggcggccctggccgacctgccccaggccaccttcgccagcaaggtcgaagtggccggcgacaaggtcagcgtcacacgcgaagtcgacggcggcctggaaaccctgcagctgacaaccccggccgtcatcaccaccgacctgcgcctgaacgagccgcgctacgtcacgctgcccaacatcatgaaggccaagaaaaagccgctggacaccatcaagcccgaagacctcggcgtggacgtggccccgcgcctcaagaccctcaaggtggccgaacccccgaagcgcggcgctggcgtgaaagtgcccgacgtcgccacgctggtggacaagctcaagaacgaagccaaggtcatctaa

SEQ ID NO: 74892 - protein, 249 aa, Acidovorax sp. JS42
MKVLVPVKRVVDYNVKVRVKSDGTGVDIANVKMSMNPFDEIAVEEAVRLKEKGVATEVIAVSCGVAQCQETLRTAMAIGADRGILVETDAELQPLAVAKLLKALVDKEQPGLIILGKQAIDDDANQTGQMLAALADLPQATFASKVEVAGDKVSVTREVDGGLETLQLTTPAVITTDLRLNEPRYVTLPNIMKAKKKPLDTIKPEDLGVDVAPRLKTLKVAEPPKRGAGVKVPDVATLVDKLKNEAKVI

SEQ ID NO: 74893 - DNA, 750 bp, Acidovorax sp. JS42
  CDS (1)..(750): transl_table=11
atgaaaatcctcgtccccgtcaagcgcgtggtggactacaacgtgaaggtccgggtgaagtcggacggcacgggcgtagacatcgcgaacgtgaagatgagcatgaacccctttgacgaaatcgccgtggaagaggcggtgcggctcaaagaaaaaggcgtggccacggaagtgatcgcggtgagctgcggcgtggcgcaatgccaggaaacgctgcgcacggcgatggccattggcgccgaccgcggcatcctggtggaaaccgatgccgagctgcaacccctggccgtggccaagctgctcaaggccctggtggacaaagagcaaccgggcctgatcatcctgggcaagcaagccatcgacgacgacgccaaccagaccggccagatgctggcggccctggccgacctgccccaggccaccttcgccagcaaagtcgaagtcgccggcgacaaagtgagcgtcacacgcgaagtcgacggcggcctggaaaccctgcaactgaccaccccggccgtcatcaccaccgacctgcgcctgaacgagccgcgctacgtcacgctgcccaacatcatgaaggccaagaaaaagccgctggacaccatcaaacccgaagacctcggcgtggacgtggccccgcgcctcaagaccctcaaggtggccgaacccccgaagcgcggcgccggcgtgaaagtgcccgacgtcgccacgctggtggacaagctcaagaacgaagccaaggtcatctaa

SEQ ID NO: 74894 - protein, 249 aa, Acidovorax sp. JS42
MKILVPVKRVVDYNVKVRVKSDGTGVDIANVKMSMNPFDEIAVEEAVRLKEKGVATEVIAVSCGVAQCQETLRTAMAIGADRGILVETDAELQPLAVAKLLKALVDKEQPGLIILGKQAIDDDANQTGQMLAALADLPQATFASKVEVAGDKVSVTREVDGGLETLQLTTPAVITTDLRLNEPRYVTLPNIMKAKKKPLDTIKPEDLGVDVAPRLKTLKVAEPPKRGAGVKVPDVATLVDKLKNEAKVI

SEQ ID NO: 74895 - DNA, 750 bp, Magnetospirillum magnetotacticum MS-1
  CDS (1)..(750): transl_table=11
atgaaggtgttggtcgcgatcaagcgggtgatcgactacaacgtcaagattcgggtcaagtcggatggttcgggtgtggagacccagaatgtgaagttctccatgaaccccttcgacgagatcgcggtggaagaggccgtgcgcctcaaggaagcgggcaaggccgccgaggttgtggtggtgtccgtgggccccgccgcctgttccgagacgctgcgcaccgcgctggccatgggcgctgatcgcggcgttctggtgcagtccgatgacgaggttcagcctctggccgtggccaaggtcttgaaggccctggccgccaaggaggcccccggcctgatcatcctgggcaagcaggccatcgacgacgattccaaccagaccggccagatgctggccgccctgctgggccagccccaaggcacctttgcctccaagctggaaatcggcgccgatgccgtcaccgtcacccgcgaggtggatggcgggttggagacggtgtccttgaagcttcccgccgtggtcaccaccgatctgcgcctcaacgagccgcgctatgccagccttcccaacatcatgaaggccaagaagaagcccatcgacacggtctctccggccgatctgggcgtcgacgtcagccctcgcctggtgacgctgaaggtcgaggagccgcccaagcgcagcgccggtatcaaggtggccgacgtggccgccctggtggacaagttgaagaacgaagccaaggtgatctga

SEQ ID NO: 74896 - protein, 249 aa, Magnetospirillum magnetotacticum MS-1
MKVLVAIKRVIDYNVKIRVKSDGSGVETQNVKFSMNPFDEIAVEEAVRLKEAGKAAEVVVVSVGPAACSETLRTALAMGADRGVLVQSDDEVQPLAVAKVLKALAAKEAPGLIILGKQAIDDDSNQTGQMLAALLGQPQGTFASKLEIGADAVTVTREVDGGLETVSLKLPAVVTTDLRLNEPRYASLPNIMKAKKKPIDTVSPADLGVDVSPRLVTLKVEEPPKRSAGIKVADVAALVDKLKNEAKVI

SEQ ID NO: 74897 - DNA, 750 bp, Xylella fastidiosa Ann-1
  CDS (1)..(750): transl_table=11
atgaaaatcctcgtcgcctataagcgcgtggttgactacaacgtccgcatccaagtgaaacccgatggatccggcgtgatgacagaaggcgttaaagtctctgccaatcctttcgacgaaattgctctcgaagaagcgctacgcctgcgtgatgcaggcatcgccagcgaagtcgtcatcgccacactcgccccgaacgacgtgaccgcacaccttcgcaacggactggcgatgggggccaaccgtgctatccacatcgtcacccacaccacagtacaaccactcactgcggcacgcgctctactcaaactggttgagaaagaacagccagcactggtaatcctgggaaaacaggccattgacgacgacgccaaccaaaccgggcaaatgttggccacactatgggggcgcccacaggccacctttgcatcaaaagtgaccatcgctaatggcaaagccaccgtcacccgcgaagtcgacgctggtttggaaacactgcacattgatctaccggccgtgattaccgccgacctgcgcctaaacgccccacgcttcatcaaactgccggacatcatgaaggccaagagcaaaccactggaaaccatcgccttcgccgaccttggcgtaacagcacaagatagcctgcaaaccacacattacgcaccccccaaaaaacgcaaccaaggcgtgatggtgaaaaacgtcaccgaactggtgaccctgctcaagaaccaaggagccctatcatga

SEQ ID NO: 74898 - protein, 249 aa, Xylella fastidiosa Ann-1
MKILVAYKRVVDYNVRIQVKPDGSGVMTEGVKVSANPFDEIALEEALRLRDAGIASEVVIATLAPNDVTAHLRNGLAMGANRAIHIVTHTTVQPLTAARALLKLVEKEQPALVILGKQAIDDDANQTGQMLATLWGRPQATFASKVTIANGKATVTREVDAGLETLHIDLPAVITADLRLNAPRFIKLPDIMKAKSKPLETIAFADLGVTAQDSLQTTHYAPPKKRNQGVMVKNVTELVTLLKNQGALS

SEQ ID NO: 74899 - DNA, 759 bp, Roseovarius nubinhibens ISM
  CDS (1)..(759): transl_table=11
atgaaggtgcttgtgcctgtcaaacgcgtgatcgactataacgtgaaagtgcgcgtcaaagcggacgggagcggtgtcgatcttgccaatgtgaaaatgtcgatgaaccccttcgacgagattgccgtcgaagaggcgatccgcctgaaagaggccggcaaggccgatgaggtcgtcgcggtctcgatcggtgtcaagcaggcgcaggaaaccctgcggaccgcgctcgccatgggcgccgaccgcgccattctcgtggttgccgccgacgacgttcacaccgacatcgaaccgctggccgtggccaagatcctcgccaaggtcgtcgaagaagaacagcccggtctcgtcctcgcgggcaagcaggcgatcgacaacgacatgaacgccaccggtcagatgctctcggcgctgctcggctggagccaaggcacctttgccagcggcctcgacatcgatggtgacagcgcgctcgtcacccgcgaagtggacggcggcctgcaaacgatcaaggtcaagatgcccgccatcatcaccgtcgatctgcgcctcaatgagccgcgctacgcctcgcttcccaacatcatgaaagcgaagaaaaagccgctcgacgagaaaaccgccgccgattacggcgtcgatgtcagcccgcgtctcgaaatcgtcaagaccgacgaacccgaggcccgcaaggcaggcgagattgtgggctcggtcgacgagctcgtggcgaaactcaaagaagtgggggctgtgtaa

SEQ ID NO: 74900 - protein, 252 aa, Roseovarius nubinhibens ISM
MKVLVPVKRVIDYNVKVRVKADGSGVDLANVKMSMNPFDEIAVEEAIRLKEAGKADEVVAVSIGVKQAQETLRTALAMGADRAILVVAADDVHTDIEPLAVAKILAKVVEEEQPGLVLAGKQAIDNDMNATGQMLSALLGWSQGTFASGLDIDGDSALVTREVDGGLQTIKVKMPAIITVDLRLNEPRYASLPNIMKAKKKPLDEKTAADYGVDVSPRLEIVKTDEPEARKAGEIVGSVDELVAKLKEVGAV

SEQ ID NO: 74901 - DNA, 759 bp, Oceanicola batsensis HTCC2597
  CDS (1)..(759): transl_table=11
atgaaaataattgcacctataaaacacctaattgattacaacgtgaaggttcgcgttaaggcggacggtagcggagttggtctcgcgaatgtgaagatgtcgatgaacccgttcgacgagattgcggttgaagaggcgatccgtctgaaggaagcgggcaaggcggacgagcttgtcgtcgtgtcgatcggcgtgaaacaggcgcaggaaacgctgcgcacggcgctggcgatgggcgcggaccgggcgatcctcgtcgtggccgccgacgacgtgcaccaagatatcgagccgctggcggtggccaagatcctaaaggccgtgatcgacgccgaggcgccgggcctggtgatcgcgggcaaacaggcgatcgacaacgacatgaacgcgaccggccagatgctggcggcgctgctgggctggggtcaggcgacctatgcctctgaggttgcgatcgagggcgagcatgccgtcgtgacccgcgaagtggacggcggtctgcagaccatcaaggtgaagctgccggcgatcgtcaccgccgacctgcgcctgaacgagccgcgctacgcctcgctgcccaacatcatgaaagccaagaagaaaccgctggacgaaaagaccgccgccgatttcggcgtcgatgtcacgccgcgcctgaccgtcgtcaagacggcagagcccgccgcgcgttcggccggggaaatggttggctcggtcgacgagctggtgtcgaagctgaaagaaaaggggatcgtgtaa

SEQ ID NO: 74902 - protein, 252 aa, Oceanicola batsensis HTCC2597
MKIIAPIKHLIDYNVKVRVKADGSGVGLANVKMSMNPFDEIAVEEAIRLKEAGKADELVVVSIGVKQAQETLRTALAMGADRAILVVAADDVHQDIEPLAVAKILKAVIDAEAPGLVIAGKQAIDNDMNATGQMLAALLGWGQATYASEVAIEGEHAVVTREVDGGLQTIKVKLPAIVTADLRLNEPRYASLPNIMKAKKKPLDEKTAADFGVDVTPRLTVVKTAEPAARSAGEMVGSVDELVSKLKEKGIV

SEQ ID NO: 74903 - DNA, 747 bp, Erythrobacter sp. NAP1
  CDS (1)..(747): transl_table=11
atgaaaatcctcgtccccgtcaagcgggtgatcgactacaacgtgaagccgcgcgtgaagcccgatggctccggcgtagacctcgcgaacgtcaagatgagcatgaacccgtttgacgagatcgcagtcgaagaagcgatccggatcaaggaagcgggcaaggccgaggaaatcgtggctgtctcgatcggcccggcaaaggcgcaggaaacgctgcgcaccgcgctcgccatgggtgctgaccgcgcgatcctcgttgagaccgatgaagaggtcgagccgctcgccgttgccaagatcctcaaggccatcgctgacgaagaacagccaggcctcgtgctcctcggcaagcagtcgatcagcgacgacagcaaccagaccggccagatgctcgcagctctcatgggtcgcccgcagggtacctttgcgaacaccgtcgaagtcgacggcgacagcgtcatcgtgaagcgtgaggtcgacggcggccttgaaacggtcaagctgaccacgccagcgatcgtcaccaccgatcttcgcctgaacgagccgcgttacgcttcgctgccgaacatcatgaaagcgaagaagaagccgctcgatacgaagtcgcctgccgactacggcgtcgacatcgcaccgcgccttaccaccaccaatgtcagcgaaccgccggttcgtcaggccggtgaaaaggtcgaagacgtcgccgcgctcgtcgccaagatcaaggagctggggatcgcttaa

SEQ ID NO: 74904 - protein, 248 aa, Erythrobacter sp. NAP1
MKILVPVKRVIDYNVKPRVKPDGSGVDLANVKMSMNPFDEIAVEEAIRIKEAGKAEEIVAVSIGPAKAQETLRTALAMGADRAILVETDEEVEPLAVAKILKAIADEEQPGLVLLGKQSISDDSNQTGQMLAALMGRPQGTFANTVEVDGDSVIVKREVDGGLETVKLTTPAIVTTDLRLNEPRYASLPNIMKAKKKPLDTKSPADYGVDIAPRLTTTNVSEPPVRQAGEKVEDVAALVAKIKELGIA

SEQ ID NO: 74905 - DNA, 750 bp, Oceanospirillum sp. MED92
  CDS (1)..(750): transl_table=11
atgaaagtactggttgccgtaaaacgagtaattgactacaacgtgaaagttcgcgtgaaagcggataacagcgatgttgatctggccaatgtcaaaatggccctgaatccattctgtgaaattgcaatcgaagaggcggttcgcttgaaagaagcaggtactgcttcggaagtggttgtggtttctatcggtagcaaaagttgtgaagaacagatccgtacagcgctggcattaggcgctgatcgtggtgtccgcatcgacactgaagatggcccggattctctgtctgtatctaaactactggcaaaagtggttgagaaagaagcgccgggtatggtgattctgggtaagcaggcaatcgattcagacaataaccagacagggcaaatgctgggagccttgttggaccgtcctcagggtactttcgcatctgaagttaaagttgatggcgataaagtacaggtaacccgtgaagtagatggtggcctgcaaacggtcgaacttgctatgccggcgattgttaccacggatctgcgccttaacgagccgcgttatgcctctctgccaaatattatgaaagctaaacgtaaaccgctggaagtgatcagcccggatgatctgggtgttaccgtatccagcaacctttctctgctgcgtgtagatcctcctgctgaacgtcaggctgggattatggtgggctctgtagatgagctggtagaaaaactgcgcaacgaagcaaaagtgatctga

SEQ ID NO: 74906 - protein, 249 aa, Oceanospirillum sp. MED92
MKVLVAVKRVIDYNVKVRVKADNSDVDLANVKMALNPFCEIAIEEAVRLKEAGTASEVVVVSIGSKSCEEQIRTALALGADRGVRIDTEDGPDSLSVSKLLAKVVEKEAPGMVILGKQAIDSDNNQTGQMLGALLDRPQGTFASEVKVDGDKVQVTREVDGGLQTVELAMPAIVTTDLRLNEPRYASLPNIMKAKRKPLEVISPDDLGVTVSSNLSLLRVDPPAERQAGIMVGSVDELVEKLRNEAKVI

SEQ ID NO: 74907 - DNA, 750 bp, Oceanospirillum sp. MED92
  CDS (1)..(750): transl_table=11
atgaaggtactcgtaacagttaagcgtgttatcgactacaacgtcaaagtacgtgttaagtcggacaacaccgatgtagatctggccaatgtaaaaatggccctgaacccattctgtgaaatcgcggtagaagaagcggttcgtctgaaagaagcaggcactgcctctgaagtggttgtggtgtctattggccctaaaacttgccaggagcagattcgtacggcgctggctttaggtgcagaccgtggcatccagatcgaaactgaagatatgcctgagtcactgaacgttgccaaactgctggcaaaagtgatcgatgaagagcagccaggcctagtaattatgggtaaacaggcgatcgattctgataacaaccagaccggccagatgctggctgcactgaccgatatgcctcagggtaccttcgcgtctgaagttaagattgatggcgataaagttaatgtgacgcgcgaagtagacggtggtctgcagactgttgcgctgaacatgcctgcgatcgtgactaccgatctgcgtctgaacgagccacgttatgcttctctgcctaacatcatgaaagcgaagcgtaagccgctggatgttaagacccctgctgatctgggtgttgagctgaaagctcacactaagctattgaaagttacccctcctgcggaacgtcaggcgggcattatggtggctagcgtagatgagctggtcgacaaactgaaaaacgaagcgaaagtactttaa

SEQ ID NO: 74908 - protein, 249 aa, Oceanospirillum sp. MED92
MKVLVTVKRVIDYNVKVRVKSDNTDVDLANVKMALNPFCEIAVEEAVRLKEAGTASEVVVVSIGPKTCQEQIRTALALGADRGIQIETEDMPESLNVAKLLAKVIDEEQPGLVIMGKQAIDSDNNQTGQMLAALTDMPQGTFASEVKIDGDKVNVTREVDGGLQTVALNMPAIVTTDLRLNEPRYASLPNIMKAKRKPLDVKTPADLGVELKAHTKLLKVTPPAERQAGIMVASVDELVDKLKNEAKVL

SEQ ID NO: 74909 - DNA, 750 bp, Oceanospirillum sp. MED92
  CDS (1)..(750): transl_table=11
atgaaaatactggtaagcgtaaaacgtgttatcgactacaacgtcaaagtacgtgttaagtcggacaacaccgatgtagatctggccaatgtaaaaatggctctgaacccattttgtgaaatcgcggtagaagaagcggttcgcctgaaagaagcaggcacagcctctgaagtcgtggtggtgtctattggtcctaagccttgccaggagcagattcgtacggcgttggctttaggtgcggaccgcggtatccaggttgaaactgaagagatgcctgaatcactgaatgttgccaaactgctggcaaaagtgatcgaagaagagcagccaggcctggtgattatgggcaaacaggcgatcgattcagataacaaccagaccggtcagatgctcgcagcactcaccgatatgcctcaggggacttttgcgtctgaagttaaaattgacggcgataaagtcaacgtgacccgtgaagtcgacggtggtttgcaaacggttgaattgaatatgcctgccatcgttacgacggacctgcgcttgaacgaaccccgttacgcatccctgccaaacatcatgaaagcaaaacgtaagccgcttgatgttaagacgcccgctgaactgggtgttgagctgaaagctcacactaagctactgaaagttactcctcctgcggaacgccaagcgggtattaaagtggctagcgtagatgagctggtcgagaaactgaaaaacgaagcaaaagtactttaa

SEQ ID NO: 74910 - protein, 249 aa, Oceanospirillum sp. MED92
MKILVSVKRVIDYNVKVRVKSDNTDVDLANVKMALNPFCEIAVEEAVRLKEAGTASEVVVVSIGPKPCQEQIRTALALGADRGIQVETEEMPESLNVAKLLAKVIEEEQPGLVIMGKQAIDSDNNQTGQMLAALTDMPQGTFASEVKIDGDKVNVTREVDGGLQTVELNMPAIVTTDLRLNEPRYASLPNIMKAKRKPLDVKTPAELGVELKAHTKLLKVTPPAERQAGIKVASVDELVEKLKNEAKVL

SEQ ID NO: 74911 - DNA, 834 bp, Desulfitobacterium hafniense DCB-2
  CDS (1)..(834): transl_table=11
ttgcatttcgtagtttgtctaaaacaagttccggactcatctgaagttcggattgaccccaaaacgaacacgctaatgcgtgaaggggtaccgtctattattaatccatatgatgcccatgcccttgaagaggcaatccgtcttaaagagaaaatgggtgggaaagttactattgtcacaatgggtcctccccaagcgaaagaagcactccggaaagccatgtcctttggggcggatcgcgctattctgttaagcgatcgggccttcggtggttcagattcgttggcaacagcttacattatcactcaagccatcctcaaaatcaatgaaacagatcctgtcgatttggtattggccggtaaagaagctatcgacggggatactgctcagacaggccccggcattgccagccgtttgggttttccgcaattgacttatgttattaaggttaccgatattaataaagacaccataaccgttcagcgcaagctggaaacaggtaaagaagtggtgcaggctaaattaccggccctgctcactgttgaaaaggagcttaatgatctgcgttatgcatccttgcccaacatgatgaaggctgcttcttatgagccggagatgatcgactccaagtcctttgagttcgatgtgactcaaatgggacttaagggatcccccaccagcgtgaataagatttttgccccgccggcccgctccggtggagaaacattcgatggcaccaaggatcctcaaggtgtagcagctcaagtggtagagaaaatgttccagcataatattatcatggttaatcccgctgcgaagggaggcaatcggtaa

SEQ ID NO: 74912 - protein, 277 aa, Desulfitobacterium hafniense DCB-2
MHFVVCLKQVPDSSEVRIDPKTNTLMREGVPSIINPYDAHALEEAIRLKEKMGGKVTIVTMGPPQAKEALRKAMSFGADRAILLSDRAFGGSDSLATAYIITQAILKINETDPVDLVLAGKEAIDGDTAQTGPGIASRLGFPQLTYVIKVTDINKDTITVQRKLETGKEVVQAKLPALLTVEKELNDLRYASLPNMMKAASYEPEMIDSKSFEFDVTQMGLKGSPTSVNKIFAPPARSGGETFDGTKDPQGVAAQVVEKMFQHNIIMVNPAAKGGNR

SEQ ID NO: 74913 - DNA, 750 bp, Alteromonadales bacterium TW-7
  CDS (1)..(750): transl_table=11
atgaaagttcttgtaccaataaaacgcgttatagattacaacgtaaaagcgcgtgtcaaaagtgacaacagcgatgtagatttaacgaacgttaaaatggcgatgaacccattttgtgaaattgcaattgaagaagctattcgcttaaaagaagccggtacagccactgaagttgtagctgttactattggcgctaaaacatcgcaagaacaactacgcacagcacttgcactgggtgcagataaagcaatccacatcgaaaccgatgaaaaattagagtcattacacattgcaaaattactcgcaaaaattgtagagcaagaagcgccagaacttgttattttaggaaagcagtcgattgattcagacaataaccaaacgggtcaaatgcttgcagcattaactaatcgtgggcaagggacgtttgcgtctaaagtggtcgtcgctgatggaaaagtaaatgttacgcgtgaagtagacggcggtttgcaaacggtcgcgctttcattgccagccattatcactacagatttacgtttgaacgaaccacgttatgcatcactacccaatataatgaaagcaaaacgcaagccgcttgatgtaatagctgcagactctttaggtgtagatttaacacctcgtattcagcttgttagcgtagaagaaccggctaaacgtagtggtggcattattgtagaagacgttgcacaacttgtagaaaaattaaaaacagaggcaaaggtgatttaa

SEQ ID NO: 74914 - protein, 249 aa, Alteromonadales bacterium TW-7
MKVLVPIKRVIDYNVKARVKSDNSDVDLTNVKMAMNPFCEIAIEEAIRLKEAGTATEVVAVTIGAKTSQEQLRTALALGADKAIHIETDEKLESLHIAKLLAKIVEQEAPELVILGKQSIDSDNNQTGQMLAALTNRGQGTFASKVVVADGKVNVTREVDGGLQTVALSLPAIITTDLRLNEPRYASLPNIMKAKRKPLDVIAADSLGVDLTPRIQLVSVEEPAKRSGGIIVEDVAQLVEKLKTEAKVI

SEQ ID NO: 74915 - DNA, 750 bp, marine gamma proteobacterium HTCC2143
  CDS (1)..(750): transl_table=11
atgaaggttcttgttgcggttaagcgtgttgcagacgctaacgtaaaggttcggcccaagtctgatggcagcggcgccgacttaaataacgtcaaaatggcgatcaatccattctgtgaaattgcagtcgaagaagcggttcgcatgaaagaagcgggcaccgccacagaaattattgctgtctcaattggtgataagtcctgccaagagcagattcgtacatcgttagccctgggcgcagaccgtggtatccaggtcgaggcagataatagtattcaaccattggctatcgccaagttgttaaaggctgttgtcgataaagaacagcctgatcttatcattctcgggaagcaatctatcgatggtgacaacaaccaaaccggtcaaatgctagcggcacttgcgggtcttggacaggggacttttgcgtccgagataactgttgtcgacggcaagctgaatgtcactcgtgaaatcgacggtgggttacagactatcaccttgagtctgcctgcggttgttactactgatttgcgtttgaatgagcctcgctatgcttcgttacccaacattatgaaggctaagaaaaagccgcttgatgtatttacagctgaggatcttggtgttgatgtggcaccgcgactaacaacggttaaggttgaaccaccggctgagcgcgctgcaggaatcaaggtagaatcagttgctgaacttgttgataaactgaaaaatgaggcgaaggtgatctaa

SEQ ID NO: 74916 - protein, 249 aa, marine gamma proteobacterium HTCC2143
MKVLVAVKRVADANVKVRPKSDGSGADLNNVKMAINPFCEIAVEEAVRMKEAGTATEIIAVSIGDKSCQEQIRTSLALGADRGIQVEADNSIQPLAIAKLLKAVVDKEQPDLIILGKQSIDGDNNQTGQMLAALAGLGQGTFASEITVVDGKLNVTREIDGGLQTITLSLPAVVTTDLRLNEPRYASLPNIMKAKKKPLDVFTAEDLGVDVAPRLTTVKVEPPAERAAGIKVESVAELVDKLKNEAKVI

SEQ ID NO: 74917 - DNA, 753 bp, marine gamma proteobacterium HTCC2080
  CDS (1)..(753): transl_table=11
atgaaagcactggtcgctgttaagcgcgtggttgattataacgtcaaggtacgcgccaaagccgatggcagtgatgttgaacttaacaatgtcaaaatggccatcaaccccttttgtgagatcgcagtcgaagaggccgtgcgccttaaagaggccggaacagtctctgaagtcgtggtggtctctgtgggtgaaaaatctagccaagagcaaattcgcaccgcactcgccctgggcgctgaccgtggtattcacgttgaagtagagggtcgtcctgagcctctcgaaatagccaagcttttgaaaggtgtggtcgataaagagcagccacagttggtgattttgggcaagcagtcgatcgacggtgataataatcagaccggtcagatgctgggtgcattggccaacatggggcaggggacctttgcctcagagataaaggtcgatggcgatagcttacaagttatcagagaggtcgatgggggcttacaaacccttaaactgacactgcctgcgatcgtcaccaccgacctgcgactcaatgaacctcgctacgcttcattgcccaacatcatgaaggctaaaaagaagccgttagaggtcaccaatcctgctgagcttggggtggaggtgaaatctcacgtcacgcaactcggggtggcaccaccgccggagcgcgctgcaggaatcaaggttgaggatgtggctcaactggtcgataaactcaagaacgaagcaaaggtgatctcatga

SEQ ID NO: 74918 - protein, 250 aa, marine gamma proteobacterium HTCC2080
MKALVAVKRVVDYNVKVRAKADGSDVELNNVKMAINPFCEIAVEEAVRLKEAGTVSEVVVVSVGEKSSQEQIRTALALGADRGIHVEVEGRPEPLEIAKLLKGVVDKEQPQLVILGKQSIDGDNNQTGQMLGALANMGQGTFASEIKVDGDSLQVIREVDGGLQTLKLTLPAIVTTDLRLNEPRYASLPNIMKAKKKPLEVTNPAELGVEVKSHVTQLGVAPPPERAAGIKVEDVAQLVDKLKNEAKVIS

SEQ ID NO: 74919 - DNA, 786 bp, Escherichia coli B
  CDS (1)..(786): transl_table=11
atgcgactcacaggagaaatcatgaaaataataacctgctttaagctggtgcctgaagaacaggacattgttgtcactccagaatacaccctgaatttcgacaatgccgacgccaaaatcagccagttcgatctcaatgccattgaagctgcaagccagcttgcaacagatgacgatgagatagccgcgctgaccgttggcggctcattgttgcagaactcgaaagtgcgcaaagacgtgctatcccgcgggccgcacagcctgtatatggtgcaggatgcacaacttgagcatgcactgcctctcgataccgcaaaagcgctggcggcagcagttgaaaagatcggcttcgatttactgatctttggtgaaggttccggcgacctttatgcccagcaggttggcttgctggtcggagaaattctgcaacttccggtgattaatgcagtgagtgctattcagcgtcagggcaatacactggtgattgaacgcacgcttgaagatgacgttgaagttattgaactctctgttccagccgtgctctgcgtcacctccgatattaacgtgccacgcattccttcgatgaaagccattctcggcgcgggtaaaaaaccggtaaatcagtggcaggcaagtgatattggctggagccagagcgcaccacttgctgaactgaccggcattcgcgtaccgccgcaaacagaacgtaagcacatcattctcgataacgattcgccggaggccattgccgagctggcggaacatctgaagaaagccctgaactga

SEQ ID NO: 74920 - protein, 261 aa, Escherichia coli B
MRLTGEIMKIITCFKLVPEEQDIVVTPEYTLNFDNADAKISQFDLNAIEAASQLATDDDEIAALTVGGSLLQNSKVRKDVLSRGPHSLYMVQDAQLEHALPLDTAKALAAAVEKIGFDLLIFGEGSGDLYAQQVGLLVGEILQLPVINAVSAIQRQGNTLVIERTLEDDVEVIELSVPAVLCVTSDINVPRIPSMKAILGAGKKPVNQWQASDIGWSQSAPLAELTGIRVPPQTERKHIILDNDSPEAIAELAEHLKKALN

SEQ ID NO: 74921 - DNA, 750 bp, Pseudomonas putida GB-1
  CDS (1)..(750): transl_table=11
atgaaggttcttgtagctgtcaaacgagtggtcgactacaacgtcaaggttcgcgtcaaagcggacaactccggcgtcgaccttgctaacgtcaagatgtccatgaaccccttctgcgaaatcgccgtggaagaagccgtgcgcctgaaggaaaaaggcgttgcgaccgagatcgtcgtcgtttccgtcggcccgaccactgcccaggagcaactgcgtaccgccctggccctgggtgccgaccgtgccatcctggtcgaggccgctgatgagctgaactccctggccgtggccaaggccctgaaagccgttgtcgacaaagagcagccgcagctggtgatccttggcaaacaggccatcgacagcgacaacaaccagaccggccagatgctggccgcgctgaccggctacgctcagggtaccttcgcctccaaggtcgaactggctggcgacaaactgaacgtcacccgtgaaatcgatggcggcctgcagaccgttgcgctgaacctgccagcgatcgtcaccaccgacctgcgcctgaacgagccacgctacgcgtcgctgccgaacatcatgaaggccaagaaaaagccgctggaaaccgttactccagacgcgctgggcgtatccctcgcctccaccaacaagaccgtgaaggttgaagccccggctgctcgcagcgctggcatcaaggttaaatcggtggccgaactggtcgagaagctgaagaacgaagcgaaggtaatctaa

SEQ ID NO: 74922 - protein, 249 aa, Pseudomonas putida GB-1
MKVLVAVKRVVDYNVKVRVKADNSGVDLANVKMSMNPFCEIAVEEAVRLKEKGVATEIVVVSVGPTTAQEQLRTALALGADRAILVEAADELNSLAVAKALKAVVDKEQPQLVILGKQAIDSDNNQTGQMLAALTGYAQGTFASKVELAGDKLNVTREIDGGLQTVALNLPAIVTTDLRLNEPRYASLPNIMKAKKKPLETVTPDALGVSLASTNKTVKVEAPAARSAGIKVKSVAELVEKLKNEAKVI

SEQ ID NO: 74923 - DNA, 750 bp, Marinobacter sp. ELB17
  CDS (1)..(750): transl_table=11
atgaaggttctggttgctgtaaaacgagtagttgactacaacgtaaaagtgcgtgtaaagccggacaactccggcgttgatctcgctaacgtcaaaatggcaatgaacccattctgcgaaatcgctgttgaagaagcggttcggctgaaagaaaagggcgttgtgaacgagattgtggtggtttctattggccccaaagcctgtcaggagcagatccgcaccgctctggcattgggcgcagaccgtggcatccacattgagacagacgcagagattcagtctttgcaggttgccaagctgttgaaagctgtggccgataaagagcaacccaatctggttattctgggcaagcaggccatcgactcagacaacaaccaaacgggccagatgctggccgcgctggcaggtatgagccagggtacgttcgcgtctgaaattgtgatcgacggtgacaaagtaaacgtaacgcgcgaagtagacggcggcatgatgaccgtttcactgacgctgcctgcggttgttaccaccgacttgcgtctgaacgagccccgctatgcgtctttgcccaatattatgaaagcaaagaagaagcctctagagtccattagcccggctgatctgggtgttgatgtcactccgcgcctgacgattgtcaaagtggaagccccggcttcacgccaggcaggtatcaaagttgcagacgtggcagagctggttaacaaattgaagaacgaagcgaaggtgatctga

SEQ ID NO: 74924 - protein, 249 aa, Marinobacter sp. ELB17
MKVLVAVKRVVDYNVKVRVKPDNSGVDLANVKMAMNPFCEIAVEEAVRLKEKGVVNEIVVVSIGPKACQEQIRTALALGADRGIHIETDAEIQSLQVAKLLKAVADKEQPNLVILGKQAIDSDNNQTGQMLAALAGMSQGTFASEIVIDGDKVNVTREVDGGMMTVSLTLPAVVTTDLRLNEPRYASLPNIMKAKKKPLESISPADLGVDVTPRLTIVKVEAPASRQAGIKVADVAELVNKLKNEAKVI

SEQ ID NO: 74925 - DNA, 753 bp, Moritella sp. PE36
  CDS (1)..(753): transl_table=11
atgaagatattggtcgcggtgaagcgggttgtcgatcataaggtcaacgtcagggttaaaacggatgaaacaggcattgaaaccgcgaatgtaaaaatggtgatcaatccattctgtgagatcgcgattgaacaagctgtgcgttttaaagaacagggctcggccgacgaagttgtcttggtttgcattggtcccaaagaggcggaagtgcaattacgggcagggctagcattagacgcagatcgcgccattctgattagaacagatgaagaagttcaatcccttgatgtcgctaaattactgcataaagtcgtgcaagaacaactacctgatctagtgctactggggaaacaagcgattgataccgacaataatcaaacagggcaaatgctagcggcactcactaatatgccacaaggaacgtttgcttctgatatcgtctttatcgtcccgaataaagtcaaagtaactcgtgaagtggacggtggtttagtcacattagccttgaatttacctgccgtcattactgtcgatttacgcttaaacacaccccgatacgcttcgttacctaatatcatgaaagcgaaacgcaaaatcatcaccatggtatcccctgactctttgggggttagcttatccccgcggctgactacgcttaaagtcgaatcgccaccagtacggcaagctggggttaaagtggctgatgtcgctgacctagtagataaactacaacagcaagcgaaggtgatctaa

SEQ ID NO: 74926 - protein, 250 aa, Moritella sp. PE36
MKILVAVKRVVDHKVNVRVKTDETGIETANVKMVINPFCEIAIEQAVRFKEQGSADEVVLVCIGPKEAEVQLRAGLALDADRAILIRTDEEVQSLDVAKLLHKVVQEQLPDLVLLGKQAIDTDNNQTGQMLAALTNMPQGTFASDIVFIVPNKVKVTREVDGGLVTLALNLPAVITVDLRLNTPRYASLPNIMKAKRKIITMVSPDSLGVSLSPRLTTLKVESPPVRQAGVKVADVADLVDKLQQQAKVI

SEQ ID NO: 74927 - DNA, 843 bp, Rhizobium leguminosarum bv
  CDS (1)..(843): transl_table=11
atgaatatcgtggtctgcataaagcaagtgcctgactccgcacagatccgggttcatcccgttacgagcacgatcatgcgccaaggcgtgccgacaattatcaatccttacgatctttttgcgttggaagaagctctcagactgcgtgaccgctacgggggtaacgtcactgtgcttaccatgggcccgccaatggcaaaacaggcgctggagaaagctctggcatacggcgcagaccaggcagtgctcctaagcgaccggcacttcgccgggtcggacaccttggcaacttcgtttgctatctcgcgggcaatcaccaaaattggtcgcggccgtgcgcctgaaatcgtccttactggcaagcagacgatcgacggcgatactgctcaggtcggcccggggatagcgaggcgcctggagctgcaacaactgacctacgtaaccaaaattttttcagtcgattttcatgcccgacagatcatggtggagcgtcgttcggaaggcggcacccaaatgctgaagagccgactgccatgcttgatcagtgtccttgaaggcgtcaacgccatccgtcgcggctctgtggctgacgcattgcgtgccgcacgcatgcaaattccgacctggcgtgcagtcgacgccggtattgaggaaatagccaattgcggcttgagaggatcgcccacggtcgtcaagcgcgtattcgcccccaccccgcgggccgaaaaagcgatccaaatcgaagcaatcgaaagcggtcgggtggctgacgaagtaattgcatcgatcttcgaacaccagcccgcgttggaagcgagctttcaactcaatgggttcacgtaa

SEQ ID NO: 74928 - protein, 280 aa, Rhizobium leguminosarum bv
MNIVVCIKQVPDSAQIRVHPVTSTIMRQGVPTIINPYDLFALEEALRLRDRYGGNVTVLTMGPPMAKQALEKALAYGADQAVLLSDRHFAGSDTLATSFAISRAITKIGRGRAPEIVLTGKQTIDGDTAQVGPGIARRLELQQLTYVTKIFSVDFHARQIMVERRSEGGTQMLKSRLPCLISVLEGVNAIRRGSVADALRAARMQIPTWRAVDAGIEEIANCGLRGSPTVVKRVFAPTPRAEKAIQIEAIESGRVADEVIASIFEHQPALEASFQLNGFT

SEQ ID NO: 74929 - DNA, 849 bp, Rhizobium leguminosarum bv
  CDS (1)..(849): transl_table=11
atgaacatcgtggtctgcataaagcaagtgcctgactccgcacagatccgggttcatccggttacgaacacgatcatgcgccagggagtgccgacaatcatcaatccttacgatcttttcgccttggaagaagctcttaaactgcgtgaccggcatgggggtaaagtcactgtgcttaccatgggtccgcccatggcaaaacaagcgctggagaaagctctggcatacggcgcagatgaagcggtactcctgagcgaccgtcacttcgccgggtcagacaccttggcaacttcatttgctatctcgcgagctatcacgaaccttggactccgccatgcgcctgaaatcgtgtttactggcaagcagacgatcgacggcgatactgcgcaggtggggccggggattgccaggcgtctcgaactgcaacaactgacctacgtaacgaaaattgtttcagtcgatcttcatgcccgagagatcacggtggagcgccgttcggaaggcggcacacaaatgctgaagagccaactgccgtgcttgatcagtgtccttgaaggcgtcaacgccatccgtcgaggctccgtcgctgacgcgttgcgtgccgcacgcgcgcaaataccgacctggcgtgcagccgacgccggtattgtggagatagctaattgcggcttgagaggatcaccgaccgtcgtcaagcgcgtattcgcccccaccccacgggccgaaaaagcaatccaaatcgaagtaaacgatgaccagtgcggtccgctggctgacgaaataatcgcatcgatcttcgagcaccagcccccattggaagcgagctttcaaccgaatgggctcacgtga

SEQ ID NO: 74930 - protein, 282 aa, Rhizobium leguminosarum bv
MNIVVCIKQVPDSAQIRVHPVTNTIMRQGVPTIINPYDLFALEEALKLRDRHGGKVTVLTMGPPMAKQALEKALAYGADEAVLLSDRHFAGSDTLATSFAISRAITNLGLRHAPEIVFTGKQTIDGDTAQVGPGIARRLELQQLTYVTKIVSVDLHAREITVERRSEGGTQMLKSQLPCLISVLEGVNAIRRGSVADALRAARAQIPTWRAADAGIVEIANCGLRGSPTVVKRVFAPTPRAEKAIQIEVNDDQCGPLADEIIASIFEHQPPLEASFQPNGLT

SEQ ID NO: 74931 - DNA, 747 bp, Magnetospirillum gryphiswaldense
  CDS (1)..(747): transl_table=11
atgaaggtacttgtcgcggcgaagcgcgtcattgattacaacgtgaaaattcgggtcaaggctgacaattcgggcgtcgagacggcgaacgtgaagttcagcatgaatccgttcgacgaaatcgcggttgaagaggcggttcgcctgaaggaagccggcaaggcgaccgagatcgtggtggtcagcatcggcccggcgacagcgcaggaaaccctgcgcaccgccctggccatgggggccgatcgcggcatcctggtgcagaccgacgacgagattcagcccctggcggtggccaagctgttgaaggcggtggtcgacaaggaagctccgggtctggtgatcctgggcaagcaggccatcgacgacgacagcaaccagaccggccagatgctggcggcgctgctgggctggtcgcaaggcaccttcgccagcaagatcgagatcggcgacaaactgaccgtgacgcgtgaagtggatggcgggctggaaaccgtgtcgctggccctgccggcggtggtgaccagcgatctgcgcctgaacgagccgcgctacgccagcctgcccaacatcatgaaggcgaagaagaagcccatcgacgtcaccaatccgggcgatctgggcgtcgacgtggcgccgcgactggtgaccttgaaggtggaagagccgcccaagcgcgccgccggcatcaaggtgcccgacgtcgccaccttggtcgacaagctgaagaacgaagcgaaggtgatctga

SEQ ID NO: 74932 - protein, 248 aa, Magnetospirillum gryphiswaldense
MKVLVAAKRVIDYNVKIRVKADNSGVETANVKFSMNPFDEIAVEEAVRLKEAGKATEIVVVSIGPATAQETLRTALAMGADRGILVQTDDEIQPLAVAKLLKAVVDKEAPGLVILGKQAIDDDSNQTGQMLAALLGWSQGTFASKIEIGDKLTVTREVDGGLETVSLALPAVVTSDLRLNEPRYASLPNIMKAKKKPIDVTNPGDLGVDVAPRLVTLKVEEPPKRAAGIKVPDVATLVDKLKNEAKVI

SEQ ID NO: 74933 - DNA, 747 bp, Xanthomonas maltophilia
  CDS (1)..(747): transl_table=11
atgaaaatcctcgtcgcgtacaagcgcgtggtggactacaacgtccgcattcaggtcaagccggacggttccggcgtggtcaccgacggcgtcaagctgtcccccaacccctttgacgaaatcgccctggaagaagccctgcgcctgcgcgacaagggcatcgccaccgaggtcatcgtggccaccatctctccggccgatgcccaggcgcacctgcgcaacggcttggccatgggcgccaaccgcgccatccacgtggtcaccgaccaggccatccagccgctgaccgccgcgcgcaccctgctcaagctggtcgagaaggaacagccggacctggtgatcctgggcaagcaggccatcgacgacgacgccaaccagaccggccagatgctggccacgctgtggggccgcccgcaggcgaccttcgccagcaagctggagattgccgacggcaaggccacggtgacccgcgaggtcgacgccggcctggaaacgctggaagtggacctgccggccgtggtcaccaccgacctgcgcctgaacgagccgcgtttcatcaagctgcccgacatcatgaaggccaaggccaaaccgctggaaacgctgcagctggccgacctcggggttgatgccgccgataccttcaagaccacccagtacgccgcgccctccaagcgaagcaagggcgtgatggtcaaggacgcggccgaactggttgccgcactcaagcagaaggggttgctgtaa

SEQ ID NO: 74934 - protein, 248 aa, Xanthomonas maltophilia
MKILVAYKRVVDYNVRIQVKPDGSGVVTDGVKLSPNPFDEIALEEALRLRDKGIATEVIVATISPADAQAHLRNGLAMGANRAIHVVTDQAIQPLTAARTLLKLVEKEQPDLVILGKQAIDDDANQTGQMLATLWGRPQATFASKLEIADGKATVTREVDAGLETLEVDLPAVVTTDLRLNEPRFIKLPDIMKAKAKPLETLQLADLGVDAADTFKTTQYAAPSKRSKGVMVKDAAELVAALKQKGLL

SEQ ID NO: 74935 - DNA, 786 bp, Aspergillus oryzae
  CDS (1)..(786)
atggccagtggtttgcgtatcttagtacccgttaagcgggtgatcgactacgcgatcaaaccccgtatcaacaaggcccagaccggcgtcgaaacctccggcgttaagcactcgctcaacccattcgacgaactctcgatcgaggaggccgtccgtctccgtgagcgcaagggtcccctcaaagtcgagaacattctcgctctctccgcgggcggagccaaatgcgctgataccctccgcacggcgatggccatgggcgccgaccgcgcgttccacgtcgacgtccccgactccaacgatgggggcctggagcctcttaccgtcgcgaagatgctgaaggaggttgtcaacaaggagaacatcaacctggtgctgctcgggaagcaggctatcgatggtgaccagggtcagacgggtcagatgctcgcgggcctgttgggctggcctcaggcgacgcaggctagcaaggtggatatcaaggatgagcagggaaccgtggaggttacccatgaggttgatggcggcgttgagactcttcgggccaagttgcctctcatcattactaccgacttgcgactcaacgagccgaggtatgccactctgccgaacatcatgaaggccaagaagaagccgttggagaagaagacgctggcagactttggtatagaggataagaagcggttgaagacgctgaaggtcactgaacccccagcccgccagggcggcggtaaggtcgaggacgtcgacggattgatcggaaagctgaaggagctgggcgctctgtga

SEQ ID NO: 74936 - protein, 261 aa, Aspergillus oryzae
MASGLRILVPVKRVIDYAIKPRINKAQTGVETSGVKHSLNPFDELSIEEAVRLRERKGPLKVENILALSAGGAKCADTLRTAMAMGADRAFHVDVPDSNDGGLEPLTVAKMLKEVVNKENINLVLLGKQAIDGDQGQTGQMLAGLLGWPQATQASKVDIKDEQGTVEVTHEVDGGVETLRAKLPLIITTDLRLNEPRYATLPNIMKAKKKPLEKKTLADFGIEDKKRLKTLKVTEPPARQGGGKVEDVDGLIGKLKELGAL

SEQ ID NO: 74937 - DNA, 783 bp, Butyrivibrio fibrisolvens
  CDS (1)..(783): transl_table=11
atgaatatcgtagtatgtattaaacaggttcctgacacaaagggcggcgtaaagttcaacccagatggaactcttgatagagcatcaatgctcgcaattatgaacccagatgataaggcaggtcttgaggctgctcttagaatcaaggatgagacaggtgcaaaggttacagttcttacaatgggacttccaaaggctgatgatatgctccgcgaagcacttgctatgggtgctgacgaggcagttcttgttacagatagacgccttggtggtgctgatacatgggctacatcttcaacagttgcagctgcagttaagaagcttgattatgatcttattatcacaggtcgtcaggctatcgatggtgatacagctcaggttggtccacagatcgctgagcatctcgcactcccagtaatttcttatgctgaggatatcaaggtagagggtaacagcgttatcgttaagcgtcagtacgaggatagatatcacgaagttaagctcagatgccttgccttatcactgcactttctgagtttaaatgagccacgttacatgactccaggcggcatctttgatgcatatgacaaggaagtaacagtttggggacgtgatgatcttacagatcttgatgatgcaaacatcggtcttgctggttctccaacaaagatcgctaaggcttctgataaggttcgtaagggagcaggcgaaaaggttgctcttgaccctaaggagtcagtagaatatatcgttggcaagcttaaagaaaagcatgtaatttaa

SEQ ID NO: 74938 - protein, 260 aa, Butyrivibrio fibrisolvens
MNIVVCIKQVPDTKGGVKFNPDGTLDRASMLAIMNPDDKAGLEAALRIKDETGAKVTVLTMGLPKADDMLREALAMGADEAVLVTDRRLGGADTWATSSTVAAAVKKLDYDLIITGRQAIDGDTAQVGPQIAEHLALPVISYAEDIKVEGNSVIVKRQYEDRYHEVKLRCLALSLHFLSLNEPRYMTPGGIFDAYDKEVTVWGRDDLTDLDDANIGLAGSPTKIAKASDKVRKGAGEKVALDPKESVEYIVGKLKEKHVI

SEQ ID NO: 74939 - DNA, 783 bp, Saccharopolyspora spinosa
  CDS (1)..(783): transl_table=11
atgaacatcgtcgttctggtcaagcaggtgccggacacgtattccgagcggcggctcgcgggtgcggatcacgcgttggatcgtgagtcggcggatgcggtgctggacgaggtcaacgagcgtgcggtggaggaggcgctgcagatcaccgaggcacagggcggtgaggtcaccgttgtgtgcatgggcccggatcgcgccacagatgcgattcgcaaggcgttgtcgatgggtgcggacaaggcggtgcacctatccgatggggcgctgggcggcaccgacgcgccggcgacggcgcgggcgctggcgaaggttatcggcaccgtcgaggacgtcgacttggtgatcgccggtaacgaggcgaccgacggccgcgtgggcgcggtcccggcgatggtggccgaggtgctgggctggccgcagctgaccttcgcgcgcaaggtcgagaccgacggttccagcgtgaaggccgagcgggagaccgacgcgggcatcgtcaacgtcgaggctgggttgccggcggttgtgtcggtgacggagaagatcaacgagccgcggtatccgtccttcaaggggatcatggcggcgaagaagaagccggtcagcgtgctttcgctggcggacgtggggatcgaggtgggcgaggtcgggctggctggcgccgcctcgcaggtggtggcctcggcgccgaagccgccgaaggccgcgggtgtgaaggtcaccgatgagggcgagggtggcgtggccgtcgccgggttcctggccggcgagaagctggtctga

SEQ ID NO: 74940 - protein, 260 aa, Saccharopolyspora spinosa
MNIVVLVKQVPDTYSERRLAGADHALDRESADAVLDEVNERAVEEALQITEAQGGEVTVVCMGPDRATDAIRKALSMGADKAVHLSDGALGGTDAPATARALAKVIGTVEDVDLVIAGNEATDGRVGAVPAMVAEVLGWPQLTFARKVETDGSSVKAERETDAGIVNVEAGLPAVVSVTEKINEPRYPSFKGIMAAKKKPVSVLSLADVGIEVGEVGLAGAASQVVASAPKPPKAAGVKVTDEGEGGVAVAGFLAGEKLV

SEQ ID NO: 74941 - DNA, 756 bp, Arabidopsis thaliana
  CDS (1)..(756)
atgaagattctcgtcgccgttaaacgtgtcgtcgactacgccgtcaagatccgagtcaaacccgataagactggtgtagaaacccaaaatgtgaagatgtcaatgaatccattttgtgagatcgcacttgaggaagcgcttcgaatcaaagaagctggttttgcgaaagaggttattgcagtgagtattggaccttcacaatgtgtggatacacttcgtactggtttagctatgggtgctgatcgaggaatccatgttgagaccaattctagttttcttcctttgactattgctaagatcttgaagagtttagctgatgttgagaatcctggattgattttcttagggaaacaggcgatagatgatgattgcaatcaaacaggacagatggttgcagctttacttggttggccacaagcaacgtttgcatcgaaggttgtgttggataaagataagaatgttgcaaccgtggatagagaagtggatggaggtcttgagactcttaatgtagacttacccgctgtgataacaactgatttgaggctgaaccaaccaagatatgcatcactccctaacataatgaaggcaaaatcaaagcctataaagaaaatgacggtgcaagatctgaaagtagacattaaatccgacatagagatcttggaagtcacggagcctccaaagaggaaatctggggttatggtttcttcggtggatgagttgatagataaacttaaaaatgaagctcatgttgtttga

SEQ ID NO: 74942 - protein, 251 aa, Arabidopsis thaliana
MKILVAVKRVVDYAVKIRVKPDKTGVETQNVKMSMNPFCEIALEEALRIKEAGFAKEVIAVSIGPSQCVDTLRTGLAMGADRGIHVETNSSFLPLTIAKILKSLADVENPGLIFLGKQAIDDDCNQTGQMVAALLGWPQATFASKVVLDKDKNVATVDREVDGGLETLNVDLPAVITTDLRLNQPRYASLPNIMKAKSKPIKKMTVQDLKVDIKSDIEILEVTEPPKRKSGVMVSSVDELIDKLKNEAHVV

SEQ ID NO: 74943 - DNA, 852 bp, Rhizobium leguminosarum bv
  CDS (1)..(852): transl_table=11
atgcacatcgtggtctgtatcaaacaggtgccggactctgcgcagatacgcgtccacccggtgacaaatacgatcatgcgccaaggcgtaccgaccatcattaacccttacgacctgtttgctctcgaagaggcactacaagttcgtaaccgctatgggggcgaggtgactgttctcacgatggggccgcccatggctgagcaagcgctacgcaaagccctcacccacggcgcagatcgcgcagtgcttctcaccgaccgccactttgctggatctgacacgctggcgacctcgtatgctctttctcaagcagtagcgaagattggcgagagctatggggcgccagatatcgtctttaccggaaagcagacaattgacggcgacacggcccaggtcgggcccggaattgcaaagaggctgaacctccagcaactgacttacgtaacgaagatagtctccattgatcccacttcgcgcgagctcatggttgaacgacacgcggagagcggcacgcagatgctgaagagcacgttgccgtgtctcatcaccgtgctggaaggtgtcaatgcaatccgccggggctctctcgatgacgccttccgtgccgcgcgaagcccggttcttaaatggggggccgctgacgccggcattggggagttgaccaaatgcggcctaaggggatcgccgacggtcgtgaagcgagtattcgctcctggtccgcgcgccgaaaaagctatgcaaatggacattaacgacaaaacgttggccgaggtcgcggcggacacggtcgctgcaatttttgcgcgcgagcctgttttggaacgcaagctcacgtcccatggcaatcggtga

SEQ ID NO: 74944 - protein, 283 aa, Rhizobium leguminosarum bv
MHIVVCIKQVPDSAQIRVHPVTNTIMRQGVPTIINPYDLFALEEALQVRNRYGGEVTVLTMGPPMAEQALRKALTHGADRAVLLTDRHFAGSDTLATSYALSQAVAKIGESYGAPDIVFTGKQTIDGDTAQVGPGIAKRLNLQQLTYVTKIVSIDPTSRELMVERHAESGTQMLKSTLPCLITVLEGVNAIRRGSLDDAFRAARSPVLKWGAADAGIGELTKCGLRGSPTVVKRVFAPGPRAEKAMQMDINDKTLAEVAADTVAAIFAREPVLERKLTSHGNR

SEQ ID NO: 74945 - DNA, 786 bp, Streptomyces griseus subsp
  CDS (1)..(786): transl_table=11
gtgagcttgaggatcgttgtctgtgtgaagtacgtgcccgacgcgaccggtgaccggcgtttcgccgatgacctgacgctggaccgtgaggatgtcgacggtctgttgtcggagctggacgagtacgcggtcgagcaggcgttgcagatcgctgacggggcggacgatgcggagatcaccgtggtgacggtgggtccggaggatgccaaggacgcgttgcgcaaggcgttgtcgatgggtgcggacaaggcggttcacgtcgaggacgacgatctgcacggcagtgatgtgatggggacgtcgctggtgctggcgaaggctgtggagaaggccgggtatgacctggtgatctgtgggatggcgtcgacggacggtgtgatgggtgtgctgccggcgttgctggcggagcgtctgggtgtgccgcaggtgacgttgctgtccgaggtcgcggtggacggtggtgtggtgacggggcggcgtgacggtgacacggcgtccgagcagcttgaggcgtcgcttcccgcggtggtgtcggtgaccgaccagtcgggtgaggcccgttacccgtcgttcaaggggatcatggcggcgaagaagaagccggtggagtcgctggacctggacgatctgggtctggacgcggacgaggtcggtctggcgggtgcgtggacggtggtggattccgccaccgagcgtccggcgcggacggcgggcacgatcgtgaaggacgagggtgagggcggcaggcagctcgccgggttcctcgcgggccagaagttcatctag

SEQ ID NO: 74946 - protein, 261 aa, Streptomyces griseus subsp
MSLRIVVCVKYVPDATGDRRFADDLTLDREDVDGLLSELDEYAVEQALQIADGADDAEITVVTVGPEDAKDALRKALSMGADKAVHVEDDDLHGSDVMGTSLVLAKAVEKAGYDLVICGMASTDGVMGVLPALLAERLGVPQVTLLSEVAVDGGVVTGRRDGDTASEQLEASLPAVVSVTDQSGEARYPSFKGIMAAKKKPVESLDLDDLGLDADEVGLAGAWTVVDSATERPARTAGTIVKDEGEGGRQLAGFLAGQKFI

SEQ ID NO: 74947 - DNA, 831 bp, Streptomyces griseus subsp
  CDS (1)..(831): transl_table=11
atgacacccaggtgggaccacacccaggtaggcaggagagccggcgtgagcttgaggatcgttgtctgtgtgaagtacgtgcccgacgcgaccggtgaccggcgtttcgccgatgacctgacgctggaccgtgaggatgtcgacggtctgttgtcggagctggacgagtacgcggtcgagcaggcgttgcagatcgctgacggggcggacgatgcggagatcaccgtggtgacggtgggtccggaggatgccaaggacgcgttgcgcaaggcgttgtcgatgggtgcggacaaggcggttcacgtcgaggacgacgatctgcacggcagtgatgtgatggggacgtcgctggtgctggcgaaggctgtggagaaggccgggtatgacctggtgatctgtgggatggcgtcgacggacggtgtgatgggtgtgctgccggcgttgctggcggagcgtctgggtgtgccgcaggtgacgttgctgtccgaggtcgcggtggacggtggtgtggtgacggggcggcgtgacggtgacacggcgtccgagcagcttgaggcgtcgcttcccgcggtggtgtcggtgaccgaccagtcgggtgaggcccgttacccgtcgttcaaggggatcatggcggcgaagaagaagccggtggagtcgctggacctggacgatctgggtctggacgcggacgaggtcggtctggcgggtgcgtggacggtggtggattccgccaccgagcgtccggcgcggacggcgggcacgatcgtgaaggacgagggtgagggcggcaggcagctcgccgggttcctcgcgggccagaagttcatctag

SEQ ID NO: 74948 - protein, 276 aa, Streptomyces griseus subsp
MTPRWDHTQVGRRAGVSLRIVVCVKYVPDATGDRRFADDLTLDREDVDGLLSELDEYAVEQALQIADGADDAEITVVTVGPEDAKDALRKALSMGADKAVHVEDDDLHGSDVMGTSLVLAKAVEKAGYDLVICGMASTDGVMGVLPALLAERLGVPQVTLLSEVAVDGGVVTGRRDGDTASEQLEASLPAVVSVTDQSGEARYPSFKGIMAAKKKPVESLDLDDLGLDADEVGLAGAWTVVDSATERPARTAGTIVKDEGEGGRQLAGFLAGQKFI

SEQ ID NO: 74949 - DNA, 774 bp, Bacillus subtilis
  CDS (1)..(774): transl_table=11
atgaatctatttgtactgatgaaacggacgtttgacacagaagaaaaaatcgtcattgaaacaggaaagattcaggatgacggagcggaatggatcattaatccatatgatgagtacgcgatagaagaagccatccagctgaaggaaaagcatggcggcacgatcaccgctgtcacggtcggcggtgaagaagcggagaaagaattgcgtacggcgcttgccatgggttgtgaccaagctgttttaatcaacatagaagatgatcttgatgaacccgaccaatattccatttctcaagttttataccactatatgaaggatcaggagtttgatttgattctcggcggaaatgttgccattgacggaggatcaggacaagtggcgcctcggcttgccgagctactggacattccgtgtatcactacgatcaccaaactcgaaatcaacggcactgatgcagaagcagaaagggacgtcgaaggggatgttgaaaaaatcaaaacgacgctcccattgcttgtcacagctcagcagggcttaaacgagccgcgctatccatcgcttccgggaattatgaaggctaagaaaaagccgcttgaagagcttgaacttgatgatcttgatctggacgaagaggatgctgaaccaaagctgaaaaccattgaacgttttctgccgccgaaaaaagaagccgggaagcttctccaaggtgagcctgctgaacaggcaaaagagcttgtttcattgctccgcagcgaagctaaagtcatttaa

SEQ ID NO: 74950 - protein, 257 aa, Bacillus subtilis
MNLFVLMKRTFDTEEKIVIETGKIQDDGAEWIINPYDEYAIEEAIQLKEKHGGTITAVTVGGEEAEKELRTALAMGCDQAVLINIEDDLDEPDQYSISQVLYHYMKDQEFDLILGGNVAIDGGSGQVAPRLAELLDIPCITTITKLEINGTDAEAERDVEGDVEKIKTTLPLLVTAQQGLNEPRYPSLPGIMKAKKKPLEELELDDLDLDEEDAEPKLKTIERFLPPKKEAGKLLQGEPAEQAKELVSLLRSEAKVI

SEQ ID NO: 74951 - DNA, 750 bp, Bradyrhizobium japonicum
  CDS (1)..(750): transl_table=11
atgaaggtcttagtgccggtaaagcgggtggtcgattacaacgtcaaggtccgcgtcaagggcgatggatcgggcgttgaactcgccaacgtcaagatgtcgatgaacccgttcgacgaaatcgcggtcgaggaagcgctgcgcctgaaggaaggtggcaaggccaccgaggtcgtggtggtttccattggaccggcgcaggcgtcggagacgatccgcaccggtcttgccatgggcgccgatcgcggcatcctggtgaaggccgagggcaccgtcgagccgctcgccgtcgccaagatcctgaagaaggtcgctgaggaagagcagccgggcctgatcatcctcggcaagcaggcgatcgacgacgacagcaaccagaccggccagatgctggccgcgctgctcggctggtcgcaggcgacgttcgcctcgaagctcgaggtcgaaggaagcgacttcaaggtcactcgtgaagtcgacgggggcttgcagaccgtgaagctgaagggaccggcgatcgtgaccaccgacctgcgtctcaacgagccgcgctacgcctcgctgcccaacatcatgaaggcgaagaagaagccgatcgcggagaagaccgtcgccgattacggcgttgacgtcaccgcgcgcctcgaggttctcaagacgaccgagccggcgggccgcaaggccggcgtcaaggtcaaggacgtcgccgagctggtgtcgaaactcaagaacgaagccggggtgctctga

SEQ ID NO: 74952 - protein, 249 aa, Bradyrhizobium japonicum
MKVLVPVKRVVDYNVKVRVKGDGSGVELANVKMSMNPFDEIAVEEALRLKEGGKATEVVVVSIGPAQASETIRTGLAMGADRGILVKAEGTVEPLAVAKILKKVAEEEQPGLIILGKQAIDDDSNQTGQMLAALLGWSQATFASKLEVEGSDFKVTREVDGGLQTVKLKGPAIVTTDLRLNEPRYASLPNIMKAKKKPIAEKTVADYGVDVTARLEVLKTTEPAGRKAGVKVKDVAELVSKLKNEAGVL

SEQ ID NO: 74953 - DNA, 783 bp, Clostridium thermosaccharolyticum
  CDS (1)..(783): transl_table=11
atgaatatacttgttttgattaagcaggttccggatacgaacgaagttagaattgatcctgtaacaaagacacttatacgtgaaggtgttccaagcattattaatcctgatgacaaaaatgccttagaagaagctatcaggataagagaaaaagtcggcggaaaagtaactgtaatatcgatgggaccaacacaagcagaagtagcattacgtgaggctcttgctatgggtgctgatgaagcatatcttttgacagatagagcatttgcaggcgcagacacttatgctactgcaaaagcactatcaaaagcaattgaaaagtttcagtacgacattgtattttgcggcagacaggcgatagatggcgatactgcacaagttggaccacaaattgcagaacaattagacatacctcaggtaacatatgtaaggaaggtagaaatagaaggagacaaactcatagttgaaagagctcttgaagatggatatgaaatcattgaagttaagacgccagtcttattgacagctattaaagaacttaatgtgcctaggtatccttcaataaaaggaatattcaatgcttacaataaaaaagaagttaaaatcttaactgcagatgatttagaagttgataaaaatgaacttggactaaaaggttcaccaactaaggttgtagcaacgtcaactccaaatactgaaagagctggagaaatatttactggcaatataaaagaagctgttcagaatctagttgaaagattaaacagcagacatgtgatatag

SEQ ID NO: 74954 - protein, 260 aa, Clostridium thermosaccharolyticum
MNILVLIKQVPDTNEVRIDPVTKTLIREGVPSIINPDDKNALEEAIRIREKVGGKVTVISMGPTQAEVALREALAMGADEAYLLTDRAFAGADTYATAKALSKAIEKFQYDIVFCGRQAIDGDTAQVGPQIAEQLDIPQVTYVRKVEIEGDKLIVERALEDGYEIIEVKTPVLLTAIKELNVPRYPSIKGIFNAYNKKEVKILTADDLEVDKNELGLKGSPTKVVATSTPNTERAGEIFTGNIKEAVQNLVERLNSRHVI

SEQ ID NO: 74955 - DNA, 759 bp, Paracoccus denitrificans
  CDS (1)..(759): transl_table=11
atgaaggttctcgtgccagtcaagcgcctgatcgactacaacgtgaaggcgcgtgtgaagtctgacggttctggagttgatcttgcgaacgtgaagatgtcgatgaacccgttcgacgagatcgcggtcgaggaggcgatccgtctgaaggagaagggccaggccgaggagatcatcgcggtctcgatcggcgtcaagcaggcggccgagacgctgcgcacggcgctggccatgggcgccgaccgggcgatcctggtggtggccgcggacgacgtgcagcaggacatcgagccgctggcggtggcgaagatcctcgccgcggtggccagggcggaaggcaccgagctcatcatcgccggcaagcaggcgatcgacaacgacatgaacgccaccggccagatgctggcggcgatcctgggctgggcgcaggcgaccttcgcctcgaaagtcgagatcgaaggggccaaggccaaggtgacgcgcgaggtcgacggcggcctccagaccatcgcggtcagcctgccggcggtggtcaccgccgacctgcggctgaacgagccgcgctatgcctcgctgccgaacatcatgaaggccaagaagaagccgctcgatgaaaagaccgccgccgattacggcgtcgacgtcgcgccgcggctcgaggtggtctcggtgcgcgagcccgagggccgcaaggccggcatcaaggtgggctcggtggacgagctggtgggcaagctgaaagaagcgggggtgatctga

SEQ ID NO: 74956 - protein, 252 aa, Paracoccus denitrificans
MKVLVPVKRLIDYNVKARVKSDGSGVDLANVKMSMNPFDEIAVEEAIRLKEKGQAEEIIAVSIGVKQAAETLRTALAMGADRAILVVAADDVQQDIEPLAVAKILAAVARAEGTELIIAGKQAIDNDMNATGQMLAAILGWAQATFASKVEIEGAKAKVTREVDGGLQTIAVSLPAVVTADLRLNEPRYASLPNIMKAKKKPLDEKTAADYGVDVAPRLEVVSVREPEGRKAGIKVGSVDELVGKLKEAGVI

SEQ ID NO: 74957 - DNA, 750 bp, Pseudomonas aeruginosa
  CDS (1)..(750): transl_table=11
atgaaggttcttgtagcagtcaaacgagtggtcgactacaacgtcaaggtccgcgtcaaggcggacaactccggcgtcgacctcgccaacgtcaagatgtccatgaaccccttctgcgaaatcgccgtggaagaagccgtgcgcctgaaagagaagggcgtggctaccgagatcgtcgctgtctccgtcggcccgaccgccgcccaggagcaactgcgcaccgcgctggcgctgggcgctgaccgtgcgatcctggtggagagcaacgacgagctgaactccctggccgtggccaagctgctcaaggccgtggtcgacaaggagcagccgcagctggtgatcctcggcaagcaggccatcgacagcgacaacaaccagaccggccagatgctcgccgcgctgaccggctacgcccagggcaccttcgcctccaaggtcgaggtcgctggcgacaaggtcaacgtgacccgcgagatcgatggcggtctgcagaccgtcgcgctgaacctgccggccatcgtcaccaccgacctgcgcctgaacgagccgcgctacgcgtcgctgccgaacatcatgaaagccaagaagaagccgctggacgtggtgaccccggacgccctgggcgtttccaccgcttccaccgtgaagaccctgaaggtcgaggcgccggctgcacgctccgctggcatcaaggtcaagtccgtggctgaactggtagagaaactgaagaacgaggcgaaggtaatctaa

SEQ ID NO: 74958 - protein, 249 aa, Pseudomonas aeruginosa
MKVLVAVKRVVDYNVKVRVKADNSGVDLANVKMSMNPFCEIAVEEAVRLKEKGVATEIVAVSVGPTAAQEQLRTALALGADRAILVESNDELNSLAVAKLLKAVVDKEQPQLVILGKQAIDSDNNQTGQMLAALTGYAQGTFASKVEVAGDKVNVTREIDGGLQTVALNLPAIVTTDLRLNEPRYASLPNIMKAKKKPLDVVTPDALGVSTASTVKTLKVEAPAARSAGIKVKSVAELVEKLKNEAKVI

SEQ ID NO: 74959 - DNA, 765 bp, Schizosaccharomyces pombe
  CDS (1)..(765)
atgtcgaaaattcgcattttagtaggagtcaagcgaactctagactatatgttaaagcctcgcatcaatgccactaagactgctgttgatttatcggggcaaaaaatgagtattaatccattttgtgatattgctgtagaagaggctataaggatgaaggaaactttgaaaaatagaattgaggacactttagtagtgaccgcaggacaaacttcttctgagcccattcttcgccagtgtcttgctaaaggaattggccgagcagcacttataaatgttggcgaaaaagaacttgaacctctttcagtagccaaacttttgaaggcaacagtcgagaaggaaaaaagtaatctggttttgctgggcaagcaagctattgatgatgatgcacaccaaacaggtggtatgctggctgctatgcttggatggcctcaattcactagcgcaagtaaagtccgtattgaaggtgacaaagttatcgttacaagagaaattgacggcggtgaagaaaccttaagtagtacacttccagccattattaccaccgatttacgtcttaatgttcctagattcgcgaatttggcaaaagttatgaaggcaaggaaggctcctttaggcaaaatgtctcccgaagatctaggcgtaacaattgatcaaagactacagactgtttcagtctccgagcctgttcaaaagagacaaaacataatggtaaagagtgttgatgaaatggttaagacattaaaggaacttggcgccctctaa

SEQ ID NO: 74960 - protein, 254 aa, Schizosaccharomyces pombe
MSKIRILVGVKRTLDYMLKPRINATKTAVDLSGQKMSINPFCDIAVEEAIRMKETLKNRIEDTLVVTAGQTSSEPILRQCLAKGIGRAALINVGEKELEPLSVAKLLKATVEKEKSNLVLLGKQAIDDDAHQTGGMLAAMLGWPQFTSASKVRIEGDKVIVTREIDGGEETLSSTLPAIITTDLRLNVPRFANLAKVMKARKAPLGKMSPEDLGVTIDQRLQTVSVSEPVQKRQNIMVKSVDEMVKTLKELGAL

SEQ ID NO: 74961 - DNA, 786 bp, Saccharomyces cerevisiae
  CDS (1)..(786)
atgtctgcaaaacagcaactacgtatattagttccggtgaaaagggtagttgatttccagatcaagcctagagtaaataagaccttaactgggattgaaaccagtggaatcaaattcagtatcaaccctttcgatgatattgctgtcgaagaagccatcagaattaaagaaaagaacaagagtttagtagaatctacgcatgcagtttctattggctccgccaaagctcaggatattctaagaaattgccttgctaagggaatagacacctgtagtttaattgactctgtgggtaaagaaaacatagagcccttagcaattgctaaaatcttaaaagctgttgttgaaaagaagggttctaatctggttttgatgggaaagcaagccattgatgatgactgtaacaacaccggtcagatgttggcaggtttattaaattggccacaggcaacaaatgcggcaaaggtggaattccttgataatggtagagttcaggtaacaagagaaattgacgatggagaagaagtaattgaagcttccttaccaatggttattactacagatttgagattgaacactccgcgttacgtaggactgcccaaactaatgaaggcgaagaaaaagcctattgaaaaattggatatagcaaaagattttcctgaaattaatattgaacctcagttaaagatagtgtcgatggaagagccaaagactaagtcacctggtgtgaaattgaattctgtggatgaattgattgaaaagttaaaagaagttaaggccatttaa

SEQ ID NO: 74962 - protein, 261 aa, Saccharomyces cerevisiae
MSAKQQLRILVPVKRVVDFQIKPRVNKTLTGIETSGIKFSINPFDDIAVEEAIRIKEKNKSLVESTHAVSIGSAKAQDILRNCLAKGIDTCSLIDSVGKENIEPLAIAKILKAVVEKKGSNLVLMGKQAIDDDCNNTGQMLAGLLNWPQATNAAKVEFLDNGRVQVTREIDDGEEVIEASLPMVITTDLRLNTPRYVGLPKLMKAKKKPIEKLDIAKDFPEINIEPQLKIVSMEEPKTKSPGVKLNSVDELIEKLKEVKAI

SEQ ID NO: 74963 - DNA, 846 bp, Azotobacter vinelandii
  CDS (1)..(846): transl_table=11
atgcacagcgtcgtctgtatcaagcagttgccggactcggcccagatccgggttcacccggtcaccaacaccatcatgcgccagggtgtcccggcgatcatcaacccttatgacctgttcgccctggaggaggccctgcgcctcaaggataagttcggcggcacggtcaccgtggtcaccatgggcccgcccatggccgaggcggcgctacgcaagtgcctgtccttcggcgccgacgacgccatcctggtgtcggaccgggccttcgccggctccgacaccctggccacttcctatgccctcagcgccgtcatccgcaagatcatggaagacatgccggtggacctgatcttcaccggcaagcagaccatcgacggcgacaccgcccaggtcgggccgggcatcgccaagcgcttggactaccagttgctcacctatgtgtccaggatcgtcgacgtcgacaccgcgaagaaggaaatccaggtggagcgtcgcgccgaaggcggcgtgcaattgctcgagacctcccttccctgcctgatcaccatgctggaaggcaccaatgaaatgcgtttcggcgatctggacgacctgtttcgcgccgcgcgccacgaactcaaggtctgggaccgcgtggccgccggcatcgatacggtggagatgatcggcctcaagggcagccccacggtggtcagcaaggtcttcgcgcccaagccccgcagcaagcgcgccgaactcatcgaaagccacgacagcgatccgaagaatctggccgaggccgcgctggccaagctgttcacccagcatcccaacttggaacaggaaatcgccaagcgggcggtctga

SEQ ID NO: 74964 - protein, 281 aa, Azotobacter vinelandii
MHSVVCIKQLPDSAQIRVHPVTNTIMRQGVPAIINPYDLFALEEALRLKDKFGGTVTVVTMGPPMAEAALRKCLSFGADDAILVSDRAFAGSDTLATSYALSAVIRKIMEDMPVDLIFTGKQTIDGDTAQVGPGIAKRLDYQLLTYVSRIVDVDTAKKEIQVERRAEGGVQLLETSLPCLITMLEGTNEMRFGDLDDLFRAARHELKVWDRVAAGIDTVEMIGLKGSPTVVSKVFAPKPRSKRAELIESHDSDPKNLAEAALAKLFTQHPNLEQEIAKRAV

SEQ ID NO: 74965 - DNA, 867 bp, Bradyrhizobium japonicum
  CDS (1)..(867): transl_table=11
ttgcataatattgtctgcatcaagcaagttccggactcggcgcagatccgcgtgcaccccgtgaccaatacaatcatgcgtcagggagtgccgaccatcatcaacccgtatgacctattcgcgctcgaggccgcgctggggctgcgcgatcggttcggtggcgaaattaccgtgcttaccatggggccgccatcggcagaggagtcgttgcgaaaggcgctgacttatggtgctgatcgcgccgtcctacttactgatcgctgctttgcgggctcggatacgctggccactacgtatgcgcttgcaacagcgatccggaaaattggcaaggaatatggtccggcaaacctcatcttcacgggaaagcagaccatcgacggcgatacagcgcaggttggtcctggcatcgcgaagcgactgggcgtagggcagctaacttacgttgcgaaggtcagatccgtggacgtcgccaatgaaacaattgaagcggagcggcgctcggaaggcggtgtgcaggttctgcacactaggttgccctgcctcatcaccatgcttgaggcgacgaatcagattcggcgaggcgcgatggcggatgccttgcgtgccgcgcgagccaaaatcgtgaaatggagcgcgcaagatgcaggtgtcgaagacatctccaaatgtgggctcaagggctcgccgactgtcgtcaaacgtgtgttcgctccccctgcgcgggccgagagggcggcgctggttgagtccgccgagcagccggcgcaggcgctaatagacgcaatcttcttgaatcaaccgaagctcgaaaccgatctggcgacacttgctcgtgacgcccgatctggactgtccgggcaatgttag

SEQ ID NO: 74966 - protein, 288 aa, Bradyrhizobium japonicum
MHNIVCIKQVPDSAQIRVHPVTNTIMRQGVPTIINPYDLFALEAALGLRDRFGGEITVLTMGPPSAEESLRKALTYGADRAVLLTDRCFAGSDTLATTYALATAIRKIGKEYGPANLIFTGKQTIDGDTAQVGPGIAKRLGVGQLTYVAKVRSVDVANETIEAERRSEGGVQVLHTRLPCLITMLEATNQIRRGAMADALRAARAKIVKWSAQDAGVEDISKCGLKGSPTVVKRVFAPPARAERAALVESAEQPAQALIDAIFLNQPKLETDLATLARDARSGLSGQC

SEQ ID NO: 74967 - DNA, 840 bp, Rhizobium leguminosarum bv
  CDS (1)..(840): transl_table=11
atgcacatagttatctgtatcaaacaggtaccggactccgcacaaatacgagtcgatccggtgacgaacacaatcatgcgtcagggggtgccaaccatcatcaacccctatgatctgttcgcgcttgaagagcgctccagttgcgcgagccatggcggcgaggtgaccgtgctcaccatggggccgcccatggcagaggacgcgttgcgcaaggcgctcaccgtagccgaccgcgccgtactcttgaccgagcgtcattttgccggctccgacactctggcgacctcgtttgctctttcgcgagccatcgcgaagatcggagaggccttcggtacgcccgatatcgtctttacggccaaacagacgatcgacggcgataccgcccaggttgggcctggcatcgccaagcgcctcgacctcctgcagctcacctacgttgcgaaaatcgtctctgtcgacatcaatgggcgcgagattacggtggagcgccgctcggaagggggcacgcagacgctgatgagcaagctcccttgcctaattacaatgctcgaaggcacaaacgaaatccgccgcggctcgctcgatgacgcgctacgggccgcgcgcagccagatcgtgaagtggaatgcggccgacgctggcatagaggacctcaccaagtgcggcctgcgtggctcgccaaccgtcgttaagagggtctttgcccctcctgagcgggcggaaaaggcggagcagatcgacaccgcggaaaaaacaccgcgcgatctcgcggaggagttgatcgctgggatctttttgcgcagcggcgtcgaaagcgaactcgcctttgacgcgaattga

SEQ ID NO: 74968 - protein, 279 aa, Rhizobium leguminosarum bv
MHIVICIKQVPDSAQIRVDPVTNTIMRQGVPTIINPYDLFALEERSSCASHGGEVTVLTMGPPMAEDALRKALTVADRAVLLTERHFAGSDTLATSFALSRAIAKIGEAFGTPDIVFTAKQTIDGDTAQVGPGIAKRLDLLQLTYVAKIVSVDINGREITVERRSEGGTQTLMSKLPCLITMLEGTNEIRRGSLDDALRAARSQIVKWNAADAGIEDLTKCGLRGSPTVVKRVFAPPERAEKAEQIDTAEKTPRDLAEELIAGIFLRSGVESELAFDAN

SEQ ID NO: 74969 - DNA, 879 bp, Rhizobium meliloti
  CDS (1)..(879): transl_table=11
atgcaccttgtagtctgtatcaaacaggtgccggattccgcgcaaatacgcgtccatccggtgaccaacacgatcatgcgacagggcgtgccgaccattatcaacccccatgatctggccgccctcgaagaagcactgaagttgtgcgacacgtatggaggcgaggttaccgtggtgaccatgggccctaagatggccgaggacgcgctgcgcaaggcactcacgtttggcgcacaccgcgccgttctcttgaccgaccgccattttgcaggctcggatacgctcgcgacctccttcgcccttgctcaagcaatcgcggagatcggcgagaccttcggcacgcctgatgttgtgttcaccggcaagcagacgatcgacggcgacactgcccaagttggacctggaattgccaagcgcctcgacctacagcagctcacttacgtggcgaagattctctccattgatgccgcttcgcgcgagatcactgttgagcggcgcgcggaaggcggctcgcagatcctgagaaccggactaccatgccttgtcactatgctggacggcgccgacgccatccgtcgcgggcgtctcgacgacgcccttcgcgccgcgcgcaccaaggtcgtcaagtggagtgcggcggacgccggcattgcagaaccggccaactgtggcttgcgaggatctccgacggtcgtaaagcgcgtgtttgccccaacttcccgcgaacaaaaggcaaggcagatcgacaccacaaataagccactgcgtgagatcgcggacggtctgatcgcggcaatctttgccgaccggccggccttgaaacacgatctcggcagcacgggacagcaaggagcaccagatgtcgaccgagaatcgtga

SEQ ID NO: 74970 - protein, 292 aa, Rhizobium meliloti
MHLVVCIKQVPDSAQIRVHPVTNTIMRQGVPTIINPHDLAALEEALKLCDTYGGEVTVVTMGPKMAEDALRKALTFGAHRAVLLTDRHFAGSDTLATSFALAQAIAEIGETFGTPDVVFTGKQTIDGDTAQVGPGIAKRLDLQQLTYVAKILSIDAASREITVERRAEGGSQILRTGLPCLVTMLDGADAIRRGRLDDALRAARTKVVKWSAADAGIAEPANCGLRGSPTVVKRVFAPTSREQKARQIDTTNKPLREIADGLIAAIFADRPALKHDLGSTGQQGAPDVDRES

SEQ ID NO: 74971 - DNA, 765 bp, Escherichia coli
  CDS (1)..(765): transl_table=11
atgaaaataataacctgctttaagctggtgcctgaagaacaggacattgttgtcactccagaatacaccctgaatttcgacaatgccgacgccaaaatcagccagttcgatctcaatgccattgaagctgcaagccagctcgcaacagatgacgatgagatagccgcgctgaccgttggcggctcattgttgcagaactcgaaagtgcgcaaagacgtgctatcccgcgggccgcacagcctgtatttggtgcaggatgcgcaacttgaacatgcactgcctctcgataccgcaaaagcgctggcggcagcaattgaaaagatcggcttcgatttactgatctttggtgaaggttccggcgacctttatgcccagcaggttggcttgctggtcggagaaattctgcaacttccggtgattaatgcagtgagtgctattcagcgtcagggcaatacactggtgattgaacgcacgcttgaagatgatgttgaagttattgaactctctgttccagccgtgctctgcgtcacctccgatattaacgtgccacgcattccttcgatgaaagccattctcggcgcgggtaaaaaaccggtaaatcagtggcaggcaagtgatattgactggagccagagcgcgccacttgctgaactggtcggcattcgcgtaccgccgcaaacagaacgtaagcacatcattatcgataacgattcgccggaggccattgccgagctggcggaacatctgaagaaagccctgaactga

SEQ ID NO: 74972 - protein, 254 aa, Escherichia coli
MKIITCFKLVPEEQDIVVTPEYTLNFDNADAKISQFDLNAIEAASQLATDDDEIAALTVGGSLLQNSKVRKDVLSRGPHSLYLVQDAQLEHALPLDTAKALAAAIEKIGFDLLIFGEGSGDLYAQQVGLLVGEILQLPVINAVSAIQRQGNTLVIERTLEDDVEVIELSVPAVLCVTSDINVPRIPSMKAILGAGKKPVNQWQASDIDWSQSAPLAELVGIRVPPQTERKHIIIDNDSPEAIAELAEHLKKALN

SEQ ID NO: 74973 - DNA, 762 bp, Oryza sativa
  CDS (1)..(762)
atgaagatcctagtggcggtgaagcgggtggtggactacgccgtcaaggtgcgggtgaggcccgaccggacgggcgtcgagacggcgagcgtcaagatgtccatgaacccattctgcgagatcgccgtcgaggaggcgctccgcctccgcgagtccggcgccgccaccgaggtcgtcgccgccaccgtcggcccctcccagtccgccgacaccctccgcaccgcgctcgccatgggcgccgaccgcgccgtccacgtcctccacgaccccgacccctcccgccccctcctccccctcgccgtcgccaagatcctccgcgccctcgcgctccaggagaaccccggcctcgtcatcctcggcaagcaggcaattgatgatgattgcaaccaaacaggacaaatgctagctgggttgcttaattggccacaaggaacctttgcctcaaaggttatattgaacaaggaaaaggctactgtggagagagaggtcgatggcggaatcgagaccattagcttggatttgcctgcagttatcaccacggatttgagactgaaccaaccaaggtatgcaacattgccaaacataatgaaggcaaaatcaaaagtcatcaagaaagtcacccccgaagatctggatgtagatatcagatcagacatggaagtagttgaggtcactgaaccacctaagagaaaagccggtgtcattctttcatccgtcgatgagctcgttgacaggttgaaaaatgaagcccgtgttttataa

SEQ ID NO: 74974 - protein, 253 aa, Oryza sativa
MKILVAVKRVVDYAVKVRVRPDRTGVETASVKMSMNPFCEIAVEEALRLRESGAATEVVAATVGPSQSADTLRTALAMGADRAVHVLHDPDPSRPLLPLAVAKILRALALQENPGLVILGKQAIDDDCNQTGQMLAGLLNWPQGTFASKVILNKEKATVEREVDGGIETISLDLPAVITTDLRLNQPRYATLPNIMKAKSKVIKKVTPEDLDVDIRSDMEVVEVTEPPKRKAGVILSSVDELVDRLKNEARVL

SEQ ID NO: 74975 - DNA, 756 bp, Brassica napus
  CDS (1)..(756)
atgaagattctcgtcgccgttaagcgtgtcgtcgactacgccgtcaagatccgtgtcaaacccgacaagaccggcgtagatacccagaatgtcaagatgtcgatgaacccattctgcgagatcgcgctcgaggaagcccttcgaatcaaagaagctgggttcgccaaagaggtcgtcgcagtgagcatcggacctccacagtgcgtcgacacgcttcgcactggtctagccatgggcgctgatcgaggaatccatgtcgaggccaattctagcttcctccctttgacgatcgctaagatcttgaagagtctcgctgatgtcgagaatcctgggttgattttcctcgggaaacaggcaatagatgatgactgcaatcaaacaggacaaatggttgcagctttgcttggttggccacaagcaacttttgcatctaaggttgtgttggataaggataagcagtttgcaactgtggatagagaagtagatggaggtcttgaaacccttagtgtagatttacccgctgtgatcacaactgacttgaggctgaaccaaccaagatatgcaacactcccaaacataatgaaggcaaaatcgaagccgataaagaaaatgacgttggaggatctgaaagtagacattaaatctgacatagagattgtggaagtcacggagccaaaaaagaggaaatctggagttatcgtttcttcagtggatgagttgatagataagctcaaaaatgaagctcatgtagtttga

SEQ ID NO: 74976 - protein, 251 aa, Brassica napus
MKILVAVKRVVDYAVKIRVKPDKTGVDTQNVKMSMNPFCEIALEEALRIKEAGFAKEVVAVSIGPPQCVDTLRTGLAMGADRGIHVEANSSFLPLTIAKILKSLADVENPGLIFLGKQAIDDDCNQTGQMVAALLGWPQATFASKVVLDKDKQFATVDREVDGGLETLSVDLPAVITTDLRLNQPRYATLPNIMKAKSKPIKKMTLEDLKVDIKSDIEIVEVTEPKKRKSGVIVSSVDELIDKLKNEAHVV

SEQ ID NO: 74977 - DNA, 765 bp, Glycine max
  CDS (1)..(765)
atgacgatgaagataatgagagagattaagagagagagagagacagagagtgagagagagagagagagggcagacaagacaggggtggtgagccataacgtgaaaatgtcgatgaaccccttctgcgagatcgctctcgaagaggcccttcgcatcagagagtctggcttggcctccgaggttgtcgccgtcaccatgggaccctctcaatctctagacactctccgaaccggtcttgccatgggagccgacagaggcatccatgtcgagtcaactgcttccctctaccctctctctgttgccaagattttgagaaaactcgtcgagattgagaaacccgctcttctcatccttggcaaacaggccattgatgatgattgcaatcaaactgggcagatgatagcaggactcctcaactggcctcaagggacttttgcttctaaggtggtccttgacaaagagaaacaggttgccacagttgacagagaggttgacgatggtattgaaaccgtgtgtctaaacttaccagcagtaataaccactgatctgagactgaaccaaccaaggtatgctactcttcccaacataatgaaagcaaagtcgaaacccataaaaaaattcactccggaggagttgaatgtagaaatcaaatctgatttggagatagttcaagtcacagaacctcccaagagaaaagcaggggttattctttcttctgtggatgagctgattgacaaactaaaacatgaagctaatgtcatctaa

SEQ ID NO: 74978 - protein, 254 aa, Glycine max
MTMKIMREIKRERETESERERERADKTGVVSHNVKMSMNPFCEIALEEALRIRESGLASEVVAVTMGPSQSLDTLRTGLAMGADRGIHVESTASLYPLSVAKILRKLVEIEKPALLILGKQAIDDDCNQTGQMIAGLLNWPQGTFASKVVLDKEKQVATVDREVDDGIETVCLNLPAVITTDLRLNQPRYATLPNIMKAKSKPIKKFTPEELNVEIKSDLEIVQVTEPPKRKAGVILSSVDELIDKLKHEANVI

SEQ ID NO: 74979 - DNA, 21 bp, Artificial sequence
  primer
atgaaggttcttgtagctgtc

SEQ ID NO: 74980 - DNA, 22 bp, Artificial sequence
  primer
tcagatcaccttcgcttcgttc

SEQ ID NO: 74981 - protein, 282 aa, Artificial sequence
  consensus sequence
  Variant (2)..(4): Xaa in position 2 to 4 is any amino acid
  Variant (6)..(7): Xaa in position 6 to 7 is any amino acid
  Variant (9)..(9): Xaa in position 9 is any amino acid
  Variant (11)..(11): Xaa in position 11 is any amino acid
  Variant (13)..(15): Xaa in position 13 to 15 is any amino acid
  Variant (16)..(18): Xaa in position 16 to 18 is any or no amino acid
  Variant (21)..(29): Xaa in position 21 to 29 is any amino acid
  Variant (30)..(31): Xaa in position 30 to 31 is any or no amino acid
  Variant (33)..(36): Xaa in position 33 to 36 is any amino acid
  Variant (39)..(40): Xaa in position 39 to 40 is any amino acid
  Variant (42)..(42): Xaa in position 42 is any amino acid
  Variant (44)..(44): Xaa in position 44 is any amino acid
  Variant (48)..(48): Xaa in position 48 is any amino acid
  Variant (50)..(51): Xaa in position 50 to 51 is any amino acid
  Variant (53)..(55): Xaa in position 53 to 55 is any amino acid
  Variant (56)..(61): Xaa in position 56 to 61 is any or no amino acid
  Variant (63)..(68): Xaa in position 63 to 68 is any amino acid
  Variant (70)..(75): Xaa in position 70 to 75 is any amino acid
  Variant (76)..(77): Xaa in position 76 to 77 is any or no amino acid
  Variant (80)..(80): Xaa in position 80 is any amino acid
  Variant (84)..(84): Xaa in position 84 is any amino acid
  Variant (88)..(102): Xaa in position 88 to 102 is any amino acid
  Variant (103)..(108): Xaa in position 103 to 108 is any or no amino acid
  Variant (110)..(111): Xaa in position 110 to 111 is any amino acid
  Variant (113)..(122): Xaa in position 113 to 122 is any amino acid
  Variant (123)..(127): Xaa in position 123 to 127 is any or no amino acid
  Variant (129)..(131): Xaa in position 129 to 131 is any amino acid
  Variant (135)..(135): Xaa in position 135 is any amino acid
  Variant (138)..(138): Xaa in position 138 is any amino acid
  Variant (140)..(141): Xaa in position 140 to 141 is any amino acid
  Variant (143)..(143): Xaa in position 143 is any amino acid
  Variant (145)..(147): Xaa in position 145 to 147 is any amino acid
  Variant (149)..(154): Xaa in position 149 to 154 is any amino acid
  Variant (156)..(156): Xaa in position 156 is any amino acid
  Variant (158)..(169): Xaa in position 158 to 169 is any amino acid
  Variant (170)..(176): Xaa in position 170 to 176 is any or no amino acid
  Variant (178)..(178): Xaa in position 178 is any amino acid
  Variant (181)..(182): Xaa in position 181 to 182 is any amino acid
  Variant (184)..(184): Xaa in position 184 is any amino acid
  Variant (186)..(193): Xaa in position 186 to 193 is any amino acid
  Variant (195)..(197): Xaa in position 195 to 197 is any amino acid
  Variant (199)..(202): Xaa in position 199 to 202 is any amino acid
  Variant (205)..(205): Xaa in position 205 is any amino acid
  Variant (209)..(210): Xaa in position 209 to 210 is any amino acid
  Variant (212)..(213): Xaa in position 212 to 213 is any amino acid
  Variant (216)..(216): Xaa in position 216 is any amino acid
  Variant (219)..(219): Xaa in position 219 is any amino acid
  Variant (221)..(241): Xaa in position 221 to 241 is any amino acid
  Variant (242)..(253): Xaa in position 242 to 253 is any or no amino acid
  Variant (255)..(255): Xaa in position 255 is any amino acid
  Variant (256)..(256): Xaa in position 256 is any or no amino acid
  Variant (258)..(259): Xaa in position 258 to 259 is any amino acid
  Variant (261)..(268): Xaa in position 261 to 268 is any amino acid
  Variant (269)..(277): Xaa in position 269 to 277 is any or no amino acid
  Variant (279)..(281): Xaa in position 279 to 281 is any amino acid
MXXXVXXKXVXDXXXXXXRVXXXXXXXXXXXVXXXXNPXXEXAXEEAXRXXEXXXXXXXXXEXXXXXXGXXXXXXXXLRXALAXGADXXXXXXXXXXXXXXXXXXXXXAXXLXXXXXXXXXXXXXXXLXXXGKQXIDXDXXQXGXXXAXXXXXXQXTXXXXXXXXXXXXXXXXXXXVXREXXGXGXXXXXXXXPXXXTXXXXLNXPRYXXLXXIMXAKXKXXXXXXXXXXXXXXXXXXXXXXXXXXXXXXXXXPXXRXXGXXXXXXXXXXXXXXXXXLXXXL

SEQ ID NO: 74982 - protein, 29 aa, Artificial sequence
  protein pattern
  Variant (2)..(7): Xaa in position 2 to 7 is any amino acid
  Variant (8)..(9): Xaa in position 8 to 9 is any or no amino acid
  Variant (11)..(12): Xaa in position 11 to 12 is any or no amino acid
  Variant (14)..(14): Xaa in position 14 is any amino acid
  Variant (17)..(17): Xaa in position 17 is Phe or Tyr
  Variant (18)..(18): Xaa in position 18 is Ala, Ile, Pro or Val
  Variant (19)..(19): Xaa in position 19 is any amino acid
  Variant (20)..(20): Xaa in position 20 is Leu, Met or Val
  Variant (21)..(22): Xaa in position 21 to 22 is any amino acid
  Variant (23)..(23): Xaa in position 23 is Ile, Leu or Met
  Variant (25)..(25): Xaa in position 25 is any amino acid
  Variant (27)..(27): Xaa in position 27 is Lys or Arg
  Variant (28)..(28): Xaa in position 28 is any amino acid
PXXXXXXXXLXXNXPRXXXXXXXMXAXXK

SEQ ID NO: 74983 - protein, 11 aa, Artificial sequence
  protein pattern
  Variant (3)..(3): Xaa in position 3 is any amino acid
  Variant (4)..(4): Xaa in position 4 is Cys or Asp
  Variant (5)..(6): Xaa in position 5 to 6 is any amino acid
  Variant (7)..(7): Xaa in position 7 is Ala or Ser
  Variant (8)..(8): Xaa in position 8 is Ile, Leu or Val
NPXXXXXXEEA

SEQ ID NO: 74984 - protein, 16 aa, Artificial sequence
  protein pattern
  Variant (3)..(3): Xaa in position 3 is Ala, Ser or Thr
  Variant (6)..(6): Xaa in position 6 is Ala, Asp, Gly, Asn, Ser or Thr
  Variant (8)..(10): Xaa in position 8 to 10 is any amino acid
  Variant (11)..(11): Xaa in position 11 is Thr or Val
  Variant (12)..(12): Xaa in position 12 is Ala, Gly or Pro
  Variant (13)..(15): Xaa in position 13 to 15 is any amino acid
  Variant (16)..(16): Xaa in position 16 is Ala, Gly or Ser
KQXIDXDXXXXXXXXX

SEQ ID NO: 74985 - protein, 18 aa, Artificial sequence
  protein pattern
  Variant (2)..(4): Xaa in position 2 to 4 is any amino acid
  Variant (5)..(5): Xaa in position 5 is Ala, Cys, Ser or Val
  Variant (6)..(8): Xaa in position 6 to 8 is any amino acid
  Variant (9)..(9): Xaa in position 9 is Ile or Leu
  Variant (10)..(10): Xaa in position 10 is Glu or Arg
  Variant (11)..(11): Xaa in position 11 is any amino acid
  Variant (12)..(12): Xaa in position 12 is Ala, Cys, Gly or Ser
  Variant (13)..(13): Xaa in position 13 is any amino acid
  Variant (14)..(14): Xaa in position 14 is Ala, Ser or Thr
  Variant (15)..(15): Xaa in position 15 is any amino acid
GXXXXXXXXXXXXXXGAD

SEQ ID NO: 74986 - DNA, 381 bp, Escherichia coli
  CDS (1)..(381): transl_table=11
atgattcgcacgatgctgcagggcaaactccaccgcgtgaaagtgactcatgcggacctgcactatgaaggttcttgcgccattgaccaggattttcttgacgcagccggtattctcgaaaacgaagccattgatatctggaatgtcaccaacggcaagcgtttctccacttatgccatcgcggcagaacgcggttcgagaattatttctgttaacggtgcggcggcccactgcgccagtgtcggcgatattgtcatcatcgccagcttcgttaccatgccagatgaagaagctcgcacctggcgacccaacgtcgcctattttgaaggcgacaatgaaatgaaacgtaccgcgaaagcgattccggtacaggttgcttaa

SEQ ID NO: 74987 - protein, 126 aa, Escherichia coli
MIRTMLQGKLHRVKVTHADLHYEGSCAIDQDFLDAAGILENEAIDIWNVTNGKRFSTYAIAAERGSRIISVNGAAAHCASVGDIVIIASFVTMPDEEARTWRPNVAYFEGDNEMKRTAKAIPVQVA

SEQ ID NO: 74988 - DNA, 402 bp, Legionella pneumophila
  CDS (1)..(402): transl_table=11
atggcttatagaaaaatgcttaaatcaaaaattcatcgtgcttgcgtcacacaggcggatctggattatgaagggagtatcaccatttcaccagagcttttaaaagtggcaaacatattgccctatgaagcggttaatgtctggaatatcactgccggaacccgatttgaaacttatgccattacaggtgaaaagggttcaacggatatctgtgtcaatggagcggcagctcatttggtaacccctggcgatttggttattatcgcctcttttacgcaaattctggaagaggattgtgcagcacatgaacccactgttgtttttgttgatcaattcaatcgtctgaaagaaatccgacctgaaagaatcggtgttaaaagtagaattccttacccggcttga

SEQ ID NO: 74989 - protein, 133 aa, Legionella pneumophila
MAYRKMLKSKIHRACVTQADLDYEGSITISPELLKVANILPYEAVNVWNITAGTRFETYAITGEKGSTDICVNGAAAHLVTPGDLVIIASFTQILEEDCAAHEPTVVFVDQFNRLKEIRPERIGVKSRIPYPA

SEQ ID NO: 74990 - DNA, 528 bp, Agrobacterium rhizogenes
  CDS (1)..(528): transl_table=11
atgggttgttgcggaatgctgcatcgcacaaatataggtgggattgcgaatataccgactggggaggggcaggccgtggaaaaatacgtgggcgcgaagctgcatggccttcgagtgaccgacgcaaaactgaactaccacggctcgatcacgatcgatgcggacttctgccgggaggtcggtctgaaaccgctggaatatgtggagatctggaacaagatgtccggagcgaggatcagcacttatgtgctctacggcgatcccggctccaggtgctgcattctcaacggtgcggccgcccgcacgtgtcagcaaggcgatgagattatcatcgcatccagcgtcttttgcgaagtcgatgacatcatcaagctcaagccacgcgtgctggtcttcggagaaaaaaacgaaatcatcgacaggatcacctacgaggtctttcgccgcgcagacaattctctcgacatggcggtgagctccgagctttccgacaatagctacggatttccggcctccatttccggatag

SEQ ID NO: 74991 - protein, 175 aa, Agrobacterium rhizogenes
MGCCGMLHRTNIGGIANIPTGEGQAVEKYVGAKLHGLRVTDAKLNYHGSITIDADFCREVGLKPLEYVEIWNKMSGARISTYVLYGDPGSRCCILNGAAARTCQQGDEIIIASSVFCEVDDIIKLKPRVLVFGEKNEIIDRITYEVFRRADNSLDMAVSSELSDNSYGFPASISG

SEQ ID NO: 74992 - DNA, 372 bp, Staphylococcus aureus subsp. aureus Mu50
  CDS (1)..(372): transl_table=11
atgatgaatgctaaaattcatagagcaagagtgactgagtcaaatttaaattatgtaggtagtattacgattgattcagatattttggaagcggtagacatcttgccaaatgaaaaagtagccatcgtgaataataataatggtgcacgttttgaaacatacgtaatagctggtgaaagaggtagtggtaaaatttgtttgaacggtgcagcatcaagacttgttgaagtaggcgatgtagtcataatcatgacttatgcacagttaaatgaagaagaaattaaaaaccatgctcctaaagtagcagtaatgaatgaagacaatgtcattattgaaatgattcatgaaaaagaaaatacgatagtgttataa

SEQ ID NO: 74993 - protein, 123 aa, Staphylococcus aureus subsp. aureus Mu50
MMNAKIHRARVTESNLNYVGSITIDSDILEAVDILPNEKVAIVNNNNGARFETYVIAGERGSGKICLNGAASRLVEVGDVVIIMTYAQLNEEEIKNHAPKVAVMNEDNVIIEMIHEKENTIVL

SEQ ID NO: 74994 - DNA, 396 bp, Staphylococcus epidermidis ATCC 12228
  CDS (1)..(396): transl_table=11
atgactatattgattagaacatttatgaactcaaaaatccatagagctagagttacagaatctaatttaaattacgttggaagcataacaatagatgccaatatattagatgcggttgatattttacccaatgaaaaggttgctattgttaataataataatggtgctcgatttgaaacatatgtcattgctggagaacgtggtagtggaaagatgtgtttaaatggcgcggcttcaagactagttgaagttggagacgtcattattattatgacatatgcacaattaaatgaagatgaaatggtagatcactcaccaaaagtagctgtgttaaatgaaaataatgaaattatagaaatgataaatgagaaagaaaatacgatatcaaatgtataa

SEQ ID NO: 74995 - protein, 131 aa, Staphylococcus epidermidis ATCC 12228
MTILIRTFMNSKIHRARVTESNLNYVGSITIDANILDAVDILPNEKVAIVNNNNGARFETYVIAGERGSGKMCLNGAASRLVEVGDVIIIMTYAQLNEDEMVDHSPKVAVLNENNEIIEMINEKENTISNV

SEQ ID NO: 74996 - DNA, 336 bp, Coxiella burnetii RSA 493
  CDS (1)..(336): transl_table=11
atgctaatttccgttttaaaatcgaaaatttcttatgctactattactcaaaaagaacttttttacataggaagcattaccatcgatgaggcgattatggaaagagctcaactcacgattaatgaacaagtgcagatagttaatctcaacaatggcgaacgcctagaaacctatgtcatcccgggcaaacggaacagtaatatcatcgccttaaacggtcctgccgctcgaaaaggtgaaatcggcgaccaactttttattttatcctatgccttaattgatccaacacaggaaaaacttgaccctgttttggttgatttaaaactgaatgactaa

SEQ ID NO: 74997 - protein, 111 aa, Coxiella burnetii RSA 493
MLISVLKSKISYATITQKELFYIGSITIDEAIMERAQLTINEQVQIVNLNNGERLETYVIPGKRNSNIIALNGPAARKGEIGDQLFILSYALIDPTQEKLDPVLVDLKLND

SEQ ID NO: 74998 - DNA, 381 bp, Clostridium thermocellum ATCC 27405
  CDS (1)..(381): transl_table=11
atgtttataacattgatgaaatccaagatccatagggccacggtgaccgaagcgaacttggactatgtgggcagcattacgattgatgaagatttaatggaagctgctgatataatggaaaatgagaaggttcaagtggttgacaataacaacggaaacaggtttgaaacttatgtcattaaaggagaaagaggcagcggaatgatttgccttaacggagcggccgcaaggcttgttcatccgggggatttgataattataatttcctatggaatatttgacagggaagaagctaaaacttttaatccgaaagtagttttcgtggatgaaaagaataaaataattaatattaaaagcgaagagaagcatggggaaatatga

SEQ ID NO: 74999 - protein, 126 aa, Clostridium thermocellum ATCC 27405
MFITLMKSKIHRATVTEANLDYVGSITIDEDLMEAADIMENEKVQVVDNNNGNRFETYVIKGERGSGMICLNGAAARLVHPGDLIIIISYGIFDREEAKTFNPKVVFVDEKNKIINIKSEEKHGEI

SEQ ID NO: 75000 - DNA, 360 bp, Herminiimonas arsenicoxydans
  CDS (1)..(360): transl_table=11
atgcaacgcatcatgctcagagcaaaaattcatcgcgccaaggtgacgcaagcggacctgcattacgagggttcatgcgggatcgacgcggatttgctggaagccgcagatatcaaggttggtgaaaagattgagttgtacaacatcaataacggcgagcgtttttctacctatgccatccaaggcgcaagaggtagtggcgagatttcgctgaacggcgccgccgcacgctgtgctcatctcggtgatttgatgatcatctgtacctatggtccgatgactgatgaagaaattgcgacctacacgcctaagattgtttttgtcgatgaagacaatcatttcgctggaatgaaaaaataa

SEQ ID NO: 75001 - protein, 119 aa, Herminiimonas arsenicoxydans
MQRIMLRAKIHRAKVTQADLHYEGSCGIDADLLEAADIKVGEKIELYNINNGERFSTYAIQGARGSGEISLNGAAARCAHLGDLMIICTYGPMTDEEIATYTPKIVFVDEDNHFAGMKK

SEQ ID NO: 75002 - DNA, 351 bp, Thermus thermophilus HB27
  CDS (1)..(351): transl_table=11
atgttccacgccaagatccaccgggccacggtgacccaggccgacctccactacgtgggctcggtgacggtggaccaggacctcctggacgccgccgggatccttccttttgagcaggtggacatctacgacatcaccaacggggcccggctcaccacctacgcccttcccggggaacgggggtccggcgtcatcgggatcaacggggccgcggcccacctggtgaagcccggggacctggtcatcctcgtggcctacggcgtctttgacgaggaggaggcgaggaacctcaagcccaccgtggtcctggtggacgagaggaaccggatcctcgaggtgcgcaaagggtaa

SEQ ID NO: 75003 - protein, 116 aa, Thermus thermophilus HB27
MFHAKIHRATVTQADLHYVGSVTVDQDLLDAAGILPFEQVDIYDITNGARLTTYALPGERGSGVIGINGAAAHLVKPGDLVILVAYGVFDEEEARNLKPTVVLVDERNRILEVRKG

SEQ ID NO: 75004 - DNA, 465 bp, Desulfotalea psychrophila LSv54
  CDS (1)..(465): transl_table=11
ttgtgcgccccttgtttgggctgtgttctgcattattttattcgcaataggatagtgcgtgtcacctctccccgcttgagggtaaaattttattggtttattattatgttacatcagatgatgaaggctaagttgcaccgagccacaatttcggctgctgacttgaattatgaaggaagtctcactattgataccgatctgctaaaagcttcaggtattcgtccctatgaacgtatctatgtctataacgtaaataatggcgaacgatttgaaacctatgcaattgagggagaagcgggatccggtgcaattcaactcaacggagcagcggcacgtaagggaatgataggcgattttctcattattgtcacctatgccctctgttcagacgatgaagtagatgagcatagaccaaatgttgttctgcttaacccagataatacaattaaagaaatcgtgaagtag

SEQ ID NO: 75005 - protein, 154 aa, Desulfotalea psychrophila LSv54
MCAPCLGCVLHYFIRNRIVRVTSPRLRVKFYWFIIMLHQMMKAKLHRATISAADLNYEGSLTIDTDLLKASGIRPYERIYVYNVNNGERFETYAIEGEAGSGAIQLNGAAARKGMIGDFLIIVTYALCSDDEVDEHRPNVVLLNPDNTIKEIVK

SEQ ID NO: 75006 - DNA, 384 bp, Desulfitobacterium hafniense Y51
  CDS (1)..(384): transl_table=11
atgttccgaacgatgatgaagtccaagattcaccgggccacagttactgaagccaaccttaaatatgtaggaagcattaccattgatgaagaactcttagaggtggcggatatccttcctaatgaaaaagtacaggtcgttaataacaataacggagcccgtttggagacttacgttattcctggaaagcggggggagcgtactgtatgtctcaatggagctgcggcccgcttagttcaagtgggggatgaagtgattattattgcctatggaattttcaccgatgaggcagcccgaacctatgaaccaaaggtcatctttgttgatgaagggaataacccggtgaagatagcccatgaggagatacacgggcagcagtcttag

SEQ ID NO: 75007 - protein, 127 aa, Desulfitobacterium hafniense Y51
MFRTMMKSKIHRATVTEANLKYVGSITIDEELLEVADILPNEKVQVVNNNNGARLETYVIPGKRGERTVCLNGAAARLVQVGDEVIIIAYGIFTDEAARTYEPKVIFVDEGNNPVKIAHEEIHGQQS

SEQ ID NO: 75008 - DNA, 381 bp, Saccharophagus degradans 2-40
  CDS (1)..(381): transl_table=11
atgcaaattacgctattaaagggtaagttgcacatggcgaaggtgactcaagccgagctgtggtacgacgggtcctgcgccattgatgaagagtttgttaagctggcagggttgcgagagtttgagcaaattgaaatttataatgtcgataacggcgagcgtttctctacctacgttattttggctgaagcgggtagtcgcaccatttctatgaacggtgctgctgcgcggaaagtgcaagttggcgaccgtgtaattattgccgcatacagtcaaatgagcgaagccgaagccgattcattcaagcctcgcttggtgtatttggataaagacaacgccgtagaacgcactactaacaccattccggttcaggccgcttag

SEQ ID NO: 75009 - protein, 126 aa, Saccharophagus degradans 2-40
MQITLLKGKLHMAKVTQAELWYDGSCAIDEEFVKLAGLREFEQIEIYNVDNGERFSTYVILAEAGSRTISMNGAAARKVQVGDRVIIAAYSQMSEAEADSFKPRLVYLDKDNAVERTTNTIPVQAA

SEQ ID NO: 75010 - DNA, 381 bp, Methylobacillus flagellatus KT
  CDS (1)..(381): transl_table=11
atgcaaagaactatgctcaaatccaagctgcaccgcgtgcatgtaacgcactcggagctggactacgagggctcctgcgccatcgatgaagcgttgctcgaagcagccgacatcaaggaatatcagcagatcgacatctacaatgtcaacaacggcgagcgcttcaccacctatgcgatccgcgccgagcgcaattccggcattatctcggtaaacggtgctgctgcgcgcaaagccagccctggtgacctgctgatcattgccacttacgccagctatactgaagcagaactggcccaattcaaaccccagctggtgtatgtcgatgccgataaccgcatcaaaaaccaacgccagcacatccccgtacaagctgcctaa

SEQ ID NO: 75011 - protein, 126 aa, Methylobacillus flagellatus KT
MQRTMLKSKLHRVHVTHSELDYEGSCAIDEALLEAADIKEYQQIDIYNVNNGERFTTYAIRAERNSGIISVNGAAARKASPGDLLIIATYASYTEAELAQFKPQLVYVDADNRIKNQRQHIPVQAA

SEQ ID NO: 75012 - DNA, 387 bp, Burkholderia xenovorans LB400
  CDS (1)..(387): transl_table=11
atgcaacgcaacatgctgaagtcgaagatccaccgcgtcgcggtcacgcactgcgaactgcactacgaaggttcgtgcgcgatcgacgaagatttgctggaagcggcgaacatcgtcgaaaacgagcggatcgacatctggaacatcaacaacggcgagcgtttctcgacctacgcgatcaagggtgaacgcggcagcggcatgatctcgctgaacggatcggcggcgcggcgcgcgcagctgggcgacctggtgattatcgcggcgttcgcggtggtggacgaagcggagctgaaggccggctggaagccggacctcgtgttcgtggacgacaacaacaggatcaagggcagccgcgatcacgtgccgacgcagaactggacctga

SEQ ID NO: 75013 - protein, 128 aa, Burkholderia xenovorans LB400
MQRNMLKSKIHRVAVTHCELHYEGSCAIDEDLLEAANIVENERIDIWNINNGERFSTYAIKGERGSGMISLNGSAARRAQLGDLVIIAAFAVVDEAELKAGWKPDLVFVDDNNRIKGSRDHVPTQNWT

SEQ ID NO: 75014 - DNA, 393 bp, Myxococcus xanthus DK 1622
  CDS (1)..(393): transl_table=11
atgcgccgcatcctcttcaagtcgaaaatccaccgcgcgaccgtgacccaggctgacctggattacgaagggtccgtcaccatcgaccgcgacctgcttcgcgccgccgacatcgtggagaacgaaaaggtcgcggtctggaacatcacccagggcacgcgcctggagacctacgcgctggaaggtgaggccggcagcggcgtcatctgcatcaacggcgcggcggcgcacctgaacaagccgggcgacctggtcatcctggccaccttcgcggaagtggaggaagccgaggtggcgaactggaagcccaccgtggtgttcgtggacaaggacaaccgcgtggtgcccgggcagacgaaggagattccgggcccgcagcgccgctcggcctga

SEQ ID NO: 75015 - protein, 130 aa, Myxococcus xanthus DK 1622
MRRILFKSKIHRATVTQADLDYEGSVTIDRDLLRAADIVENEKVAVWNITQGTRLETYALEGEAGSGVICINGAAAHLNKPGDLVILATFAEVEEAEVANWKPTVVFVDKDNRVVPGQTKEIPGPQRRSA

SEQ ID NO: 75016 - DNA, 348 bp, Cytophaga hutchinsonii ATCC 33406
  CDS (1)..(348): transl_table=11
atgaatattgaagtactaaaatcgaaaatccatcgcgttaaggttacacaggcggaattacattatgttggaagcattacaattgacgaagcgttgatggaggcgtccaatattattgaaaacgaaaaagttcagatcgttaacatcaacaacggtgaacgttttgaaacatacgtgatcaaaggcgaaaaaaacaccggtgtaatttgtttaaacggcccggcagcccgtaaggtagctgtgggtgatatcgtaatcgttatcgcatacgcgtccatggattttgaagaggcaaaaaaatggaaacctaccttgatttttccggatgccaataacagacttatttaa

SEQ ID NO: 75017 - protein, 115 aa, Cytophaga hutchinsonii ATCC 33406
MNIEVLKSKIHRVKVTQAELHYVGSITIDEALMEASNIIENEKVQIVNINNGERFETYVIKGEKNTGVICLNGPAARKVAVGDIVIVIAYASMDFEEAKKWKPTLIFPDANNRLI

SEQ ID NO: 75018 - DNA, 447 bp, Rhodococcus sp. RHA1
  CDS (1)..(447): transl_table=11
atgtttcgcaccatgatgaagtcgaagatccatcgcgccaccgtcacgcacgccgacctgcactacgtgggctcggtgacggtcgaccaggatctgatggacgccgccgaccttctcgagggcgagcaggtgtgcatcgtcgacatcgacaacggcgcgcggctcgaaacgtatgtgatcgccggcgagcggggaagtggtgtcatcgggatcaacggtgcggcagcgcatctggtcaagcccggcgacctcgtcatcctcatcgcgtacggcgtcatgaacgagcaggaggtgcgcgactacgagccgcgtgtcgtgttcgtcgacgccgccaactcaccgatcgagctcggcgccgaccccgcgcacgcgccggagggctccggtctcatcaccccgcgcatgctgtcgacgctcgacgccgagcgcgaatccagtttggtgtaa

SEQ ID NO: 75019 - protein, 148 aa, Rhodococcus sp. RHA1
MFRTMMKSKIHRATVTHADLHYVGSVTVDQDLMDAADLLEGEQVCIVDIDNGARLETYVIAGERGSGVIGINGAAAHLVKPGDLVILIAYGVMNEQEVRDYEPRVVFVDAANSPIELGADPAHAPEGSGLITPRMLSTLDAERESSLV

SEQ ID NO: 75020 - DNA, 477 bp, Trichodesmium erythraeum IMS101
  CDS (1)..(477): transl_table=11
atgactacaatcaaattaatgcatgctaaacttcatcgcgtacgagtaacagacgcaaagcctgactacgttggcagcgtgactatagactcggatttactcgaaaaagtaggaattttgcctttagaagaagtgcaaatagttaatcttaataatggccaacgttggttaacttatgttttacccggacaagcaggatcgggtatggtttgtccaaatgggggtgcggcacttctatgtaaaaaagatgatatattaattatctgggctaatgaacaatgcgatcgggctgaagtcctagaaaatggacataaagcaaaaatatttgtggcagatgaaaataaccactgccgagaatttctctatcaaattttaaatcccaatcaaggaagtgttgaatttcactccctgccagtaattccagaaggtaaaacatctgaatacctccaacaaatgatcgaaacaaataaaatttaa

SEQ ID NO: 75021 - protein, 158 aa, Trichodesmium erythraeum IMS101
MTTIKLMHAKLHRVRVTDAKPDYVGSVTIDSDLLEKVGILPLEEVQIVNLNNGQRWLTYVLPGQAGSGMVCPNGGAALLCKKDDILIIWANEQCDRAEVLENGHKAKIFVADENNHCREFLYQILNPNQGSVEFHSLPVIPEGKTSEYLQQMIETNKI

SEQ ID NO: 75022 - DNA, 381 bp, Alkalilimnicola ehrlichei MLHE-1
  CDS (1)..(381): transl_table=11
atgcaattgaacatgctgaaatgcaagctgcaccaggcctgcgtgacggatacagagctggactacgaggggtcctgcgccattgatgccaacctcatggatgccgccggtatccgcgagttcgagcagatccatgtctacaatctggcgaacggtgcgcggttcaccacctatgccatccgtggcgaggccggttcgcgcatgatctccatgaacggtgcggcggcgcatctgtgcagtgagggtgaccgtatcatcatctgctgctacgccaacgtggacgagtcggagctggaccgccacgagcccgcgctggtctactgcgacggcgataaccggattacccaccagcgcaacggcatcccgctgcaggtggcctga

SEQ ID NO: 75023 - protein, 126 aa, Alkalilimnicola ehrlichei MLHE-1
MQLNMLKCKLHQACVTDTELDYEGSCAIDANLMDAAGIREFEQIHVYNLANGARFTTYAIRGEAGSRMISMNGAAAHLCSEGDRIIICCYANVDESELDRHEPALVYCDGDNRITHQRNGIPLQVA

SEQ ID NO: 75024 - DNA, 357 bp, Hyphomonas neptunium ATCC 15444
  CDS (1)..(357): transl_table=11
ttgatcctcagcatgctcaaagccaagcttcacggcgcaactgtcacccagtgtgacctgcattatgaaggctctgtgtccatcgaccaggacctgctcgatgcgtccggtatcctgccgcatgagaaggtggatatctggaacgtgaccaatggcgcgcgcatccagacctatgctctggaagccccccgtggctcccgcaccattggcgtcaatggcgcggcggcccgccacttcgccgtgggcgacacggtgatcatcgcggcgttctgcggcgtggaagcggaaaaagcccgccagcatgcgccgaccgtggtgctgctcggcgaaggcaacgagatcaagcgcgcctcctga

SEQ ID NO: 75025 - protein, 118 aa, Hyphomonas neptunium ATCC 15444
MILSMLKAKLHGATVTQCDLHYEGSVSIDQDLLDASGILPHEKVDIWNVTNGARIQTYALEAPRGSRTIGVNGAAARHFAVGDTVIIAAFCGVEAEKARQHAPTVVLLGEGNEIKRAS

SEQ ID NO: 75026 - DNA, 381 bp, Pseudomonas aeruginosa UCBPP-PA14
  CDS (1)..(381): transl_table=11
atgcacgccatcatgctcaaagccaagttgcatcgcgccgaagtcacccatgccgtcctcgactacgaaggctcctgcgccatcgacggcgattggctggacctctccggaatccgcgagtacgaacagatccagatctacaacgtcgacaacggcgagcgcttcaccacctatgcgatccgcgccgagaacggctcgaagatgatctcggtgaacggcgccgcggcacacaaggccaaggtcggcgaccgcgtgatcatctgcgcctacgcacactacagcgaagccgaactggccagccacaagccgcgcatgctgtacatggcgccgggcaaccagctcagccataccagcgaggcgattccgatacaggtcgcctga

SEQ ID NO: 75027 - protein, 126 aa, Pseudomonas aeruginosa UCBPP-PA14
MHAIMLKAKLHRAEVTHAVLDYEGSCAIDGDWLDLSGIREYEQIQIYNVDNGERFTTYAIRAENGSKMISVNGAAAHKAKVGDRVIICAYAHYSEAELASHKPRMLYMAPGNQLSHTSEAIPIQVA

SEQ ID NO: 75028 - DNA, 411 bp, Mycobacterium smegmatis str. MC2 155
  CDS (1)..(411): transl_table=11
atgcaaagagtgctgctggcaagcaagattcaccgcgcaacagtgactcaagcggacctgcactacgtcgggtccataacgatcgacgcggaactgatggcagccgcggacatcgtcgagggtgaacaggtgcacgtcgtggacatcacgagcggggcacgactggtcacctacgccatcaccggcaccccggggtcgggtgtgatcggcatcaacggcgctgccgcccatctcatttcgccaggaaacctggtgatcatcatgtcgttcgtacatctcgacgaagccgaacgtgccgatcaccgggcaaacgtcgtgcacgtcgacgccgacaaccacatcgtcaccatcggatccgacccggcccagccggtaccaggggcggccgatcagctggtgggacgggtgtga

SEQ ID NO: 75029 - protein, 136 aa, Mycobacterium smegmatis str. MC2 155
MQRVLLASKIHRATVTQADLHYVGSITIDAELMAAADIVEGEQVHVVDITSGARLVTYAITGTPGSGVIGINGAAAHLISPGNLVIIMSFVHLDEAERADHRANVVHVDADNHIVTIGSDPAQPVPGAADQLVGRV

SEQ ID NO: 75030 - DNA, 408 bp, Nocardioides sp. JS614
  CDS (1)..(408): transl_table=11
atgatgaagagcaagatccaccgggccacggtgacccaggccgacctgcactacgtcggctcggtgacggtcgacgaggacctcctcgacgccgccgacctgctgccgggcgagctggtgcacatcgtcgacatcgacaacggtgcgcgcctggagacctacacgatcgccggcgagcgtggctcgggcgtgatcggcatcaacggtgccgctgcccggctcgtgcaccccggggacctggtgatcctgatcgcctacggccagatggaggacgtcgaggccaagggcttcgagccgcacgtggtcttcgtcgacgccgacaaccgggtcgtgagcaccggcagcgacccggccgacgccccggccggatccggactgctgcgcggcgaccgcccggccggacgctag

SEQ ID NO: 75031 - protein, 135 aa, Nocardioides sp. JS614
MMKSKIHRATVTQADLHYVGSVTVDEDLLDAADLLPGELVHIVDIDNGARLETYTIAGERGSGVIGINGAAARLVHPGDLVILIAYGQMEDVEAKGFEPHVVFVDADNRVVSTGSDPADAPAGSGLLRGDRPAGR

SEQ ID NO: 75032 - DNA, 408 bp, Mycobacterium sp. KMS
  CDS (1)..(408): transl_table=11
atgcttcgcacgatgctgaagtcgaagatccaccgagccaccgtcacgcagtccgatctgcactacgtcggctcggtcaccatcgacgccgatctgatggacgccgccgacctcatcgagggtgagcaggtcaccatcgtcgacatcgacaacggcaaccgcctggtgacctacgcgatcaccggcgcccgcggcagcggggtgatcgggatcaacggcgccgcagcacatctcgtgcatcccggcgatctggtcatcctgatcgcctacggcaccatggaagacgccgaggcgcgcgcatatcagccgcgggtggtcttcgtcgacgccgacaaccggcaggtccatctcggcgccgacccggcgatggtgccggacaccgccgtcgacctgatgtctccgcgttga

SEQ ID NO: 75033 - protein, 135 aa, Mycobacterium sp. KMS
MLRTMLKSKIHRATVTQSDLHYVGSVTIDADLMDAADLIEGEQVTIVDIDNGNRLVTYAITGARGSGVIGINGAAAHLVHPGDLVILIAYGTMEDAEARAYQPRVVFVDADNRQVHLGADPAMVPDTAVDLMSPR

SEQ ID NO: 75034 - DNA, 384 bp, Neisseria meningitidis FAM18
  CDS (1)..(384): transl_table=11
atgttccgtactatgcttggcggaaaaatccaccgcgccaccgttaccgaagccgatttgaactacgtcggcagtattaccgtcgatcaagacctgttagacgcagcaggcatctaccccaacgaaaaagtcgccatcgtcaacaacaacaacggcgaacgttttgaaacctataccatttcaggcaaacgcggcagcggcgtggtctgcctgaacggggcggcggccaggctggtacagaaaggcgatatcgtcatcatcatgtcttacgtccaactctccgaacccgaaatcgccgcacacgaacccaaagtcgtcttggtagacggaaacaacaaaatccgcgacatcatctcctacgagccgccgcacaccgtgctgtaa

SEQ ID NO: 75035 - protein, 127 aa, Neisseria meningitidis FAM18
MFRTMLGGKIHRATVTEADLNYVGSITVDQDLLDAAGIYPNEKVAIVNNNNGERFETYTISGKRGSGVVCLNGAAARLVQKGDIVIIMSYVQLSEPEIAAHEPKVVLVDGNNKIRDIISYEPPHTVL

SEQ ID NO: 75036 - DNA, 381 bp, Acidovorax sp. JS42
  CDS (1)..(381): transl_table=11
atgtaccgcaccctgctcaagtccaagatccaccgtgtgaagaccacgcactgcgagttgcactacgaaggctcgtgcgccatcgacgaagacctgctggaggccgccaacatctgcgagaacgaacaggtgcacatctggaacgtggacaacggcgaacgcttcgtcacctacgccatcaagggccagcgcggcagcggcatgatctcggtgaacggatcggccgcgcgccgcgcctgcgtgggcgacctgctcatcatcgcggccttcgcccaagtggcagaagccgacgtggccgcacaccagccgcaactggtgttcgtgaacgaccagaaccgccaagtggaactgcgccaccacgtacccacgcaggcactttga

SEQ ID NO: 75037 - protein, 126 aa, Acidovorax sp. JS42
MYRTLLKSKIHRVKTTHCELHYEGSCAIDEDLLEAANICENEQVHIWNVDNGERFVTYAIKGQRGSGMISVNGSAARRACVGDLLIIAAFAQVAEADVAAHQPQLVFVNDQNRQVELRHHVPTQAL

SEQ ID NO: 75038 - DNA, 543 bp, Magnetospirillum magnetotacticum MS-1
  CDS (1)..(543): transl_table=11
atgatgaagatcattcgcgcgaagctgcatggcattcgcgtcaccaatgccgacctcaattatcacggctcgatcacccttgatcccgagcagtgcgagatggccggcatctatcccatggaattcgtcgacatctggaataagaattcggcggcccgcatttcgacctatgtcatcttcggcgagccgggctcgcgctgctgcgtgctgaacggcgccgcggcgcgcacctgtcagaagggcgacgaactgatcatcgctgcctcggcggatatttccggaccggaaaagctttacgagatcaagccgcgcatcctgaccttcctgcccgacaatcacgtcgatcaggtgctgtattacgacgtcttccaaagcgagaagcgtccttacgacttccgcatcgtcgatgccgacaagcataccatcgagagctgccacacctggcccaacgtggatatcaccaaactgcgctccgatctggcggccaagggctggagcgaggccgaaatcgacgccttcatcgcgtcgcatttttctctgtag

SEQ ID NO: 75039 - protein, 180 aa, Magnetospirillum magnetotacticum MS-1
MMKIIRAKLHGIRVTNADLNYHGSITLDPEQCEMAGIYPMEFVDIWNKNSAARISTYVIFGEPGSRCCVLNGAAARTCQKGDELIIAASADISGPEKLYEIKPRILTFLPDNHVDQVLYYDVFQSEKRPYDFRIVDADKHTIESCHTWPNVDITKLRSDLAAKGWSEAEIDAFIASHFSL

SEQ ID NO: 75040 - DNA, 384 bp, Nostoc punctiforme PCC 73102
  CDS (1)..(384): transl_table=11
atgcagcgtactctccttttggcaaaaattcataattgcacccttacaggggcgaatatcaactacgtgggtagtatcagcatcgatgaaatccttttggaaaaggctgggatcttaccttatgaacaagtgcaagtagttaatagtgccaatggtcagcgttttattacttatgcgatcccggctccagcccattcaggagtaattgagctaaatgggggtgcagcacgtttaggcattattggcgatcgcttgattataatgacttacgggcagttcactccagaagagttaaaaaattactctcctacggtagtcattgtggacgaaaaaaacaggctgttggaagttcggcgctacgatgacctgctcgttaaggtctaa

SEQ ID NO: 75041 - protein, 127 aa, Nostoc punctiforme PCC 73102
MQRTLLLAKIHNCTLTGANINYVGSISIDEILLEKAGILPYEQVQVVNSANGQRFITYAIPAPAHSGVIELNGGAARLGIIGDRLIIMTYGQFTPEELKNYSPTVVIVDEKNRLLEVRRYDDLLVKV

SEQ ID NO: 75042 - DNA, 384 bp, Bacillus cereus G9241
  CDS (1)..(384): transl_table=11
atgtttcgcacaatgatgagagcgaagttacatcgcgcaacagtaacagaggcaaatttaaattatgtaggtagtattacaattgatgaagatttaatggatgcagtaaatattgtagaaaatgaaaaagtacaaattgtaaataataataatggtgctcgcttagagacatatgttattagaggagaacgtggtagcggtgttgtttgtttgaatggtgcagctgcaaggcttgtacagccaggagataaagttattattatttgctacggtctagtggcagaagaaaatattcataaacaagagccgaaaattgcagtattagacgataataatcaaattattgaaatgttaggtgctgaaaaagcgggcacgatattataa

SEQ ID NO: 75043 - protein, 127 aa, Bacillus cereus G9241
MFRTMMRAKLHRATVTEANLNYVGSITIDEDLMDAVNIVENEKVQIVNNNNGARLETYVIRGERGSGVVCLNGAAARLVQPGDKVIIICYGLVAEENIHKQEPKIAVLDDNNQIIEMLGAEKAGTIL

SEQ ID NO: 75044 - DNA, 384 bp, Exiguobacterium sibiricum 255-15
  CDS (1)..(384): transl_table=11
atgttacgtacattcatgcatgcaaaattacacaaagcccgtgtcacggaagcgaatctgcattacgtcggttcgattacgatcgatgaagatttactggacgcggtcgggattcttgaaaacgagaaggtccaagtgacgaacaatcaaaacggggcccggattgaaacatacgccattaagggagcccgtggttctggtgtcatttgtctgaacggagcagcagcccgtcatttccaaatcggtgatgaagtcatcatcatggcttatgcgcaattgacaaacgaagaaattgcgacacatgttccgaaagtcgcggttcttgatcaagagaattcgattaagcagatgttatcgcaggaaatcgcacatacgatcttatga

SEQ ID NO: 75045 - protein, 127 aa, Exiguobacterium sibiricum 255-15
MLRTFMHAKLHKARVTEANLHYVGSITIDEDLLDAVGILENEKVQVTNNQNGARIETYAIKGARGSGVICLNGAAARHFQIGDEVIIMAYAQLTNEEIATHVPKVAVLDQENSIKQMLSQEIAHTIL

SEQ ID NO: 75046 - DNA, 390 bp, Prosthecochloris aestuarii DSM 271
  CDS (1)..(390): transl_table=11
atgagactgcatttgcttaagtcgaaaattcacaatgctatcgttaccagcggagatcttgaatacgaaggaagtataacgattgattcccagttgcttgaactggctgacatgcttcccaatgagaaagtgctttgcgtcaataacaacaatggcgaacggtttgaaacctatattatcaaaggaaaagccggctcacgcgaaattcagctcaatggcgctgccgcgcgttgcgcacttccgggcgatgagattatcatcatgacatttgcagaaatcgaagccgaaaaagcaaaggatttcaaaccgatgatcctgattgtcgatcaccagaacaatcccaaacgccgtcatctggtaggcgaggaagacacccccctgccgcactga

SEQ ID NO: 75047 - protein, 129 aa, Prosthecochloris aestuarii DSM 271
MRLHLLKSKIHNAIVTSGDLEYEGSITIDSQLLELADMLPNEKVLCVNNNNGERFETYIIKGKAGSREIQLNGAAARCALPGDEIIIMTFAEIEAEKAKDFKPMILIVDHQNNPKRRHLVGEEDTPLPH

SEQ ID NO: 75048 - DNA, 381 bp, Xylella fastidiosa Dixon
  CDS (1)..(381): transl_table=11
atgcaactgtccttgcttaaagctaagatccaccgtgctaccgtcagtcattctgaactcaactatgaagggtctatcgcaatagacggactactgttggaggctgccggtctctatgagtttgagaaagtccacatctggaatgtgacgaatggtgcccgtttcactacttatgcaatacgtgccgagcatggcagtggcattatttcagtgaatgggggtgctgcgcgttacgtgcaggttggagatttggtgatcgttgctgcgtttgcacaaatgagtgaggacgaggcagcagttttcagaccgaatttggtatacgtcgatgctgccaatgcgatgactcataccaaccacagtattcctacacaggtcgcatga

SEQ ID NO: 75049 - protein, 126 aa, Xylella fastidiosa Dixon
MQLSLLKAKIHRATVSHSELNYEGSIAIDGLLLEAAGLYEFEKVHIWNVTNGARFTTYAIRAEHGSGIISVNGGAARYVQVGDLVIVAAFAQMSEDEAAVFRPNLVYVDAANAMTHTNHSIPTQVA

SEQ ID NO: 75050 - DNA, 351 bp, Croceibacter atlanticus HTCC2559
  CDS (1)..(351): transl_table=11
atgcttgtaacagtagtaaaatctaaaattcaccgtgtgaaagtcacaggtgcagaccttaactatattggtagcattaccatagatgaagatttaatggatgctgcaaatttagttgaaggcgaaaaagttcaaattgtgaacaacaacaatggcgaacgtcttgaaacttatgcaattcctggccctagaggaagtggtgaaattactttaaatggagcagctgctcgtaaagttgcaaaaggagatattcttattcttattacttatggtatgatgaccatggatgaggctaagaactttaaaccgtctttagtgtttcctaatgaagagaataaccttctgaaataa

SEQ ID NO: 75051 - protein, 116 aa, Croceibacter atlanticus HTCC2559
MLVTVVKSKIHRVKVTGADLNYIGSITIDEDLMDAANLVEGEKVQIVNNNNGERLETYAIPGPRGSGEITLNGAAARKVAKGDILILITYGMMTMDEAKNFKPSLVFPNEENNLLK

SEQ ID NO: 75052 - DNA, 435 bp, Oceanospirillum sp. MED92
  CDS (1)..(435): transl_table=11
atgctgcagacattcttgaagtgtaagctacaccgagtaaccgtaactcacgcagagctacactatgaaggttcatgtgcaattgatggtgtactgcttgataagtcaggcattcgtgaatatgaattaattcatatctacaacatcaacaacggtgaacgattcagtacttatgcaattcgtgccgaagaaaacagtggcattatctctgttaacggtgcggcagcgcacaaagcaagcaaaggtgatctgctgatcattgcttcttacgttcaactggacgagaaagaagctgacgagcatcagccaacactatgctacttcgaaaacgccaaggcagatggcggtgtaggtgcatctgatgaagaacttcatcagcgcaatgtacttaccggaatgaagcaggctatccctgttcagccaaaagatatctga

SEQ ID NO: 75053 - protein, 144 aa, Oceanospirillum sp. MED92
MLQTFLKCKLHRVTVTHAELHYEGSCAIDGVLLDKSGIREYELIHIYNINNGERFSTYAIRAEENSGIISVNGAAAHKASKGDLLIIASYVQLDEKEADEHQPTLCYFENAKADGGVGASDEELHQRNVLTGMKQAIPVQPKDI

SEQ ID NO: 75054 - DNA, 453 bp, Xanthobacter autotrophicus Py2
  CDS (1)..(453): transl_table=11
atgcgtaagatcgtcgccggcaagctgcacggcctgaccgtgacgggggccgacctcaactatcacggctccatcacgcttgatcccgagcattgcgaggaggcggggatcctgccgctggaattcgtcgagatctggaaccgcaattccggggcgcggatctccacctatgtcatcctcggcgagcgcggctcgcgctgctgcgtgctcaatggcgccgccgcccgcacctgccagccgggcgacgaggtcatcatctgcaattcggtctacgtgccggaaggcgagatcgtggcgctgcgcccgcgcgtcctgaccttcgacaaggataaccgcgtcacgagccgcctcacctatgaggtgacgcgcgacagccagggcgcctaccacttcgccgtgcgcgacgaacgcggcgacgagaagccgatcccgctccgggtcgaggcgtcctga

SEQ ID NO: 75055 - protein, 150 aa, Xanthobacter autotrophicus Py2
MRKIVAGKLHGLTVTGADLNYHGSITLDPEHCEEAGILPLEFVEIWNRNSGARISTYVILGERGSRCCVLNGAAARTCQPGDEVIICNSVYVPEGEIVALRPRVLTFDKDNRVTSRLTYEVTRDSQGAYHFAVRDERGDEKPIPLRVEAS

SEQ ID NO: 75056 - DNA, 351 bp, Flavobacteria bacterium BBFL7
  CDS (1)..(351): transl_table=11
atgttaattacagtagtaaaatccaaaattcaccgagttaaagtaaccggtgcagacctcaattatataggtagtatcaccattgacgaagatttaatggacggtgcaaacattgttgaaggtgaaaaagttcaaatcgttaataataataacggtaatcgattagaaacctatgccattcctggacctcgcggtagcggagaaatcacattaaatggtgctgctgcaagaaaagtatctccaggtgatgtattgattcttatctgctatgcacaaatgacgatggaagaagcgcgagcttttaagcctacacttcttttccctaatgaagaggacaacaccttatcataa

SEQ ID NO: 75057 - protein, 116 aa, Flavobacteria bacterium BBFL7
MLITVVKSKIHRVKVTGADLNYIGSITIDEDLMDGANIVEGEKVQIVNNNNGNRLETYAIPGPRGSGEITLNGAAARKVSPGDVLILICYAQMTMEEARAFKPTLLFPNEEDNTLS

SEQ ID NO: 75058 - DNA, 384 bp, marine gamma proteobacterium HTCC2207
  CDS (1)..(384): transl_table=11
atgttgtcgacctttctgaaagccaagctgcatatgggatccgtgacccaagccgagctttggtatgacggttcctgtgccatagatgcggatttgttagcgctctcgggcatgcgggaatttgagcagatcgatatttacaatattaccaatggtgagcgccttaccacctatgtcattgtggctgaagccggatccggaatcatttctatgaacggcgcagcggcgcgcaaattccaagttggcgatcggattattattgccagttacggccagttttccgagttagaagcggctgagcataagcctaagctggtctacctcaatccagataataccgtcgagcgcagtgccaataccattgctgtgcagctggcggaataa

SEQ ID NO: 75059 - protein, 127 aa, marine gamma proteobacterium HTCC2207
MLSTFLKAKLHMGSVTQAELWYDGSCAIDADLLALSGMREFEQIDIYNITNGERLTTYVIVAEAGSGIISMNGAAARKFQVGDRIIIASYGQFSELEAAEHKPKLVYLNPDNTVERSANTIAVQLAE

SEQ ID NO: 75060 - DNA, 384 bp, delta proteobacterium MLMS-1
  CDS (1)..(384): transl_table=11
atgttaagaacgatgttgaaatcaaagatccaccgggccacggtggtggatgccgagctccactacgagggcagcctggcggtggatgccgagttgatggcggcggtggacctggcacccttcgagcgggtccacgtttacaatatgaacaacggggagcgttttgaaacctacgtgatcaaggccccggccggttcggggatgatcggcctgcgcggcgcggcggcccgcaagggacagcccggggatatggtgatcatcgtcaattacgcccattatagcgctaaggagttgagtgaccaccagccgcaaatagtcctgctcgatgaacagaaccggatcaagcgccggggattggccaccgccgctgatcccggggcttga

SEQ ID NO: 75061 - protein, 127 aa, delta proteobacterium MLMS-1
MLRTMLKSKIHRATVVDAELHYEGSLAVDAELMAAVDLAPFERVHVYNMNNGERFETYVIKAPAGSGMIGLRGAAARKGQPGDMVIIVNYAHYSAKELSDHQPQIVLLDEQNRIKRRGLATAADPGA

SEQ ID NO: 75062 - DNA, 381 bp, Oceanobacter sp. RED65
  CDS (1)..(381): transl_table=11
atgcagtccattatgcttaaagccaaattacaccaagctcgtgtaactcatgccgttcttgagtacgaaggttcatgtgccatcgacggaaatcttttggatatggccggtattcaagaatacgaacaaatccaaatctacaacctagaaaacggcgagcgcttcacgacctatgctattcgaggggaagaaggcagtaatatgattagtgtcaatggcgcagctgctcacttagcggatgttggccatcgcgttatcatctgtgcctacgcaaactactctgaagaagaactaaaaaacttcaagccgcgcatgatctacatgcaagagggcaatgaagtaagccatacttctaacgcgatccctgtacagctcgcctaa

SEQ ID NO: 75063 - protein, 126 aa, Oceanobacter sp. RED65
MQSIMLKAKLHQARVTHAVLEYEGSCAIDGNLLDMAGIQEYEQIQIYNLENGERFTTYAIRGEEGSNMISVNGAAAHLADVGHRVIICAYANYSEEELKNFKPRMIYMQEGNEVSHTSNAIPVQLA

SEQ ID NO: 75064 - DNA, 381 bp, marine gamma proteobacterium HTCC2143
  CDS (1)..(381): transl_table=11
atgctgacgaaaatgttgaaagccaagttgcatatggcctgtatcacgcaggcggagctttggtatgacggttcctgtgctatcgatcgagatttggtagagctggcgggaatgcgagaatttgagcagattgatatctacaacgtcagtaatggcgaacggttcagtacctatatcatattggcggagcccggctcgggcaccatttctatgaatggcgccgcggcgcggaaagtgcaagtcggagatcgaatcatcattgccacctacgggcatttagacgatgatgagctcgcagcctttaaaccgaagctggtctatctgaacgacgataactcggttgaaaggtcaaccaatacgatagcaatgcagacagcctga

SEQ ID NO: 75065 - protein, 126 aa, marine gamma proteobacterium HTCC2143
MLTKMLKAKLHMACITQAELWYDGSCAIDRDLVELAGMREFEQIDIYNVSNGERFSTYIILAEPGSGTISMNGAAARKVQVGDRIIIATYGHLDDDELAAFKPKLVYLNDDNSVERSTNTIAMQTA

SEQ ID NO: 75066 - DNA, 543 bp, Magnetospirillum gryphiswaldense
  CDS (1)..(543): transl_table=11
atgatgaaggttatccgcgccaagttccatggcatccgcgtcaccagcgccgatctgaactatcacggttcgatcacgctcgaccccgagcaatgcgccctggccggcatctatcccatggaattcgtggaaatctggaacaagagttccggcgcccgcatttccacctatgtcatcttcggccagcccggatcgcgctgctgcatcctgaacggcgccgccgcccgcacctgccagaccggtgacgaggtgatcatcgccgccgccgattacatcaaggggccggaagagctttataccctgaagccgcgcatcctcaccttcctgcccgacaaccacgtcgatcaggtgctttattacgacgtcttccaaagcgaacagcgcccctatgatttccgcatcatggacgccgataaacatacggtggacagctgccacacctggcccaatgtggatgtcaacgccatccgcaccgacctcaaggccaagggctgggccgaggccgatatcgattccttcgtcgcctcgcatttctcgctgtaa

SEQ ID NO: 75067 - protein, 180 aa, Magnetospirillum gryphiswaldense
MMKVIRAKFHGIRVTSADLNYHGSITLDPEQCALAGIYPMEFVEIWNKSSGARISTYVIFGQPGSRCCILNGAAARTCQTGDEVIIAAADYIKGPEELYTLKPRILTFLPDNHVDQVLYYDVFQSEQRPYDFRIMDADKHTVDSCHTWPNVDVNAIRTDLKAKGWAEADIDSFVASHFSL

SEQ ID NO: 75068 - DNA, 465 bp, Frankia sp
  CDS (1)..(465): transl_table=11
atgatctaccgcgagatgctcaaatccaaaatccatcgtgccgtcgtgcgacaggccgatcttcactatgttggttcgatcaccatcgacgccaccctgatggcggccgccggcctgtggccgggagaaaaggtcgacgtgctggacatcaccaacggtgcgcggctcagcacgtacgtcatcgaaggtgaggcggacagcgggaccatcggcatcaacggcgccgccgctcacctgatcagtccaggcgatctggtgatcatcgtcggctatgcgttgatggccgaggaggacgcccgctcttaccagcccaacgtcgtgttcgtgaacggcgacaaccaactggtgcgcatgggcaccgacccggccgaggcgtacgacggcgtcggtctggtgcgcggtgacaccaacagcccccagccctccctttccgagcaggccggagacccgcggagagcgcagtga

SEQ ID NO: 75069 - protein, 154 aa, Frankia sp
MIYREMLKSKIHRAVVRQADLHYVGSITIDATLMAAAGLWPGEKVDVLDITNGARLSTYVIEGEADSGTIGINGAAAHLISPGDLVIIVGYALMAEEDARSYQPNVVFVNGDNQLVRMGTDPAEAYDGVGLVRGDTNSPQPSLSEQAGDPRRAQ

SEQ ID NO: 75070 - DNA, 357 bp, Gloeobacter violaceus
  CDS (1)..(357): transl_table=11
atgttgcggaccgttttgttgagcaaaattcaccgcgctaccgtcaccggggcttgcctggagtacatgggttcgatcagcctggatgcgcagttgctcgcggcggcccacatcttggcgtttgaacaggtgcatgtcgtcaacctcaacaatggagcgcgtttgatcacctacgcgatcgaggcgaccgcgggctcgggggccgtcgtgctcaacggcgccgccgcccgtcttgccgcacccggcgatcgggtgatcgtgcttgcctacgggcagggcaccaccgaggaattggagaaccaccaaccccgtgtcgtgcacgtcgacaccggcaatcggatcgtcgcgtgcgtttga

SEQ ID NO: 75071 - protein, 118 aa, Gloeobacter violaceus
MLRTVLLSKIHRATVTGACLEYMGSISLDAQLLAAAHILAFEQVHVVNLNNGARLITYAIEATAGSGAVVLNGAAARLAAPGDRVIVLAYGQGTTEELENHQPRVVHVDTGNRIVACV

SEQ ID NO: 75072 - DNA, 453 bp, Rhizobium loti
  CDS (1)..(453): transl_table=11
atgcgaaaactagtcgccggcaagctgcacggcatccacgtcacagaagcgaacctcaactaccatggttcgataacgctcgaccccgaccactgcgaggcagccgggatcctgccgatggaattcgtggagatatggaacaagaattccggtgcgcggatttcgacctatgtcatcctcggcgagcgcggctcacggtgctgcatcctcaacggagcggcggctcgcacctgtcagcccgacgacccgattatcgtctgcaactccatctacctggacgaagcgcatatcacttcgctgaagccgcgcatcgtcacgttcgaccaggataaccacatactcgaccgcctgagctactccgtcgatattgacacagacggccgttacagtttcgccattcttgacgaggcggatgagcctttggtcattcctgccctggtctccggggcgtga

SEQ ID NO: 75073 - protein, 150 aa, Rhizobium loti
MRKLVAGKLHGIHVTEANLNYHGSITLDPDHCEAAGILPMEFVEIWNKNSGARISTYVILGERGSRCCILNGAAARTCQPDDPIIVCNSIYLDEAHITSLKPRIVTFDQDNHILDRLSYSVDIDTDGRYSFAILDEADEPLVIPALVSGA

SEQ ID NO: 75074 - DNA, 483 bp, Frankia sp
  CDS (1)..(483): transl_table=11
gtgttgcgcaccatgctcaccgccaagatccaccgtgccacggtcacccaggccgatctgcactacgtgggctccgtgacgatcgacgcggacctgctggccgccgccgacctgctgcctggcgagcaggtcacgatcgtcgacatcaacaacggcgcccggctggagacgtacgccatcgcgggaccggcgggaagcgggatcatcggtattaacggtgccgcggcgcgcctggtccagccgggcgacctagtgatcatcattgcgtacgggctcatggacgacgccgaggcgcgccggcacgtcccgaaggtgctgttcgtcgacgcggcaaaccggatcatcgggcacggcgacgacccggccgaaccgctccccggcgacccgtcgagcctgcgtggcgacatcccggtcgacatcccggtcgacatcccggtacccacagccgcggcggcggtccgatcggccatggctacgcagtga

SEQ ID NO: 75075 - protein, 160 aa, Frankia sp
MLRTMLTAKIHRATVTQADLHYVGSVTIDADLLAAADLLPGEQVTIVDINNGARLETYAIAGPAGSGIIGINGAAARLVQPGDLVIIIAYGLMDDAEARRHVPKVLFVDAANRIIGHGDDPAEPLPGDPSSLRGDIPVDIPVDIPVPTAAAAVRSAMATQ

SEQ ID NO: 75076 - DNA, 378 bp, Gloeobacter violaceus
  CDS (1)..(378): transl_table=11
atgctacgcaccgtactactcggcaaaatccaccgcgccactgtgactggagcctgtctggagtatgtgggttcgatcagcgtcgacagccgtttgctcgcggcggcgggtatcctgccccacgaacaggtgcacgtcgtcaacctcaacaacggcgcgcgcctggtcacctacgccatcgaggccagcgaaggttccggggcggtggtcctcaacggtgcagcggcccgcttggcagcagccggcgatcaggtgattgtccttgcctacggccagggcacggccgttgaactggagcaccaccaaccccaggtggtgtacgtcgatgctcagaaccgcatcgtctcggtccacaggagcgtcgaacacgctggttga

SEQ ID NO: 75077 - protein, 125 aa, Gloeobacter violaceus
MLRTVLLGKIHRATVTGACLEYVGSISVDSRLLAAAGILPHEQVHVVNLNNGARLVTYAIEASEGSGAVVLNGAAARLAAAGDQVIVLAYGQGTAVELEHHQPQVVYVDAQNRIVSVHRSVEHAG

SEQ ID NO: 75078 - DNA, 468 bp, Agrobacterium tumefaciens
  CDS (1)..(468): transl_table=11
ttgatacgcatcgtcagagccgagctgcacggcatcaccgtaacgggagccgatctcgattatcacggatccatcacgctggatcccgagcattgtgacctcgccgggatcagaccgctggaatttgtcgacatctggaacaagcagagcggcgccagaatttcgacctatgtgattttcggcgaagccggatcgaaatgctgcatcctgaacggcgctgcggcgcgtacctgccagcgtggcgatcaggtcatcatatgctcgtcgtcttacgttgaggaaacggcgctttatgacaccgctccgatggtgctgacgtttacgccgaaaaacgatgtgaaggacgttctgcgttatcgcgtcaaggaaacggcgcgccgccctttcgatttctttatcgaaaccctgccgcgcgcagaaaactccgatgtggacgacggtagcgctgcagatcgcgccattgcctga

SEQ ID NO: 75079 - protein, 155 aa, Agrobacterium tumefaciens
MIRIVRAELHGITVTGADLDYHGSITLDPEHCDLAGIRPLEFVDIWNKQSGARISTYVIFGEAGSKCCILNGAAARTCQRGDQVIICSSSYVEETALYDTAPMVLTFTPKNDVKDVLRYRVKETARRPFDFFIETLPRAENSDVDDGSAADRAIA

SEQ ID NO: 75080 - DNA, 384 bp, Anabaena sp
  CDS (1)..(384): transl_table=11
atgcaacgtaccctccttttggcaaaaattcataattgcaccctcactggggcaaacatcaattatgtgggtagtatcagcatcgatcaaatcttattagataaatctggcatcttgccttatgaacaagtgcaagtagtgaataatgccaatggacaacgtttcattacttatgcgatcccggctccagcgcattcgggaattattgaactaaatggggctgccgcccgtctaggcattataggcgatcgcgtgattataatgacttacgggcagtttacatctgaggagttaaaaagttacactccaacggtagtcattgtagatgaaaaaaaccgacctttagaagtgcggcgctacgatgacctgctcagtcaggtctaa

SEQ ID NO: 75081 - protein, 127 aa, Anabaena sp
MQRTLLLAKIHNCTLTGANINYVGSISIDQILLDKSGILPYEQVQVVNNANGQRFITYAIPAPAHSGIIELNGAAARLGIIGDRVIIMTYGQFTSEELKSYTPTVVIVDEKNRPLEVRRYDDLLSQV

SEQ ID NO: 75082 - DNA, 375 bp, Aquifex aeolicus
  CDS (1)..(375): transl_table=11
atgctgagggaaatgctcaagtccaaaatacacaggttaacggtaacggatgcggatcttcattacgagggaagtctgtccttagacgagtatttaatggagcttgcggacttaaagcccttcgaaaagatagacgtttacaacattaacaacggtgcgaggtttcagacttacgttatccccgccccgaggtattcgggagaggttaagttaaacggtgcggccgcaagactcgggcacaaaggcgaccttataataatcgcctcttacgcccagtacacggaggaggagctagagaactacgctcccaagctcattttcgttaacgagaagaaccagcctgttgaagtaaaagaaagtacggaggtgaagtga

SEQ ID NO: 75083 - protein, 124 aa, Aquifex aeolicus
MLREMLKSKIHRLTVTDADLHYEGSLSLDEYLMELADLKPFEKIDVYNINNGARFQTYVIPAPRYSGEVKLNGAAARLGHKGDLIIIASYAQYTEEELENYAPKLIFVNEKNQPVEVKESTEVK

SEQ ID NO: 75084 - DNA, 384 bp, Bacillus anthracis
  CDS (1)..(384): transl_table=11
atgtttcgcacaatgatgagagcgaagttacatcgcgcaacagtaacagaagcaaatttaaattatgtaggtagtattacaattgatgaagatttaatggatgcagtaaatattgtagaaaatgaaaaagttcaaattgtaaataataataatggtgctcgcttagagacatatgttattaaaggcgaacgaggtagcggtgttgtttgtttaaatggtgcagctgcaaggcttgtacagccaggagataaagttattattatttgctacggtttagtggcagaagaaaatattcataaacaagagccgaaaattgcagtattagatgatgataatcaaattattgaaatgttaggtgctgaaaaagcgggtacgatattataa

SEQ ID NO: 75085 - protein, 127 aa, Bacillus anthracis
MFRTMMRAKLHRATVTEANLNYVGSITIDEDLMDAVNIVENEKVQIVNNNNGARLETYVIKGERGSGVVCLNGAAARLVQPGDKVIIICYGLVAEENIHKQEPKIAVLDDDNQIIEMLGAEKAGTIL

SEQ ID NO: 75086 - DNA, 384 bp, Bacillus cereus
  CDS (1)..(384): transl_table=11
atgtttcgcacaatgatgagagcaaagttacatcgtgcaactgtaacggaggcaaatttaaattatgtaggtagtattacaattgatgaagacttaatggatgcagtaaatattgtagaaaacgaaaaagtccaaattgtaaataataataatggtgctcgcttagagacatacgttattaaaggggaacgcggtagtggtgttgtttgtttaaacggtgctgcggcaagacttgtacaaccaggggacaaagtaattattatttgttatgggctagttacggaagaagagattcatacacaagaaccaaaaattgcagtactagacgataataatcaaattattgaaatgttaggtgctgaaaaagcgggtacgatattataa

SEQ ID NO: 75087 - protein, 127 aa, Bacillus cereus
MFRTMMRAKLHRATVTEANLNYVGSITIDEDLMDAVNIVENEKVQIVNNNNGARLETYVIKGERGSGVVCLNGAAARLVQPGDKVIIICYGLVTEEEIHTQEPKIAVLDDNNQIIEMLGAEKAGTIL

SEQ ID NO: 75088 - DNA, 384 bp, Bacillus halodurans
  CDS (1)..(384): transl_table=11
atgtttcgtacaatgatgaaagcgaagcttcacagagccagggtgacagaatcaaacttaaactacgttggcagcattacaatcgatgaagatattatggatgctgtggacatagttgaaaacgaaaaagttcaaattgtgaacaataacaatggggctagatttgagacatatgtcataaaaggaccacggggaagcggtgtattttgcttaaatggggcagcggcaaggctcgtacaagaaggtgatgtaattattgtcatttcttatgctctcgtggctgaagagaacgtgaaggagcaccagccaaaagtggcagttctgaatgaatcaaaccaaatcgttgaaatgcttggtacagagccagcttctaccgtattataa

SEQ ID NO: 75089 - protein, 127 aa, Bacillus halodurans
MFRTMMKAKLHRARVTESNLNYVGSITIDEDIMDAVDIVENEKVQIVNNNNGARFETYVIKGPRGSGVFCLNGAAARLVQEGDVIIVISYALVAEENVKEHQPKVAVLNESNQIVEMLGTEPASTVL

SEQ ID NO: 75090 - DNA, 384 bp, Bacillus licheniformis
  CDS (1)..(384): transl_table=11
atgtaccgtacgttaatgagcgcaaaacttcacagagcgagagtgacggaagccaatttgaactacgtcggcagcgtgacaattgatgaagatttgctggatgctgtcggaatgatggcaaatgaaaaagtgcaaattgtgaataataataacggggcccggctggaaacgtacattattcccggtgaaaggggcagcggcgtcgtttgtttaaacggagctgccgcccgccttgtccaggttggagatgtcgtcatcatcgtgtcttatgcgatgatgtctgaagaggaagcaaagacccataagccgaaggttgccgttttgaacgagagaaacgaaatcgaggaaatgctgggtcaggagccagcccgtaccattctgtag

SEQ ID NO: 75091 - protein, 127 aa, Bacillus licheniformis
MYRTLMSAKLHRARVTEANLNYVGSVTIDEDLLDAVGMMANEKVQIVNNNNGARLETYIIPGERGSGVVCLNGAAARLVQVGDVVIIVSYAMMSEEEAKTHKPKVAVLNERNEIEEMLGQEPARTIL

SEQ ID NO: 75092 - DNA, 384 bp, Bacillus clausii
  CDS (1)..(384): transl_table=11
atgtatcggacaatgatgaaagcaaaattgcatcgtgcacgggtgactgaatcaaatttaaactatgtgggcagcatcaccatagatgaagacctcatggatgcagttgatttgcttgaaaatgaaaaagtacaaattgtgaacaacaacaatggtgaacggtttgaaacgtatgtcattaaagggccaagaggagaagggggcatctgtttaaatggtgccgccgcgcgaaaagtccaacctggagacgtcgtcatcattttgtcttatgcgatgatggaaaacgcagaagccctagcccatcagccgaaagtggcgattttggatgagaacaaccgaattgtggaaatgttaggcacagagccagcttctaccgtccgttag

SEQ ID NO: 75093 - protein, 127 aa, Bacillus clausii
MYRTMMKAKLHRARVTESNLNYVGSITIDEDLMDAVDLLENEKVQIVNNNNGERFETYVIKGPRGEGGICLNGAAARKVQPGDVVIILSYAMMENAEALAHQPKVAILDENNRIVEMLGTEPASTVR

SEQ ID NO: 75094 - DNA, 354 bp, Bacteroides thetaiotaomicron
  CDS (1)..(354): transl_table=11
atgatgattgaagtgttgaagtcgaaaattcattgtgcacgtgtcacagaggcaaatttgaactacatgggtagtatcacgattgacgaagacctgctggatgctgccaacatgattccgggagaaaaagtgtacatcgctgataacaacaatggcgaacgctttgaaacctacattatcaaaggtgaacgcggttccggtaagatttgtctgaacggtgctgccgcccgcaaggtgcaaccggatgatattgtgattatcatgtcgtacgcattgatggattttgaggaagcgaagtcgtttaaaccgaccgtgattttcccggaccctgcgacgaatagcgtagtgaagtaa

SEQ ID NO: 75095 - protein, 117 aa, Bacteroides thetaiotaomicron
MMIEVLKSKIHCARVTEANLNYMGSITIDEDLLDAANMIPGEKVYIADNNNGERFETYIIKGERGSGKICLNGAAARKVQPDDIVIIMSYALMDFEEAKSFKPTVIFPDPATNSVVK

SEQ ID NO: 75096 - DNA, 375 bp, Bdellovibrio bacteriovorus
  CDS (1)..(375): transl_table=11
atgaatatctcattgcttagaaccaaaattcaccgcgccaccgttaccggagccgatctgaactatgagggctccgtcagcatctgtccggatctgatcaaagcctctggtttgctgatgaatgaacgtgtggatatttacaactgcaacaacggcgcccgcttttccacgtacgtgatcaagggtaaaaaaggtgaaatctgcctgaatggggctgctgcccgtcacgtgcaaaaaggcgatctggtgatcatctgttcttactgtggtctgagcatggatgaagccaagaaacatgagccgacagtggtttttgtaaacgcaaaaaacaaagtcactgaaaagcgcaaagaagaccgcaagaacaacaagtag

SEQ ID NO: 75097 - protein, 124 aa, Bdellovibrio bacteriovorus
MNISLLRTKIHRATVTGADLNYEGSVSICPDLIKASGLLMNERVDIYNCNNGARFSTYVIKGKKGEICLNGAAARHVQKGDLVIICSYCGLSMDEAKKHEPTVVFVNAKNKVTEKRKEDRKNNK

SEQ ID NO: 75098 - DNA, 369 bp, Bordetella bronchiseptica
  CDS (1)..(369): transl_table=11
atgcaacgcatcatgctgcgggcgaagctgcaccgcgttacggtcaccgaggccgatctgcactacgagggatcgtgcggcatcgacgaagacctgctggacgccgccggtatgcgcgagttcgaacggatcgagctgtacaacgtcaccaacggcgaacgcttcgacacctacatcatcaaggcggcccgcggcagcggcgcgatctcgctcaacggcgccgcggcgcggcgcgcgcaggtcggcgacctgctgatcatctgcacctacgggccgatgtcggaagagcagtcggccacgcacaagccgcaggtcgtgctggtcgacgacgccaaccgcgtcaaggaaatccgtaaattcccggcctga

SEQ ID NO: 75099 - protein, 122 aa, Bordetella bronchiseptica
MQRIMLRAKLHRVTVTEADLHYEGSCGIDEDLLDAAGMREFERIELYNVTNGERFDTYIIKAARGSGAISLNGAAARRAQVGDLLIICTYGPMSEEQSATHKPQVVLVDDANRVKEIRKFPA

SEQ ID NO: 75100 - DNA, 369 bp, Bordetella pertussis
  CDS (1)..(369): transl_table=11
atgcaacgcatcatgctgcgggcgaagctgcaccgcgttacggtcaccgaggccgatctgcactacgagggatcgtgcggcatcgacgaagacctgctggacgccgccggcatgcgcgagttcgaacggatcgagctctacaacgtcaccaacggcgaacgcttcgacacctacatcatcaaggcggcccgcggcagcggcgcgatctcgctcaacggtgccgcggcgcggcgcgcgcaggtcggcgacctgctgatcatctgcacctacggcccgatgtcggaagagcagtcggccgcgcacaagccgcaggtcgtgctggtcgacgacgccaaccgcgtcaaggaaatccgtaaattcccggcctga

SEQ ID NO: 75101 - protein, 122 aa, Bordetella pertussis
MQRIMLRAKLHRVTVTEADLHYEGSCGIDEDLLDAAGMREFERIELYNVTNGERFDTYIIKAARGSGAISLNGAAARRAQVGDLLIICTYGPMSEEQSAAHKPQVVLVDDANRVKEIRKFPA

SEQ ID NO: 75102 - DNA, 354 bp, Bradyrhizobium japonicum
  CDS (1)..(354): transl_table=11
atgcagataactttgatgaagggcaaaatccatcgcgcctcagtgaccgaagctgatctgcactatgaaggctcgatctcgatagatcgtacgctcctggaggcagcaggaatggtgatcaacgagcgcgtcgaaatctacaatgtagaaacagggacgcgctttgccacctacgtgatcgaggcgccgccgatgtctggtacgatgagcctgaacggtgcggctgcccgactggtgatgcccggagacaagatcattatcgttgcatatgcctcattcgatgaggccgaagcaaagaagttcaagccacacgttgtgcgtgtggaccgagataatcgcatcctggcaagttga

SEQ ID NO: 75103 - protein, 117 aa, Bradyrhizobium japonicum
MQITLMKGKIHRASVTEADLHYEGSISIDRTLLEAAGMVINERVEIYNVETGTRFATYVIEAPPMSGTMSLNGAAARLVMPGDKIIIVAYASFDEAEAKKFKPHVVRVDRDNRILAS

SEQ ID NO: 75104 - DNA, 387 bp, Burkholderia mallei
  CDS (1)..(387): transl_table=11
atgcagcgccacatgctgaaatcgaagatccaccgcgcggcggtcacgcactgcgagctgcattacgaaggctcgtgcgcgatcgacgaggacttgctcgaagcggcgaacatcgtcgagaacgagcggatcgacatctggaacgtcaacaacggcgagcgcttttcgacgtacgcgatcaagggcgagcgcggcagcgggatgatttcgctgaacggctcggccgcgcgccgcgcgcaactgggcgacctcgtgatcatcgccgcgttcgcgatgatcgacgagcaagaattgaaggcgggctggaagccggatctcgtgttcgtcgacgaagacaacaagatcaagggcagccgcgatcacgtgccgacgcagaactggacgtaa

SEQ ID NO: 75105 - protein, 128 aa, Burkholderia mallei
MQRHMLKSKIHRAAVTHCELHYEGSCAIDEDLLEAANIVENERIDIWNVNNGERFSTYAIKGERGSGMISLNGSAARRAQLGDLVIIAAFAMIDEQELKAGWKPDLVFVDEDNKIKGSRDHVPTQNWT

SEQ ID NO: 75106 - DNA, 381 bp, Campylobacter jejuni
  CDS (1)..(381): transl_table=11
atgaatatcactttactcaaatcaaaaatacatcgcgcaagcgtaacagaagctaggcttgattatataggaagtataagtatagatgaaaaattattgcaagcgagtggaattttagaatacgaaaaagtccaagtagtcaatgtcaataatggcgctagatttgaaacctataccatagccacgcaagaagaaggagttgtatgcttaaatggtgctgcggctcgtcttgcagaagtgggagataaggtgatcatcatgtcttatgctgattttaatgaagaagaagcaaaaacatttaaaccaaaagttgtttttgtggatgaaaataacactgctacaaaaataacaaattatgaaaaacacggagctattttctaa

SEQ ID NO: 75107 - protein, 126 aa, Campylobacter jejuni
MNITLLKSKIHRASVTEARLDYIGSISIDEKLLQASGILEYEKVQVVNVNNGARFETYTIATQEEGVVCLNGAAARLAEVGDKVIIMSYADFNEEEAKTFKPKVVFVDENNTATKITNYEKHGAIF

SEQ ID NO: 75108 - DNA, 357 bp, Caulobacter crescentus
  CDS (1)..(357): transl_table=11
atgctgctcaccatgctgaaggccaagctgcaccgcgccacggtgacccaggccgacctcgattacgaaggctcgatcgcgatcgaccgcgacctgctggacgcctcgggcatcctgcccaacgagcaggtcgacgtgctcaacatcaccaacggcgcgcgtttcaccacctacgccatcgaggccccgcgtggctcgaaggtcatcggcgtcaacggcgcggccgcccgtctggtgcagaagaacgatctggtgatcgtcgtcacctactgccagatgcccgccgaggaggcgcgcaactacgcccccaccgtcgtcctgctggacgagggcaacctgatcaagaaggcggcctga

SEQ ID NO: 75109 - protein, 118 aa, Caulobacter crescentus
MLLTMLKAKLHRATVTQADLDYEGSIAIDRDLLDASGILPNEQVDVLNITNGARFTTYAIEAPRGSKVIGVNGAAARLVQKNDLVIVVTYCQMPAEEARNYAPTVVLLDEGNLIKKAA

SEQ ID NO: 75110 - DNA, 387 bp, Chlorobium tepidum
  CDS (1)..(387): transl_table=11
atgaaattacacatgctcaaatccaagatccacaacgccattgtcaccagtggagacctggaatacgaaggaagcatcaccatcgacaaggagctgcttgacatggccgatatgatcgccaatgaaaaggtgctggttgtcaataacaacaacggtgagcgattcgagacttacatcatcgagggaacacgcggactgcgcgaaatccagctcaatggcgcggcggcccgttgcgcgctgcccggcgacgagatcatcatcatgaccttcgccgaaatggaaccggaagaggcgcgcaactggaaaccgatgattgtcatcgttgaccggatgaacaatccgaagcgacgccaccgggtaggttccgaagacgaatatcttggctga

SEQ ID NO: 75111 - protein, 128 aa, Chlorobium tepidum
MKLHMLKSKIHNAIVTSGDLEYEGSITIDKELLDMADMIANEKVLVVNNNNGERFETYIIEGTRGLREIQLNGAAARCALPGDEIIIMTFAEMEPEEARNWKPMIVIVDRMNNPKRRHRVGSEDEYLG

SEQ ID NO: 75112 - DNA, 381 bp, Chromobacterium violaceum
  CDS (1)..(381): transl_table=11
atgcaacgcaatatgctcaagtccaagctccaccgcgtgaccaccacgcatgccgagctgcattacatcggctcctgcgccatcgatgagaacctgctggaagcggcggacattctcgagtacgaagaggtgcagatctggaatgtcaccaacggcgagcgtttcgccacttacgcgatcaaggccgagcgcgggtccggcgtgatttcggtcaacggttccgccgcgcgccgcgccgcgccgggcgacctgctgatcatcgcctcgttcgcgcagtacgaggatgcggaactgaagggccactcgcccaagctggtgttcgtcgacggcgacaaccgcctgaccgaggtgaagggcgccacgccgacccagccggcctga

SEQ ID NO: 75113 - protein, 126 aa, Chromobacterium violaceum
MQRNMLKSKLHRVTTTHAELHYIGSCAIDENLLEAADILEYEEVQIWNVTNGERFATYAIKAERGSGVISVNGSAARRAAPGDLLIIASFAQYEDAELKGHSPKLVFVDGDNRLTEVKGATPTQPA

SEQ ID NO: 75114 - DNA, 384 bp, Clostridium acetobutylicum
  CDS (1)..(384): transl_table=11
atgcatttaaatatgttaaaatctaaaattcatagagcaacagttgttcaagctgatttaaattatgttggaagcataactattgatagaaaccttatggataaagccaatatacttgaatacgaaaaggtagagatagcaaatataaataatggtgctagatttgaaacctacgtaatagctggagaagctggaagtggaataatatgccttaatggagccgctgcaagatgtgcccaagctggcgataaagtaataattatgtgctattgcagcttaacacctgaagaagcatcagaacatagaccaaaagtcgtatttgtaaatgatgacaatagtatatctaatgttacagagtacgaaaagcacgggacaattggctaa

SEQ ID NO: 75115 - protein, 127 aa, Clostridium acetobutylicum
MHLNMLKSKIHRATVVQADLNYVGSITIDRNLMDKANILEYEKVEIANINNGARFETYVIAGEAGSGIICLNGAAARCAQAGDKVIIMCYCSLTPEEASEHRPKVVFVNDDNSISNVTEYEKHGTIG

SEQ ID NO: 75116 - DNA, 411 bp, Corynebacterium efficiens
  CDS (1)..(411): transl_table=11
atgctgcgcaccatcctcggtagcaagattcaccgcgccaccgtcacccaggccgaccttgactatgtcggctccatcaccatcgacgccgacctggtcaatgccgccggcctcatcgagggcgagaaggtcgccgtcgtggacatcaccaacggcgcccgcattgagacctatgtgatcaccggcgatgccggaaccggcagcatctgcatcaatggtgccgccgcccatctgatcaacccgggtgatctggtcatcatcatgagctatctgcaggccaccgatgccgaggcccgcgcctaccagcccaatatcgtccacgtggatgccgacaaccggatcgtcgccctgggcaacgacgccggcgagcccatcccgggttccagcttgctgtcctcgcgctccctctag

SEQ ID NO: 75117 - protein, 136 aa, Corynebacterium efficiens
MLRTILGSKIHRATVTQADLDYVGSITIDADLVNAAGLIEGEKVAVVDITNGARIETYVITGDAGTGSICINGAAAHLINPGDLVIIMSYLQATDAEARAYQPNIVHVDADNRIVALGNDAGEPIPGSSLLSSRSL

SEQ ID NO: 75118 - DNA, 411 bp, Corynebacterium glutamicum
  CDS (1)..(411): transl_table=11
atgctgcgcaccatcctcggaagtaagattcaccgagccactgtcactcaagctgatctagattatgttggctctgtaaccatcgacgccgacctggttcacgccgccggattgatcgaaggcgaaaaagttgccatcgtagacatcaccaacggcgctcgtctggaaacttatgtcattgtgggcgacgccggaacgggcaatatttgcatcaatggtgccgctgcacaccttattaatcctggcgatcttgtgatcatcatgagctaccttcaggcaactgatgcggaagccaaggcgtatgagccaaagattgtgcacgtggacgccgacaaccgcatcgttgcgctcggcaacgatcttgcggaagcactacctggatccgggcttttgacgtcgagaagcatttag

SEQ ID NO: 75119 - protein, 136 aa, Corynebacterium glutamicum
MLRTILGSKIHRATVTQADLDYVGSVTIDADLVHAAGLIEGEKVAIVDITNGARLETYVIVGDAGTGNICINGAAAHLINPGDLVIIMSYLQATDAEAKAYEPKIVHVDADNRIVALGNDLAEALPGSGLLTSRSI

SEQ ID NO: 75120 - DNA, 384 bp, Dechloromonas aromatica
  CDS (1)..(384): transl_table=11
atgcagagaacaatgctgaaatccaagttgcaccgtgttacggcgacccatgccgacctgcactacgagggttcctgcgccattgatgaagacctgctcgaagcggcaaacatcaaggaatacgaacagatcgacatctggaacgtaaataacggcgagcgtttcacgacctacgccatccgcgccgaacgtggctcgggtgtcatttccgtcaatggctcggcggcccgtcgtgccgccccgggcgatatcctgatcatcgccaccttcgccgtctataacgaggtggaactggccaaacatgagccggatctgatctatgtcgatacgcaaaatcgcatcgtccgtcgcggccacaagattccagtacaagccgctgcctga

SEQ ID NO: 75121 - protein, 127 aa, Dechloromonas aromatica
MQRTMLKSKLHRVTATHADLHYEGSCAIDEDLLEAANIKEYEQIDIWNVNNGERFTTYAIRAERGSGVISVNGSAARRAAPGDILIIATFAVYNEVELAKHEPDLIYVDTQNRIVRRGHKIPVQAAA

SEQ ID NO: 75122 - DNA, 375 bp, Dehalococcoides ethenogenes
  CDS (1)..(375): transl_table=11
atgctcaaaagcaaaatccaccgggctaccattaccgatgcctgcatagactatgaaggcagtattaccattgataaaaaccttatgcaggcagccaacttgctgccctacgaacaggtgcatgtggtaaatgtaaataacggaacgcggctggagacctatgtcatagagggcccggctggcagcgggcagatatgcttaaacggggcagctgcccgtatgggaatgaagggtgataaagtaattatactgggctacagtctgattaccgaagaagatacccttacccaccagccgaatctggtctatgtagacagtcttaaccgcataaccaaagttaaaaacggggttgccagccggaatttagaggtataa

SEQ ID NO: 75123 - protein, 124 aa, Dehalococcoides ethenogenes
MLKSKIHRATITDACIDYEGSITIDKNLMQAANLLPYEQVHVVNVNNGTRLETYVIEGPAGSGQICLNGAAARMGMKGDKVIILGYSLITEEDTLTHQPNLVYVDSLNRITKVKNGVASRNLEV

SEQ ID NO: 75124 - DNA, 375 bp, Dehalococcoides sp
  CDS (1)..(375): transl_table=11
atgctgaaaagcaaaatccaccgggctaccatcacggatgcctgcatagactatgaaggcagtattaccattgataaaaaccttatgcaggcagccaacttgctgccttacgaacaggtacatgtggtaaatgtaaataacgggacacggttggaaacctatgttatagagggttcagccggcagtggccagatatgcctaaacggggcggccgcccgcatgggcatgaagggtgacaagataatcatactgggctatagcctgataaccgaagaagatactcttattcaccagccaaatctggtgtatgtagatgcgcttaaccgtataaccaaagtaaaaaacggggttgccaatcagggtttagaggtataa

SEQ ID NO: 75125 - protein, 124 aa, Dehalococcoides sp
MLKSKIHRATITDACIDYEGSITIDKNLMQAANLLPYEQVHVVNVNNGTRLETYVIEGSAGSGQICLNGAAARMGMKGDKIIILGYSLITEEDTLIHQPNLVYVDALNRITKVKNGVANQGLEV

SEQ ID NO: 75126 - DNA, 360 bp, Desulfotalea psychrophila
  CDS (1)..(360): transl_table=11
atgttacatcagatgatgaaggctaagttgcaccgagccacaatttcggctgctgacttgaattatgaaggaagtctcactattgataccgatctgctaaaagcttcaggtattcgtccctatgaacgtatctatgtctataacgtaaataatggcgaacgatttgaaacctatgcaattgagggagaagcgggatccggtgcaattcaactcaacggagcagcggcacgtaagggaatgataggcgattttctcattattgtcacctatgccctctgttcagacgatgaagtagatgagcatagaccaaatgttgttctgcttaacccagataatacaattaaagaaatcgtgaagtag

SEQ ID NO: 75127 - protein, 119 aa, Desulfotalea psychrophila
MLHQMMKAKLHRATISAADLNYEGSLTIDTDLLKASGIRPYERIYVYNVNNGERFETYAIEGEAGSGAIQLNGAAARKGMIGDFLIIVTYALCSDDEVDEHRPNVVLLNPDNTIKEIVK

SEQ ID NO: 75128 - DNA, 396 bp, Enterococcus faecalis
  CDS (1)..(396): transl_table=11
atgaaagttacaatgttaaaaggaaaaatacatagagctaaagttgaacaagctgagttagattatgtaggaagtattactgttgatatggatttattagaagcagcaggaatatatgaatatgaaaaagtacaaatagttgatgttaataatggaaatagatttgaaacttatacaatagctggagagagaggaacagggatgatttgcttgaatggagctgcagctagatgtgtatcaactggagataaaataattttaatggcatattgtgaattaaatgaaaatgaggttaaggatcatagacctaaggttgtttttgtcgatgataataataaagttgaaagagtaacatcatatgaaaaacatggaaggttatcagatataattctttag

SEQ ID NO: 75129 - protein, 131 aa, Enterococcus faecalis
MKVTMLKGKIHRAKVEQAELDYVGSITVDMDLLEAAGIYEYEKVQIVDVNNGNRFETYTIAGERGTGMICLNGAAARCVSTGDKIILMAYCELNENEVKDHRPKVVFVDDNNKVERVTSYEKHGRLSDIIL

SEQ ID NO: 75130 - DNA, 384 bp, Geobacillus kaustophilus
  CDS (1)..(384): transl_table=11
atgtttcgcacgctcatgaacgccaaaattcaccgcgctcgtgtaacagaggccaatctcgattacgtcggcagcatcacgatcgatgaagatattttggatgccgtcggcattgtggcgaatgaaaaagtacaggtagtgaacaatcataatggagcccgttttgaaacatacgtcatccccggtgagcgcggcagcggcgtcttttgcctaaacggcgccgccgcccgccttgtgcaaaaaggggacgttattatcgtcatctcatatgtgctcgttccagaggaaaaaatcgccgcccatcgaccgaaaatcgcgattatggacgaaaacaaccgaattgtgcagctcatcgccgaagagccggcgcatacggttttatga

SEQ ID NO: 75131 - protein, 127 aa, Geobacillus kaustophilus
MFRTLMNAKIHRARVTEANLDYVGSITIDEDILDAVGIVANEKVQVVNNHNGARFETYVIPGERGSGVFCLNGAAARLVQKGDVIIVISYVLVPEEKIAAHRPKIAIMDENNRIVQLIAEEPAHTVL

SEQ ID NO: 75132 - DNA, 513 bp, Helicobacter hepaticus
  CDS (151)..(513): transl_table=11
ttgataataagattcttatatggaataatcaataagaaagcttactccaagccttatctgattaatttatttactcatcatataatgatattacatatttttatgataaaattacactatttttatatcccaaatcaaataaggcataaaatgcaatttgaaatgctttactcaaagattcatcgtgctaaagtcagtgatgctaatcttaattatgtcggctcaattacgattgataaaacacttgcccaaagtgcaaatcttttagcaggtatgaaagtagagattgtgaatatcaataatggcgaacgttttagcacttatgtcatttatggcgataaaaagggtgaaatttgtctcaatggagctgctgcacgcaaagttcaaataggcgatattattataataattgcttatgccacatatacccacaatgagcttgaacactataaacctactattgtgcaagtcaatgaatctaatcagattctatctattacaaatgaggtgtaa

SEQ ID NO: 75133 - protein, 120 aa, Helicobacter hepaticus
MQFEMLYSKIHRAKVSDANLNYVGSITIDKTLAQSANLLAGMKVEIVNINNGERFSTYVIYGDKKGEICLNGAAARKVQIGDIIIIIAYATYTHNELEHYKPTIVQVNESNQILSITNEV

SEQ ID NO: 75134 - DNA, 354 bp, Helicobacter pylori J99
  CDS (1)..(354): transl_table=11
atgacttttgaaatgctttatagtaaaatccatagggcgactatcacagacgctaatctcaactatataggctcgatcaccatagatgaggatttagccaagctcgctaagctcagagagggcatgaaagtggaaatcgtggatgtcaataacggcgaacgcttcagcacctatgtgattttagggaaaaaaaggggcaaaatttgtgtcaatggtgcagcagccagaaaggtggccataggcgatgtggtgatcattttagcttatgcgagcatgaatgaagatgaaatcaatacgcacaagccaagcattgtgctagtggatgaaaaaaacgaaattttagaaaagggttag

SEQ ID NO: 75135 - protein, 117 aa, Helicobacter pylori J99
MTFEMLYSKIHRATITDANLNYIGSITIDEDLAKLAKLREGMKVEIVDVNNGERFSTYVILGKKRGKICVNGAAARKVAIGDVVIILAYASMNEDEINTHKPSIVLVDEKNEILEKG

SEQ ID NO: 75136 - DNA, 354 bp, Helicobacter pylori
  CDS (1)..(354): transl_table=11
atgacttttgaaatgctttatagtaaaatccatagggcgactatcacggacgctaatctcaactatataggctcgatcaccatagatgaggatttagccaagctcgccaagctcagagagggcatgaaagtagaaatcgtggatgtcaataatggcgaacgcttcagcacctatgtgattttagggaaaaaaaggggcgaaatttgcgtcaatggtgcagcagccagaaaggtggccataggcgatgtagtgatcattttagcttatgcgagcatgaatgaagatgaaatcaacgcacacaagccgagcatcgtgctagtggatgaaaaaaacgaaattttagaaaagggttag

SEQ ID NO: 75137 - protein, 117 aa, Helicobacter pylori
MTFEMLYSKIHRATITDANLNYIGSITIDEDLAKLAKLREGMKVEIVDVNNGERFSTYVILGKKRGEICVNGAAARKVAIGDVVIILAYASMNEDEINAHKPSIVLVDEKNEILEKG

SEQ ID NO: 75138 - DNA, 393 bp, Lactobacillus plantarum
  CDS (1)..(393): transl_table=11
atgttaattgatatgttaaaaggtaagattcaccgggcaaccgttacacaggccgatttggaatatgttggtagtattactattgatgaaacattgatggaagcaagtggaatcttggaatacgaaaaagttcaaattgcggatgtaaataatggcgcgcggtttgaaacttatgtgattgcggggccaagggactcaggcgtgatttgcttgaacggtgctactgctcgatgtgcatcagttggcgataaggttattattatgaattatgcgcaatttgagccagaagaggccaagcatgcaaagccgtatgttgtacttgtcgacgatgaaaatagattgacgaagcgagtacgttatgaaaagcatggattattagcagaagaactatga

SEQ ID NO: 75139 - protein, 130 aa, Lactobacillus plantarum
MLIDMLKGKIHRATVTQADLEYVGSITIDETLMEASGILEYEKVQIADVNNGARFETYVIAGPRDSGVICLNGATARCASVGDKVIIMNYAQFEPEEAKHAKPYVVLVDDENRLTKRVRYEKHGLLAEEL

SEQ ID NO: 75140 - DNA, 351 bp, Leptospira interrogans
  CDS (1)..(351): transl_table=11
atgcagataaccgtaatgaaaggtaaaatccaccgggccacggtaacagacgcggatttaaactatgaaggaagtctgaccgtggatatggatcttgtagatgctgcgggaatgcgagtatacgagaaggtttccgtagtgaacgtaaacaatggagcccgttttgaaacctatatcatagagggaaaaagaggttccggagaaatctgtttgaatggggcagccgcaagactaggaatgaagggtgataagatcatcatcatcacttatgctcaagtagaagaacaagaacttgcttcagactacactcctaaagtagttcacgttgacgaaaaaaatcgaaaacgttaa

SEQ ID NO: 75141 - protein, 116 aa, Leptospira interrogans
MQITVMKGKIHRATVTDADLNYEGSLTVDMDLVDAAGMRVYEKVSVVNVNNGARFETYIIEGKRGSGEICLNGAAARLGMKGDKIIIITYAQVEEQELASDYTPKVVHVDEKNRKR

SEQ ID NO: 75142 - DNA, 384 bp, Listeria innocua
  CDS (1)..(384): transl_table=11
atgtttagaactatgatgaatggcaaaattcaccgagcgactgtaacagaagccaatctgaattatgtaggaagtattacgattgactctgctattttagaagcggtggatatgcttccaaacgaaaaagttcaaattgtaaataataataatggcgcaagaattgaaacgtatattatcccaggtgagccaggtagtggtgtgatttgcctaaatggagctgctgcaagacacgtccaagttggcgatgtggttattatcatgagctacgggatgtttacgtcggaagaagcaaaaacacatgaacccaaaattgtggtattagacgaaaaaaatcatattgaaatgattcttccagaagaaaaagcgcatacgactttataa

SEQ ID NO: 75143 - protein, 127 aa, Listeria innocua
MFRTMMNGKIHRATVTEANLNYVGSITIDSAILEAVDMLPNEKVQIVNNNNGARIETYIIPGEPGSGVICLNGAAARHVQVGDVVIIMSYGMFTSEEAKTHEPKIVVLDEKNHIEMILPEEKAHTTL

SEQ ID NO: 75144 - DNA, 384 bp, Listeria monocytogenes
  CDS (1)..(384): transl_table=11
atgtttagaacaatgatgaatggcaaaattcaccgagcgactgtaacagaagccaatctgaattatgttggaagtattacgattgattctgctattttagaagcggtggatatgcttccaaacgaaaaagttcaaattgtaaataataataatggtgctagaattgaaacctatattatcccaggtgagccgggaagcggtgtgatttgtctaaacggagctgcagctagacacgtccaagtcggcgatgtagtaattattatgagttacggaatgtttactgacgaagaagcgaaaacacatgaacccaaaatagtcgttttagatgaaaaaaatcatattgaaatgattcttccagaagaaaaagcacatacgactttataa

SEQ ID NO: 75145 - protein, 127 aa, Listeria monocytogenes
MFRTMMNGKIHRATVTEANLNYVGSITIDSAILEAVDMLPNEKVQIVNNNNGARIETYIIPGEPGSGVICLNGAAARHVQVGDVVIIMSYGMFTDEEAKTHEPKIVVLDEKNHIEMILPEEKAHTTL

SEQ ID NO: 75146 - DNA, 381 bp, Methylococcus capsulatus
  CDS (1)..(381): transl_table=11
atgcaaaccacgatgttgaaagccaagttgcaccgagcgcgtgtgacccattcggagctcgaatacgaaggctcctgcgccatcgacggctcactgctcgactgtgccggcattcgcgaatacgagcaaatccagatctacaacgtcaacaacggggaacgcttcaccacctatgccatccgcgccgccgacggatccggcaccatctcagtcaacggcgcagccgcccgcctcgccgccgtgggcgatatcgtcatcatctgcgcctacgtcggtttgaaccaggccgaactggccgcctaccggccgaacctcgtctacgtcgacgaaaacaaccaaatcacccggaccagccacgccatcccggttcaggcggcctga

SEQ ID NO: 75147 - protein, 126 aa, Methylococcus capsulatus
MQTTMLKAKLHRARVTHSELEYEGSCAIDGSLLDCAGIREYEQIQIYNVNNGERFTTYAIRAADGSGTISVNGAAARLAAVGDIVIICAYVGLNQAELAAYRPNLVYVDENNQITRTSHAIPVQAA

SEQ ID NO: 75148 - DNA, 387 bp, Moorella thermoacetica
  CDS (1)..(387): transl_table=11
atgtggcgcatcatgatgaaaagcaaactccaccgggcgacggtgaccgctgcggacctgaactacatcggcagtataaccattgacagcgacttgatggccgccgccgatattttacccaatgagaaagtccaggtagtcgataacaataacggcgcccgcctggagacctacgctatccccggcccggccggcagcggggtaatctgcgccaacggtgccgctgcccggctggtgcaacccggcgacattataattattattgcctatggcatctttgacgaccgggaggccaggacctaccagccccgggttatttttctggatgcccggaataaaataaccgccgtcaaaaaaggagagcaaccgggccaggtctgggtataa

SEQ ID NO: 75149 - protein, 128 aa, Moorella thermoacetica
MWRIMMKSKLHRATVTAADLNYIGSITIDSDLMAAADILPNEKVQVVDNNNGARLETYAIPGPAGSGVICANGAAARLVQPGDIIIIIAYGIFDDREARTYQPRVIFLDARNKITAVKKGEQPGQVWV

SEQ ID NO: 75150 - DNA, 420 bp, Mycobacterium bovis
  CDS (1)..(420): transl_table=11
atgttacggacgatgctgaagtcgaagatccaccgcgccacggtgacctgcgccgacctgcactacgtcggctcggtgaccatcgatgccgacttgatggacgccgccgacctgctggaaggcgaacaggtaaccatcgtcgatatcgacaacggtgctcgactggtcacctacgcgatcaccggcgaacgcggcagtggtgtgattggcatcaacggtgccgccgcgcacttggtgcatccgggggatctggtgattctgattgcgtacgcgacgatggacgacgcccgggcccgcacataccagccgcggatcgtgtttgtcgacgcttacaacaaaccgatcgacatgggccacgatccggcatttgtgcccgaaaacgcgggcgagctgctagacccccggctcggtgtgggatag

SEQ ID NO: 75151 - protein, 139 aa, Mycobacterium bovis
MLRTMLKSKIHRATVTCADLHYVGSVTIDADLMDAADLLEGEQVTIVDIDNGARLVTYAITGERGSGVIGINGAAAHLVHPGDLVILIAYATMDDARARTYQPRIVFVDAYNKPIDMGHDPAFVPENAGELLDPRLGVG

SEQ ID NO: 75152 - DNA, 429 bp, Mycobacterium leprae
  CDS (1)..(429): transl_table=11
atgttacggacgatgctaaagtctaagattcatcgcgccaccgtcacgcaggcttatctgcactatgtcggttcggtgaccatcgatgccgatttgatgggcgctgcggacctgcttgagggtgaacaggttaccattgttgacatcaataacggtgcccggctcgtcacctacgcaattgctggcgagcgtggcaccggtgtgattggaatcaatggcgccgcagcgcatcttgttcatccgggcgatctggtaatcctgatctcctatgggaccatggaagatgccgaggcgcacgcttatcagccgcggattgtgttcgtcgacgccgataacaaaccgatcgatctgggccacgatccaggctccgtgcccttggacatatctgtcgcggctgaactatttgatccccggatcggtgcgcggtaa

SEQ ID NO: 75153 - protein, 142 aa, Mycobacterium leprae
MLRTMLKSKIHRATVTQAYLHYVGSVTIDADLMGAADLLEGEQVTIVDINNGARLVTYAIAGERGTGVIGINGAAAHLVHPGDLVILISYGTMEDAEAHAYQPRIVFVDADNKPIDLGHDPGSVPLDISVAAELFDPRIGAR

SEQ ID NO: 75154 - DNA, 432 bp, Mycobacterium paratuberculosis
  CDS (1)..(432): transl_table=11
atgttacggacgatgctcaagtcgaagatccaccgggccaccgtcacgcaggccgacctgcactacgtgggctcggtgaccatcgacgccgacctgatggacgccgccgacctgctcgagggcgaacaggtgaccatcgtcgacatcgacaacggcgcccggctggtcacctacgcgatcaccggtgagcgtggcagcggggtgatcgggatcaacggtgccgcagcgcatctggtccacccgggcgatctggtcatcctgatcgcgtatgggaccatggaggaggccgaggcgcgggcgtatcagccgcgaatcgtcttcgtcgacgccgacaacaagccggtcgacctcggccacgatccggcattcgtgccggacttcgagatagcaggggcggccgagctgctcgatccccggatcgttgcgcggtag

SEQ ID NO: 75155 - protein, 143 aa, Mycobacterium paratuberculosis
MLRTMLKSKIHRATVTQADLHYVGSVTIDADLMDAADLLEGEQVTIVDIDNGARLVTYAITGERGSGVIGINGAAAHLVHPGDLVILIAYGTMEEAEARAYQPRIVFVDADNKPVDLGHDPAFVPDFEIAGAAELLDPRIVAR

SEQ ID NO: 75156 - DNA, 384 bp, Neisseria meningitidis serogroup A
  CDS (1)..(384): transl_table=11
atgttccgtactatgcttggcggaaaaatccaccgcgccaccgtaaccgaagccgatttaaactatgtcggcagcattaccgtcgatcaagacctgttggacgcggcaggcatctaccccaacgaaaaagtcgccatcgtcaacaacaacaacggcgaacgttttgaaacctataccattgcagggaaacgcggcagcggcgtgatttgtctgaacggtgctgcggcaaggctggtgcagaaaagcgatatcgtcatcatcatgtcttacgtccaactctccgaacccgaaatcgccgcacacgaacccaaagtcgtcttggtagacggaaacaacaaaatccgcgacatcatctcctatgagccgccgcacaccgtgctgtaa

SEQ ID NO: 75157 - protein, 127 aa, Neisseria meningitidis serogroup A
MFRTMLGGKIHRATVTEADLNYVGSITVDQDLLDAAGIYPNEKVAIVNNNNGERFETYTIAGKRGSGVICLNGAAARLVQKSDIVIIMSYVQLSEPEIAAHEPKVVLVDGNNKIRDIISYEPPHTVL

SEQ ID NO: 75158 - DNA, 420 bp, Nocardia farcinica
  CDS (1)..(420): transl_table=11
atgttgcgcaccatgatgaagtccaagatccaccgggccaccgtgacccacgccgatctgcactacgtcggctcggtcaccgtggaccaggatctgctcgacgccgccgatctgctcgagggcgagcaggtctgcatcgtcgacatcgacaacggcgcccggctggagacgtacgtgatcgccggtgagcgcggctcgggcgtgatcggcatcaacggcgccgccgcccacctggtgcaccccggcgacctggtgatcctgatcgcctacgggatgatgaacgagcaggagatcgccgagtacgacccgaaggtcgtcttcgtcgacgagcgcaaccgcccggtcgaactcggctccgacccggcgcatgcgcccgagggttcggggctgacctcgccgcgttcgctcaccttcgcctga

SEQ ID NO: 75159 - protein, 139 aa, Nocardia farcinica
MLRTMMKSKIHRATVTHADLHYVGSVTVDQDLLDAADLLEGEQVCIVDIDNGARLETYVIAGERGSGVIGINGAAAHLVHPGDLVILIAYGMMNEQEIAEYDPKVVFVDERNRPVELGSDPAHAPEGSGLTSPRSLTFA

SEQ ID NO: 75160 - DNA, 384 bp, Oceanobacillus iheyensis
  CDS (1)..(384): transl_table=11
atgtatcgtacgatgatgaaaagtaaaattcatcgggcagtagtaacagaggcaaatttaaattacgtaggcagtattactatagatgaagctatcctaaatcaagttgatatcttacctaatgaaaaggtccaaattgtgaataataataatggagctcgattagagacctatgttatcgccggagaaagaaatagtggaacaatctgtttaaatggagcagctgcaagacttgtacaaccaggagatactgtaattatcattgcatatgcgcttttatcacaagaagaacttcagagttttcatccgaaggtagcaattatggacgaatccaaccgtgttaaacaaatgatagaacaagaacctccgatgacggttttgtaa

SEQ ID NO: 75161 - protein, 127 aa, Oceanobacillus iheyensis
MYRTMMKSKIHRAVVTEANLNYVGSITIDEAILNQVDILPNEKVQIVNNNNGARLETYVIAGERNSGTICLNGAAARLVQPGDTVIIIAYALLSQEELQSFHPKVAIMDESNRVKQMIEQEPPMTVL

SEQ ID NO: 75162 - DNA, 357 bp, Porphyromonas gingivalis
  CDS (1)..(357): transl_table=11
atgtacgtcgaagtattaaaatccaaaatacaccgcgtaaccattacggaggccaacctcaactatgtgggtagcatcaccatcgatgaagatctgatggatgctgccaacatcatcgccggagagaaagtccaaatcgtggacaacaacaacggagcacgcttggagacctataccataccgggcaaaagaggttcgggggtaatctgtctcaatggagcagctgcccgcatcgttcatccgggcgacatcatcatcatcatggcatatgcctggatgccgatggaggaagccaaggtgttcaagcctgctgtagtatttcccgatactgcaacgaacaagataatcctgaagtaa

SEQ ID NO: 75163 - protein, 118 aa, Porphyromonas gingivalis
MYVEVLKSKIHRVTITEANLNYVGSITIDEDLMDAANIIAGEKVQIVDNNNGARLETYTIPGKRGSGVICLNGAAARIVHPGDIIIIMAYAWMPMEEAKVFKPAVVFPDTATNKIILK

SEQ ID NO: 75164 - DNA, 381 bp, Pseudomonas aeruginosa
  CDS (1)..(381): transl_table=11
atgcacgccataatgctcaaagccaagttgcatcgcgccgaagtcacccatgccgtcctcgactacgaaggctcctgcgccatcgacggcgattggctggacctctccggaatccgcgagtacgaacagatccagatctacaacatcgacaacggcgagcgcttcaccacctatgcgatccgcgccgagaacggctcgaagatgatctcggtgaacggcgccgcggcacacaaggccaaggtcggcgaccgcgtgatcatctgcgcctacgcacactacagcgaagccgaactggccagccacaagccgcgcatgctgtacatggcgccgggcaaccagctcagccataccagcgaggcgattccgatacaggtcgcctga

SEQ ID NO: 75165 - protein, 126 aa, Pseudomonas aeruginosa
MHAIMLKAKLHRAEVTHAVLDYEGSCAIDGDWLDLSGIREYEQIQIYNIDNGERFTTYAIRAENGSKMISVNGAAAHKAKVGDRVIICAYAHYSEAELASHKPRMLYMAPGNQLSHTSEAIPIQVA

SEQ ID NO: 75166 - DNA, 363 bp, Ralstonia solanacearum
  CDS (1)..(363): transl_table=11
atgcaacgcaatatgctccgcgccaagctgcaccgcgcgacggtcacccaggccgatctggactacgaaggctcgtgcggcatcgacgaggacctgctcgacgccgccgacatgcgcgagtacgaaaagatcgagctctacaacgtcaacaacggcgagcgcttctcgacctacatcatcaagggcaagcgcggctcgggcgaaatctcgctcaacggcgccgccgcgcgccgcgcgcacgtgggcgacaaactgatcatctgcacctacgcgccgatgaacgaggaagaagtcgccaactacaagcccaagatcgtgctgctcggcgacggcaaccggatcaaggaaatcaaggcagtctga

SEQ ID NO: 75167 - protein, 120 aa, Ralstonia solanacearum
MQRNMLRAKLHRATVTQADLDYEGSCGIDEDLLDAADMREYEKIELYNVNNGERFSTYIIKGKRGSGEISLNGAAARRAHVGDKLIICTYAPMNEEEVANYKPKIVLLGDGNRIKEIKAV

SEQ ID NO: 75168 - DNA, 471 bp, Rhodopirellula baltica
  CDS (1)..(471): transl_table=11
ttggtggacacaccttatcgaaaaatgctggcggccaagattcaccgcgcgacggtgactggtgcagacgtgaactacgaaggcagcttgaccgttcccccggaactgttggttgctgcaaagattcacccttacgaatctttgcatgtttggaatgtgactcgaggcacgcgtttggaaacctacgcgatcgaaggacttccaaattccaatgacgtgtgtgccaacggtgccgccgctcacttgattcgtcctggcgaccatgtgattttggcggcgtacgccatggttcccgaagccgatgcggcgacacacaaacctcgtttgatctttgttgatgacaacaatcagttgtcccacgtcggccctgagatcgcgggtcccaacctgcgatccgattccgatgacacgcacctggttcgctccactgagatgacgcctgacggacaaccgctcgctgaaggttgctag

SEQ ID NO: 75169 - protein, 156 aa, Rhodopirellula baltica
MVDTPYRKMLAAKIHRATVTGADVNYEGSLTVPPELLVAAKIHPYESLHVWNVTRGTRLETYAIEGLPNSNDVCANGAAAHLIRPGDHVILAAYAMVPEADAATHKPRLIFVDDNNQLSHVGPEIAGPNLRSDSDDTHLVRSTEMTPDGQPLAEGC

SEQ ID NO: 75170 - DNA, 384 bp, Staphylococcus aureus
  CDS (1)..(384): transl_table=11
gtgataagaacaatgatgaatgctaaaattcatagagcaagagtgactgagtcaaatttaaattatgtaggtagcattacgattgattcagatatattggaagcggtagacatcttgccaaatgaaaaagtagccatcgtgaataataataatggtgcacgttttgaaacatacgtaatagctggtgaaagaggtagtggtaaaatttgtttaaacggtgcagcatcaagacttgttgaagtaggcgatgtagtcataatcatgacttatgcacagttgaatgaagaagaaattcaaaaccatgcacctaaagtagcagtaatgaatgaagacaatgtcattattgaaatgattcatgaaaaagaaaatacgatagtgttataa

SEQ ID NO: 75171 - protein, 127 aa, Staphylococcus aureus
MIRTMMNAKIHRARVTESNLNYVGSITIDSDILEAVDILPNEKVAIVNNNNGARFETYVIAGERGSGKICLNGAASRLVEVGDVVIIMTYAQLNEEEIQNHAPKVAVMNEDNVIIEMIHEKENTIVL

SEQ ID NO: 75172 - DNA, 387 bp, Staphylococcus epidermidis
  CDS (1)..(387): transl_table=11
ttgattagaacatttatgaactcaaaaatccatagagctagagttacagaatctaatttaaattacgttggaagcataacaatagatgccaatatattagatgcggttgatattttacccaatgaaaaggttgctattgttaataataataatggtgctcgatttgaaacatatgtcattgctggagaacgtggtagtggaaagatgtgtttaaatggcgcggcttcaagactagttgaagttggagacgtcattattattatgacatatgcacaattaaatgaagatgaaatggtagatcactcaccaaaagtagctgtgttaaatgaaaataatgaaattatagaaatgataaatgagaaagaaaatacgatatcaaatgtataa

SEQ ID NO: 75173 - protein, 128 aa, Staphylococcus epidermidis
MIRTFMNSKIHRARVTESNLNYVGSITIDANILDAVDILPNEKVAIVNNNNGARFETYVIAGERGSGKMCLNGAASRLVEVGDVIIIMTYAQLNEDEMVDHSPKVAVLNENNEIIEMINEKENTISNV

SEQ ID NO: 75174 - DNA, 420 bp, Streptomyces avermitilis
  CDS (1)..(420): transl_table=11
atgctgcgtaccatgttcaagtccaagatccaccgagccaccgtcacccaggccgacctgcactacgtcggatccgtcaccatcgacgccgatcttctggacgccgccgatctgctgcccggcgagttggttcatatcgtcgacatcaccaacggtgcccgcctggagacgtacgtcatcgagggcgagcgtggctccggagtcgtcgggatcaacggggcggcggcccatctcgtccaccccggcgacctggtgatcatcatcagctacgctcaggtttccgacgccgaggcgagggcactgcggccgagggtcgtgcacgtggaccgcgacaaccgcgtcgtggccctgggcgcggacccggccgagccggtaccgggctcggaccaggcgcgcagcccgcaggccgtcaccgcctga

SEQ ID NO: 75175 - protein, 139 aa, Streptomyces avermitilis
MLRTMFKSKIHRATVTQADLHYVGSVTIDADLLDAADLLPGELVHIVDITNGARLETYVIEGERGSGVVGINGAAAHLVHPGDLVIIISYAQVSDAEARALRPRVVHVDRDNRVVALGADPAEPVPGSDQARSPQAVTA

SEQ ID NO: 75176 - DNA, 438 bp, Synechocystis sp
  CDS (1)..(438): transl_table=11
atggggagcattcgtttgatgcacgcaaaattacatcgggtctgtgtgacggaggccaatgttaattatgtgggcagtatcaccattgacccagtaatgttggagcgggtgggattgttgcccctagaggaggtggatattatcaatctcagcaacggtaatcgcttttccacctatgtcctgcccggtcaagcccattccaaggaaatttgccccaacggtggagccgccttgctttgtcaaccaggcgatcgcctgattatttttgcctacgaactgtgcgatcgccgtgaggtattacaaaaggggcaccaagctaaggtgctagtgaccaacgaaagtaatgaaacggtggatttttatttacaagaactgatacccaaggaagatggggtgaaattcatcaacaatatttgttcggaagccatcccccattga

SEQ ID NO: 75177 - protein, 145 aa, Synechocystis sp
MGSIRLMHAKLHRVCVTEANVNYVGSITIDPVMLERVGLLPLEEVDIINLSNGNRFSTYVLPGQAHSKEICPNGGAALLCQPGDRLIIFAYELCDRREVLQKGHQAKVLVTNESNETVDFYLQELIPKEDGVKFINNICSEAIPH

SEQ ID NO: 75178 - DNA, 345 bp, Thermotoga maritima
  CDS (1)..(345): transl_table=11
atgctgaacatatatctgaagtccaaaattcacatggctacgatcacgagaaaagaagtttactacgaaggaagcatagaaatagacgaagagctgatgggaaaagcgggcatcagcgagggagaactcgtactggtggtgaacgtcaacaacgccgaaagattcgtaacgtatgtcataaagggaaagaggggaagccgtgagataaacctctacggtgcagccgcaagactcggtgaagaaggtgacagagtgatcatcatggctttcaccttcagtgacaaacctgtgaaagcgaaaacgatcgttctcaacgagaaaaacgaaatcgttcaggagaaataa

SEQ ID NO: 75179 - protein, 114 aa, Thermotoga maritima
MLNIYLKSKIHMATITRKEVYYEGSIEIDEELMGKAGISEGELVLVVNVNNAERFVTYVIKGKRGSREINLYGAAARLGEEGDRVIIMAFTFSDKPVKAKTIVLNEKNEIVQEK

SEQ ID NO: 75180 - DNA, 381 bp, Thiobacillus denitrificans
  CDS (1)..(381): transl_table=11
atgcaaagaacgatgctcaagtccaagctgcatcgcgcgaccgtcacgcattccgagctgcattacgaaggctcgtgcgccatcgacgagtcgctgctcgaagcggccaatatccacgagtacgagcagatccagatctacaacgtcagcaacggcgagcgcttcaccacctatgccatccgcgcggcgcgcgggtcgggcgtcatctcggtgaacggcgccgcggcgcacaaggcgaatcccggcgacctcgtcatcatcgccacctatgcgacgtacaacgaactcgagatggcgcgctacgcgcccgaactcgtctacgtcgacgccgccaacgccatcgtcgacacgcgccagacgatcccggtccaggctgcctag

SEQ ID NO: 75181 - protein, 126 aa, Thiobacillus denitrificans
MQRTMLKSKLHRATVTHSELHYEGSCAIDESLLEAANIHEYEQIQIYNVSNGERFTTYAIRAARGSGVISVNGAAAHKANPGDLVIIATYATYNELEMARYAPELVYVDAANAIVDTRQTIPVQAA

SEQ ID NO: 75182 - DNA, 366 bp, Wolinella succinogenes
  CDS (1)..(366): transl_table=11
atgaaattcgatatgctatggagcaagatccatcgagcgaccgtcaccgatgccaatctcaattatgtcggatccatcacgattgatgaagagttgatggaggcggcggagcttttggtggggcagaaggtcgagattcttgatgtcaataacggagagcgctttagcacctatgtcattaggggtgagcgcggaagtagagagatctgtctcaatggcgcagccgcgcgaaaagtcgccattggcgataagatcattattgttgcctacgcacagtatgatcgaagcgagctatctagctacaaacccaccgtggtattagtggatgagaagaacgatattgtccaaatcaagcatgaggtgtga

SEQ ID NO: 75183 - protein, 121 aa, Wolinella succinogenes
MKFDMLWSKIHRATVTDANLNYVGSITIDEELMEAAELLVGQKVEILDVNNGERFSTYVIRGERGSREICLNGAAARKVAIGDKIIIVAYAQYDRSELSSYKPTVVLVDEKNDIVQIKHEV

SEQ ID NO: 75184 - DNA, 429 bp, Xylella fastidiosa
  CDS (49)..(429): transl_table=11
gtgtctgtcattggctacaatcactttccttactttgctgcgtttcccatgcaactgtccttgcttaaagctaagatccaccgtgctaccgtcagccattctgaactcaactatgaagggtctattgcaatagacggactactgttggaggctgccggtctctatgagtttgagaaagtccacatctggaatgtgacgaatggtgcccgtttcactacttatgcaatacgtgccgagcatggcagtggcatcatttcagtgaatgggggtgctgcgcgttacgtgcaggttggagatttggtgatcgttgctgcgtttgcacaaatgagtgaggacgaggcagcagttttcagcccgaatttggtatacgtggacgctgccaatgcgatgactcataccaaccacagtattcctacacaggtcgcgtga

SEQ ID NO: 75185 - protein, 126 aa, Xylella fastidiosa
MQLSLLKAKIHRATVSHSELNYEGSIAIDGLLLEAAGLYEFEKVHIWNVTNGARFTTYAIRAEHGSGIISVNGGAARYVQVGDLVIVAAFAQMSEDEAAVFSPNLVYVDAANAMTHTNHSIPTQVA

SEQ ID NO: 75186 - DNA, 381 bp, Yersinia pestis
  CDS (1)..(381): transl_table=11
atgatacgcactatgttgcaaggcaaactgcaccgggtcaaagtcactcaagcggatttgcactatgaaggctcctgcgccatcgatcaggattttctggaagccgccggtattctggaatacgaagctattgatatttataacgttgataacggtcagcgtttttcaacctatgcgattgctgctgagcgtggttcgcggattatctccgtgaatggtgccgcagcacgctgcgcttgtgtcggtgataagctcattatctgttcttatgtacagatgtcatatgctgctgcccgtttgcaccaccctaaagtggcttattttgaaggtgaaaatcagctacaacgcaaagctaaggcagtgccagttcaggtcgcttaa

SEQ ID NO: 75187 - protein, 126 aa, Yersinia pestis
MIRTMLQGKLHRVKVTQADLHYEGSCAIDQDFLEAAGILEYEAIDIYNVDNGQRFSTYAIAAERGSRIISVNGAAARCACVGDKLIICSYVQMSYAAARLHHPKVAYFEGENQLQRKAKAVPVQVA

SEQ ID NO: 75188 - DNA, 381 bp, Yersinia pseudotuberculosis
  CDS (1)..(381): transl_table=11
atgatacgcactatgttgcaaggcaaactgcaccgggtcaaagtcactcaagcggatttgcactatgaaggctcctgcgccatcgatcaggattttctggaagccgccggtattctggaatacgaagctattgatatttataacgttgataacggtcagcgtttttcaacctatgcgattgctgctgagcgtggttcgcggattatctccgtgaatggtgccgcagcacgctgcgcttgtgtcggtgataagctcattatctgttcttatgtacagatgtcagatgctgctgcccgtttgcaccaccctaaagtggcttattttgaaggtgaaaatcagctacaacgcaaagctaaggccgtgccggttcaggtcgcttaa

SEQ ID NO: 75189 - protein, 126 aa, Yersinia pseudotuberculosis
MIRTMLQGKLHRVKVTQADLHYEGSCAIDQDFLEAAGILEYEAIDIYNVDNGQRFSTYAIAAERGSRIISVNGAAARCACVGDKLIICSYVQMSDAAARLHHPKVAYFEGENQLQRKAKAVPVQVA

SEQ ID NO: 75190 - DNA, 22 bp, Artificial sequence
  primer
atgattcgcacgatgctgcagg

SEQ ID NO: 75191 - DNA, 24 bp, Artificial sequence
  primer
ttaagcaacctgtaccggaatcgc

SEQ ID NO: 75192 - protein, 130 aa, Artificial sequence
  consensus sequence
  Variant (2)..(8): Xaa in position 2 to 8 is any amino acid
  Variant (10)..(10): Xaa in position 10 is any amino acid
  Variant (13)..(14): Xaa in position 13 to 14 is any amino acid
  Variant (17)..(19): Xaa in position 17 to 19 is any amino acid
  Variant (21)..(21): Xaa in position 21 is any amino acid
  Variant (23)..(23): Xaa in position 23 is any amino acid
  Variant (26)..(27): Xaa in position 26 to 27 is any amino acid
  Variant (30)..(41): Xaa in position 30 to 41 is any amino acid
  Variant (43)..(50): Xaa in position 43 to 50 is any amino acid
  Variant (53)..(53): Xaa in position 53 is any amino acid
  Variant (55)..(56): Xaa in position 55 to 56 is any amino acid
  Variant (59)..(59): Xaa in position 59 is any amino acid
  Variant (61)..(63): Xaa in position 61 to 63 is any amino acid
  Variant (64)..(64): Xaa in position 64 is any or no amino acid
  Variant (67)..(69): Xaa in position 67 to 69 is any amino acid
  Variant (70)..(71): Xaa in position 70 to 71 is any or no amino acid
  Variant (77)..(81): Xaa in position 77 to 81 is any amino acid
  Variant (84)..(85): Xaa in position 84 to 85 is any amino acid
  Variant (87)..(99): Xaa in position 87 to 99 is any amino acid
  Variant (100)..(104): Xaa in position 100 to 104 is any or no amino acid
  Variant (106)..(112): Xaa in position 106 to 112 is any amino acid
  Variant (113)..(129): Xaa in position 113 to 129 is any or no amino acid
MXXXXXXXKXHRXXVTXXXLXYXGSXXIDXXXXXXXXXXXXEXXXXXXXXNGXRXXTYXIXXXXGSXXXXXNGAAAXXXXXGDXXIXXXXXXXXXXXXXXXXXXPXXXXXXXXXXXXXXXXXXXXXXXXN

SEQ ID NO: 75193 - protein, 54 aa, Artificial sequence
  protein pattern
  Variant (2)..(3): Xaa in position 2 to 3 is any amino acid
  Variant (4)..(5): Xaa in position 4 to 5 is any or no amino acid
  Variant (7)..(9): Xaa in position 7 to 9 is any amino acid
  Variant (10)..(11): Xaa in position 10 to 11 is any or no amino acid
  Variant (13)..(13): Xaa in position 13 is any amino acid
  Variant (15)..(15): Xaa in position 15 is any amino acid
  Variant (18)..(18): Xaa in position 18 is any amino acid
  Variant (19)..(19): Xaa in position 19 is Ala, Gly, Ser or Thr
  Variant (20)..(20): Xaa in position 20 is Ile, Leu or Val
  Variant (22)..(27): Xaa in position 22 to 27 is any amino acid
  Variant (28)..(28): Xaa in position 28 is Ala, Ser or Val
  Variant (29)..(29): Xaa in position 29 is Asp, Gly or Asn
  Variant (30)..(30): Xaa in position 30 is Ile, Leu or Met
  Variant (31)..(33): Xaa in position 31 to 33 is any amino acid
  Variant (35)..(35): Xaa in position 35 is any amino acid
  Variant (36)..(36): Xaa in position 36 is Ile or Val
  Variant (37)..(39): Xaa in position 37 to 39 is any amino acid
  Variant (40)..(40): Xaa in position 40 is Asp or Asn
  Variant (41)..(42): Xaa in position 41 to 42 is any amino acid
  Variant (43)..(43): Xaa in position 43 is Asn, Gln, Ser or Thr
  Variant (45)..(45): Xaa in position 45 is any amino acid
  Variant (47)..(47): Xaa in position 47 is Phe, Ile or Leu
  Variant (48)..(48): Xaa in position 48 is any amino acid
  Variant (51)..(51): Xaa in position 51 is any amino acid
  Variant (52)..(52): Xaa in position 52 is Ile or Leu
  Variant (53)..(53): Xaa in position 53 is any amino acid
  Variant (54)..(54): Xaa in position 54 is Ala, Gly or Thr
HXXXXTXXXXXLXYXGSXXXDXXXXXXXXXXXXEXXXXXXXXXGXRXXTYXXXX

SEQ ID NO: 75194 - protein, 15 aa, Artificial sequence
  protein pattern
  Variant (3)..(3): Xaa in position 3 is Ala or Ser
  Variant (6)..(6): Xaa in position 6 is His or Arg
  Variant (7)..(10): Xaa in position 7 to 10 is any amino acid
  Variant (13)..(13): Xaa in position 13 is any amino acid
  Variant (14)..(14): Xaa in position 14 is Ile, Leu, Met or Val
NGXAAXXXXXGDXXI

SEQ ID NO: 75195 - DNA, 285 bp, Escherichia coli
  CDS (1)..(285): transl_table=11
atgcttcaaagtaatgagtacttttccggcaaagtgaaatcaatcggcttttccagcagcagcactggtcgcgccagcgtgggtgttatggttgaaggcgaatacaccttcagcaccgctgagccggaagagatgacggtaatcagtggcgcgctgaatgtgttactgcctgacgcgaccgactggcaggtgtatgaagccggttcggtgtttaatgttcccggtcacagtgagtttcatctgcaagttgccgaacccacctcttatctgtgccgctatctgtaa

SEQ ID NO: 75196 - protein, 94 aa, Escherichia coli
MLQSNEYFSGKVKSIGFSSSSTGRASVGVMVEGEYTFSTAEPEEMTVISGALNVLLPDATDWQVYEAGSVFNVPGHSEFHLQVAEPTSYLCRYL

SEQ ID NO: 75197 - DNA, 315 bp, Vibrio cholerae O1 biovar eltor str. N16961
  CDS (1)..(315): transl_table=11
gtgattgatgacagacaggaagaaaaaatgatcaaggaaaacgtgtattttgatggcaacgtaaagtcacttggcttcagccagcaagatggagagagtacggttggtgtgatggctcctggccaatacactttcggtactggtgcaccagagcgcatgacggtagtcaaaggtgcgctgactattaagcgtgtcaccgatgctgactgggttacctttactgcaggtgaagcgtttgaagtggcgggtaattcctcttttgatctgcaagtggaagtcgcgaccgcttatctgtgtgaatttttgcctgcttaa

SEQ ID NO: 75198 - protein, 104 aa, Vibrio cholerae O1 biovar eltor str. N16961
MIDDRQEEKMIKENVYFDGNVKSLGFSQQDGESTVGVMAPGQYTFGTGAPERMTVVKGALTIKRVTDADWVTFTAGEAFEVAGNSSFDLQVEVATAYLCEFLPA

SEQ ID NO: 75199 - DNA, 282 bp, Pseudomonas syringae pv. syringae B728a
  CDS (1)..(282): transl_table=11
atgttcaaggtcaacgagtacttcgacggcaccgtcaaatccatcgccttcacccaggccgatggtgaggcaaccatcggtgtcatggcagcgggcgaatatgagttcggtacggcgcaacgggaaatcatgcacgtgatctccggcgagttgagcgtgaagcttccggacagcactgactgggaaacctttgccaccggcaaccagttcaacgtaccggccaacagcaagttccagatcaaggtcaaagtcgataccgcctacctgtgcgaatatcgctga

SEQ ID NO: 75200 - protein, 93 aa, Pseudomonas syringae pv. syringae B728a
MFKVNEYFDGTVKSIAFTQADGEATIGVMAAGEYEFGTAQREIMHVISGELSVKLPDSTDWETFATGNQFNVPANSKFQIKVKVDTAYLCEYR

SEQ ID NO: 75201 - DNA, 285 bp, Pseudomonas fluorescens Pf-5
  CDS (1)..(285): transl_table=11
atgtttaaagtcaacgagtacttcgacggcaccgtcaagtcgattgccttcggcacggccgaaggcccagccaccattggcgtcatggccccgggcgaatacgagttcggcaccgcacaacgggaaatcatgcacgtggtctccggcgccctgaccgtgcgcctgccagacagcgcagactgggaaaccttcccggccggtagccagttcaacgttccggccaacagcaagttccagctcaaagtcgcggtggacaccgcctacctgtgcgaataccgcggctga

SEQ ID NO: 75202 - protein, 94 aa, Pseudomonas fluorescens Pf-5
MFKVNEYFDGTVKSIAFGTAEGPATIGVMAPGEYEFGTAQREIMHVVSGALTVRLPDSADWETFPAGSQFNVPANSKFQLKVAVDTAYLCEYRG

SEQ ID NO: 75203 - DNA, 285 bp, Psychrobacter arcticus 273-4
  CDS (1)..(285): transl_table=11
atgccaagcgttaataattattttgataataaagtaacttctattgcctttcaaacggcaaccaagcctgctactgttggggtaatggagattggtgactatgaatttggcaccagcgaatttgagactatgacagtcgttagcggtgctttgacggtcaagttgccagagagtgatgaatggcagacctttaatgctggcgcgcaatttactgttgacgccaatcagaaatttcaagtaaaagtagaagtcgaaacggcttatctatgcacttacggtgaatag

SEQ ID NO: 75204 - protein, 94 aa, Psychrobacter arcticus 273-4
MPSVNNYFDNKVTSIAFQTATKPATVGVMEIGDYEFGTSEFETMTVVSGALTVKLPESDEWQTFNAGAQFTVDANQKFQVKVEVETAYLCTYGE

SEQ ID NO: 75205 - DNA, 315 bp, Colwellia psychrerythraea 34H
  CDS (1)..(315): transl_table=11
atgtcagagtttaaagaagttaccgttactaaagcagccagcgtttattttgatggtaaagttactagccgtaaggttactttcaatgatggaagttttaaaaccttaggtattatgatgccaggtgaatataagtttggtaccaatgaagaagaattaatggaaattactgcaggtgaatgtgaaattttactagcaggagctactgaatggcagaacattagcgacgggcaatcttttggtgtcccggcaaatagttcttttgaagtacgcgcgaaaaccttaattgattattgttgtacttatataagctaa

SEQ ID NO: 75206 - protein, 104 aa, Colwellia psychrerythraea 34H
MSEFKEVTVTKAASVYFDGKVTSRKVTFNDGSFKTLGIMMPGEYKFGTNEEELMEITAGECEILLAGATEWQNISDGQSFGVPANSSFEVRAKTLIDYCCTYIS

SEQ ID NO: 75207 - DNA, 282 bp, Pseudomonas syringae pv. phaseolicola 1448A
  CDS (1)..(282): transl_table=11
atgttcaaggtcaacgagtacttcgacggcaccgtcaaatccatcgccttcagtcaggtcgacggtcaggcaaccatcggtgtcatggcggcgggcgaatatgagttcggtacagcgcaacgggaaatcatgcacgtgatctccggcgagctgaacgtgaagctcccggacagtaccgactgggaaactttctccaccggcagccagttcaatgtcccggccaacagcaagttccagctcaaggtcagcgttgataccgcttacctgtgcgaataccgctga

SEQ ID NO: 75208 - protein, 93 aa, Pseudomonas syringae pv. phaseolicola 1448A
MFKVNEYFDGTVKSIAFSQVDGQATIGVMAAGEYEFGTAQREIMHVISGELNVKLPDSTDWETFSTGSQFNVPANSKFQLKVSVDTAYLCEYR

SEQ ID NO: 75209 - DNA, 312 bp, Dechloromonas aromatica RCB
  CDS (1)..(312): transl_table=11
atgtcgcaatacgacaacgtttccgtggtcaagaaggccaatgtttattttgacggcaagtgtgtcagccacaccgtggtgctggccgatggcacgaagaagacggttggcgtgatcctgccgtccagcctgaccttcaataccggcgcaccggaaatcatggaaggtgtcggcggttcctgccgcgtcaagctgaagggcgagagcgagtggaaaacctacggcgatggtcagtctttcaacgtgccgggcaattccagcttcgaaatcgcctgtgacgagccctatcactacgtttgccacttcgggtaa

SEQ ID NO: 75210 - protein, 103 aa, Dechloromonas aromatica RCB
MSQYDNVSVVKKANVYFDGKCVSHTVVLADGTKKTVGVILPSSLTFNTGAPEIMEGVGGSCRVKLKGESEWKTYGDGQSFNVPGNSSFEIACDEPYHYVCHFG

SEQ ID NO: 75211 - DNA, 318 bp, Ralstonia eutropha JMP134
  CDS (1)..(318): transl_table=11
atggaagtgagccagttcgataacgtatcggtcgtcaagaaggccaacctgtatttcgacggcaagtgcgtgagccacaccgtgctgttttccgatggcacgcgcaagacgctcggcgtgatcttcccggcgacgctgacctttaacaccggcgctccggaaatcatggaaatcaacgctggcgtgtgccgcgtgcgcctggccggctccgaagcctggcagacgtatggcgccggccagcagttcgatgtgccgggcaacagcagctttgacattgaagtccaggaaaccctggactacgtctgccactttggctga

SEQ ID NO: 75212 - protein, 105 aa, Ralstonia eutropha JMP134
MEVSQFDNVSVVKKANLYFDGKCVSHTVLFSDGTRKTLGVIFPATLTFNTGAPEIMEINAGVCRVRLAGSEAWQTYGAGQQFDVPGNSSFDIEVQETLDYVCHFG

SEQ ID NO: 75213 - DNA, 315 bp, Thiobacillus denitrificans ATCC 25259
  CDS (1)..(315): transl_table=11
atgtcccggttcgacaacgtcgcagtcaccaagcaggccaacgtctatttcgacggcaagtgcgtttcgcataccgtcgaattcgccgacggcaccaaaaagtccgtcggcgtgattctgccatcgacgctgaccttcaatacgggggcccccgaagtcatggagaccgtcgccggcgcatgtcgggtcaagctcgcgggcgaaaacgagtggaagagctacgcggccgggcagtcgttcgaagtgcctgcgaactcgagcttcgagatcgaagtcgcggccgagccctaccactacgtgtgccatttcggctga

SEQ ID NO: 75214 - protein, 104 aa, Thiobacillus denitrificans ATCC 25259
MSRFDNVAVTKQANVYFDGKCVSHTVEFADGTKKSVGVILPSTLTFNTGAPEVMETVAGACRVKLAGENEWKSYAAGQSFEVPANSSFEIEVAAEPYHYVCHFG

SEQ ID NO: 75215 - DNA, 285 bp, Pseudomonas fluorescens PfO-1
  CDS (1)..(285): transl_table=11
atgtttaaagtcaacgagtacttcgacggcaccgtcaagtcgatcgcttttggcactgctgaaggccctgcgaccatcggcgtcatggccgcgggcgaatacgaattcggcaccagccagcgtgaaatcatgcacgtggtttcgggcgcactgaccgtcaaactgccggacagcagcgactgggaaactttcgctgccggtagccagttcaacgtgccagccaacagcaagttccagctgaaagtcgccgtcgacaccgcctacctgtgcgaataccgcggctga

SEQ ID NO: 75216 - protein, 94 aa, Pseudomonas fluorescens PfO-1
MFKVNEYFDGTVKSIAFGTAEGPATIGVMAAGEYEFGTSQREIMHVVSGALTVKLPDSSDWETFAAGSQFNVPANSKFQLKVAVDTAYLCEYRG

SEQ ID NO: 75217 - DNA, 321 bp, Burkholderia sp. 383
  CDS (1)..(321): transl_table=11
atgaccagtgcaacccaattcgacaacgtatcggtcgtcaagcgcgcgaacgtctatttcgacggcaagtgcgtgtcgcataccgtgctcttcccggacggcacgcgcaagacgctcggcgtgatcctgccgtgcgcgctcaacttcggcacggacgcacccgaattgatggaagtgcaggccggcaagtgccgcgtgaagctcgacggcagcagcgaatggcagacctacggcgccggcgaatcgttctcggtgccgggcaagagccgcttcgacatcgaagtgctcgagacgctcgattacgtctgcagctacctgtaa

SEQ ID NO: 75218 - protein, 106 aa, Burkholderia sp. 383
MTSATQFDNVSVVKRANVYFDGKCVSHTVLFPDGTRKTLGVILPCALNFGTDAPELMEVQAGKCRVKLDGSSEWQTYGAGESFSVPGKSRFDIEVLETLDYVCSYL

SEQ ID NO: 75219 - DNA, 315 bp, Geobacter metallireducens GS-15
  CDS (1)..(315): transl_table=11
atgtctgaattcatcaacgtaaccgtagtccgggaggcaaacgtattcttcaatggcggcgtcgtgagccgcaccgtcattttccccgacggcaccaagaagaccctcggcatcatgcaaccgggggagtataccttcaataccggcgccccggagatcatggagatcctcaccggcgaactggatctcaagcttcccggcagcgatctgtgggaccggatcggaggcggggaatccttcgaggtgccggccaattcctccttcaccatgaaggtcctctccctcaccgattactgttgctctttcctcggctag

SEQ ID NO: 75220 - protein, 104 aa, Geobacter metallireducens GS-15
MSEFINVTVVREANVFFNGGVVSRTVIFPDGTKKTLGIMQPGEYTFNTGAPEIMEILTGELDLKLPGSDLWDRIGGGESFEVPANSSFTMKVLSLTDYCCSFLG

SEQ ID NO: 75221 - DNA, 285 bp, Saccharophagus degradans 2-40
  CDS (1)..(285): transl_table=11
atgttagaagtcaatacttactttgacggtacagttaaatctatcgcctttcaaactgccactctacccgctaccgttggcgttatggctaaaggcgaatacacctttggtacagactgcaaagaaattatgaccgttgtcagtggcgaattaattgtacaactgccaaatcaagaagaatggcaaacatttattgatggccaaacctttgaagtagaggcgaaccaatcttttaacttaaaagtaccggtagaaactgcttacctttgtaaatacatacgctag

SEQ ID NO: 75222 - protein, 94 aa, Saccharophagus degradans 2-40
MLEVNTYFDGTVKSIAFQTATLPATVGVMAKGEYTFGTDCKEIMTVVSGELIVQLPNQEEWQTFIDGQTFEVEANQSFNLKVPVETAYLCKYIR

SEQ ID NO: 75223 - DNA, 312 bp, Methylobacillus flagellatus KT
  CDS (1)..(312): transl_table=11
gtggcccagttcgacaatgtgagtgtcaagaaaaaagccaatgtgtactttgatggcaagtgtgtcagccacacagtgctgttcccgaacggtacccgtgccaccgtaggtgtgattttccctggtgcgttgactttcaatacgggttctccagagttgatggaaatcaacagcggcgcctgcaaggtgcgcctgagtggcgaaagtgactggaaggcatatggtgcgggcgagaaatttacggtaccgggcaactccagtttcgatatcgaagtgacggaaacgttagattacgtctgtcatttcgaataa

SEQ ID NO: 75224 - protein, 103 aa, Methylobacillus flagellatus KT
MAQFDNVSVKKKANVYFDGKCVSHTVLFPNGTRATVGVIFPGALTFNTGSPELMEINSGACKVRLSGESDWKAYGAGEKFTVPGNSSFDIEVTETLDYVCHFE

SEQ ID NO: 75225 - DNA, 321 bp, Burkholderia xenovorans LB400
  CDS (1)..(321): transl_table=11
atgacggccgcaacgcaattcgatcaggtgtccattatcaaacgggccaacgtctacttcgacggcaagtgtgtctcgcacaccgttgtgttccccgacggctcgcgaaagacgctcggcgtgatcctgcccggcgcgctcaacttcggcaccgacgcggcggaactcatggaggtgcaggccggccaatgccgcatccgcctcgaaggcagcgaggactggaaaacgtatggcgcgggcgaatcgttctcggtgcccggcaacagccgctttgatatcgacgtggttgaaacgctcgactacgtctgcagctatctgtaa

SEQ ID NO: 75226 - protein, 106 aa, Burkholderia xenovorans LB400
MTAATQFDQVSIIKRANVYFDGKCVSHTVVFPDGSRKTLGVILPGALNFGTDAAELMEVQAGQCRIRLEGSEDWKTYGAGESFSVPGNSRFDIDVVETLDYVCSYL

SEQ ID NO: 75227 - DNA, 312 bp, Ralstonia metallidurans CH34
  CDS (1)..(312): transl_table=11
atgagccagttcgacaacgtatccgtggtcaagaaggccaacctgtatttcgatggcaagtgcgttagccatacggtgacctttgccgacggcacccgcaagacgctcggcgtcattttcccggccgcgctgacgttcaacaccggtgcgccagaaatcatggaaatcaatgccggcgtctgccgcgtgcgtctggcgggttcggacgagtggaagacctatggcgctggtcagcagtttgacgtgccgggcaacagcagcttcgatatcgaagtgaccgagaccctggattacgtctgccacttcggttaa

SEQ ID NO: 75228 - protein, 103 aa, Ralstonia metallidurans CH34
MSQFDNVSVVKKANLYFDGKCVSHTVTFADGTRKTLGVIFPAALTFNTGAPEIMEINAGVCRVRLAGSDEWKTYGAGQQFDVPGNSSFDIEVTETLDYVCHFG

SEQ ID NO: 75229 - DNA, 312 bp, Shewanella sp. MR-4
  CDS (1)..(312): transl_table=11
atggagttaattgagcaagtctcggtcgcgaaaaaagccaatatttattttgagggcaaagttgccagccgcagcgtattcttcaatgatggcagcaagcaaaccctaggtgtcgtcctccctggagaatacgagttttcgacctcgcagggtgaaataatgcaagtcaccagtggcagtttcgaggtattactgccagatagcacaacttggcaaacctttagtgaaggcagtcaattcgaactcgtggccaatgccagcttcaaaatccgtaacagtgcaattgcagagtattgctgtagctacctgtaa

SEQ ID NO: 75230 - protein, 103 aa, Shewanella sp. MR-4
MELIEQVSVAKKANIYFEGKVASRSVFFNDGSKQTLGVVLPGEYEFSTSQGEIMQVTSGSFEVLLPDSTTWQTFSEGSQFELVANASFKIRNSAIAEYCCSYL

SEQ ID NO: 75231 - DNA, 312 bp, Shewanella sp. MR-7
  CDS (1)..(312): transl_table=11
atggagttaattgagcaagtctcggtcgcgaaaaaagccaatatttattttgagggcaaagttgccagccgcagcgtattcttcagtgatggcagcaagcaaaccctaggtgtcgtcctccctggagaatacgagttttcgacctcgcagggtgaaatcatgcaagtcaccagtggcagttttgaggtattactgccagatagcacaacctggcaaacctttagtgaaggcagtcaattcgaactcgtggccaacgtcagcttcaaaatccgtaacagtgcaattgcagagtattgctgtagctacctgtaa

SEQ ID NO: 75232 - protein, 103 aa, Shewanella sp. MR-7
MELIEQVSVAKKANIYFEGKVASRSVFFSDGSKQTLGVVLPGEYEFSTSQGEIMQVTSGSFEVLLPDSTTWQTFSEGSQFELVANVSFKIRNSAIAEYCCSYL

SEQ ID NO: 75233 - DNA, 282 bp, Magnetococcus sp. MC-1
  CDS (1)..(282): transl_table=11
atgttgaaagtgaatgaatattttgatggggcagtgaaatccatcggttttcagagcgaaaccctgcccgcgacggtgggggttatggcaccgggtgcctataccttcggtaccgaccaaaaagagaccatgaccgtggttagcggtgctttaacggttaagctccccggtcaggatggttggcagcgctttgccgccgcggaacattttgaggtggaggccaaccaatcgtttgagcttaaagttgaggttgccacggcttatctctgcacctatggctaa

SEQ ID NO: 75234 - protein, 93 aa, Magnetococcus sp. MC-1
MLKVNEYFDGAVKSIGFQSETLPATVGVMAPGAYTFGTDQKETMTVVSGALTVKLPGQDGWQRFAAAEHFEVEANQSFELKVEVATAYLCTYG

SEQ ID NO: 75235 - DNA, 324 bp, Azoarcus sp. BH72
  CDS (1)..(324): transl_table=11
atgggtattaccgaaaagctcgacggcgttgccgtcaccaccaaggccaacgtctatttcgatggcaagtgcgtcagccactccgtccgtttcgcggacggtacgggcaagtccgtcggcgtgatcctgccttccatcctgaccttcaataccggcgcgccggaagtgatggagggtgtggccggatcctgccgtgttcgcctgaaaggcgagaccacgtggaacacctatggggccggcgagtcctatcaggtgccgggcaactcgagcttcgacattgaagtcgtcggcgagccctatcactacatctgccacttcggctga

SEQ ID NO: 75236 - protein, 107 aa, Azoarcus sp. BH72
MGITEKLDGVAVTTKANVYFDGKCVSHSVRFADGTGKSVGVILPSILTFNTGAPEVMEGVAGSCRVRLKGETTWNTYGAGESYQVPGNSSFDIEVVGEPYHYICHFG

SEQ ID NO: 75237 - DNA, 318 bp, Acidovorax sp. JS42
  CDS (1)..(318): transl_table=11
atgaccaccgaaaaaatcgacggtgtttccgtcaccacccaggccaatgtgtactttgacggcaagtgcgtgagccacaacctcacgtaccccgatggcacgaagaagtcggtgggtgtggtgctgccggccacgttgaccttcggcacgggcgcacccgagatcatggaatgcgtgggcggatcctgcgaataccagctggacggcaccgacgcctgggtcaaggtgggcgcgggcgagaagttcagcgtgccgggcaattccaaattcaacatccgcgtgaccgaggccttccactacatctgccactacggctga

SEQ ID NO: 75238 - protein, 105 aa, Acidovorax sp. JS42
MTTEKIDGVSVTTQANVYFDGKCVSHNLTYPDGTKKSVGVVLPATLTFGTGAPEIMECVGGSCEYQLDGTDAWVKVGAGEKFSVPGNSKFNIRVTEAFHYICHYG

SEQ ID NO: 75239 - DNA, 315 bp, Pseudoalteromonas tunicata D2
  CDS (1)..(315): transl_table=11
atggaacaatttgataatgtcgctgtggttaaaaaagcaaacagttactttgatggtaaagtgaccagtagaaccgtgatatttaaagatggtagcaaaaaaactttaggtattatgcaacctggcgattatgaatttggtaccgagcttgcggaggtaatggaaatactcgcaggagagcttgaggtgttattaccagagcaacctgaatggcaaactatccgtgcaggtgatgtgtttgaaattccagctaaaaagagttttcaattaaaggtttatagtcttacagattactgctgttcatacttcgaataa

SEQ ID NO: 75240 - protein, 104 aa, Pseudoalteromonas tunicata D2
MEQFDNVAVVKKANSYFDGKVTSRTVIFKDGSKKTLGIMQPGDYEFGTELAEVMEILAGELEVLLPEQPEWQTIRAGDVFEIPAKKSFQLKVYSLTDYCCSYFE

SEQ ID NO: 75241 - DNA, 282 bp, Photobacterium sp. SKA34
  CDS (1)..(282): transl_table=11
atgttaaaagtaaatgaatattttgatagccaagtaaaatcaattggctttgaatcttcgggcgaccatgtcagtgttggcgtaatggcacctggcgaatatacctttggtacggtagcacctgaacgtatgactgtggttaaaggtgcattaactgtaaaattaccaggccatgttgactgggaaacttacaacgcaggcgataattttgaagttcctggtgacagttcatttaatgtgaaagtattggttactactgcttatctttgtgattacttataa

SEQ ID NO: 75242 - protein, 93 aa, Photobacterium sp. SKA34
MLKVNEYFDSQVKSIGFESSGDHVSVGVMAPGEYTFGTVAPERMTVVKGALTVKLPGHVDWETYNAGDNFEVPGDSSFNVKVLVTTAYLCDYL

SEQ ID NO: 75243 - DNA, 282 bp, Oceanospirillum sp. MED92
  CDS (1)..(282): transl_table=11
atgctgaacgtaaatgagtacttcgacggtaaagtaaaatccatcggtttcgaaaacagtgaaggtaatgtcacttcaggtgtcatggctccaggcgagtatgagttcggcaccagcgaagatgaactgatgaaagtcgtaagcggagagcttatcgttaaactacctggtagcgacgagtttcagtcttacccaacgggcacagaatttaaagttgctgccaatcagaagttccagttgaaagttgagcaggcaactgcttacctatgcttctacggctaa

SEQ ID NO: 75244 - protein, 93 aa, Oceanospirillum sp. MED92
MLNVNEYFDGKVKSIGFENSEGNVTSGVMAPGEYEFGTSEDELMKVVSGELIVKLPGSDEFQSYPTGTEFKVAANQKFQLKVEQATAYLCFYG

SEQ ID NO: 75245 - DNA, 315 bp, marine gamma proteobacterium HTCC2207
  CDS (1)..(315): transl_table=11
atgtcagaatttgccaatgtaagcgtcaatctagaagccaatgtttatttcgacggtcaggtgaccagccgggccatagtgcttgccgacggtactcagaaaaccctcggagtgatgttacccggtgaatatgaatttggtaccgaggtccgcgagttgatggaaattacctcgggtcagttggatgttctgttgccgggcgcgacagaatggcaggcttatactggcggcagcgcatttgatgtccccgccgcagcgacgttttcggttcgagtgcagcagattactaactatgtctgttcatactttgcctag

SEQ ID NO: 75246 - protein, 104 aa, marine gamma proteobacterium HTCC2207
MSEFANVSVNLEANVYFDGQVTSRAIVLADGTQKTLGVMLPGEYEFGTEVRELMEITSGQLDVLLPGATEWQAYTGGSAFDVPAAATFSVRVQQITNYVCSYFA

SEQ ID NO: 75247 - DNA, 282 bp, Oceanobacter sp. RED65
  CDS (1)..(282): transl_table=11
atgcttgaagtaaatgaatactttgatggcaaagtaaaatcaattgctctacagacagaaaccttgcctgcaaccgtaggtgtaatgtctccgggtgaatacgaatttggtacaagccaaaaagaagtgatgacggtggtgagtggtgcgttgaccattcgcttccctggtacagaagagtggaaaaccttcaagcaaggggaacaatttgagctagatgccaatgtcaaatttggtgttaaagtagagatagaaaccgcgtatttctgtacctacgagtaa

SEQ ID NO: 75248 - protein, 93 aa, Oceanobacter sp. RED65
MLEVNEYFDGKVKSIALQTETLPATVGVMSPGEYEFGTSQKEVMTVVSGALTIRFPGTEEWKTFKQGEQFELDANVKFGVKVEIETAYFCTYE

SEQ ID NO: 75249 - DNA, 285 bp, Vibrio sp. Ex25
  CDS (1)..(285): transl_table=11
atgagtattaaggaaaacagctattttgcaggtagtgtaaaatcactaggctttaaccagaatgatcaggacgttagcgttggtgtaatgcttcctggtgaatacacgttcggcactcaagcgcctgagcgtatgacggttgtaaaaggtgcacttgtggtcaagcgtgtcggcgaaagtgattggacgacttaccaaagtggtgagttttttgaagtggaagggaactcttcatttgagcttcaagtgaaagacgcgactgcgtatttatgtgagtacttctaa

SEQ ID NO: 75250 - protein, 94 aa, Vibrio sp. Ex25
MSIKENSYFAGSVKSLGFNQNDQDVSVGVMLPGEYTFGTQAPERMTVVKGALVVKRVGESDWTTYQSGEFFEVEGNSSFELQVKDATAYLCEYF

SEQ ID NO: 75251 - DNA, 315 bp, Alteromonadales bacterium TW-7
  CDS (1)..(315): transl_table=11
atgtctcagtttgaaaatgtaagcgtagttaaaaaggccaacgtgtattttgacggtaaagtgtcaagccgtacggttgtatttagcgatggaactaccaaaacattaggctttatgcagccgggtgagtttgtattcgataccagtaaaaaagaactcatggagcttttaggcggccaatgggatattttattaccaggggcaagcgagtggaaaacatttaatgcgggcgagtcatttaatgtagacgctaacgtaagctttaaagtaaaagtaagtgattttgctgactactgttgctcgtacacagattaa

SEQ ID NO: 75252 - protein, 104 aa, Alteromonadales bacterium TW-7
MSQFENVSVVKKANVYFDGKVSSRTVVFSDGTTKTLGFMQPGEFVFDTSKKELMELLGGQWDILLPGASEWKTFNAGESFNVDANVSFKVKVSDFADYCCSYTD

SEQ ID NO: 75253 - DNA, 363 bp, marine gamma proteobacterium HTCC2143
  CDS (1)..(363): transl_table=11
atgcctggcaaaacagctttgccaggcattggtattttgcctataatccccgccctcttatccctgacaggcggttttaacatgttcaatactaatcaatatttcgatggcaaggttgcttccattgcctttcaaacagacacactgccagctactgtcggcgttatggccgtgggtgaatttgaatttggcaccagccagaaagaaacaatgacggtcgtcagtggtgcgttaacggtgaaattacctgctagtgatagctggaatacattttcggctggtgaacatttcattgttgccgccaacgaaaaatttcaagtaaaagtggcggtagaaactgcctatctttgcgtttacgaataa

SEQ ID NO: 75254 - protein, 120 aa, marine gamma proteobacterium HTCC2143
MPGKTALPGIGILPIIPALLSLTGGFNMFNTNQYFDGKVASIAFQTDTLPATVGVMAVGEFEFGTSQKETMTVVSGALTVKLPASDSWNTFSAGEHFIVAANEKFQVKVAVETAYLCVYE

SEQ ID NO: 75255 - DNA, 285 bp, Pseudomonas putida GB-1
  CDS (1)..(285): transl_table=11
atgttccaggtcaacgagtacttcaacggcaccgtcaagtcgatcgcattcgcgggcgaagaaggccccgccactgtcggcgtcatggccccgggcgaatacgagttcggcactgccaagcgcgagatcatgcacgtggtatcgggcgcgctgaccgtgaaactgccgggtagcgacaactgggaaaccttcaacgcgggcgacaagttcaatgttgccgccgacagcaagttccagctgaaggtgaaagtcgataccgcctacctgtgcgagtaccgcgactaa

SEQ ID NO: 75256 - protein, 94 aa, Pseudomonas putida GB-1
MFQVNEYFNGTVKSIAFAGEEGPATVGVMAPGEYEFGTAKREIMHVVSGALTVKLPGSDNWETFNAGDKFNVAADSKFQLKVKVDTAYLCEYRD

SEQ ID NO: 75257 - DNA, 315 bp, Geobacter sulfurreducens
  CDS (1)..(315): transl_table=11
atgtccgaattcaccaacgtaaccatcatccgcgaggccaacgtctacttcgacggcggcgtcgtgagccgcaccgtcgtgttccccgacggcacgaagaagaccctcggcatcatgcagccgggcgagtacaccttcaccaccggcgcgcccgagatcatggagatcctttccggcgagctggatctcaagctgccgggcagcgatgcgtggaaccgcgtcggcgggggtgagtccttcgatgtgccggccaattcatcctttaccatgaaggtgctgtcccttaccgattactgctgctcgttcctcggctag

SEQ ID NO: 75258 - protein, 104 aa, Geobacter sulfurreducens
MSEFTNVTIIREANVYFDGGVVSRTVVFPDGTKKTLGIMQPGEYTFTTGAPEIMEILSGELDLKLPGSDAWNRVGGGESFDVPANSSFTMKVLSLTDYCCSFLG

SEQ ID NO: 75259 - DNA, 312 bp, Nocardia farcinica
  CDS (1)..(312): transl_table=11
atgtcgaagttcgagaatgtcagcgtcgcgaagaaggccaacgtctacttcgacggcgcatgtgtcagccacagcatcgaattccccgacggcaccgccaagtcggtcggggtgatcctgcccgcgacgctgaccttcggcaccaccgcgcccgaggtcatggagctggtcgagggccactgccgcgtcaccctgcccggtgccgacgcgccggtcacgttccggggcggggagtccttcgaggtgcccgccgacagcgagttcaccatcgaggtgctcgagaccgtgcactacgtctgccactacggctga

SEQ ID NO: 75260 - protein, 103 aa, Nocardia farcinica
MSKFENVSVAKKANVYFDGACVSHSIEFPDGTAKSVGVILPATLTFGTTAPEVMELVEGHCRVTLPGADAPVTFRGGESFEVPADSEFTIEVLETVHYVCHYG

SEQ ID NO: 75261 - DNA, 282 bp, Pseudomonas aeruginosa
  CDS (1)..(282): transl_table=11
atgttcaaggtcaacgaatacttcgacggcaccgtcaaatccatcgccttcgacatgaccgccggcccggccaccatcggcgtgatggcggcaggcgaatacgagttcggcaccagccagctggagatcatgcatgtggtcgccggcgcgctgacggtcaagctgccgggcagcgacgagtggcaggaatacgccagcggcagccagttcaccgtcccggcgaacagcaagttccagctcaaggtcgcccaggacaccgcctacctctgcgaatatcgctga

SEQ ID NO: 75262 - protein, 93 aa, Pseudomonas aeruginosa
MFKVNEYFDGTVKSIAFDMTAGPATIGVMAAGEYEFGTSQLEIMHVVAGALTVKLPGSDEWQEYASGSQFTVPANSKFQLKVAQDTAYLCEYR

SEQ ID NO: 75263 - DNA, 288 bp, Yersinia pestis
  CDS (1)..(288): transl_table=11
atgctgaaatttaatgagtattttaccgggaaagtgaaatctattggttttgacagtgacagcattgggccagccagcgttggggtgatggaaaagggagagtacacctttagtacagctaaagcggaggaaatgacagtaatcaccggttctttgaaagtacttataccgggatcgcctgactggcaaacctttatgccgggtgaaaccttctatatcccaggggaaagtgaatttaacctacaagtggctgaagcatcttcatatttgtgcaaatatttgagctaa

SEQ ID NO: 75264 - protein, 95 aa, Yersinia pestis
MLKFNEYFTGKVKSIGFDSDSIGPASVGVMEKGEYTFSTAKAEEMTVITGSLKVLIPGSPDWQTFMPGETFYIPGESEFNLQVAEASSYLCKYLS

SEQ ID NO: 75265 - DNA, 282 bp, Photobacterium profundum
  CDS (1)..(282): transl_table=11
atgttgaatgttaatgaatattttgaaggccaagtgaaatcaatcggttttgaagctcaaggcgatcgaacgagtgttggtgttatggctgctggggaatatacgtttggtactgctgcacccgagcgaatgactgtggttaaaggctcgatggatgtgaagcgacctggccatgttgaatgggaaacatttaatgctggggatgattttgaagtacctggtgattcatcattcgaggtaaaaatcacctcatcgacggcatatctgtgtgactatctttaa

SEQ ID NO: 75266 - protein, 93 aa, Photobacterium profundum
MLNVNEYFEGQVKSIGFEAQGDRTSVGVMAAGEYTFGTAAPERMTVVKGSMDVKRPGHVEWETFNAGDDFEVPGDSSFEVKITSSTAYLCDYL

SEQ ID NO: 75267 - DNA, 288 bp, Vibrio cholerae
  CDS (1)..(288): transl_table=11
atgatcaaggaaaacgtgtattttgatggcaacgtaaagtcactaggcttcagccagcaagatggagagagtacggttggcgtgatggctcctggccaatacactttcggtactggcgcaccagagcgcatgacagtcgtcaaaggtgcgctgactattaagcgtgtcaccgatgctgactgggttacctttactgcaggtgaagcgtttgaagtggcgggtaattcctcttttgatctgcaagtggaagtcgcgaccgcttatctgtgtgaatttttgcctgcttag

SEQ ID NO: 75268 - protein, 95 aa, Vibrio cholerae
MIKENVYFDGNVKSLGFSQQDGESTVGVMAPGQYTFGTGAPERMTVVKGALTIKRVTDADWVTFTAGEAFEVAGNSSFDLQVEVATAYLCEFLPA

SEQ ID NO: 75269 - DNA, 282 bp, Vibrio vulnificus
  CDS (1)..(282): transl_table=11
atgattaaagaaaacagctattttgccggaaatgtaaagtctcttgggttcaatcagcaaggtgaagacagcagtgtgggtgtgatgctccctggtaactacacctttggtactgatgctccagagcgtatgacggtggtgaaaggggcgctcgtgattaaacgcgaaggcgatgaagagtggagcacgtatcaagcgggtgaagcgtttgaagtggctggaaaatcttcttttgatctgcaagttgaagtcgcgacagcttacctatgtgagtacttgtaa

SEQ ID NO: 75270 - protein, 93 aa, Vibrio vulnificus
MIKENSYFAGNVKSLGFNQQGEDSSVGVMLPGNYTFGTDAPERMTVVKGALVIKREGDEEWSTYQAGEAFEVAGKSSFDLQVEVATAYLCEYL

SEQ ID NO: 75271 - DNA, 285 bp, Vibrio parahaemolyticus
  CDS (1)..(285): transl_table=11
atgagtattaaggaaaatagttattttgcaggcggtgtgaagtcactaggttttaaccagcacggacaggatgttagtgtcggtgtgatgcttccgggcgagtacacatttggtacgcaggctcctgagcgcatgacagtcgttaaaggtgctctcgtggtgaaacgcgtaggtgaagccgattggacaacctacagcagcggtgagtcgtttgatgttgaaggtaactcatcatttgagctgcaagtgaaagacgcaacggcttacttgtgcgaatacctataa

SEQ ID NO: 75272 - protein, 94 aa, Vibrio parahaemolyticus
MSIKENSYFAGGVKSLGFNQHGQDVSVGVMLPGEYTFGTQAPERMTVVKGALVVKRVGEADWTTYSSGESFDVEGNSSFELQVKDATAYLCEYL

SEQ ID NO: 75273 - DNA, 285 bp, Pseudomonas putida
  CDS (1)..(285): transl_table=11
atgttccaggtcaacgagtacttcaacggcaccgtcaagtcgatcgcattctcgggcgaagaaggcccggccactgtcggcgtcatggctccgggcgaatacgaattcggcactgccaagcgcgagatcatgcatgtggtatcgggcgcgctgaccgtgaaactgccaggtagcgacaactgggaaaccttcaacgccggtgacaagttcaacgtgccggctgacagcaagttccagctgcaggtgaaggtggataccgcttacctgtgcgaataccgcgactaa

SEQ ID NO: 75274 - protein, 94 aa, Pseudomonas putida
MFQVNEYFNGTVKSIAFSGEEGPATVGVMAPGEYEFGTAKREIMHVVSGALTVKLPGSDNWETFNAGDKFNVPADSKFQLQVKVDTAYLCEYRD

SEQ ID NO: 75275 - DNA, 279 bp, Rhodopirellula baltica
  CDS (1)..(279): transl_table=11
atgcaagtcaacgaatacttcgacggcaacgtcacttccatcgccttcgaaaatggcgaaggccgtgcgacgtccggcgtgatgctggtgggcgactacgaatttggaaccagcgaaaaagagctgatgaaaatcgtctcgggcaaactggaagccaaacttcccggcgaacctgggtttcgagcttacccagccggatccgagttccgaatcgatgccaatcaaaagttccaggttcgagtgatcgagcccaccgcgtacctctgcttttacagctga

SEQ ID NO: 75276 - protein, 92 aa, Rhodopirellula baltica
MQVNEYFDGNVTSIAFENGEGRATSGVMLVGDYEFGTSEKELMKIVSGKLEAKLPGEPGFRAYPAGSEFRIDANQKFQVRVIEPTAYLCFYS

SEQ ID NO: 75277 - DNA, 285 bp, Salmonella paratyphi
  CDS (1)..(285): transl_table=11
atgctacaaagcaatgaatacttttccgggaaagtgaagtctattggatttaccagcagtagcaccggccgggccagcgttggtgtgatggcggaaggggagtatacatttggcaccgccgaacccgaagagatgacggttgtgagcggcgcgttgaaggtactgttgccgggaactgtcgaatggaaagtgtatacagccggtgaggtgtttaacgtgcctggccacagcgagtttcatctccaggttgctgagcccacctcgtatctgtgccgctatttgtaa

SEQ ID NO: 75278 - protein, 94 aa, Salmonella paratyphi
MLQSNEYFSGKVKSIGFTSSSTGRASVGVMAEGEYTFGTAEPEEMTVVSGALKVLLPGTVEWKVYTAGEVFNVPGHSEFHLQVAEPTSYLCRYL

SEQ ID NO: 75279 - DNA, 285 bp, Salmonella typhimurium
  CDS (1)..(285): transl_table=11
atgctacaaagcaatgaatacttttccgggaaagttaagtctattggatttaccagcagtagcaccggccgggccagcgttggtgtgatggcggaaggggagtatacatttggcaccgccgaacccgaagagatgacggttgtgagcggcgcgttgaaggtactgttgccgggaactgtcgaatggaaagtgtatacagccggtgaggtgtttaacgtgcctggccacagcgagtttcatctccaggttgctgagcccgcctcgtatctgtgccgctatttgtaa

SEQ ID NO: 75280 - protein, 94 aa, Salmonella typhimurium
MLQSNEYFSGKVKSIGFTSSSTGRASVGVMAEGEYTFGTAEPEEMTVVSGALKVLLPGTVEWKVYTAGEVFNVPGHSEFHLQVAEPASYLCRYL

SEQ ID NO: 75281 - DNA, 26 bp, Artificial sequence
  primer
atgcttcaaagtaatgagtacttttc

SEQ ID NO: 75282 - DNA, 24 bp, Artificial sequence
  primer
ttacagatagcggcacagataaga

SEQ ID NO: 75283 - protein, 88 aa, Artificial sequence
  consensus sequence
  Variant (2)..(2): Xaa in position 2 is any amino acid
  Variant (5)..(5): Xaa in position 5 is any amino acid
  Variant (7)..(9): Xaa in position 7 to 9 is any amino acid
  Variant (11)..(22): Xaa in position 11 to 22 is any amino acid
  Variant (23)..(23): Xaa in position 23 is any or no amino acid
  Variant (26)..(28): Xaa in position 26 to 28 is any amino acid
  Variant (30)..(32): Xaa in position 30 to 32 is any amino acid
  Variant (34)..(34): Xaa in position 34 is any amino acid
  Variant (36)..(38): Xaa in position 36 to 38 is any amino acid
  Variant (40)..(40): Xaa in position 40 is any amino acid
  Variant (42)..(45): Xaa in position 42 to 45 is any amino acid
  Variant (47)..(51): Xaa in position 47 to 51 is any amino acid
  Variant (53)..(57): Xaa in position 53 to 57 is any amino acid
  Variant (59)..(63): Xaa in position 59 to 63 is any amino acid
  Variant (65)..(66): Xaa in position 65 to 66 is any amino acid
  Variant (68)..(68): Xaa in position 68 is any amino acid
  Variant (70)..(74): Xaa in position 70 to 74 is any amino acid
  Variant (76)..(78): Xaa in position 76 to 78 is any amino acid
  Variant (80)..(84): Xaa in position 80 to 84 is any amino acid
  Variant (85)..(85): Xaa in position 85 is any or no amino acid
  Variant (87)..(87): Xaa in position 87 is any amino acid
NXYFXGXXXSXXXXXXXXXXXXXGVXXXGXXXFXTXXXEXMXXXXGXXXXXLXXXXXWXXXXXGXXFXVXXXXXFXXXVXXXXXXYXC

SEQ ID NO: 75284 - protein, 54 aa, Artificial sequence
  protein pattern
  Variant (3)..(3): Xaa in position 3 is Ile, Met or Val
  Variant (4)..(5): Xaa in position 4 to 5 is any amino acid
  Variant (6)..(6): Xaa in position 6 is Ala, Cys, Gly or Ser
  Variant (7)..(8): Xaa in position 7 to 8 is any amino acid
  Variant (9)..(9): Xaa in position 9 is Glu, Asn or Thr
  Variant (11)..(11): Xaa in position 11 is Gly, Asn or Ser
  Variant (13)..(15): Xaa in position 13 to 15 is any amino acid
  Variant (17)..(17): Xaa in position 17 is any amino acid
  Variant (19)..(22): Xaa in position 19 to 22 is any amino acid
  Variant (24)..(30): Xaa in position 24 to 30 is any amino acid
  Variant (31)..(31): Xaa in position 31 is Ala, Asp, Glu, Gly, Asn or Thr
  Variant (32)..(33): Xaa in position 32 to 33 is any amino acid
  Variant (34)..(34): Xaa in position 34 is Ala, Asp, Glu, Gly, Asn, Ser or Thr
  Variant (36)..(40): Xaa in position 36 to 40 is any amino acid
  Variant (41)..(41): Xaa in position 41 is Ala or Gly
  Variant (42)..(42): Xaa in position 42 is Ala, Asp, Glu, Asn, Gln or Ser
  Variant (43)..(43): Xaa in position 43 is any amino acid
  Variant (44)..(44): Xaa in position 44 is Phe or Tyr
  Variant (45)..(45): Xaa in position 45 is any amino acid
  Variant (46)..(46): Xaa in position 46 is Ile, Leu or Val
  Variant (47)..(47): Xaa in position 47 is any amino acid
  Variant (48)..(48): Xaa in position 48 is Ala or Gly
  Variant (49)..(51): Xaa in position 49 to 51 is any amino acid
  Variant (53)..(53): Xaa in position 53 is any amino acid
  Variant (54)..(54): Xaa in position 54 is Ile, Leu or Val
GVXXXXXXXFXTXXXEXMXXXXGXXXXXXXXXXXWXXXXXXXXXXXXXXXXFXX

SEQ ID NO: 75285 - protein, 18 aa, Artificial sequence
  protein pattern
  Variant (2)..(2): Xaa in position 2 is any amino acid
  Variant (5)..(5): Xaa in position 5 is Ala, Asp, Glu or Ser
  Variant (7)..(7): Xaa in position 7 is any amino acid
  Variant (8)..(8): Xaa in position 8 is any or no amino acid
  Variant (10)..(10): Xaa in position 10 is any or no amino acid
  Variant (12)..(12): Xaa in position 12 is any amino acid
  Variant (13)..(13): Xaa in position 13 is Ala, Gly, Ser or Thr
  Variant (14)..(14): Xaa in position 14 is Phe, Ile, Leu or Val
  Variant (15)..(17): Xaa in position 15 to 17 is any amino acid
  Variant (18)..(18): Xaa in position 18 is Ala, Asp, Glu, Gly, Asn, Ser or Thr
NXYFXGXXVXSXXXXXXX

SEQ ID NO: 75286 - DNA, 1053 bp, Escherichia coli
  CDS (1)..(1053): transl_table=11
atgaattatcagaacgacgatttacgcatcaaagaaatcaaagagttacttcctcctgtcgcattgctggaaaaattccccgctactgaaaatgccgcgaatacggttgcccatgcccgaaaagcgatccataagatcctgaaaggtaatgatgatcgcctgttggttgtgattggcccatgctcaattcatgatcctgtcgcggcaaaagagtatgccactcgcttgctggcgctgcgtgaagagctgaaagatgagctggaaatcgtaatgcgcgtctattttgaaaagccgcgtaccacggtgggctggaaagggctgattaacgatccgcatatggataatagcttccagatcaacgacggtctgcgtatagcccgtaaattgctgcttgatattaacgacagcggtctgccagcggcaggtgagtttctcgatatgatcaccccacaatatctcgctgacctgatgagctggggcgcaattggcgcacgtaccaccgaatcgcaggtgcaccgcgaactggcatcagggctttcttgtccggtcggcttcaaaaatggcaccgacggtacgattaaagtggctatcgatgccattaatgccgccggtgcgccgcactgcttcctgtccgtaacgaaatgggggcattcggcgattgtgaataccagcggtaacggcgattgccatatcattctgcgcggcggtaaagagcctaactacagcgcgaagcacgttgctgaagtgaaagaagggctgaacaaagcaggcctgccagcacaggtgatgatcgatttcagccatgctaactcgtccaaacaattcaaaaagcagatggatgtttgtgctgacgtttgccagcagattgccggtggcgaaaaggccattattggcgtgatggtggaaagccatctggtggaaggcaatcagagcctcgagagcggggagccgctggcctacggtaagagcatcaccgatgcctgcatcggctgggaagataccgatgctctgttacgtcaactggcgaatgcagtaaaagcgcgtcgcgggtaa

SEQ ID NO: 75287 - protein, 350 aa, Escherichia coli
MNYQNDDLRIKEIKELLPPVALLEKFPATENAANTVAHARKAIHKILKGNDDRLLVVIGPCSIHDPVAAKEYATRLLALREELKDELEIVMRVYFEKPRTTVGWKGLINDPHMDNSFQINDGLRIARKLLLDINDSGLPAAGEFLDMITPQYLADLMSWGAIGARTTESQVHRELASGLSCPVGFKNGTDGTIKVAIDAINAAGAPHCFLSVTKWGHSAIVNTSGNGDCHIILRGGKEPNYSAKHVAEVKEGLNKAGLPAQVMIDFSHANSSKQFKKQMDVCADVCQQIAGGEKAIIGVMVESHLVEGNQSLESGEPLAYGKSITDACIGWEDTDALLRQLANAVKARRG

SEQ ID NO: 75288 - DNA, 1083 bp, Methylophilus methylotrophus; AS-1
  CDS (1)..(1083)
atgactgcatacgaaaaattagccaccgatgatgtgcgcgtgcttgaaatcaagccgctggtaaagcccgcggagctattgtctcgcctgcaggaaagtacagtcagtacccaaaacatccttaaaacgcggtcagcgattcatcatattctccatcagggcgacgaccggttgctggtgattgttggcccttgttccatccatgacacggaagctggcatggagtacgcgcgacgcctgctcgatgtgcgtcagcgactgggtggcgaattgctcattgtcatgcgcgtctattttgagaaaccccgtaccacggtagggtggaaaggcctgatcaacgacccgcatctggatgggacttatgatatcaatcttggattggagaaggcccgccgtttcctgctggatgtgaatgaaattggcatgcctgcagccacagaattcctcgatgtggtctccccgcaatatactgctgacctggtcagctggggagctattggcgctcggacgacagagtctcagattcaccgcgaattggcctctggcctgtcttgtccggttggctttaaaaatgggaccgatggcggcgtcaaagttgccattgatgcgattaaggcagcagccagtccgcatcactttttgtccgtgaccaaagaaggcgaatccgctatttttgccaccaagggtaatgaagactgccatgtgattttacgtggcggtaaagcgccgaactttgatgcgcctagtgtggcagcagtatgcgaccaattggcagacgctggcctggcaccggtattgatggtggattgcagtcatggcaatagccagaagcaatataaaaaccaaatttcggtggtgaatgatgtggctagccaaatagcgggtggagatgctcgcataatcgggatcatgctagagtcgcatttgaacgaagggcgacaggatcattcgccaggctgcagccttaattatgggcaatccatcaccgatgcctgtttgggatgggaggactcagtggctgtgctggaaacgctggctgctgcagtcaaggcccgccgtgacaagcatgccgctgctgaataa

SEQ ID NO: 75289 - protein, 360 aa, Methylophilus methylotrophus; AS-1
MTAYEKLATDDVRVLEIKPLVKPAELLSRLQESTVSTQNILKTRSAIHHILHQGDDRLLVIVGPCSIHDTEAGMEYARRLLDVRQRLGGELLIVMRVYFEKPRTTVGWKGLINDPHLDGTYDINLGLEKARRFLLDVNEIGMPAATEFLDVVSPQYTADLVSWGAIGARTTESQIHRELASGLSCPVGFKNGTDGGVKVAIDAIKAAASPHHFLSVTKEGESAIFATKGNEDCHVILRGGKAPNFDAPSVAAVCDQLADAGLAPVLMVDCSHGNSQKQYKNQISVVNDVASQIAGGDARIIGIMLESHLNEGRQDHSPGCSLNYGQSITDACLGWEDSVAVLETLAAAVKARRDKHAAAE

SEQ ID NO: 75290 - DNA, 1071 bp, Bacillus licheniformis
  CDS (1)..(1071): transl_table=11
atgcaaaaagacgcgctgaataacgtacatattaccgacgaacaggttttaatgactccggaacaactgaaggccgcttttccattgagcctgcaacaagaagcccagattgctgactcgcgtaaaagcatttcagatattatcgccgggcgcgatcctcgtctgctggtagtatgtggtccttgttccattcatgatccggaaactgctctggaatatgctcgtcgatttaaagcccttgccgcagaggtcagcgatagcctctatctggtaatgcgcgtctattttgaaaaaccccgtaccactgtcggctggaaagggttaattaacgatccccatatggatggctcttttgatgtagaagccgggctgcagatcgcgcgtaaattgctgcttgagctggtgaatatgggactgccactggcgacggaagcgttagatccgaatagcccgcaatacctgggcgatctgtttagctggtcagcaattggtgctcgtacaacggaatcgcaaactcaccgtgaaatggcctccgggctttccatgccggttggttttaaaaacggcaccgacggcagtctggcaacagcaattaacgctatgcgcgccgccgcccagccgcaccgttttgttggcattaaccaggcagggcaggttgcgttgctacaaactcaggggaatccggacggccatgtgatcctgcgcggtggtaaagcgccgaactatagccctgcggatgttgcgcaatgtgaaaaagagatggaacacgcgggactgcgcccgtctctgatggtagattgcagccacggtaattccaataaagattatcgccgtcagcctgcggtggcagaatccgtggttgctcaaatcaaagatggcaatcgctcaattattggtctgatgatcgaaagtaatatccacgagggcaatcagtcttccgagcaaccgcgcagtgaaatgaaatacggtgtatccgtaaccgatgcctgcattagctgggaaatgaccgatgccttgctgcgtgaaattcatcaggatctgaacgggcagctgacggctcgcgtggcttaa

SEQ ID NO: 75291 - protein, 356 aa, Bacillus licheniformis
MQKDALNNVHITDEQVLMTPEQLKAAFPLSLQQEAQIADSRKSISDIIAGRDPRLLVVCGPCSIHDPETALEYARRFKALAAEVSDSLYLVMRVYFEKPRTTVGWKGLINDPHMDGSFDVEAGLQIARKLLLELVNMGLPLATEALDPNSPQYLGDLFSWSAIGARTTESQTHREMASGLSMPVGFKNGTDGSLATAINAMRAAAQPHRFVGINQAGQVALLQTQGNPDGHVILRGGKAPNYSPADVAQCEKEMEHAGLRPSLMVDCSHGNSNKDYRRQPAVAESVVAQIKDGNRSIIGLMIESNIHEGNQSSEQPRSEMKYGVSVTDACISWEMTDALLREIHQDLNGQLTARVA

SEQ ID NO: 75292 - DNA, 1092 bp, Mesorhizobium loti MAFF303099
  CDS (1)..(1092): transl_table=11
gtgttgaccaccacagacgacctccgggtcaaggaaatccgagaactgagcacgccggaccaggtgatgcgggaaatcccgcgcacgctgacggcgacgcgcaccgtgagcgcctcacgcaatgcgatccacgctattctgaacggcaccgacgaccggctgcttgtcgtcgtcggtccctgttcgatccacgatccggtcgcggccgttgactatgccagccgtctggcggcgctgcgcgagaccctgtccgaccggcttgagatcgtgatgcgggtgtatttcgagaagccgcgcaccacggtcggctggaagggcctgatcaacgatcccgaccttgacggcagcttcaacatcgacaaggggctcaggatggcacgcaacgtgctttccgccgtcaacaatctcggcctgccggcggccaccgaattcctcgacatgaccacgccgcaatacattgccgacctcgtcgcctggggtgccatcggcgcgcgcaccaccgaaagccaaatccaccgtgagctggcctcgggcctgtcctgcccggtcggtttcaagaacggcaccgacggcaatctcaggatcgccggcgaggcggtgaaatcggccgcccagccgcatcatttcatggcggtgaccaagggcggacgcagcggcatcgccaccaccaccggcaatgaggactgccatgtcatcctgcgcggcggcgttcagcccaactacgacgcggcgagcgtcgaggcggcctcggtcgaactcgcccgcatcggtgtcgcgccgcggctgatgatcgatgtcagccacgccaactccgccaagaagcctgagaaccagccgaaggtggcggccgatgtggccggccaggtggcggcgggcgacgagcgcatcatcggcctgatgatcgagagcaatctcgtcgccggccggcaggacgtggtgcccggcaagccgctcgtctatggccagagcatcaccgatggctgcatcgactgggcgaccaccgagaccgtgctgcatggccttgccggtgccgtcgagtggcgccggtcggcacgccgcgccatgctggaaagccggcagggtgctgcctga

SEQ ID NO: 75293 - protein, 363 aa, Mesorhizobium loti MAFF303099
MLTTTDDLRVKEIRELSTPDQVMREIPRTLTATRTVSASRNAIHAILNGTDDRLLVVVGPCSIHDPVAAVDYASRLAALRETLSDRLEIVMRVYFEKPRTTVGWKGLINDPDLDGSFNIDKGLRMARNVLSAVNNLGLPAATEFLDMTTPQYIADLVAWGAIGARTTESQIHRELASGLSCPVGFKNGTDGNLRIAGEAVKSAAQPHHFMAVTKGGRSGIATTTGNEDCHVILRGGVQPNYDAASVEAASVELARIGVAPRLMIDVSHANSAKKPENQPKVAADVAGQVAAGDERIIGLMIESNLVAGRQDVVPGKPLVYGQSITDGCIDWATTETVLHGLAGAVEWRRSARRAMLESRQGAA

SEQ ID NO: 75294 - DNA, 1074 bp, Vibrio cholerae O1 biovar eltor str. N16961
  CDS (1)..(1074): transl_table=11
atgaaaaaaagtgaattgagtgatgtgaatatcagtaatgaacagatattgatcaccccagatgccttaaaagccaagattccactcagtgacaaggcgcgtaagtttattcgtgagtcacgtcagacggtggcggacattatccacaaacgcgatcctcgcttgctgatcgtctgtggtccttgctcaattcatgatgtggatgcggcgaaagagtacgccaaaaaactcaaagcactctcggcgcagctgagcgaccagctctacatcgtaatgcgcgtgtactttgaaaaaccgcgtactacggtcggttggaaagggctgattaacgatccgcatcttgatggcagttttgatatcgaacacggtctgcatgttgggcgtcaactcttggtcgatttggccgaaatggaaattccactggcaaccgaagcgttggacccgattagcccgcaatacttggcggatacttttagttgggcggcgattggtgcgcgtaccacggaatcacaaactcaccgcgagatggcaagtggcctttccatgccaatcggctttaaaaatggcacggatggtaacttggcaacggcgattaatgccatgcaggccgcttcatccagtcaccgctttatgggaattaaccgcgaaggacaagtggcactgctcacgacacaaggcaacccgaatgggcatgtgattttacgtggtggcaaacagaccaactacgattcggtttctgtcgcggaatgtgaagaagagatgcaaaaagcgcgtttggaaccctctttgatggtggattgcagccatgcgaactcacgtaaagattaccgccgtcagccgttggtggcagaagatgtgattcatcaaatccgtgaaggcaatcgctcgatcattggcctgatgattgaaagccatctcaatgaaggaaatcagtcttcggatctgcctcgtgaaaagatgcaatacggagtctcgatcactgacggctgtataaattggtcaacgactgaggcattattacgtcgtgcgcatcaggaacttattccctttttgcacaatcgtttgcaaggataa

SEQ ID NO: 75295 - protein, 357 aa, Vibrio cholerae O1 biovar eltor str. N16961
MKKSELSDVNISNEQILITPDALKAKIPLSDKARKFIRESRQTVADIIHKRDPRLLIVCGPCSIHDVDAAKEYAKKLKALSAQLSDQLYIVMRVYFEKPRTTVGWKGLINDPHLDGSFDIEHGLHVGRQLLVDLAEMEIPLATEALDPISPQYLADTFSWAAIGARTTESQTHREMASGLSMPIGFKNGTDGNLATAINAMQAASSSHRFMGINREGQVALLTTQGNPNGHVILRGGKQTNYDSVSVAECEEEMQKARLEPSLMVDCSHANSRKDYRRQPLVAEDVIHQIREGNRSIIGLMIESHLNEGNQSSDLPREKMQYGVSITDGCINWSTTEALLRRAHQELIPFLHNRLQG

SEQ ID NO: 75296 - DNA, 1086 bp, Pasteurella multocida subsp. multocida str. Pm70
  CDS (1)..(1086): transl_table=11
atgacagaatataaaaatgaaatttatatcgaaaatgatgacaccagaattgataaaattgagcaagttttaccgcctgtggcgttattagaaaaatttcctgccagtgatgtggcagtagaaaccgtcagacaaacacgaaaaaaagcacataatattattcatcgaaaagatgaccgtttattagttgtcatgggaccttgttccattcatgatcctgtttctgcgctggagtatgcgaaacggattaaaatgatgcgcgaaaaataccaagatagcttggagattattatgcgtgtctattttgaaaaaccgcgaaccacggtagggtggaaaggcttgattaatgatcctcacctaaatggtacctttgagctgaatgaagggttgcgtcttgcgcgtaaattattatcggacgttaatgatttaggggtaccggctgcgggtgaatttttggacatgattacaccacaatatctggctgatttcatgagttggggtgcgattggtgccagaaccacagaatcacaggtgcaccgtgaacttgcctctggtctatcttgtgcagttggctttaaaaatggcacgaatggtggggtcagaatcgcgttagatgcgattggggcagcagaagcaccacattattttctttctgtcacgaaatttggtcattctgcgattgtatctacaaaagggaatgaagactgccacattattttacgaggcggtgataaaggtcctaattatgatgcagagcatattgctatggtttgtgcagagatcgaaaaaacagggcgtattccacatgtgatggtcgatttcagccatgctaacagttgtaaacaatttaaaaaacaattagaggtttgtgacagtgtttgccagcaaatcgctatgggttctactcaaatctttggtgtgatggtagaaagccatcttgttgaagggcgacaagatttagtagatggaaaagcggtcacttatgggcagagtatcacggacgcctgtattgggtgggaagatagcgagaaagttttggaatcgctttcaaaagctgtcatccaacgccgaaatttgcagcaataa

SEQ ID NO: 75297 - protein, 361 aa, Pasteurella multocida subsp. multocida str. Pm70
MTEYKNEIYIENDDTRIDKIEQVLPPVALLEKFPASDVAVETVRQTRKKAHNIIHRKDDRLLVVMGPCSIHDPVSALEYAKRIKMMREKYQDSLEIIMRVYFEKPRTTVGWKGLINDPHLNGTFELNEGLRLARKLLSDVNDLGVPAAGEFLDMITPQYLADFMSWGAIGARTTESQVHRELASGLSCAVGFKNGTNGGVRIALDAIGAAEAPHYFLSVTKFGHSAIVSTKGNEDCHIILRGGDKGPNYDAEHIAMVCAEIEKTGRIPHVMVDFSHANSCKQFKKQLEVCDSVCQQIAMGSTQIFGVMVESHLVEGRQDLVDGKAVTYGQSITDACIGWEDSEKVLESLSKAVIQRRNLQQ

SEQ ID NO: 75298 - DNA, 1053 bp, Pasteurella multocida subsp. multocida str. Pm70
  CDS (1)..(1053): transl_table=11
gtgaataaagataacatacataatgtcaatattgttggtgaaaaggtactgattaccccaaaagaattgaaggaaaaactccctctatcccttcctcttcgtagccaaatagcgcaatcacgccgtgatattgcgaatatcatccataaaaaagatcagcgtttattggttgtgattggaccatgttctattcatgatccgatcgcggctttagaatacgcttcacgtttaaaacacttagcagaagaattacaagatcaattgtatattgtgatgcgagtgtattttgaaaaaccaagaacaactgttggctggaaaggattgattaatgatccgaaattggatggttcatttgatgtggaacatggcttacatattgcacgagcattactgctagagctggctgaaatgggactccctttggcaaccgaagcacttgatcccattatgccgcaatatattgctgatctatttagttggtctgcgattggtgcgagaacgacagaatcacaaacgcacagagaaatgtcatcaggtttatccatggcagtgggatttaaaaatggtacggatggcagtttagccaccgcaattaatgcaatgaaagcagcgtcagttggacacagttttattgggattaatcaacaaggtcaagtcaatctattacatacagcgggcaaccctaatgggcatgtgattttgcgtggcggaaaatcaccaaattatgaagctgaacatatcgcactttgtgaacaagaattgcaaaaagcaggtttgacgcaagcaattatgatcgattgtagccatggtaactcgaataaagattaccgtttgcagccgaaagtggcaaaaaatgccgtacagcaaattgtgaagggaaatcgctctattatcgggttgatgttagaaagtcatttatacgcaggtaatcaaagtgctgatcagccattgagtgaaatgcaatatggggtttcgattacggatgcctgtattgattggcagacgacagaacaattattacgtgaaatgacgagcgcattgcgccaaaaataa

SEQ ID NO: 75299 - protein, 350 aa, Pasteurella multocida subsp. multocida str. Pm70
MNKDNIHNVNIVGEKVLITPKELKEKLPLSLPLRSQIAQSRRDIANIIHKKDQRLLVVIGPCSIHDPIAALEYASRLKHLAEELQDQLYIVMRVYFEKPRTTVGWKGLINDPKLDGSFDVEHGLHIARALLLELAEMGLPLATEALDPIMPQYIADLFSWSAIGARTTESQTHREMSSGLSMAVGFKNGTDGSLATAINAMKAASVGHSFIGINQQGQVNLLHTAGNPNGHVILRGGKSPNYEAEHIALCEQELQKAGLTQAIMIDCSHGNSNKDYRLQPKVAKNAVQQIVKGNRSIIGLMLESHLYAGNQSADQPLSEMQYGVSITDACIDWQTTEQLLREMTSALRQK

SEQ ID NO: 75300 - DNA, 1077 bp, Pseudomonas aeruginosa PAO1
  CDS (1)..(1077): transl_table=11
atggctgatttacagatcgacgaccttaacgttgcctccaacgagaccctgatcacgccggagcagctcaagcgtgaaattcccctgaccgacaaggccctgcagaccgtggcccagggtcgccaggtggtgcgcgacatcctggatggcaaggaccaccgtctgttcgtggtgatcggcccctgctccatccacgacatcaaggccgcccacgaatacgccgaccgcctcaaggcgctcgcggccgaagtggcggatacgctgttcctggtgatgcgcgtgtacttcgagaagccgcgtaccacggtgggctggaaaggcctgatcaacgatccgtacctggacgactcgttcaagatccaggatggcctgcacatcggccgccaactgctccgcgaccttgccgagaaaggcttgcccaccgccaccgaagcgctcgacccgatttccccgcagtacctgcaggacctgatcagttggtcggcgatcggcgcccgtaccaccgaatcgcagactcaccgcgagatggcctccggcctgtcttccgcggtcggcttcaagaacggcaccgatggcagcctgaccgtggcgatcaatgccctgcagtcggtctccagcccgcatcgcttcctcggcatcaaccagcagggcggcgtgtccatcgtgaccaccaagggcaaccgctacggtcacgtggtgttgcgcggcggcaacggcaagccgaactacgattcggtcagcgtcgcgctctgcgagcaggacctgaacaaggcgaaaatcccgctgaacatcatggtcgactgcagccacgccaactccaacaaggacccggccctgcaaccgctggtgatggacaacgtcagcaaccagatcgtcgaaggcaacaactcgatcgtcggcctgatggtggaaagccacctgggctggggcagccagccgattccgaaggatctcgaccaacttcagtacggcgtctccatcaccgacgcctgcatcgactgggcgaccaccgagaagagcatccgcagcatgcacgccaagctcaaggacgtgctgccgaaacgccagcgcggctga

SEQ ID NO: 75301 - protein, 358 aa, Pseudomonas aeruginosa PAO1
MADLQIDDLNVASNETLITPEQLKREIPLTDKALQTVAQGRQVVRDILDGKDHRLFVVIGPCSIHDIKAAHEYADRLKALAAEVADTLFLVMRVYFEKPRTTVGWKGLINDPYLDDSFKIQDGLHIGRQLLRDLAEKGLPTATEALDPISPQYLQDLISWSAIGARTTESQTHREMASGLSSAVGFKNGTDGSLTVAINALQSVSSPHRFLGINQQGGVSIVTTKGNRYGHVVLRGGNGKPNYDSVSVALCEQDLNKAKIPLNIMVDCSHANSNKDPALQPLVMDNVSNQIVEGNNSIVGLMVESHLGWGSQPIPKDLDQLQYGVSITDACIDWATTEKSIRSMHAKLKDVLPKRQRG

SEQ ID NO: 75302 - DNA, 1095 bp, Pseudomonas aeruginosa PAO1
  CDS (1)..(1095): transl_table=11
atgaactcatccgtatccgcactgaccaccctttcgccgaacgtccaggccgtcgccctgcccagcgccaccgcccgtaccgccctggaacgcctgcccagcccgctcgaactcaaggcccgccagccgttgccgctggagctggccagccaggtcgccgccagccgcgacgccatccgcgccatcctcgacggcgacgacccgcgcctgctggtggtagtcggtccctgttcgatccacgatccccgctccgccctcgaatacgccgaacgcctcgccgcgctgagcgacgaactcgacggccagttgctcctggtgatgcgcgcctacgtggaaaagccacgcaccacggtgggctggaagggcctcgcctacgatccgcacctggatggcagcgacgacatggccgccggcctggcgctgtcccggcaactgatgctggacatgctgcgcctcggcctgccgctggccaccgaactcctgcaaccgctggccgccggctacttcgacgacctgctgagctgggcggcgatcggcgcgcgcaccagcgaatcgcagatccaccgcgagctggtcagcggcctcggcctgccggtgggcttcaagaacggcaccgacggcggcgtcggcatcgcctgcgacgcgatccgttcggcggcccacggccaccgccatttcggcctcgacccgcacggtcacccggcgctgatcgagacccgcggcaatccggacacccatgtggtgctgcgcggcggccgccacggttcgaactacggccccgagcaggtgcaggccgtgcgccaggccctggaaagccagggcatcgccacgcggatgatggtcgattgcagtcacgccaacagcggcaagaacccgctgaaccagcccggcgtcctcgccagcgtgctggaccagcgcctggccggtgccagcgacctggtcggggtaatgctggaaagccacctgttcgacggttgccaggcgctcggcggcgaactgcgctacggcgtctcgatcaccgacggctgcctcggctgggaaggcaccgagcggattctccgcgacgccgcccggcggctcgccgagcggcgctga

SEQ ID NO: 75303 - protein, 364 aa, Pseudomonas aeruginosa PAO1
MNSSVSALTTLSPNVQAVALPSATARTALERLPSPLELKARQPLPLELASQVAASRDAIRAILDGDDPRLLVVVGPCSIHDPRSALEYAERLAALSDELDGQLLLVMRAYVEKPRTTVGWKGLAYDPHLDGSDDMAAGLALSRQLMLDMLRLGLPLATELLQPLAAGYFDDLLSWAAIGARTSESQIHRELVSGLGLPVGFKNGTDGGVGIACDAIRSAAHGHRHFGLDPHGHPALIETRGNPDTHVVLRGGRHGSNYGPEQVQAVRQALESQGIATRMMVDCSHANSGKNPLNQPGVLASVLDQRLAGASDLVGVMLESHLFDGCQALGGELRYGVSITDGCLGWEGTERILRDAARRLAERR

SEQ ID NO: 75304 - DNA, 1038 bp, Lactococcus lactis subsp. lactis Il1403
  CDS (1)..(1038): transl_table=11
atgagttttaaagaaataagtcctaagataaatattgatgcaattaagatgttgggacatctcaacagtgagcaacaagaaaaaaaattgcaacgagataaagaacttgaagcaattataaaaggtgaagatgaccgtttactcttgattattgggccatgttcgtcagacaatgaagaagcagttttagaatatgctcgccgtttagctaaacttcaagaagcagttaaagataaaatttttatggtcatgcgtgtctatactgcaaaacctcgtacaaatggcgatggctataaaggattgattcacgaaccagatgctgatggtcataccgatttaatcaatggaatcaaaatggttcgtgacttacattacaaggtcatcactgaaactggtttaacaactgctgatgaaatgctttacccagaaaatcttccaatggtagatgatttggtcagctaccatgcgattggtgcacgttctgttgaaaatcaacaacaccgttttgttgcttctgggattgatgtgccaactggtttgaaaaatccaacatcaggaaatttgaaagtgatgtttaatggaatttacgcggctcaacaatcacaagatttcctctttggtcgtgcagaagttcaaacatcaggaaatcctttagcacatgcgattttgcgtggtggacaagatgaaaatggaaaataccatccaaactactacactgataacttgcttgatacaattgaaatttatgaaaaaatgggcttgaaaaatccttttattgtcattgatacaaaccatgataactctggtaagaaatttatggaacaaatccgtattgttcgtcaaaccttagttaatcgtgactgggatgataaaattcgccaaaatgttcgtggcttcatgattgaatcttacctagaagatggtcgccaagataaaccagaagtatttggtaaatcaattactgacccatgtttaggttgggataaaacagaagcacttgttcaagaaatttacgaagctgaaaacaaaaataactaa

SEQ ID NO: 75305 - protein, 345 aa, Lactococcus lactis subsp. lactis Il1403
MSFKEISPKINIDAIKMLGHLNSEQQEKKLQRDKELEAIIKGEDDRLLLIIGPCSSDNEEAVLEYARRLAKLQEAVKDKIFMVMRVYTAKPRTNGDGYKGLIHEPDADGHTDLINGIKMVRDLHYKVITETGLTTADEMLYPENLPMVDDLVSYHAIGARSVENQQHRFVASGIDVPTGLKNPTSGNLKVMFNGIYAAQQSQDFLFGRAEVQTSGNPLAHAILRGGQDENGKYHPNYYTDNLLDTIEIYEKMGLKNPFIVIDTNHDNSGKKFMEQIRIVRQTLVNRDWDDKIRQNVRGFMIESYLEDGRQDKPEVFGKSITDPCLGWDKTEALVQEIYEAENKNN

SEQ ID NO: 75306 - DNA, 1023 bp, Lactococcus lactis subsp. lactis Il1403
  CDS (1)..(1023): transl_table=11
atgacttttaaagaactcagtaacaaaattaacattaaagatgtaagagagctaaatcatttaaatgatgagcaacaagaaaagaaagaaaaacgtgataaggaacttgaagcgataattaagggtgaagacgatagaatcctcttagtcattggcccctgctcatcggataatgaagctgcagttctagaatatgctcacagattgttaaaacttcaaaaagaagtagaagataaaatttttattgtgatgcgtgtttatactgcaaaaccgcggacaaacggagatggctataaaggcctcattcacgaacctgatgcagatggacatacagaccttatcaatgggataaaaatggttcgtgaccttcactataaagtaattactgaaactggtctgactacagcagatgagatgctatacccagaaaatctaccattagttgatgacttagtaagttactatgcagttggcgctcgctcagttgaaaatcaacaacatcgctttgttgcctcaggaatagatgccccaacaggaatgaaaaacccgacatcagggaatttaaaagttatgtttaatggaatgtatgcagcccaacaatctcaagattttctatttgggaatgctgaagtagaaacatcaggaaatccattagctcatgccatccttcgtggtggacaagatgaaaatggtaaaaaccatccaaattactatacagataatcttcttgaaagtatcgaaatatacgaaaaaatgggtttacaaaatccatttattgttattgatactaatcatgataactctgggaagaagtatatggaacaaataagaattgttcgtcaaacattagtcaatcgtaattgggatgaacaaattcataaatatgtcagaggatttatgattgaatcatatcttgaagacggtcgtcaagacaaaccagaagtatttggaaaatcaatcactgacccatgtttgggttgggataaaacagaagaacttattaatgaaatttataattcgtga

SEQ ID NO: 75307 - protein, 340 aa, Lactococcus lactis subsp. lactis Il1403
MTFKELSNKINIKDVRELNHLNDEQQEKKEKRDKELEAIIKGEDDRILLVIGPCSSDNEAAVLEYAHRLLKLQKEVEDKIFIVMRVYTAKPRTNGDGYKGLIHEPDADGHTDLINGIKMVRDLHYKVITETGLTTADEMLYPENLPLVDDLVSYYAVGARSVENQQHRFVASGIDAPTGMKNPTSGNLKVMFNGMYAAQQSQDFLFGNAEVETSGNPLAHAILRGGQDENGKNHPNYYTDNLLESIEIYEKMGLQNPFIVIDTNHDNSGKKYMEQIRIVRQTLVNRNWDEQIHKYVRGFMIESYLEDGRQDKPEVFGKSITDPCLGWDKTEELINEIYNS

SEQ ID NO: 75308 - DNA, 1056 bp, Neisseria meningitidis MC58
  CDS (1)..(1056): transl_table=11
atgacacaccattaccccacagacgatattaagattaaagaagttaaagagttgttgccgccgatagcccatctttacgagctgccgatttccaaagaggcttcgggcttggttcaccgcacccgtcaggaaatttccgatttggttcacggcagggacaagcggctgttggttattatcgggccgtgttcgattcacgatccgaaagcggcgttggaatatgcggagcgtttgttgaaactccgcaagcagtatgaaaacgagcttttgattgtgatgcgcgtttatttcgagaagccgaggacgacggtgggttggaaaggtttgattaacgacccgcatttggacggtacgtttgacatcaatttcggtttgcgtcaggcgcgcagcctgttgttgtcgctgaacaatatgggtatgcctgcctctaccgagtttttggatatgattacgccgcaatattatgcggacttgatttcttggggggcaatcggtgcgcggacgaccgaaagccaagttcaccgcgaattggcaagcgggctgtcctgccccgtcggctttaaaaacggtacggacggcaatttgaagattgccatcgacgcaatcggtgcggcgagccattcgcatcatttcctgtctgtaaccaaggccgggcattccgccattgtccataccggcggcaatcccgactgtcatgtcattttgcgcggcggcaaagagccgaattatgatgcggaacacgtcagcgaggcggcggaacaactgcgtgcggcaggggtaaccgacaagctgatgatagattgcagccacgccaacagccgcaaggattacactcggcagatggaagtggcacaagacattgccgcccaattggaacaggacggcggcaatatcatgggcgtgatggtggaaagccatttggtcgaaggcagacaggacaagccggaagtgtacggcaagagcattaccgatgcgtgtatcggttggggcgcgactgaagaactgttggcattgttggcaggtgcaaacaaaaaacgtatggcgcgcgccagttga

SEQ ID NO: 75309 - protein, 351 aa, Neisseria meningitidis MC58
MTHHYPTDDIKIKEVKELLPPIAHLYELPISKEASGLVHRTRQEISDLVHGRDKRLLVIIGPCSIHDPKAALEYAERLLKLRKQYENELLIVMRVYFEKPRTTVGWKGLINDPHLDGTFDINFGLRQARSLLLSLNNMGMPASTEFLDMITPQYYADLISWGAIGARTTESQVHRELASGLSCPVGFKNGTDGNLKIAIDAIGAASHSHHFLSVTKAGHSAIVHTGGNPDCHVILRGGKEPNYDAEHVSEAAEQLRAAGVTDKLMIDCSHANSRKDYTRQMEVAQDIAAQLEQDGGNIMGVMVESHLVEGRQDKPEVYGKSITDACIGWGATEELLALLAGANKKRMARAS

SEQ ID NO: 75310 - DNA, 1056 bp, Neisseria meningitidis Z2491
  CDS (1)..(1056): transl_table=11
atgacacaccattaccccacagacgatattaagattaaagaagttaaagagttgttgccgccgattgcccatctttacgagctgccgatttccaaagaggcttcgggcttggttcaccgcacccgtcaggaaatttccgatttggttcacggcagggacaagcggctgttggttattatcgggccgtgttcgattcacgatccgaaagcggcgttggaatatgcggagcgtttgttgaaactccgcaagcagtatgaaaacgagcttttgattgtgatgcgcgtttatttcgagaagccgaggacgacggtgggttggaaaggtttgattaacgacccgcatttggacggtacgtttgacatcaatttcggtttgcgtcaggcacgcagcctgttgttgtcgctgaacaatatgggtatgcctgcctctaccgagtttttggatatgattacgccgcaatattatgcggacttgatttcttggggggcaatcggcgcgcggacgaccgaaagccaagttcaccgcgaattggcaagcgggctgtcctgccccgtcggctttaaaaacggtacggatggcaatttgaagattgccatcgacgcaatcggtgcggcgagccattcgcatcatttcctgtctgtaaccaaggccgggcattccgccattgtccataccggcggcaatcctgactgtcatgtcattttgcgcggcggaaaagagccgaattatgatgcgggacacgtcagcgaggcggcggaacaactgcgtgcggcaggcgtaaccgacaagctgatgattgattgcagccacgccaacagccgcaaggattacacccgacagatggaagtggcgcaagacattgccgcccaattggaacaggacggcggcaatattatgggcgtgatggtggaaagccatttggtcgaaggcaggcaggacaagccggaagtgtacggcaaaagcattaccgatgcgtgtattggttgggacgcgactgaagaactgttggcattgttggcaggtgcaaacaaaaaacgtatggcgcgcgccggttga

SEQ ID NO: 75311 - protein, 351 aa, Neisseria meningitidis Z2491
MTHHYPTDDIKIKEVKELLPPIAHLYELPISKEASGLVHRTRQEISDLVHGRDKRLLVIIGPCSIHDPKAALEYAERLLKLRKQYENELLIVMRVYFEKPRTTVGWKGLINDPHLDGTFDINFGLRQARSLLLSLNNMGMPASTEFLDMITPQYYADLISWGAIGARTTESQVHRELASGLSCPVGFKNGTDGNLKIAIDAIGAASHSHHFLSVTKAGHSAIVHTGGNPDCHVILRGGKEPNYDAGHVSEAAEQLRAAGVTDKLMIDCSHANSRKDYTRQMEVAQDIAAQLEQDGGNIMGVMVESHLVEGRQDKPEVYGKSITDACIGWDATEELLALLAGANKKRMARAG

SEQ ID NO: 75312 - DNA, 1086 bp, Deinococcus radiodurans R1
  CDS (1)..(1086): transl_table=11
atgacccagccccccgccccctctaccaccgaaaacctcaacgtgaccggcttcacgccgctgatgaccccgcgtgaactcaaggccgaggtgccgctgaccgacgctgccgagcgcaccgtgctcgccggacgccgggcggcgcaggccatcctgagcggcgaggacgaccgcctactggtggttgtcgggccgtgcagcattcacgaccaggcgcaagcgctggagtacgccgggcggctcgcggcgctgcgtgagcgggtgaaagaccggctggaagtgcagatgcgcgtctacgtggacaaaccgcgcacgacggtgggctggcgcggctacctgctcgaccccgacatggacggcagcaacgacatgggcaagggcgtgcgccgcacccgcgagctgatggtggcggtgagcgaactcgggctgccggtggcgaccgaactgcttgaccccttcgcgccgcagtacctcttcgacgccgtagcctgggcctgcctgggcgcgcgcaccgccgagtcgcagacccaccgggtaatggcgagcgccgtcagtgccccgatgggcttcaagaacggcaccggcggcggtatcaagctcgcggtggacgcggtggtggccgccagtcacccgcacgcttttttcaccattgacgaagatgggcgcgccgcgattgtccacaccaagggcaacgcgcacgggcacgtcattttgcgcggcgggcgtgccggccccaactacgccccgcagttcgtgcaggaagcagcagacctgctgcgcgcggcgggccgcgaagaagccgtcatggtggactgctcgcacgccaactcggggtcggactggacccggcagcgcttggtgtggcgcgacgtgctgggccagcgcctcgccggacagcgcgccatccggggcgccatgctggagagcaacctgcaagccggcaaacagagcctgcctgccgacctcacgcagctcaagcccggcgtgagcgtcaccgacgcctgcgtgggctgggacgaaaccgaggccctgctgctggaggcccacgaacagctcagtggccgcgcggcactggcgacctgctga

SEQ ID NO: 75313 - protein, 361 aa, Deinococcus radiodurans R1
MTQPPAPSTTENLNVTGFTPLMTPRELKAEVPLTDAAERTVLAGRRAAQAILSGEDDRLLVVVGPCSIHDQAQALEYAGRLAALRERVKDRLEVQMRVYVDKPRTTVGWRGYLLDPDMDGSNDMGKGVRRTRELMVAVSELGLPVATELLDPFAPQYLFDAVAWACLGARTAESQTHRVMASAVSAPMGFKNGTGGGIKLAVDAVVAASHPHAFFTIDEDGRAAIVHTKGNAHGHVILRGGRAGPNYAPQFVQEAADLLRAAGREEAVMVDCSHANSGSDWTRQRLVWRDVLGQRLAGQRAIRGAMLESNLQAGKQSLPADLTQLKPGVSVTDACVGWDETEALLLEAHEQLSGRAALATC

SEQ ID NO: 75314 - DNA, 1095 bp, Xylella fastidiosa 9a5c
  CDS (1)..(1095): transl_table=11
atgccaccatttaccgacgacctccgtatccgcaaaattgaaccactgacacctcctaaccagctcctattgcaactaccatgcgatgagcaggcatcgctgactgttgcgacctcacgcaacgcactgcacgatatcctgcacggccacaacgaccgtttagccgtcgtgataggcccatgctcaatccatgatccaattgcagccattgattacgcgcaacgtctacacccattgcgtgagatgtacaaggatgcactagagatcgtgatgcgggtttactttcagaaaccgcgcaccaccattggttggaaaggattggtcaacgatccggatcttgatggcagcttccaaatcaataagggcctgcatatcgcgcgcaacctgctacgcgatatcaatcatctcggcttacccgctggtgtggaatttctagacacgatttcgccgcaatatctggctgacttagtcgcctggggtgccattggtgcacgcaccactgagagccaaatacaccgtgaaatggcttcaggtttatcgtgcccgattggctttaaaaacagtaccagtggtgatgtgaaaattgctgctgacgcgattaaagcagcttcgcatccgcaccatttcctttcagtgacaaagacaggtgttgccgcagtcgtcgccacccagggtaaccccgattgtcacgtgattctacgtggaggcagggtcccgaattacgacgcaatcaatgtcgaagctgccagccaaacattgcttaaatccaagctaccggtgcgactgatgattgatgcgagccatgccaatagcggcaaaaacccaaacaatcaacccaaggtgatcgagaacatcgtagaacagcttgaagccggtgaacgccgcatcgtcggtgtcatgattgaaagccacattgttggtggtcggcaagaattagtccttggaaacacacttacctatggacagagcattaccgatgcttgcatcgactgggatacctcggtcgcaatgttagagcagctcgctcaggccgtacgcgtcagacagactctaccaacgaccgctacaactaacaaaacatcaaaaacccaataa

SEQ ID NO: 75315 - protein, 364 aa, Xylella fastidiosa 9a5c
MPPFTDDLRIRKIEPLTPPNQLLLQLPCDEQASLTVATSRNALHDILHGHNDRLAVVIGPCSIHDPIAAIDYAQRLHPLREMYKDALEIVMRVYFQKPRTTIGWKGLVNDPDLDGSFQINKGLHIARNLLRDINHLGLPAGVEFLDTISPQYLADLVAWGAIGARTTESQIHREMASGLSCPIGFKNSTSGDVKIAADAIKAASHPHHFLSVTKTGVAAVVATQGNPDCHVILRGGRVPNYDAINVEAASQTLLKSKLPVRLMIDASHANSGKNPNNQPKVIENIVEQLEAGERRIVGVMIESHIVGGRQELVLGNTLTYGQSITDACIDWDTSVAMLEQLAQAVRVRQTLPTTATTNKTSKTQ

SEQ ID NO: 75316 - DNA, 1032 bp, Streptococcus pneumoniae TIGR4
  CDS (1)..(1032): transl_table=11
atggcatttattgaaaaaggtcaagaaatcgatatggaagtcatcaaggctgaaacccaattgtctgcggaagccttgagactcaaggaaagccgtgacagggaattggcagatattatttcaggggaagatgaccgtattctcttggtgattggtccttgctcttctgataatgaagaggcggtcttggaatatgctcgccgtttatctgccttgcaaaagaaggtagcggataagattttcatggtcatgcgcgtgtatactgctaagcctcgtaccaatggagacggctataaaggattagttcaccagccagatacttctaaggctccaagcctgattaatggcttgcaggctgtgcgccagttgcactaccgcgtgattacagagactggtttgacaacggcagatgagatgctttatccgtcaaatctgatcttggtggatgacttggtcagctaccatgccgttggagctcgttctgtggaagaccaagagcaccgctttgtggcttctgggattgatgcaccagtagggatgaaaaatccaacctcaggaaatttgggtgttatgtttaacgccatctatgctgctcaaaacaagcaaaccttcctttatcatgggcaggaagttgagacatcaggtaatcctttggcccatgttatcctccgtggagcagtcaacgagtatggcaattatatgccgaattactactatgaaaatctactccaagccattgaacgctatgaaaccatgggacttgaaaatccttttatcctcattgacaccaaccatgataactcaggcaagcaatatatggagcagattcgaattgttcgccagaccttgcagaatcgtgattggaatgagaaaattaaaaagacggttcgaggatttatgattgaatcttacctagcagatggtcgtcaaaaccaaccagagatctttggttgctctattactgacccttgcctaggttgggaaaatacagaggccttggtagaagagatttatgttaccttgacaaaataa

SEQ ID NO: 75317 - protein, 343 aa, Streptococcus pneumoniae TIGR4
MAFIEKGQEIDMEVIKAETQLSAEALRLKESRDRELADIISGEDDRILLVIGPCSSDNEEAVLEYARRLSALQKKVADKIFMVMRVYTAKPRTNGDGYKGLVHQPDTSKAPSLINGLQAVRQLHYRVITETGLTTADEMLYPSNLILVDDLVSYHAVGARSVEDQEHRFVASGIDAPVGMKNPTSGNLGVMFNAIYAAQNKQTFLYHGQEVETSGNPLAHVILRGAVNEYGNYMPNYYYENLLQAIERYETMGLENPFILIDTNHDNSGKQYMEQIRIVRQTLQNRDWNEKIKKTVRGFMIESYLADGRQNQPEIFGCSITDPCLGWENTEALVEEIYVTLTK

SEQ ID NO: 75318 - DNA, 1032 bp, Streptococcus pneumoniae TIGR4
  CDS (1)..(1032): transl_table=11
atggtatttacagcaaaaagctctaaaataaatatagaagaagttcgtgccttgtcaaaattagaaggtcaggctttggagaggaaatcacagcgagatcaagagctagaagccattatacgtggagaagaccagcgaattctcttggtaatcgggccatgctcatctgacaacgaagaagctgtccttgaatacgctaagcgtttggcagtcctacaagaagaagtggcagatcgtatctttatggttatgcgtgtttatactgccaaaccccgtaccaacggagatggctataagggcttgattcaccagcctaacgcgacagaagcgcctagtcttatcaatggaatcaaagccgttcgccatcttcactatcgtgtcatcacagaaacagggatgacaactgctgatgaaatgctttatcctgaaaaccttccgcttgtagatgatttgatttcttacatggcagttggtgcccgttcagttgaagaccagcaacaccgctttgtggcaagtggggcaggattttctactggttttaaaaatccaacctctggaaatctcaatgtcatgtttaatgggatttatgctgctcaaaacaaacaaagtttccttttcttaggaaaagaagtagaaacaactgggaacccgctttcacacgctattcttcgtggtgctcttaatgagtatggaaaaaatattcccaactactattatgacaatttaattgataccattgcccagtatgagaaaatgggcttggaaaatccttttatcatcattgataccaatcatgacaattctggtaagcagtatattgaacagatccgaattgtccgccagaccttgattaaccgtgcttggaatgaaaaaattaagcagttcgttcgtggttttatgattgagtcttatctggaagatggtcgacaaaatgagccagaagtatttggtaagtctatcacagacccttgcctgggttgggataacacagaagctcttgtcagagaaatttacaaaacgttaggagaataa

SEQ ID NO: 75319 - protein, 343 aa, Streptococcus pneumoniae TIGR4
MVFTAKSSKINIEEVRALSKLEGQALERKSQRDQELEAIIRGEDQRILLVIGPCSSDNEEAVLEYAKRLAVLQEEVADRIFMVMRVYTAKPRTNGDGYKGLIHQPNATEAPSLINGIKAVRHLHYRVITETGMTTADEMLYPENLPLVDDLISYMAVGARSVEDQQHRFVASGAGFSTGFKNPTSGNLNVMFNGIYAAQNKQSFLFLGKEVETTGNPLSHAILRGALNEYGKNIPNYYYDNLIDTIAQYEKMGLENPFIIIDTNHDNSGKQYIEQIRIVRQTLINRAWNEKIKQFVRGFMIESYLEDGRQNEPEVFGKSITDPCLGWDNTEALVREIYKTLGE

SEQ ID NO: 75320 - DNA, 1032 bp, Streptococcus pneumoniae R6
  CDS (1)..(1032): transl_table=11
atggtatttacagcaaaaagctctaaaataaatatagaagaagttcgtgccttgtcaaaattagaaggtcaggctttggagaggaaatcacagcgagatcaagagctagaagccattatacgtggagaagaccagcgaattctcttggtaatcgggccatgctcatctgacaacgaagaagctgtccttgaatacgctaatcgtttggcagtcctacaagaagaagtggcagatcgtatctttatggttatgcgtgtttatactgccaaaccccgtaccaacggagatggctataagggtttgattcaccagcctaacgcgacagaagcgcctagtcttatcaatggaatcaaagccgttcgccatcttcactatcgtgtcatcacagaaacagggatgacaactgctgatgaaatgctttatcctgaaaaccttccgcttgtagatgatttgatttcttacatggcagttggtgcccgttcagttgaagaccagcaacaccgctttgtggcaagtggggcaggattttctactggttttaaaaatccaacctctggaaatctcaatgtcatgtttaatgggatttatgctgctcaaaacaaacaaagtttccttttcttaggaaaagaagtagaaacaactgggaacccgctttcacacgctattcttcgtggtgctcttaatgagtatggaaaaaatattcccaactactattatgacaatttaattgataccattgcccagtatgagaaaatgggcttggaaaatccttttatcatcattgataccaatcatgacaattctggtaagcagtatattgaacagatccgaattgtccgccagaccttgattaaccgtgcttggaatgaaaaaattaagcagttcgttcgtggttttatgattgagtcttatctggaagatggtcgacaaaatgagccagaagtatttggtaagtctatcacagacccttgcctgggttgggataacacagaagctcttgtcagagaaatttacaaaacgttaggagaataa

SEQ ID NO: 75321 - protein, 343 aa, Streptococcus pneumoniae R6
MVFTAKSSKINIEEVRALSKLEGQALERKSQRDQELEAIIRGEDQRILLVIGPCSSDNEEAVLEYANRLAVLQEEVADRIFMVMRVYTAKPRTNGDGYKGLIHQPNATEAPSLINGIKAVRHLHYRVITETGMTTADEMLYPENLPLVDDLISYMAVGARSVEDQQHRFVASGAGFSTGFKNPTSGNLNVMFNGIYAAQNKQSFLFLGKEVETTGNPLSHAILRGALNEYGKNIPNYYYDNLIDTIAQYEKMGLENPFIIIDTNHDNSGKQYIEQIRIVRQTLINRAWNEKIKQFVRGFMIESYLEDGRQNEPEVFGKSITDPCLGWDNTEALVREIYKTLGE

SEQ ID NO: 75322 - DNA, 1071 bp, Yersinia pestis CO92
  CDS (1)..(1071): transl_table=11
atgcaaaaagactcgctcaataacgtccatatcagtgccgaacaaatcctgataaccccggaagaactgaaaaatcagtttccactgagcgaaaatgatcagtattcgatagagcgcgcacgtaaaaccattgctgacattattcaggggcgagatccgcgtctgttggtcgtttgtgggccctgttcaattcatgatgtggatgcggcactggattacgcgcgtcgtttgaaaaaactctctgtggaattggatgacagcttatatatcgttatgcgtgtctattttgagaagccaagaactaccgtgggttggaaaggcctgatcaatgaccctgcaatggatggttcatttgatgtagaggcaggtttacacattgcccgtcgtttattgctggatttagtgggcatggggttgccgttagcgactgaagctctggatcctaatagcccacaatatttaggtgacctgttcagttggtcggccattggtgcccgtacaacggagtcacagacccaccgtgaaatggcatcaggcttgtctatgccggttggatttaaaaatggcactgacggtagcctaggcacggcaatcaatgcaatgcgcgccgctgccatgccacatcgctttatggggatcaatcagtcgggccaggtctgcctgttacaaactcagggtaacccacacggccatgtcattctacggggaggtaaaacaccaaactacagtgcacaagatgtcgctcagtgtgaaaaacagatgcaggatgcgggactcatcccatccttaatgatagattgcagtcacggtaattcaaataaagactaccgccgtcaggttgcggtggctgaatctgtggttgaacagatcaaggcgggcaatcgttcaattacaggtgtgatgctggaaagccacatccacgaaggaaatcagtcatctgaacagccacgtgctgatatgcgctacggtgtttctgtgactgacgcctgtattaactgggaaagcactgaaaccctgttacgtggtatgcgccaagaattgcttgcagcactgacggcacggactgcatga

SEQ ID NO: 75323 - protein, 356 aa, Yersinia pestis CO92
MQKDSLNNVHISAEQILITPEELKNQFPLSENDQYSIERARKTIADIIQGRDPRLLVVCGPCSIHDVDAALDYARRLKKLSVELDDSLYIVMRVYFEKPRTTVGWKGLINDPAMDGSFDVEAGLHIARRLLLDLVGMGLPLATEALDPNSPQYLGDLFSWSAIGARTTESQTHREMASGLSMPVGFKNGTDGSLGTAINAMRAAAMPHRFMGINQSGQVCLLQTQGNPHGHVILRGGKTPNYSAQDVAQCEKQMQDAGLIPSLMIDCSHGNSNKDYRRQVAVAESVVEQIKAGNRSITGVMLESHIHEGNQSSEQPRADMRYGVSVTDACINWESTETLLRGMRQELLAALTARTA

SEQ ID NO: 75324 - DNA, 1110 bp, Caulobacter crescentus CB15
  CDS (1)..(1110): transl_table=11
atgccgtccacgtccaccgctcacctcgtcaccctgcccgttccgaccgatgatctgcggatcgagaaactccagaccctgagcccgccggctcaggtcatcggagaagctcccgccacctcgtcagtggccgagatcgtcggcggggcgcgtcaggcggttcatcagatcctgcacggccaggacgaccgcctcgtcgtggtcatcggcccctgctccattcacgaccccaaggcggcgatcgactacgcccggcgcctcgccgccgagcgcgagcgccacgcgggcgaactggaagtgatcatgcgggtctatttcgagaagccgcgcacgaccgtgggctggaagggcctgatcaacgatccgggcctcgacggcggcttccggatcaatgacggcctgcgtctggcgcgacgggttctgctggacgtcagcgcgcagggcctgccggccgcctgcgagttcctggacgtgaccaccccgcagtacatcgctgacctggtatcctggggcgcgatcggcgcccgcaccaccgagagccagattcaccgcgaactggcctcgggcctttcctgccccgtcggtttcaagaacggcaccaatggcgatgtgaagatcgccgtcgacgccgtaatggccgcgtcccagccgcaccacttcctggccgtcaccaaagagggccgcgcggcgatcgccaccacgacgggcaatggtgactgtcacctcgtgctgcgcggcggcaagaccccgaactacgacgccgccagcgtcgccgccgccgcagaggttctgagcaaggccggactgccgcagcgcctgatggtcgatgtcagccacgccaacagcggcaagaaccatgagaaccaacccgccgtgatcgccgacgtctgcgcccaggtcgcgaccggcgcctcgccggtcatgggcgtgatgatcgagagcaatctcgtggccggccgccaggatatcgtccaaggccagggcctgacctatggtcagtcggtcaccgacgcctgcgtcgactgggaaacctcggtgcggctgctggacgacctggcgggcgcagttcgcgcgggtcgcctggcgcggggctctaaatcaagcacttag

SEQ ID NO: 75325 - protein, 369 aa, Caulobacter crescentus CB15
MPSTSTAHLVTLPVPTDDLRIEKLQTLSPPAQVIGEAPATSSVAEIVGGARQAVHQILHGQDDRLVVVIGPCSIHDPKAAIDYARRLAAERERHAGELEVIMRVYFEKPRTTVGWKGLINDPGLDGGFRINDGLRLARRVLLDVSAQGLPAACEFLDVTTPQYIADLVSWGAIGARTTESQIHRELASGLSCPVGFKNGTNGDVKIAVDAVMAASQPHHFLAVTKEGRAAIATTTGNGDCHLVLRGGKTPNYDAASVAAAAEVLSKAGLPQRLMVDVSHANSGKNHENQPAVIADVCAQVATGASPVMGVMIESNLVAGRQDIVQGQGLTYGQSVTDACVDWETSVRLLDDLAGAVRAGRLARGSKSST

SEQ ID NO: 75326 - DNA, 1053 bp, Salmonella typhimurium LT2
  CDS (1)..(1053): transl_table=11
atgaattatcagaacgacgatttacgcattaaagaaatcaacgagttattacctccggtcgcgctgctggaaaagtttcccgccacggaaaatgcagcaaataccgttgctcacgcgcgcaaagccatccataaaattctcaaaggcaatgacgatcgtctgctggtggtgatcggtccttgttcaattcatgatccggcagcggcgaaagagtatgccgcccgtttgctggcgctacgcgatgagcttcaaggcgagcttgaaattgtcatgcgcgtctattttgagaaaccgcgtaccaccgtcggctggaaagggctgattaacgatccgcacatggataacagcttccagattaacgacggtctgcgtattgcgcgcaaactgctgctggatattaacgacagcggcctgcctgccgccggcgaattcctcgatatgatcacgccgcaatatctggccgatctgatgagctggggcgccattggcgcgcggactactgaatcccaggttcatcgcgaattggcgtctggcctctcttgtccggtcggttttaaaaatggtactgatggcacgattaaagtcgccattgacgccatcaacgccgccggcgcgccgcattgcttcctctccgtcactaaatggggtcattcggcgattgtgaataccagcggcaacggcgactgccatatcattctgcgcggcggtaaagcgccaaactatagcgcgcagcatgttgctgaggtgaaagaaggcctcaccaaagcgggactgacgccgcaggtcatgatcgatttcagccatgccaactcctgtaagcaatttcaaaagcagatggaggtttgcgccgatgtctgccagcagatagcgggcggtgaaaaagcgattattggcgtgatggtagagagtcatctggtagaaggaaaccagagtctggaaagcggtcagccgctgacctacggtaaaagcattactgacgcctgtattggctgggaagataccgatgcgctgcttcgtcagttgtcggcagcggtaaaagcccgtcgcggctaa

SEQ ID NO: 75327 - protein, 350 aa, Salmonella typhimurium LT2
MNYQNDDLRIKEINELLPPVALLEKFPATENAANTVAHARKAIHKILKGNDDRLLVVIGPCSIHDPAAAKEYAARLLALRDELQGELEIVMRVYFEKPRTTVGWKGLINDPHMDNSFQINDGLRIARKLLLDINDSGLPAAGEFLDMITPQYLADLMSWGAIGARTTESQVHRELASGLSCPVGFKNGTDGTIKVAIDAINAAGAPHCFLSVTKWGHSAIVNTSGNGDCHIILRGGKAPNYSAQHVAEVKEGLTKAGLTPQVMIDFSHANSCKQFQKQMEVCADVCQQIAGGEKAIIGVMVESHLVEGNQSLESGQPLTYGKSITDACIGWEDTDALLRQLSAAVKARRG

SEQ ID NO: 75328 - DNA, 1131 bp, Nostoc sp. PCC 7120
  CDS (1)..(1131): transl_table=11
atgatgaatttgtgttgtacatttcatctacaatatgtatacccaatctgcctaaaatcctacccagacaattcagagcaatcctccatgcacaataaattaactaacgcaaatattgaaaattatcacgttctcttaactccaaacgcagtaaaagaaaaattaccgttaacagaaactgcggcagaaatagttttacagtttagatgtgaaatagagaaaatcttagattttcaagatagacgcaaatttatagtagttgggccttgttccattcatgaccctaatgcagcattggaatacgcccataagttaaaaaaattagctgaacgtgtccaggataaactactgttgattatgcgggtgtattttgaaaagccccgcacaactgtaggctggaaaggattaattaatgatccagaaatggatgattcttttcatgtggaaaatggtttattgctagccagagatttactgatcaagctaacagagttagggctacccaccgctacagaagctctagaccctatcgtaccccaatatattggtgaattgatcacatgggcggcgatcggcgcacgcacaacagaatcccagactcacagggaaatggctagtggtctgtctatgcccgtgggctttaaaaatggcactgatggtaatattcaagtagctttaaatgctttacattctgccagaatgactcataattttttgggcattaatcctgagggacaggtcagtgtatttgaaacgaaaggtaatgcttacggtcatgtgattttgcgtgggggaaatcaacctaattttgatgttgcaagtgttaaacaagtagaagaaaaattaaaacaggctcagttacctccgagaattgtcattgattgtagtcatggtaatactaataagaattacaggttgcaatctgatgttttagaaaacgttgtacaacaaatagttgatggtaatacatcgattgtggggatgatgctggaatcaaatttatatgaaggtaatcaacccattaactgcaaacgggaagaattgaaatatggggtttctgtaactgacccctgtatcggttgggagcaaacggaaaaaattatcttggctgcttacgaaaaacttaattga

SEQ ID NO: 75329 - protein, 376 aa, Nostoc sp. PCC 7120
MMNLCCTFHLQYVYPICLKSYPDNSEQSSMHNKLTNANIENYHVLLTPNAVKEKLPLTETAAEIVLQFRCEIEKILDFQDRRKFIVVGPCSIHDPNAALEYAHKLKKLAERVQDKLLLIMRVYFEKPRTTVGWKGLINDPEMDDSFHVENGLLLARDLLIKLTELGLPTATEALDPIVPQYIGELITWAAIGARTTESQTHREMASGLSMPVGFKNGTDGNIQVALNALHSARMTHNFLGINPEGQVSVFETKGNAYGHVILRGGNQPNFDVASVKQVEEKLKQAQLPPRIVIDCSHGNTNKNYRLQSDVLENVVQQIVDGNTSIVGMMLESNLYEGNQPINCKREELKYGVSVTDPCIGWEQTEKIILAAYEKLN

SEQ ID NO: 75330 - DNA, 1179 bp, Ralstonia solanacearum GMI1000
  CDS (1)..(1179): transl_table=11
atgggcaatcggcggactgccccggtttcggcgcaccgctcgtgtttccaggagttttccgtgattcgcatcgacaatccccaaagcgaccaagaagtcggcgtggccgacgctacccaggacaccacccgcatcgatgacgtgcgcatcggtgcggtccgtccgctcatttccccggcactcctgctcgacgagttgcccgtgtcgcccgccgtgcaggcgcacgtcgaagcgagccgggccgcggtcacggacatcctgcacggacgggacgatcgcctgcttgccgtggtgggcccgtgctcgatccacgatcacgaccaggcgctcgactacgcccatcggctcgggacggccgcgaatcgcctgcgcgacgatctgctgatcgtcatgcgcgtgtatttcgaaaagccgcgcacgaccgtcggctggaagggctacatcaacgatccgcggctcgacggcagcttccgcatcaacgaagggctgcgccgtgcgcgccagttgctcctggaagtcaacgcgatgggattgccggcggccaccgagtttctcgatctgctgagtccgcagtacatcgcggacctgattgcctggggcgcgatcggcgccaggacgacggaaagccagagccatcggcagctcgcctcgggactgagctgtcccatcggcttcaagaacggcacggatggcggtgtccagatcgcggcggacgcgattctggcggcgcggtcgagccactcgttcatgggcatgacgaagatggggatggccgcgattttcgagacgcgcggcaacggtgatgcgcacgtcattcttcgcggcggcaagaagggaccgaactatgacgcggcggccatcgaagacagctgcgcgattctccgggcggccgggctgcgcgagcaggtgatggtcgactgttcgcacgcgaactcgggcaagtcccatgcccgtcaagccgacgttgcgcgggatctggcgcagcagctgtcgtccggcgagcggcgcatcagcggcgtgatgatcgagagccatctggaagaggggcgccaggatctgaaacccggcgtgccgttgcagcgcggcgtgtccattaccgatgcctgccttgggtggtcccagacggaaccgttgctggaaaccctcgcaacggctgtgcgtgcgcggcggcgcggctag

SEQ ID NO: 75331 - protein, 392 aa, Ralstonia solanacearum GMI1000
MGNRRTAPVSAHRSCFQEFSVIRIDNPQSDQEVGVADATQDTTRIDDVRIGAVRPLISPALLLDELPVSPAVQAHVEASRAAVTDILHGRDDRLLAVVGPCSIHDHDQALDYAHRLGTAANRLRDDLLIVMRVYFEKPRTTVGWKGYINDPRLDGSFRINEGLRRARQLLLEVNAMGLPAATEFLDLLSPQYIADLIAWGAIGARTTESQSHRQLASGLSCPIGFKNGTDGGVQIAADAILAARSSHSFMGMTKMGMAAIFETRGNGDAHVILRGGKKGPNYDAAAIEDSCAILRAAGLREQVMVDCSHANSGKSHARQADVARDLAQQLSSGERRISGVMIESHLEEGRQDLKPGVPLQRGVSITDACLGWSQTEPLLETLATAVRARRRG

SEQ ID NO: 75332 - DNA, 1080 bp, Ralstonia solanacearum GMI1000
  CDS (1)..(1080): transl_table=11
atgccgaagaacaccgacgacctgcgcattcgcgaactgaaagagctgaccccgccggcgcacctgatccgcgaattcccgtgcaacgacgccgtttccgagctgatctaccagagccgcacggcgatgcaccgcatcctgcacggcatggacgaccgcctgatcgtcatcatcgggccgtgctcgatccacgacaccaaggccgccctcgactacgcgcgccgcctggtcgaacagcgcgagcgcttcaaggccgacctggaaatcgtcatgcgcgtgtacttcgagaagccgcgcaccacggtcggctggaagggcctgatcaacgacccgtacatggacggcagcttcaagatcaacgacggcctgcgcaccgcgcgcgagctgctggtgaacatcaacgagctgggcgtgccggcgggcaccgaatacctcgacatgatcagcccgcagtacatcgccgacctggtgagctggggcgcgatcggggcgcgcacgaccgaatcgcaggtgcaccgcgaactcgcctccggactgtcgtgcccggtcggcttcaagaacggcaccgatggcaacgtgaagatcgccgtggacgcgatcaaggcggcgtcgcagccgcaccacttcctgtcggtcaccaagggcggccactcggccatcgtgtcgacggcgggcaacgaggattgccacatcatcctgcgcggcggcaaggcgcccaactacgatgccgccagcgtgcaggcggcctgcgaagacatcgccaagtccggcctggccgcgcgcctgatgatcgatgcctcgcacgccaacagcagcaagaagcacgagaaccagatcccggtctgcgaagacatcggccgccagatcgccggcggcgacgaccgcatcgtcggcgtgatggtggaatcgcacatcaatgccggccgccaggaccacgtgcagggcaccccggtcgaggacctgaactacggccagagcgtgaccgacgcctgcatcggctgggacgattcgctcaaggtactggaaacgctggccgacgccgtgcgcaagcgccggctggtgccccgcaacggcaactga

SEQ ID NO: 75333 - protein, 359 aa, Ralstonia solanacearum GMI1000
MPKNTDDLRIRELKELTPPAHLIREFPCNDAVSELIYQSRTAMHRILHGMDDRLIVIIGPCSIHDTKAALDYARRLVEQRERFKADLEIVMRVYFEKPRTTVGWKGLINDPYMDGSFKINDGLRTARELLVNINELGVPAGTEYLDMISPQYIADLVSWGAIGARTTESQVHRELASGLSCPVGFKNGTDGNVKIAVDAIKAASQPHHFLSVTKGGHSAIVSTAGNEDCHIILRGGKAPNYDAASVQAACEDIAKSGLAARLMIDASHANSSKKHENQIPVCEDIGRQIAGGDDRIVGVMVESHINAGRQDHVQGTPVEDLNYGQSVTDACIGWDDSLKVLETLADAVRKRRLVPRNGN

SEQ ID NO: 75334 - DNA, 1119 bp, Schizosaccharomyces pombe 972h-
  CDS (1)..(1119)
atgtctccggtttttttacccagcggtgaaacttacgatcaagagcatcttgatgacaaccgtgtcttaggttacaaccctttggttcctgccgctttggttcaacaagagattcctgtttctgaaacttctcgcaaagtcatcactgactccagaaaggagattcaagctattctcaacaaacaagatgacagaattatcgttgttgtcggtccttgctccattcatgaccctaaattggccatggactatgctaagttgctgaagcccaaagctgacgagcttcaggatgctttgtgcgttgtcatgcgttgttatttggagaagccccgtactactatcggatggaagggtttggtcaacgaccctaacttggatggttcttttgctatcaacaagggtattaggatggctcgtcaaatgtattgcgacgttaccaattttggcattcctttggccagtgagatgttggacaacatttctccccaattcttcgccgacttactcagttttggtgctatcggtgctcgtactaccgagtctcaattacatcgtgaattggcttctgccctttccttccctgttggtttcaagaatggtactgatggtactgttggtgtggcgattgatgccattggtgctaccgcccatcctcacacaatgctaggagttactaaacaaggtctcgccgctattaccatgaccaggggcaacaaggataccttcatcattttgcgtggtggtaagaagggtcctaactatgatgctgagcacgttgccgccgttcgcaaagatcttgagaaggccaaccttcctcctcgtatcatgatcgattgctctcatggcaactcaagcaagaatcatttgaaccaaccaaaggtctccaagagcatcgccgaacaaatcagaaatggcgactcttccattgttggtgttatgattgaatctcatatcaatgaaggtcgtcaagatgctccaatccgtcctggcgttaaggatactctcaagtacggtgtcagtatcactgatgcttgtgttagctgggaacaaactgctccaatgctagacgatcttgctgaagctgtccgtgctcgccgtcaaaaccaaaaaagtaattaa

SEQ ID NO: 75335 - protein, 372 aa, Schizosaccharomyces pombe 972h-
MSPVFLPSGETYDQEHLDDNRVLGYNPLVPAALVQQEIPVSETSRKVITDSRKEIQAILNKQDDRIIVVVGPCSIHDPKLAMDYAKLLKPKADELQDALCVVMRCYLEKPRTTIGWKGLVNDPNLDGSFAINKGIRMARQMYCDVTNFGIPLASEMLDNISPQFFADLLSFGAIGARTTESQLHRELASALSFPVGFKNGTDGTVGVAIDAIGATAHPHTMLGVTKQGLAAITMTRGNKDTFIILRGGKKGPNYDAEHVAAVRKDLEKANLPPRIMIDCSHGNSSKNHLNQPKVSKSIAEQIRNGDSSIVGVMIESHINEGRQDAPIRPGVKDTLKYGVSITDACVSWEQTAPMLDDLAEAVRARRQNQKSN

SEQ ID NO: 75336 - DNA, 1074 bp, Xanthomonas campestris pv. campestris str. ATCC 33913
  CDS (1)..(1074): transl_table=11
atgccgccgctgaccgatgacctgcgtatccgcaagatcgaaccgttgaccccgccctcgcagctgctgtcgctgctgccctgcgatgagcgcgcttccgaaaccgtcaccaacgcacgtgccgccctgcacgagattctgcacgggcgcgatgaccgcctggcggtggtgatcggcccctgttcgatccacgaccctgtggctgccatggagtacgcgcagcgtctgcgccccttgcgtgagcagtttggcgacgcgctggaaatcgtgatgcgcgtgtacttcgaaaagccgcgcaccaccattggctggaagggcctgatcaacgacccggacctggatggcagtttccagatcaacaagggcctgcgcgtggcgcgtggcttgctgcgcgatatcaacaacctcggcctgccggccggcgtggaatttctcgacatcatctcgccgcagtacatcgctgacttggtggcctggggcgcgatcggtgcgcggaccaccgaaagccaggtgcatcgcgaaatggcctccggcctgtcgtgcccagtggggttcaagaacggcaccggtggcgacgtcaagattgccgtggacgcggtgggtgcggcctcgcatccgcatcatttcctggcggtgaccaaggatggccacacggcggtggcggccaccgcgggcaacccggattgtcatgtgattttgcgtggcggcaagcagcctaacttcgacgcggccaatgtggaagcatccagccaggtgctcaacaaggccggcttgccggcgcggctgatgatcgacgccagccacgccaacagcggcaagaacccggacaaccagcccaaggtcatcgacgacatcgccacgcagctggagggcggcgagacgcgcatcgttggcgtgatggtggaaagccacctggtcggcggccggcaggaactggtgccgggcggcacgctgacctacggccaaagcatcaccgacggctgcctggattgggacgcctcgctgcaggtgctggagcgcttggcgattgcggtgcgtgcacgtcgtgcgcggcgggttgccgaggctgcgtga

SEQ ID NO: 75337 - protein, 357 aa, Xanthomonas campestris pv. campestris str. ATCC 33913
MPPLTDDLRIRKIEPLTPPSQLLSLLPCDERASETVTNARAALHEILHGRDDRLAVVIGPCSIHDPVAAMEYAQRLRPLREQFGDALEIVMRVYFEKPRTTIGWKGLINDPDLDGSFQINKGLRVARGLLRDINNLGLPAGVEFLDIISPQYIADLVAWGAIGARTTESQVHREMASGLSCPVGFKNGTGGDVKIAVDAVGAASHPHHFLAVTKDGHTAVAATAGNPDCHVILRGGKQPNFDAANVEASSQVLNKAGLPARLMIDASHANSGKNPDNQPKVIDDIATQLEGGETRIVGVMVESHLVGGRQELVPGGTLTYGQSITDGCLDWDASLQVLERLAIAVRARRARRVAEAA

SEQ ID NO: 75338 - DNA, 1074 bp, Xanthomonas axonopodis pv. citri str. 306
  CDS (1)..(1074): transl_table=11
atgccgcccgtcaccgatgacctgcgtatccgcaagatcgaagccctcgcaccgcccgcgcagctgctgtcgctgctgccctgcgatgagcgcgcctccgaaaccgtgaccaacgcgcgcgccgcgctgcacgacatcctgcatgggcgcgacgaccgcctggccgtggtgatcgggccatgctcgatccacgacccggtcgcggcgatggagtacgcgcaacgcttgcgcccgttgcgcgatcagttcggcgacgcgctggagatcgtgatgcgggtgtacttcgaaaagccgcgcaccaccatcggctggaagggcttgatcaacgatccggacctggacggcagcttccagatcaacaagggcctgcgcgtggcgcgtggcctgctgcgcgatatcaacaatctcggcctgccggccggcgtggaatttctcgacatcatttcgccgcaatacatcgccgacctggtggcctggggcgcgatcggcgcacgcaccaccgagagccaggtgcatcgcgaaatggcgtccgggctgtcatgcccggtgggcttcaagaacggcaccggtggcgacgtcaagattgcggtggacgcggtgggcgcggcctcgcatccgcatcatttcctggccgtgaccaaggacggacataccgccgtggcagcgacggcgggcaatccggattgccatgtgatcctgcgcggcggcaaacagcccaacttcgatgcggccaatgtggaagcggccagccaggtgctcaatgcatccggcctgcccgcgcgcctgatgatcgatgccagccacgccaacagcagcaagaatcccgagaaccagcccaaggtcgtcgaggacatcgccaaccagctggaaggcggcgaaacacgcatcgtcggcgtgatggtggaaagtcacctggtcggtggacgccaggacctcttgccggggtgcgagctgacctacggccagagcattaccgacggctgcatcggctgggacagttcggtgcaggtgctggaacgcctggcgaccgcagtgcgcgcacggcgcatgcgccggattgccgaggctgcatga

SEQ ID NO: 75339 - protein, 357 aa, Xanthomonas axonopodis pv. citri str. 306
MPPVTDDLRIRKIEALAPPAQLLSLLPCDERASETVTNARAALHDILHGRDDRLAVVIGPCSIHDPVAAMEYAQRLRPLRDQFGDALEIVMRVYFEKPRTTIGWKGLINDPDLDGSFQINKGLRVARGLLRDINNLGLPAGVEFLDIISPQYIADLVAWGAIGARTTESQVHREMASGLSCPVGFKNGTGGDVKIAVDAVGAASHPHHFLAVTKDGHTAVAATAGNPDCHVILRGGKQPNFDAANVEAASQVLNASGLPARLMIDASHANSSKNPENQPKVVEDIANQLEGGETRIVGVMVESHLVGGRQDLLPGCELTYGQSITDGCIGWDSSVQVLERLATAVRARRMRRIAEAA

SEQ ID NO: 75340 - DNA, 1062 bp, Chlorobium tepidum TLS
  CDS (1)..(1062): transl_table=11
atgcaacaactacaggatttacgagtttcaagaatcattactcttagctcgccaaaggcactgaaggaaaaattgcccgtaacggagcatattgccgatacggtctacaaggctaggcaggaagttgagaatattctgaccggcaaggacagccgtatgctggtcatcgtcggcccatgctccattcacgacatcaaggcggctcgtgactatgcctcgcgcctttttgctttgcgcaaagaactcgaatcggagttctgcattgtcatgagggtttatttcgagaaaccacggacgaccatcggctggaaagggttcatcaacgaccctcatctcaacgatacctacgatatcgagcatggcctgttccatgcccgaaagctgttgattgagctgaatgaaatgggcctgcccgcagccacggagtttctcgatccgatctcgccgcaatatgttgctgacctgatcagctgggcagccattggcgcgcgtaccatcgagtcacagactcaccgccagatggccagtggcctgtcaatgccggtcggttttaaaaacgcgaccgatgggcgccttcaggtggccatcgacgctattcggtcggcgatgcaccagcacagttttctcggaatcgaccaagacgggcacagcagcgtcatcaccaccaaagggaacccgtttggccatctcgtgctgcgcggcggctctagcaagccgaactacgatgccgacagcatcgcccatgctgaaaaacagttgcgcaaggccgacctgactccgcatctgctggtcgattgcagccatgctaactccggcaagaagtgtggtaatcagctcaaggtctgggccgatattcttgcccagaaggagcagggcaacaccagcatcgtaggggtcatgatcgagagcaatatcttctctggaaaccagcctttcccggtcgatccgagagagctgcaatacggcgtctcgattaccgacgagtgcgtctcttgggaggagaccgagaggatgcttcgggatggagccgcattcatgaagcaggttcgctcgaaagcctga

SEQ ID NO: 75341 - protein, 353 aa, Chlorobium tepidum TLS
MQQLQDLRVSRIITLSSPKALKEKLPVTEHIADTVYKARQEVENILTGKDSRMLVIVGPCSIHDIKAARDYASRLFALRKELESEFCIVMRVYFEKPRTTIGWKGFINDPHLNDTYDIEHGLFHARKLLIELNEMGLPAATEFLDPISPQYVADLISWAAIGARTIESQTHRQMASGLSMPVGFKNATDGRLQVAIDAIRSAMHQHSFLGIDQDGHSSVITTKGNPFGHLVLRGGSSKPNYDADSIAHAEKQLRKADLTPHLLVDCSHANSGKKCGNQLKVWADILAQKEQGNTSIVGVMIESNIFSGNQPFPVDPRELQYGVSITDECVSWEETERMLRDGAAFMKQVRSKA

SEQ ID NO: 75342 - DNA, 1077 bp, Yersinia pestis KIM
  CDS (1)..(1077): transl_table=11
atgatcatgcaaaaagactcgctcaataacgtccatatcagtgccgaacaaatcctgataaccccggaagaactgaaaaatcagtttccactgagcgaaaatgatcagtattcgatagagcgcgcacgtaaaaccattgctgacattattcaggggcgagatccgcgtctgttggtcgtttgtgggccctgttcaattcatgatgtggatgcggcactggattacgcgcgtcgtttgaaaaaactctctgtggaattggatgacagcttatatatcgttatgcgtgtctattttgagaagccaagaactaccgtgggttggaaaggcctgatcaatgaccctgcaatggatggttcatttgatgtagaggcaggtttacacattgcccgtcgtttattgctggatttagtgggcatggggttgccgttagcgactgaagctctggatcctaatagcccacaatatttaggtgacctgttcagttggtcggccattggtgcccgtacaacggagtcacagacccaccgtgaaatggcatcaggcttgtctatgccggttggatttaaaaatggcactgacggtagcctaggcacggcaatcaatgcaatgcgcgccgctgccatgccacatcgctttatggggatcaatcagtcgggccaggtctgcctgttacaaactcagggtaacccacacggccatgtcattctacggggaggtaaaacaccaaactacagtgcacaagatgtcgctcagtgtgaaaaacagatgcaggatgcgggactcatcccatccttaatgatagattgcagtcacggtaattcaaataaagactaccgccgtcaggttgcggtggctgaatctgtggttgaacagatcaaggcgggcaatcgttcaattacaggtgtgatgctggaaagccacatccacgaaggaaatcagtcatctgaacagccacgtgctgatatgcgctacggtgtttctgtgactgacgcctgtattaactgggaaagcactgaaaccctgttacgtggtatgcgccaagaattgcttgcagcactgacggcacggactgcatga

SEQ ID NO: 75343 - protein, 358 aa, Yersinia pestis KIM
MIMQKDSLNNVHISAEQILITPEELKNQFPLSENDQYSIERARKTIADIIQGRDPRLLVVCGPCSIHDVDAALDYARRLKKLSVELDDSLYIVMRVYFEKPRTTVGWKGLINDPAMDGSFDVEAGLHIARRLLLDLVGMGLPLATEALDPNSPQYLGDLFSWSAIGARTTESQTHREMASGLSMPVGFKNGTDGSLGTAINAMRAAAMPHRFMGINQSGQVCLLQTQGNPHGHVILRGGKTPNYSAQDVAQCEKQMQDAGLIPSLMIDCSHGNSNKDYRRQVAVAESVVEQIKAGNRSITGVMLESHIHEGNQSSEQPRADMRYGVSVTDACINWESTETLLRGMRQELLAALTARTA

SEQ ID NO: 75344 - DNA, 1047 bp, Yersinia pestis KIM
  CDS (1)..(1047): transl_table=11
atgtacaagatagatgaactgcggaccgctcgcatcgatagcttgattacaccgcagcaactggctgaaaagttaccgatttctgaggttattgcagataacgtgacggcgtcacgtaaacgaatagagaaaatacttattggtgaagacccacgtctactcgtggtgattggcccctgctctattcacgaccttgatgcagccgttgattatgccacccggctcaaggtgctacgagaacgctatcaagaccggctggaaatcgtgatgcgcacctatttcgagaaaccacggactgtagtgggttggaaggggctgatttctgatccggcacttgacggctcatgccaggtgaacttgggtattgaactggcacgtaagctactgttagccgtgaatgaactcgggctgccgaccgctaccgagttcctcaatatggtaacaggccaatatattgccgacctcatcagttggggggcaataggcgcacgtaccaccgaaagccagatccaccgagagatggcctcggcactctcctgccccgtgggtttcaaaaatggtacagatggcaatgtgcgtattgctattgatgccattcgcgccgcacaagccagccatatgttcctttctccggataaaaccggccaaatgacgatttaccaaaccagtggtaacccctatgggcatattattatgcggggtggaaagcaacctaactatgatgcctctgatatcgcagccgcctgtgacagcttgcgggaatttgatttgccagaacatctggtggtagattttagccacggcaattgccagaagatgcatcgccgccagttggatgttgccgaaaatatcgggctacagatccgtgcgggttcaacagcgattgtcggtgttatggctgagagtttcctgattgagggcacacagaagattgttgccggacagcccttaacttatgggcaatccatcactgacccttgcctgaattgggatgatactgaacaactgttaagcctattggcagatgcagtagacagccggttttaa

SEQ ID NO: 75345 - protein, 348 aa, Yersinia pestis KIM
MYKIDELRTARIDSLITPQQLAEKLPISEVIADNVTASRKRIEKILIGEDPRLLVVIGPCSIHDLDAAVDYATRLKVLRERYQDRLEIVMRTYFEKPRTVVGWKGLISDPALDGSCQVNLGIELARKLLLAVNELGLPTATEFLNMVTGQYIADLISWGAIGARTTESQIHREMASALSCPVGFKNGTDGNVRIAIDAIRAAQASHMFLSPDKTGQMTIYQTSGNPYGHIIMRGGKQPNYDASDIAAACDSLREFDLPEHLVVDFSHGNCQKMHRRQLDVAENIGLQIRAGSTAIVGVMAESFLIEGTQKIVAGQPLTYGQSITDPCLNWDDTEQLLSLLADAVDSRF

SEQ ID NO: 75346 - DNA, 1053 bp, Yersinia pestis KIM
  CDS (1)..(1053): transl_table=11
atgaattaccagaatgatgatttacggattaaagaaattaaggaactcctacctcctgttgcgttgttagagaaatttccctccacagttaatgcggcagaaaccgtcgccaagacccggaatgctattcacaacatcttgcgtgctcaggatgatcgcttgctggtggtgattggcccatgctctattcatgatacgcaagcggctaaagaatatgcggcccgtttgctggcactgcgtgaagaactgcagggcgagctggaagttgtcatgcgtgtttattttgaaaagccgcgtacaacggtgggttggaaaggcctgattaacgatccgcatatggacaatagctacgacatcaatgaaggtttacgtctggcgcgtgaattactcgtcgaaattaacgacagcgggttaccggccgccggtgagtttttggatatgattacgccgcagtatctggctgatctgatgagctggggagccattggcgcacgtactactgaatctcaggttcaccgcgaactggcttctggtctgtcttgccccgttggttttaaaaatggtaccgacggcaccattaaagtggctattgatgcgatcaacgcggccagtgccccacactgtttcttgtcggtgaccaaatggggtcattcggcgattgtgaatactgccggcaatggtgattgccatatcattttacgtggtggtaaagagccgaattacagcagtaagcatgtgaatgcggttaaagaagggctgattaaagcgggcctggaaccccagattatgatcgatttcagccacgctaacagttgcaaacagtttcaaaagcagatggaagtgggaacggatgtttgccaacaaattgcgcaaggtgaaaaatctatcataggcgtgatgatcgaaagccatttagtcgaaggtagccaaaacctggaaagtggtgaaccactaacctatggccagagtattaccgatgcctgtattggctggaaagatactgaggcgctgttgcgccagttggctggagcagtgagagctcgccgccagtag

SEQ ID NO: 75347 - protein, 350 aa, Yersinia pestis KIM
MNYQNDDLRIKEIKELLPPVALLEKFPSTVNAAETVAKTRNAIHNILRAQDDRLLVVIGPCSIHDTQAAKEYAARLLALREELQGELEVVMRVYFEKPRTTVGWKGLINDPHMDNSYDINEGLRLARELLVEINDSGLPAAGEFLDMITPQYLADLMSWGAIGARTTESQVHRELASGLSCPVGFKNGTDGTIKVAIDAINAASAPHCFLSVTKWGHSAIVNTAGNGDCHIILRGGKEPNYSSKHVNAVKEGLIKAGLEPQIMIDFSHANSCKQFQKQMEVGTDVCQQIAQGEKSIIGVMIESHLVEGSQNLESGEPLTYGQSITDACIGWKDTEALLRQLAGAVRARRQ

SEQ ID NO: 75348 - DNA, 1062 bp, Thermosynechococcus elongatus BP-1
  CDS (1)..(1062): transl_table=11
atgccgcaaacctttgatcttcacgttgttgagacacgacccttgttgacgcctgctaccctgctggcggatttaccgctgactgaatcccaagctacccttgtggccacaactcgcgatcgcattcgtgagattttcaaggggcgcgatcgccgcctgctggtgattgtggggccttgttcaattcacgatgtcaaggcagcgctggaatatggggaaaagttggcccggatacgcgatcgcctgcgggatagtctcgaaattgtgatgcgggtttactttgaaaaaccacggacctctgtaggttggaaaggcctcatcaacgatccgcacctcgatggcagctatgatatcaacaccgggctacgccttgcccgcaagctactgctggatttggccaacttaggaatacccgccgctacagaattactcgatccgatcattccccagtacattgccgatgttgtcagttggactgctattggcgctcgcaccaccgaaagccaaactcaccgtcaaatggcctcgggtctctcgatgcccgtaggcttcaaaaatggcaccgatggtcacttagattctgccattaatgccatgattgcggcccagcagtcccaccattttttgggcattaatgctgaaggccgcgccagtattgttgccaccactgggaatcccgatactcacctggtgctacggggcggcaaagacggccccaactattctgccgcccacattgagatggctgccgcactcttagagcgtaagggactcacaccacggctcatggtggattgtagtcatgccaacgctgccaaagacccccaacgccaagtgctagtgtgtgagaacctcgcccatcaggtccagcaaggctcccgttatttggcgggtgtgatgatcgaaagtcatctcaaggcgggtaatcaaccaattcccaaggatctctcgcagttggtctatggccaaagtattaccgatccctgcgtggactttgcaacaacagtaacaatgctcgaacaattggctagtgcggtaggatcgcaactggtggccagataa

SEQ ID NO: 75349 - protein, 353 aa, Thermosynechococcus elongatus BP-1
MPQTFDLHVVETRPLLTPATLLADLPLTESQATLVATTRDRIREIFKGRDRRLLVIVGPCSIHDVKAALEYGEKLARIRDRLRDSLEIVMRVYFEKPRTSVGWKGLINDPHLDGSYDINTGLRLARKLLLDLANLGIPAATELLDPIIPQYIADVVSWTAIGARTTESQTHRQMASGLSMPVGFKNGTDGHLDSAINAMIAAQQSHHFLGINAEGRASIVATTGNPDTHLVLRGGKDGPNYSAAHIEMAAALLERKGLTPRLMVDCSHANAAKDPQRQVLVCENLAHQVQQGSRYLAGVMIESHLKAGNQPIPKDLSQLVYGQSITDPCVDFATTVTMLEQLASAVGSQLVAR

SEQ ID NO: 75350 - DNA, 1233 bp, Bifidobacterium longum NCC2705
  CDS (1)..(1233): transl_table=11
atgcagcagcaggaggaagcagcacattcgctgcatccgttgcaagtcggtccgcagccgttgaacaccccagaagagcttcgcgccattcgtcaggcgatgggggaggggaagaacccgctcgttgccactgatgtgccgcgttgggaagatcaggtgggtgtcagtcgcatcatcaaccgccgcgtattggagttggagccgctgcccacgcccgcgcaagtgctcgctgaactcccgctgactgatcaggctcaggaaatcgtcgcctactcgcgtgatgagattcgcgcgtgcctgtacggccaagacgacaggctgttggtcatcgtcggcccctgttcggttcatgacccgaaggccgcgctggactacgcgcgccgattggccaagctgaaagatgagctcggtgaacagctgctcatcgtcatgcgcgtgtacttcgagaagccgcgcactaccattggctggaagggcctgatcaacgacccggatattgatggcagccacaatattcgcaagggcctgttgcttgctcgcaaaaccttgcttggtgtgctgaaggaaggattggcggccgccacggaatttctggagcccaccagcccgcagttcatctcggacgcggtgagttggggcgccattggtgcgcgcaacacggaaagccagatccaccgccaattggccagcgggctttccatgccggtcggctttaagaatgccactgacggctcggtgaaggcagcggtcaacggttgcttcgccgctgctcagcagcacacgttcttcggcattgaccatctggggcgtgcctgcgcagtcgagacccttggcaacccggactgccatgtggtgttgcgcggctcgattcacggcccgaactacgatgccgaatccgtggccaaagccatggaagacgtacgcgccgaaatgcccgccgaatccgcagcctcgcatggtctgattgttgattgctcgcacggtaactccggcaaggacgaacatcgtcaggccgaagtcgtgcgcaatattgccagcagaattgcagctggcgaacagggtattaccggcatcatgatggaaagctttattgaaggaggcaatcagaaggccgcgccgcttgatcagctggtctatggcaagtcgattactgacaagtgcatcagctgggaagaaaccgaggccttgctgcgcgagcttgcggaagccgtagccacacggcgttggcactga

SEQ ID NO: 75351 - protein, 410 aa, Bifidobacterium longum NCC2705
MQQQEEAAHSLHPLQVGPQPLNTPEELRAIRQAMGEGKNPLVATDVPRWEDQVGVSRIINRRVLELEPLPTPAQVLAELPLTDQAQEIVAYSRDEIRACLYGQDDRLLVIVGPCSVHDPKAALDYARRLAKLKDELGEQLLIVMRVYFEKPRTTIGWKGLINDPDIDGSHNIRKGLLLARKTLLGVLKEGLAAATEFLEPTSPQFISDAVSWGAIGARNTESQIHRQLASGLSMPVGFKNATDGSVKAAVNGCFAAAQQHTFFGIDHLGRACAVETLGNPDCHVVLRGSIHGPNYDAESVAKAMEDVRAEMPAESAASHGLIVDCSHGNSGKDEHRQAEVVRNIASRIAAGEQGITGIMMESFIEGGNQKAAPLDQLVYGKSITDKCISWEETEALLRELAEAVATRRWH

SEQ ID NO: 75352 - DNA, 1134 bp, Bifidobacterium longum NCC2705
  CDS (1)..(1134): transl_table=11
atggcagcactacgtggtccggatagttccgaggatgaacgtcgtttgggggagcaggccgtctttcctgagaccgtcgatgtcaacattcgtcagcttgaccccattcccgcgccgcgtgctttcctcagggagcagccgctcaccgatgagatgagcgagctcgtgctccactcgcggcaggaaatccgcgatgtgctcaacggccgcgacgaccgactgctcgtcatcgtgggcccctgctcaatccacgacccgaaggccgcgcacgagtacgcagaaaagctggctgccgtcaagcgcgagttggaagaccgactcgtgatcgtgatgcgcgtgtacttcgagaagccgcgcaccaccatcggctggaaaggcctcatcaacgaccccgatctggacggtcgcttcaatattcgtaagggcatgtggctggcccgcaaggtgctcaccgacgtgctgagcctcggtctgcccgccgccaccgaatggcttgaccccatcaccccgcagtacatctgcgacgcgatcagctggggtgccatcggcgcgcgtaacaccgaatcccaagtccaccgcgaactggccagtggcctgtccatgccggtgggcttcaagaactccaccgacggctccatcaaggccgccgccgattcctgtttcgcggccggcttcgagcatcacttcctgtccattaacttggacggtcgcgtgatttccgccgaaaccaaaggcaacccggattgccatctggttctgcgcggctccagccacggcccgaactacgatgccgaatccgtgcgtcaagctctggaagacctcaaggtttccaaagcgtccggcccgagccagcatggcctcgtcatcgatgccgcccacggcaactgcggcaaagacgaaaaccgcgaagccgaagtcatcgaagagatcgctgagcgcctggcgcacggcgaacaaggcatcaccggcgtaatgatggaaagcttcttggtcggcggtcaccaaaagccggccccgctcgaccagttggtctacggtcagtccgtcaccgactcttgcgtgccgtgggaacgcaccaacgaactgctgcacaccctagccgacgccgtcaccgctcgccgctcggctaaatag

SEQ ID NO: 75353 - protein, 377 aa, Bifidobacterium longum NCC2705
MAALRGPDSSEDERRLGEQAVFPETVDVNIRQLDPIPAPRAFLREQPLTDEMSELVLHSRQEIRDVLNGRDDRLLVIVGPCSIHDPKAAHEYAEKLAAVKRELEDRLVIVMRVYFEKPRTTIGWKGLINDPDLDGRFNIRKGMWLARKVLTDVLSLGLPAATEWLDPITPQYICDAISWGAIGARNTESQVHRELASGLSMPVGFKNSTDGSIKAAADSCFAAGFEHHFLSINLDGRVISAETKGNPDCHLVLRGSSHGPNYDAESVRQALEDLKVSKASGPSQHGLVIDAAHGNCGKDENREAEVIEEIAERLAHGEQGITGVMMESFLVGGHQKPAPLDQLVYGQSVTDSCVPWERTNELLHTLADAVTARRSAK

SEQ ID NO: 75354 - DNA, 1053 bp, Shigella flexneri 2a str. 301
  CDS (1)..(1053): transl_table=11
atgaattatcagaacgacgatttacgcatcaaagaaatcaaagagttacttcctcctgtcgcattgctggaaaaattccccgcaactgaaaatgccgcgaatacggttgcccatgcccgaaaagcgatccataagatcctgaaaggtaatgatgatcgcctgttggtggtgattggcccgtgctcaattcatgatcctgtcgcggctaaagagtatgccactcgcttgctggcgctgcgtgaagagctgaaagatgagctggaaatcgtaatgcgcgtctattttgaaaagccgcgtaccacggtgggctggaaagggttgattaacgatccgcatatggataacagcttccagatcaacgacggtctgcgtatagcccgtaaattgctgcttgatattaacgacagcggtctgccagcggcgggtgagtttctcgatatgatcactcctcagtatctcgctgacctgatgagctggggcgcaattggtgcacgtaccacggaatcgcaggtgcaccgcgaactggcgtctggtctttcttgtccggtaggttttaaaaatggcacagacggtacgattaaagtggctatcgatgccattaatgccgccggtgcgccgcactgcttcctgtccgtaactaaatgggggcattcggcgattgtgaataccagtggtaacggcgattgccatatcattctgcgcggcggtaaagagcctaactacagcgcgaagcacgttgctgaagtgaaagaagggctgaacaaagcaggtctgccagctcaggtgatgatcgatttcagccatgctaattcgtccaaacaattcaaaaagcagatggatgtttgtgctgacgtttgccagcagattgccggtggcgaaaaggccattattggcgtgatggtggaaagccatctggtggaaggcaatcagagcctcgatagcggggagccgctggcctacggtaagagcatcaccgatgcctgcattggctgggaagataccgatgctctgttacgtcaactggtgaatgcagtaaaagcgcgtcgcgggtaa

SEQ ID NO: 75355 - protein, 350 aa, Shigella flexneri 2a str. 301
MNYQNDDLRIKEIKELLPPVALLEKFPATENAANTVAHARKAIHKILKGNDDRLLVVIGPCSIHDPVAAKEYATRLLALREELKDELEIVMRVYFEKPRTTVGWKGLINDPHMDNSFQINDGLRIARKLLLDINDSGLPAAGEFLDMITPQYLADLMSWGAIGARTTESQVHRELASGLSCPVGFKNGTDGTIKVAIDAINAAGAPHCFLSVTKWGHSAIVNTSGNGDCHIILRGGKEPNYSAKHVAEVKEGLNKAGLPAQVMIDFSHANSSKQFKKQMDVCADVCQQIAGGEKAIIGVMVESHLVEGNQSLDSGEPLAYGKSITDACIGWEDTDALLRQLVNAVKARRG

SEQ ID NO: 75356 - DNA, 1071 bp, Shigella flexneri 2a str. 301
  CDS (1)..(1071): transl_table=11
atgcataaagacgcgctgaataacgtacatattaccgacgaacaggttttaatgactccggaacaactgaaggccgcttttccattgagcctgcaacaagaagcccagattgctgactcgcgtaaaaccatttcagatattatcgccgggcgcgatcctcgtctgctggtagtatgtggtccttgttccattcatgatccggaaactgctctggaatatgctcgtcgatttaaagctcttgccgcagaggtcagcgatagcctctatctggtaatgcgcgtctattttgaaaaaccccgtaccactgtcggctggaaagggttaattaacgatccccatatggatggctcttttgatgtagaagccgggctgcaaatcgcgcgtaaattgttgcttgagctggtgaatatgggactgccactggcgacggaagcgttagatccgaatagcccgcaatacctgggcgatctgtttagctggtcagcaattggtgctcgtacaacggaatcgcaaactcaccgtgaaatggcctccgggctttccatgccggttggttttaaaaacggcaccgacggcagtctggcaacagcaattaacgctatgcgcgccgccgcccagccgcactgttttgttggcattaaccaggcagggcaggttgcgttgctacaaactcaggggaatccggacgggcatgtgatcctgcgcggtggtaaagcgccgaactatagccctgcggatgttgcgcaatgtgaaaaagagatggaacaggcgggactgcgcccgtctctgatggtagattgcagccacggtaattccaataaagattatcgccgtcagcctgcggtggcagaatccgtggttgctcaaatcaaagatggtaatcgctcaattattggtctgatgatcgaaagtaatatccacgagggcaatcagtcttctgagcaaccgcgcagtgaaatgaaatacggtgtatccgtaaccgatgcctgcattagctgggaaatgactgatgccttgctgcgtgaaattcatcaggatctgaacgggcagctgacggctcgcgtggcttaa

SEQ ID NO: 75357 - protein, 356 aa, Shigella flexneri 2a str. 301
MHKDALNNVHITDEQVLMTPEQLKAAFPLSLQQEAQIADSRKTISDIIAGRDPRLLVVCGPCSIHDPETALEYARRFKALAAEVSDSLYLVMRVYFEKPRTTVGWKGLINDPHMDGSFDVEAGLQIARKLLLELVNMGLPLATEALDPNSPQYLGDLFSWSAIGARTTESQTHREMASGLSMPVGFKNGTDGSLATAINAMRAAAQPHCFVGINQAGQVALLQTQGNPDGHVILRGGKAPNYSPADVAQCEKEMEQAGLRPSLMVDCSHGNSNKDYRRQPAVAESVVAQIKDGNRSIIGLMIESNIHEGNQSSEQPRSEMKYGVSVTDACISWEMTDALLREIHQDLNGQLTARVA

SEQ ID NO: 75358 - DNA, 1059 bp, Shewanella oneidensis MR-1
  CDS (1)..(1059): transl_table=11
atgtattaccaaaatgatgacgttcgcattaatgaagttaaagagttacttccccctattgcgatcctagaacgatttcctgcctccgaaaacgctgctgcaactgtgtttaatgcccgtcaaagcatccataatattctcgctcgtgaagatgatcgcctattagtggtcattggtccctgctctattcatgatcctaaagcggcgctggaatacggtcagcgattggttgtccttagagagcgctatcaagatcaacttgagattgtgatgcgagtgtattttgaaaagccgcgaactaccgtagggtggaaggggctgatcaatgatccttacatggataacagtttcaaactgaatgatggtttgcgaacagcgcgtaaactcttggtcgatttgaatgattcaggcatgccgacagcgggtgagttcctcgacatgattactccgcaatatgtggcggatatgatgtgttggggcgccattggtgcccgcacaacagaatcacaagtccaccgcgaactggcctcgggtttatcttgtcctgtgggctttaaaaatggcacagacggcacaatcaaagtggcaatcgatgccattggtgccgctaatgcgccgcatcactttttatctgtgaccaaatttggccattcggcgattgtctccactaaaggcaacccagattgccatatcatccttcgcggcggccgagagccgaattacagtgcgagccacgtcgcccaaatcagtgaccaactgaaaaaagccaaactggtcgacaacatcatgatcgactttagccatgccaatagcagcaaacaatatcagcggcaaatggtggtggccaatgaggttgccgaacaagtcgcggcgggcaatcaggcgatttttggggtgatggttgaaagccacttagtcgaagggcgccaagatctgatcgagggccaagcgttatgctacggccagagtgtgactgatgcttgtattggttgggaagattctgagcgtttgttagctgtgctaaatcagagtgttgttgagcgacgtcagcgggtttaa

SEQ ID NO: 75359 - protein, 352 aa, Shewanella oneidensis MR-1
MYYQNDDVRINEVKELLPPIAILERFPASENAAATVFNARQSIHNILAREDDRLLVVIGPCSIHDPKAALEYGQRLVVLRERYQDQLEIVMRVYFEKPRTTVGWKGLINDPYMDNSFKLNDGLRTARKLLVDLNDSGMPTAGEFLDMITPQYVADMMCWGAIGARTTESQVHRELASGLSCPVGFKNGTDGTIKVAIDAIGAANAPHHFLSVTKFGHSAIVSTKGNPDCHIILRGGREPNYSASHVAQISDQLKKAKLVDNIMIDFSHANSSKQYQRQMVVANEVAEQVAAGNQAIFGVMVESHLVEGRQDLIEGQALCYGQSVTDACIGWEDSERLLAVLNQSVVERRQRV

SEQ ID NO: 75360 - DNA, 1092 bp, Shewanella oneidensis MR-1
  CDS (1)..(1092): transl_table=11
atgcagcaggatacaattaataacgtccatatcagttcagagaatgttcttattaccccgcaggagctcaaagcggctctaccactctctgagcatgcatatcgttatatcctcaatgcacgcaaaactgtggcggatatcgtccataagcgcgataaccgcgtgctcatcatcactggaccttgttcgattcatgatatcgatgccgccaaagaatacgctttaaaactcaaaaaattacacgatgaacttagtgatgaattttacatcctgatgcgggtgtactttgagaagccacgtaccacagtgggttggaaggggatgattaacgaccccgatatggatggctcttttgatgtggaaaagggcttaaagctggcccgtgagttgatgatttggctggcggaacttgagctgcctgttgcaaccgaagcactcgaccctatcagccctcagtacatttctgagctagtgacttggtcggccataggtgcccgcaccaccgaatcgcaaacccatagggaaatggcgtcgggcttatctatgcccgttggctttaaaaatggtacagatggtaagctcgatgtggcaatcaatgccctcaaatcggcagccagtagccacagatttatggggatcaaccaacagggtcaagtggcgctgttgcaaaccgcgggcaacccagatggtcatgtgattttacgtggtggcgtaacacctaactacgatgcggccagtgtggctgaatgtgaggcgcagcttcataaggccaaactcaatgcccgtcttattatcgattgtagccatggcaactcctctaaggattacgcaaggcaagtccctgtgtgtgaagatgtatttgcgcagatctacaatggtaacaagtccattattggcgtgatgttagagagccatttaaacgaaggtaatcaaagttgtgataaaccatcaggcgaactggcctatggggtttcggtaacagactcctgtattaattgggaaaaaaccgaaagcgttttacgtgcgggcgcatcgaagttatcttcagtgttaccaactcgtttcgatttgcgtaaagtggccaatgcttaa

SEQ ID NO: 75361 - protein, 363 aa, Shewanella oneidensis MR-1
MQQDTINNVHISSENVLITPQELKAALPLSEHAYRYILNARKTVADIVHKRDNRVLIITGPCSIHDIDAAKEYALKLKKLHDELSDEFYILMRVYFEKPRTTVGWKGMINDPDMDGSFDVEKGLKLARELMIWLAELELPVATEALDPISPQYISELVTWSAIGARTTESQTHREMASGLSMPVGFKNGTDGKLDVAINALKSAASSHRFMGINQQGQVALLQTAGNPDGHVILRGGVTPNYDAASVAECEAQLHKAKLNARLIIDCSHGNSSKDYARQVPVCEDVFAQIYNGNKSIIGVMLESHLNEGNQSCDKPSGELAYGVSVTDSCINWEKTESVLRAGASKLSSVLPTRFDLRKVANA

SEQ ID NO: 75362 - DNA, 1065 bp, Shewanella oneidensis MR-1
  CDS (1)..(1065): transl_table=11
atgaccattaaaacagacgaattacgcacttccttattagctaaagtcatctcacctgcacaactggcatctgagtaccccttaacccaagatgctgccgactacctcgttcaacaacgtcgtgaagttgaagccatcattatgggcgaagaccaacgcctgttggtgatcattggcccttgctctatccacgatacgcaagccgccctcgattacgcccgccgcttagcagtgctacatcaagagttaaaggacgacctctgtattttaatgcgagtgtattttgaaaagccgcgcacgattgtgggttggaaggggttgatttccgatcctgacttagatggcagcttcgagccaaataaaggattgcgtattgcacgccagcttctacagcaaatcactgagcttaagctgcccatcgctaccgaatttttagatatggtgaacgggcaatatattgccgatttaatcacctggggcgcgattggtgctcgcaccaccgaaagccaagtacaccgtgaaatggcctcagccctttcttgccctgtgggctttaaaaacggaaccgatggcaatattaatatcgccgttgatgcggtacgtgccgcaaaagtgccgcatatcttctactcaccggataaagatggtgcgatgtctgtctatcgcacccatggtaatccttacggacacatcattttacgtggcggtaaaaaacccaattactttgagcaagacattgaacaagcaagattaaaacttgagtctgtcaatgttacaccgcgtgtggtggttgattttagccacggaaatagtgaaaaaaatcacctaaaacaactggtcgttgctgaaaatatcatggcgcaaatgcgtgctggtagtacggccattgccggcatcatggccgaaagtttcttacaagaaggcaaccaaaaggtgattgaaggtcaacccctatgttatggccaaagcatcacggatgcctgcttacattgggctgactccgaaaaattactgcgagatcttgccagcgcctcacgcgatagacgcgaactccttggcaaataa

SEQ ID NO: 75363 - protein, 354 aa, Shewanella oneidensis MR-1
MTIKTDELRTSLLAKVISPAQLASEYPLTQDAADYLVQQRREVEAIIMGEDQRLLVIIGPCSIHDTQAALDYARRLAVLHQELKDDLCILMRVYFEKPRTIVGWKGLISDPDLDGSFEPNKGLRIARQLLQQITELKLPIATEFLDMVNGQYIADLITWGAIGARTTESQVHREMASALSCPVGFKNGTDGNINIAVDAVRAAKVPHIFYSPDKDGAMSVYRTHGNPYGHIILRGGKKPNYFEQDIEQARLKLESVNVTPRVVVDFSHGNSEKNHLKQLVVAENIMAQMRAGSTAIAGIMAESFLQEGNQKVIEGQPLCYGQSITDACLHWADSEKLLRDLASASRDRRELLGK

SEQ ID NO: 75364 - DNA, 1035 bp, Streptococcus mutans UA159
  CDS (1)..(1035): transl_table=11
atgggtattcatcaaaaaagcaaaaccatagatcttttcacggttaaacaaggcacgcaattaaaaggtcaggatttggctaagaaagaagcacgtgatcgtgaattggtttccattatcaagggagaggacaaccgtttactcttgattattggtccttgttcatcagataatgaagaagctgttcttgagtatgctaaacgtcttgctaaattgcaggaagaagttaaagatcgcatctttatggtgatgcgtgtttatacggcaaagccacgtactaatggtgatggttataaaggcctcattcatcaaccaaatacttctaaattgccagatttgattaatggcattcatgctgttcgtaatttgcattatcgtgtgattactgagacaggattgacaacagcagatgaaatgctttacccttctaatcttgtcttagtagatgatttggtttcttatcatgctgttggtgctcgttcggttgaagatcaggaacatcgctttgtggcttcaggcattgatgtgcctactggcatgaaaaatccaacgtctggtaatctcaaggttatgcttaatgctttacatgcagcacaaaattcacaaaattttatctataatggagcagaagtagaaacagacggcaattccttggctcatgttattttgcgcggaggcagcaatgagcatggtgactatgaacctaattattattatgacgttctcttaaaactgatccaacagtatgaaaatatgaatttaatcaatccctttattgttgttgataccaatcatgataactctggcaaaaattatttggaacaagtaagaattgttcggcaaacccttattaaccgtgactggaatgataaaatcaataagtatgttcgcggctttatgattgaatcttatctagaagatggtcgtcaggataagccagaagtttttggcaagtctattacggatccttgtttgggttgggaaaatactcaacagttgatttatgagatttaccatactctcaaagcaaaataa

SEQ ID NO: 75365 - protein, 344 aa, Streptococcus mutans UA159
MGIHQKSKTIDLFTVKQGTQLKGQDLAKKEARDRELVSIIKGEDNRLLLIIGPCSSDNEEAVLEYAKRLAKLQEEVKDRIFMVMRVYTAKPRTNGDGYKGLIHQPNTSKLPDLINGIHAVRNLHYRVITETGLTTADEMLYPSNLVLVDDLVSYHAVGARSVEDQEHRFVASGIDVPTGMKNPTSGNLKVMLNALHAAQNSQNFIYNGAEVETDGNSLAHVILRGGSNEHGDYEPNYYYDVLLKLIQQYENMNLINPFIVVDTNHDNSGKNYLEQVRIVRQTLINRDWNDKINKYVRGFMIESYLEDGRQDKPEVFGKSITDPCLGWENTQQLIYEIYHTLKAK

SEQ ID NO: 75366 - DNA, 1032 bp, Streptococcus mutans UA159
  CDS (1)..(1032): transl_table=11
atgtcttttaaagcaactagtgataaaattaatatagaagaaatgcggagcttgtcaaaattaacaggtgaagctttagcccaaaaggaagcacgtgatcgtgaattggtttccattatcaagggagaggacaaccgtttactcttgattattggtccttgttcatcagataatgaagaagctgttcttgagtatgctaaacgtcttgctaaattgcaggaagaagttaaagatcgcatctttatggtgatgcgtgtttatacggcaaagccacgcactaatggtgatggctacaaaggaatggtccatcaacctaatacaggcgcggctcccagtctgattaacggtattacagctgtacgccatctgcattatcgtgtgattactgaaacgggtattacaacagcagatgaaatgctctatcctgaaaaccttcctttgattgatgatttagtatcctatattgcagttggtgcccgttcagttgaggatcaacaacaccgttttgtagcttcaggcattgatgtgcctactggcatgaaaaatccaacatcaggaaatcttaatatcatgtttaatggtatttatgctgcgcaaaataaacaatcgttccttttcaatggcgaagaagttgaaaccagcggcaatcctacagctcacgttatcttgcgaggcggcgttaatgaatatggaaaaaatattccaaattattactatgacaatgttttagatacgattgatcagtatgaaaagatggggctgcaaaatccttttattgttgttgataccaatcatgataactctggtaaaaactatttggaacaagtaagaattgttcggcaaacccttattaaccgtgactggaatgacaaaatcaataaatatgttcgcggctttatgattgaatcttatctggaagatggtcgtcagaatgagccagaagtttttggcaagtctattacggatccttgtttgggttgggaaaatactaaacaattggttcatgaaatttatgatactttaggaaattaa

SEQ ID NO: 75367 - protein, 343 aa, Streptococcus mutans UA159
MSFKATSDKINIEEMRSLSKLTGEALAQKEARDRELVSIIKGEDNRLLLIIGPCSSDNEEAVLEYAKRLAKLQEEVKDRIFMVMRVYTAKPRTNGDGYKGMVHQPNTGAAPSLINGITAVRHLHYRVITETGITTADEMLYPENLPLIDDLVSYIAVGARSVEDQQHRFVASGIDVPTGMKNPTSGNLNIMFNGIYAAQNKQSFLFNGEEVETSGNPTAHVILRGGVNEYGKNIPNYYYDNVLDTIDQYEKMGLQNPFIVVDTNHDNSGKNYLEQVRIVRQTLINRDWNDKINKYVRGFMIESYLEDGRQNEPEVFGKSITDPCLGWENTKQLVHEIYDTLGN

SEQ ID NO: 75368 - DNA, 1008 bp, Streptococcus agalactiae NEM316
  CDS (1)..(1008): transl_table=11
atgggatttcatcagttaagtgataaaattaatattgaaatattgaagcagaaaactagcttagatctagaagttagccaaaaaaaattagccaaagaagaagagttaaaaaatatcataaaaggtgaggatcagcggtttctagtaatagtaggtccttgttctgcggataatccaaaggcggtgctaacttatgcaaagcgtttagctaaattggaagctgcctttaaagataaaatgtttttggttatgagagtttataccgctaagccaagaacgaatggtgatggttataaaggcttagttcaccattctgacaaactaggagttttttttcaagcacgtaagatgcactatgacatcattcgagagactggactcctgacagctgatgaattactttatccagagatgttatcagtgatggatgatttagtttcttactatgctattggtgcgcgttcagtggaagatcagggacaccgttttatatcttcaggtatagatgcaccagtaggtatgaaaaatccaacgtctggtaatttaagagtcatgcttaatgcggtctatgcagcacaaaatcaacaggaattattctatcaaaataagcaagttagaacagatggtaatttgctgtcacatgttattttgagaggatatcataatgccgactatcgaagtatccctaattatcattatgaaaaccttttagaaactattactcattatgaagagactgatttgcaaaatccctttattgttgttgatacaaatcatgacaattcaggtaagcaatttttagaacaaattcgcattgtgaaatcagtacttgcagaccgacagtggcatactaaaattagaaactatgttcgtggttttttgatagaatcttatttagaagatggaagacaagataaaccagatgtttttggtaagtctatcacagatccatgtctaggttgggataaaacagaaatgctaattagggatatttacaatagtttgtaa

SEQ ID NO: 75369 - protein, 335 aa, Streptococcus agalactiae NEM316
MGFHQLSDKINIEILKQKTSLDLEVSQKKLAKEEELKNIIKGEDQRFLVIVGPCSADNPKAVLTYAKRLAKLEAAFKDKMFLVMRVYTAKPRTNGDGYKGLVHHSDKLGVFFQARKMHYDIIRETGLLTADELLYPEMLSVMDDLVSYYAIGARSVEDQGHRFISSGIDAPVGMKNPTSGNLRVMLNAVYAAQNQQELFYQNKQVRTDGNLLSHVILRGYHNADYRSIPNYHYENLLETITHYEETDLQNPFIVVDTNHDNSGKQFLEQIRIVKSVLADRQWHTKIRNYVRGFLIESYLEDGRQDKPDVFGKSITDPCLGWDKTEMLIRDIYNSL

SEQ ID NO: 75370 - DNA, 1170 bp, Corynebacterium efficiens YS-314
  CDS (1)..(1170): transl_table=11
ttgtttccccatatgatttcccccataaacggtttccacaccaccatcaccgcccgaaaggcagaccccagcaccatgagcgccccagtgtccctccccaacccggcatccaccagcaacaaacgggtggttgccttccatgagctgcccagcccggccgaactcaccgccgacaaccccctgagtccacgtcaggcggagaaggttgagcgcgaccgccaggagatcgccgatatcttcgccggcgatgatgaccgcctcgtggttgtggtcggcccgtgttcggtccatgacccggaggctgcgatcgactacgccaaccgcctggcgcccctggccaagcggctggaccaggacctgaagatcgtcatgcgtgtctacttcgagaagccacgcaccaccgtcgggtggaaggggctgatcaatgatccgcacctcaacgagacctacgacatcgccgagggactgcgcctggcacgcaaggtgcttatcgacgttgtgaacctcgacctgcccgtcggttgtgaattcctcgaaccgaacagcccgcagtactacgccgatgccgtggcctggggtgccatcggtgcacgcaccaccgaatcccaggtccaccgccagctcgcctccgggatgtccatgcccatcggtttcaagaacggcaccgacggcaatgtccaggttgccatcgatgcggtggaatccgcccggagcccccacttcttctttggcacctccgaccacggtgcaccctcggtggtgcagaccgcgggtaactccaacagccatatcatcctccgtggtggcaccaccggacccaaccacgatgcggcatccgtggcgcaggccgtggagaagctgggggagggggcacgtctcatgatcgatgcctcccacgccaactcaggcaaggaccatatccgtcaggtcggtgtggtccgtgagatcgccgagcagatcgccgctggtgatgaggccatcgccggcatcatgatcgagtccttcctcgtcggtggcgcccagaacctggatcctgccaggctgaagatcaacggcggtgaggggctggtctacggccagtccgtcaccgacaagtgcatcgacatcgacaccaccgtcgatctgctcggtgagctcgccgcggcggtccgtacccgccggcaggcctga

SEQ ID NO: 75371 - protein, 389 aa, Corynebacterium efficiens YS-314
MFPHMISPINGFHTTITARKADPSTMSAPVSLPNPASTSNKRVVAFHELPSPAELTADNPLSPRQAEKVERDRQEIADIFAGDDDRLVVVVGPCSVHDPEAAIDYANRLAPLAKRLDQDLKIVMRVYFEKPRTTVGWKGLINDPHLNETYDIAEGLRLARKVLIDVVNLDLPVGCEFLEPNSPQYYADAVAWGAIGARTTESQVHRQLASGMSMPIGFKNGTDGNVQVAIDAVESARSPHFFFGTSDHGAPSVVQTAGNSNSHIILRGGTTGPNHDAASVAQAVEKLGEGARLMIDASHANSGKDHIRQVGVVREIAEQIAAGDEAIAGIMIESFLVGGAQNLDPARLKINGGEGLVYGQSVTDKCIDIDTTVDLLGELAAAVRTRRQA

SEQ ID NO: 75372 - DNA, 1113 bp, Pseudomonas putida KT2440
  CDS (1)..(1113): transl_table=11
ttggcggccggcacccgtgacctgacgagtaacacgatggctgatttaccgatcgatgacttgaacgttgcctccaacgagaccctgatcacccctgatcagctcaagaaggaaatccccctcagcgccaaggccctgcagaccgtgactgccggccgtgaagtggtgcgcaatattctcgacggcaaggaccatcgcctgttcgtcgtggtcggcccttgctccatccacgacatcaaggcagcccacgaatacgccgagcgcctgaaagtgctggccgaagaagtgtccgatacgctgtacctggtcatgcgcgtgtacttcgaaaagccgcgcaccaccgtcggctggaaaggcctgatcaacgatccgtacctggatgactcgttcaagatccaggacggcctgcacatcggccgcaagttgctgctggacctggccgaaatgggcctgccgaccgccaccgaagcgctcgacccgatttcgccgcagtacctgcaagacctgatcagctggtcggccatcggtgcccgcaccaccgaatcgcaaacacaccgcgagatggcctcgggcctgtcctcggcggtgggtttcaagaacggtaccgatggcggcctgaccgttgccatcaatgccctgcagtcggtgtccaagccgcaccgcttcctgggcatcaaccaggaaggcggcgtgtcgatcgtcaccaccaagggcaacccatacggccacgtggtactgcgcggcggcaatggcaagccgaactacgactcggtcagcgtcgccctgtgcgaacaggacctggccaaggccaagatcaaggccaacatcatggtcgactgcagccatgccaactccaacaaggacccggccctgcaaccgctggtgatggagaacgtcgccaaccagattctcgaaggcaaccagtcgatcatcggcctgatggtcgaaagccacctgaactggggctgtcagtccattccgaaaaacctggacgatttgcagtatggcgtgtcgatcacggacgcctgcatcgactggtcggctaccgagaaaaccctgcgcagcatgcatgccaagctcaaggatgtgctgccgcagcgtaagcgcggctga

SEQ ID NO: 75373 - protein, 370 aa, Pseudomonas putida KT2440
MAAGTRDLTSNTMADLPIDDLNVASNETLITPDQLKKEIPLSAKALQTVTAGREVVRNILDGKDHRLFVVVGPCSIHDIKAAHEYAERLKVLAEEVSDTLYLVMRVYFEKPRTTVGWKGLINDPYLDDSFKIQDGLHIGRKLLLDLAEMGLPTATEALDPISPQYLQDLISWSAIGARTTESQTHREMASGLSSAVGFKNGTDGGLTVAINALQSVSKPHRFLGINQEGGVSIVTTKGNPYGHVVLRGGNGKPNYDSVSVALCEQDLAKAKIKANIMVDCSHANSNKDPALQPLVMENVANQILEGNQSIIGLMVESHLNWGCQSIPKNLDDLQYGVSITDACIDWSATEKTLRSMHAKLKDVLPQRKRG

SEQ ID NO: 75374 - DNA, 1062 bp, Pseudomonas putida KT2440
  CDS (1)..(1062): transl_table=11
atgcacgcttccagcctcgccctgcccctgacccagccgcaagcggccaacaccactgtcagcagacgcctgcccagcccgcacctgctcaagcagcagatgccactgcccagcgaactggcccagcaagtccaggcccatcgccaggccatccgcaacatcctcgaaggccgcgacccgcgcctgctggtcatcgtcggcccctgctcgattcatgacccacgctcggccctggaatacgccgaccgcctggccgcccttggccgcgaagtcaacgacaagctgctgctggtgatgcgcgcctacgtcgaaaaaccgcgtactacagtgggctggaaaggcctggcctacgacccgcacctcgatggcagtgacgacatgcactcgggtatcgccttgtctcgcgggctgatgctgagcatgatcgaacgcggcctgccgatcgctaccgagttgctgcaaccgatggccgccggttacttcgacgacctgttggcctgggcggcgatcggcgcacgcaccaccgaatcgcaaatccaccgcgaaatggtcagtggcctggagctgccggtcggcttcaagaacggtacggacggcggcatcgccatcgccagcgacgccatgcgcagcgctgcccacccgcaccgccacttcggtatggatgctcagggccacccggcgatcatcgagaccttgggcaacccggacacacaccttgtactgcgcggcggccacaaaggcccgaaccatgatgccaacagcatcgccatggcccgccaggcgttggccaaggccggtctgcaggcacggatcatggtcgattgcagccacgccaacagcggcaaggacccggcgcgccagccagcggtcttcaatgatgtgctggaacagcgcctggccggcgaccgttcgttggtcggcgtcatgatcgaagggcacttgttcgatggctgccaggcgttgggcaagggcacactgaaatacggtgtgtcgattaccgacggctgcctgggctgggcctcgaccgaaaccctgttgcgtgaggcggcacaaaaactgtag

SEQ ID NO: 75375 - protein, 353 aa, Pseudomonas putida KT2440
MHASSLALPLTQPQAANTTVSRRLPSPHLLKQQMPLPSELAQQVQAHRQAIRNILEGRDPRLLVIVGPCSIHDPRSALEYADRLAALGREVNDKLLLVMRAYVEKPRTTVGWKGLAYDPHLDGSDDMHSGIALSRGLMLSMIERGLPIATELLQPMAAGYFDDLLAWAAIGARTTESQIHREMVSGLELPVGFKNGTDGGIAIASDAMRSAAHPHRHFGMDAQGHPAIIETLGNPDTHLVLRGGHKGPNHDANSIAMARQALAKAGLQARIMVDCSHANSGKDPARQPAVFNDVLEQRLAGDRSLVGVMIEGHLFDGCQALGKGTLKYGVSITDGCLGWASTETLLREAAQKL

SEQ ID NO: 75376 - DNA, 1053 bp, Escherichia coli CFT073
  CDS (1)..(1053): transl_table=11
atgaattatcagaacgacgatttacgcatcaaagaaatcaaagagttacttcctcctgtcgcattgctggaaaaattccccgctactgaaaatgccgcgaatacggtcgcccatgcccgaaaagcgatccataagatcctgaaaggtaatgatgatcgcctgttggtggtgattggcccatgctcaattcatgatcctgtcgcggctaaagagtatgccactcgcttgctgacgctgcgtgaagagctgcaagatgagctggaaatcgtgatgcgcgtctattttgaaaagccgcgtactacggtgggctggaaagggctgattaacgatccgcatatggataacagcttccagatcaacgacggtctgcgtattgcccgcaaattgctgctcgatattaacgacagcggtctgccagcggcgggtgaattcctggatatgatcaccccacaatatctcgctgacctgatgagctggggcgcaattggcgcacgtaccaccgaatcgcaggtgcaccgcgaactggcgtctggtctttcttgtccggtaggtttcaaaaatggcactgatggtacgattaaagtggctatcgatgccattaatgccgccggtgcgccgcactgcttcctgtccgtaacgaaatgggggcattcggcgattgtgaataccagcggtaacggcgattgccatatcattctgcgcggcggtaaagagcctaactacagcgcgaagcacgttgctgaagtgaaagaagggctgaacaaagcaggcctgccagcgcaggtgatgatcgatttcagccatgctaactcgtcaaaacaattcaaaaagcagatggatgtttgtactgacgtttgccagcagattgccggtggcgaaaaggccattattggcgtgatggtggaaagccatctggtggaaggcaatcagagcctcgagagcggggaaccgctggcctacggtaagagcatcaccgatgcctgcattggctgggatgataccgatgctctgttacgtcaactggcgagtgcagtaaaagcgcgtcgcgggtaa

SEQ ID NO: 75377 - protein, 350 aa, Escherichia coli CFT073
MNYQNDDLRIKEIKELLPPVALLEKFPATENAANTVAHARKAIHKILKGNDDRLLVVIGPCSIHDPVAAKEYATRLLTLREELQDELEIVMRVYFEKPRTTVGWKGLINDPHMDNSFQINDGLRIARKLLLDINDSGLPAAGEFLDMITPQYLADLMSWGAIGARTTESQVHRELASGLSCPVGFKNGTDGTIKVAIDAINAAGAPHCFLSVTKWGHSAIVNTSGNGDCHIILRGGKEPNYSAKHVAEVKEGLNKAGLPAQVMIDFSHANSSKQFKKQMDVCTDVCQQIAGGEKAIIGVMVESHLVEGNQSLESGEPLAYGKSITDACIGWDDTDALLRQLASAVKARRG

SEQ ID NO: 75378 - DNA, 1077 bp, Escherichia coli CFT073
  CDS (1)..(1077): transl_table=11
gtgtgcaatagatggttaagaatagaactttcaggagatacaatgcagtcagtcagtaaatcaatctaccgagggaagttgcttagcagtttacctgctgtgggcgagattcataaagaaatcgcagtatcagaagaaaccgtaacatggatctctctgcaacgagagattatagcgaatattttgctgggaaaagatcctcgcttgcttgtgattgttggtccatgctcaatccatgacgttcaggctgccgttgaatatgcgaaacgattgtccgtattacagaataagtacttatcgcaaatgtacattgtaatgcgcacttattttgagaaacctcgaactcgtaaaggctggaaaggaataatgcacgatcctgatctaaatggaagctataatgttgagaaagggatacgatatgctcgccagtgtttgtcctcaatcacaacaatgcgtgtcgcaaccgctacagaattcctcgatcctttccttactccctatattgctgatttaatatgttggggggctgttggtgccagaactactgaatcacaaacgcatcgtcaacttgcgtctggtttacattgtcctgttggatttaaaaacagcactgatggaaatattaacttagctattgatgctattcttgcagcccgtgaacaacatgttgtatatatgacatctttaacaaaatgtatatctaccctattaaccgatggcaatccacatggacatctcatattacgtggtggtagagagccgaactatggtttgtcggatataacgaaggcagtgaaattaatgcatgatgaaggtatcaatcatcgtctgataattgactgtagccatggtaatagtggtaaagtggctgaacggcaaatctctgttgctcgtgaagtcattgataatcggaaaaagatgccgggatatgtagctggaattatgctggaaagctttttacaaggtggaaaacaatcagacagccttccgcgagagtatggtcagtctgttactgatgagtgtctttcatggcaacagacagaacaattattatcaactctggcagcacaactttaa

SEQ ID NO: 75379 - protein, 358 aa, Escherichia coli CFT073
MCNRWLRIELSGDTMQSVSKSIYRGKLLSSLPAVGEIHKEIAVSEETVTWISLQREIIANILLGKDPRLLVIVGPCSIHDVQAAVEYAKRLSVLQNKYLSQMYIVMRTYFEKPRTRKGWKGIMHDPDLNGSYNVEKGIRYARQCLSSITTMRVATATEFLDPFLTPYIADLICWGAVGARTTESQTHRQLASGLHCPVGFKNSTDGNINLAIDAILAAREQHVVYMTSLTKCISTLLTDGNPHGHLILRGGREPNYGLSDITKAVKLMHDEGINHRLIIDCSHGNSGKVAERQISVAREVIDNRKKMPGYVAGIMLESFLQGGKQSDSLPREYGQSVTDECLSWQQTEQLLSTLAAQL

SEQ ID NO: 75380 - DNA, 1140 bp, Escherichia coli CFT073
  CDS (1)..(1140): transl_table=11
atgtgttatcgttacgtcatcctcgctgaggatcaactatcgcaaacgagcataaacaggatcgccatcatgcagaaagacgcgctgaataacgtacatattaccgacgaacaggttttaatgactccggaacaactgaaggccgcttttccattaagcctgcaacaagaagcccagattgctgactcgcgtaaaaccatttcagatattatcgccgggcgcgatcctcgtctgctggtagtatgtggtccttgttccattcatgatccggaaactgctctggaatatgctcgtcgatttaaagcccttgccgcagaggtcagcgatagcctctatctggtaatgcgcgtctattttgaaaaaccccgtaccactgtcggctggaaagggttaattaacgatccccatatggatggctcttttgatgtagaagccgggctgcagatcgcgcgtaaattgctgcttgagctggtgaatatgggactgccactggcgacggaagcgttagatccgaatagcccgcaatacctgggcgatctgtttagctggtcagcaattggtgctcgtacaacggaatcgcaaactcaccgtgaaatggcctccgggctttccatgccggttggttttaaaaacggcaccgatggcagtctggcaacggcaattaacgctatgcgtgccgccgcccagccgcaccgttttgttggcattaaccaggcagggcaggttgcgttgctacaaactcaggggaatccggacgggcatgtgatcctgcgcggtggtaaagcgccaaactatagccctgcggatgttgcgcaatgtgaaaaagagatggaacaggcgggactgcgcccgtctctgatggtagattgcagccacggtaattccaataaagattatcgccgtcagcctgcggtggcagaatccgtggttgctcaaatcaaagatggcaatcgctcaattattggtctgatgatcgaaagtaatatccacgagggcaatcagtcttccgagcaaccgcgcagtgaaatgaaatacggtgtatccgtaaccgatgcctgcattagctgggaaatgaccgatgccttgctgcgtgaaattcatcaggatctgaacgggcagctgacggctcgcgtggcttaa

SEQ ID NO: 75381 - protein, 379 aa, Escherichia coli CFT073
MCYRYVILAEDQLSQTSINRIAIMQKDALNNVHITDEQVLMTPEQLKAAFPLSLQQEAQIADSRKTISDIIAGRDPRLLVVCGPCSIHDPETALEYARRFKALAAEVSDSLYLVMRVYFEKPRTTVGWKGLINDPHMDGSFDVEAGLQIARKLLLELVNMGLPLATEALDPNSPQYLGDLFSWSAIGARTTESQTHREMASGLSMPVGFKNGTDGSLATAINAMRAAAQPHRFVGINQAGQVALLQTQGNPDGHVILRGGKAPNYSPADVAQCEKEMEQAGLRPSLMVDCSHGNSNKDYRRQPAVAESVVAQIKDGNRSIIGLMIESNIHEGNQSSEQPRSEMKYGVSVTDACISWEMTDALLREIHQDLNGQLTARVA

SEQ ID NO: 75382 - DNA, 1071 bp, Vibrio vulnificus CMCP6
  CDS (1)..(1071): transl_table=11
atgcagaaaagtgaactaagcaatattaatatcagcgatgaacaagtgctgattacgccagaacagctaaaacagaaactgccactgagcgacaacgcccgccgcttcattcaagagtcgcgtaataccgtcgccaatattattcataagcaagatcatcgtctgctggtggtttgtggtccttgttctattcacgatctggacgcggcaaaggattacgcgcgtcgcctaaaagcgctctccgccgagttaagcgatcaactgtatattgtgatgcgtgtttactttgaaaaacctcgtactactgtgggttggaaagggctcatcaacgaccctcatctggatggtagcttcgatattgagcatggtctgcatgttggccgtcaattgctggtggagctggctgaaatggagatccctctggcgacagaagcactcgacccaattagcccgcaatacttggctgatacattcagttgggctgcgattggtgcgcgtacgacagaatcacaaactcaccgtgaaatggccagtggtttgtctatgccgattggttttaaaaatggcacggatggcagcttgtcaacggcgatcaacgcaatgcaagcggcctcttcaagccaccgttttatggggatcaaccgtgaaggccaagtggcattgctgacgactcaaggtaacccaaatggtcacgtgattttgcgtggtggtaagcagaccaactacgattctgtgtcggtggcggagtgtgagcaagacatggccaaagtgggtttagatgcgtcattgatggtggattgtagccatgccaattcacgcaaagattaccgtcgtcagcctttagtcgccgaagacgtgattcatcaaattcgcgaaggcaacaaatcgatcattggtttgatgattgaaagccacattaatgaaggtaatcaatcctcagatttaccgctttctgagatgcggtacggtgtttctattaccgatgcctgtatcaattggcaggcaactgaggcactattgcgtaaagcacacaaagagttagtgccacatttagaaaaccgtctcaaataa

SEQ ID NO: 75383 - protein, 356 aa, Vibrio vulnificus CMCP6
MQKSELSNINISDEQVLITPEQLKQKLPLSDNARRFIQESRNTVANIIHKQDHRLLVVCGPCSIHDLDAAKDYARRLKALSAELSDQLYIVMRVYFEKPRTTVGWKGLINDPHLDGSFDIEHGLHVGRQLLVELAEMEIPLATEALDPISPQYLADTFSWAAIGARTTESQTHREMASGLSMPIGFKNGTDGSLSTAINAMQAASSSHRFMGINREGQVALLTTQGNPNGHVILRGGKQTNYDSVSVAECEQDMAKVGLDASLMVDCSHANSRKDYRRQPLVAEDVIHQIREGNKSIIGLMIESHINEGNQSSDLPLSEMRYGVSITDACINWQATEALLRKAHKELVPHLENRLK

SEQ ID NO: 75384 - DNA, 1053 bp, Vibrio vulnificus CMCP6
  CDS (1)..(1053): transl_table=11
atgccactaaaaacagatgaattgagaacccaacctttgggtccaatgccaactcccgctgagttgagccaagcccatccgattaccgacgatgtggccgagcgaattgcgaaatctcgcagacaaattgaagatattttaacgggtaaggacaaccgccttttggtgattgtcggtccttgctctgtgcacgatactgaagccgcgattgattacgcgacgcgtttaagctcgattcaagagctgtatcgcgatgagctgttcatcgttatgcgcacctactttgaaaaaccacgcactgtggtgggctggaaaggcctcattaccgacccaaatctggatggctcttacgcactagaagcaggcctgcataaagcacgtaagctattgctcgacatcaacaaacttggccttgctaccgcaactgagtttcttgacatgatcactggtcaatatattgctgatttgatcacttggggcgcgattggtgctcgaaccactgaatcgcaaattcaccgtgaaatggcatctgcactctcctgcccggttggctttaaaaacggcaccaacggcaacgtgaaaattgcgattgacgcaattcgagcatcaaaagcttcgcattacttctactctccagataaaaatggccgcatgaccgtttaccgcaccagtggtaacccatatggacacattattctgcgtggtggtgataccggccctaactttgatgcaaaatcggttgagtctgcctgtcaatcactggctgagttcgatttgccacagcgtttgatcgttgatttcagtcacgcgaactgtgaaaagcaacatcgtaaacagctcgatgtcgcgcaagacatttgtaaccagctaaaagcaggcagcacttatatcgcaggcatcatggcagaaagctttattaccgaaggcaatcagccgatgactgaccttgataacttgacctacggccaatcgatcactgacccttgcctaagctgggaacacacagcgcaaatgctggacatgcttgcgactgctgtaaaagaaagccgttaa

SEQ ID NO: 75385 - protein, 350 aa, Vibrio vulnificus CMCP6
MPLKTDELRTQPLGPMPTPAELSQAHPITDDVAERIAKSRRQIEDILTGKDNRLLVIVGPCSVHDTEAAIDYATRLSSIQELYRDELFIVMRTYFEKPRTVVGWKGLITDPNLDGSYALEAGLHKARKLLLDINKLGLATATEFLDMITGQYIADLITWGAIGARTTESQIHREMASALSCPVGFKNGTNGNVKIAIDAIRASKASHYFYSPDKNGRMTVYRTSGNPYGHIILRGGDTGPNFDAKSVESACQSLAEFDLPQRLIVDFSHANCEKQHRKQLDVAQDICNQLKAGSTYIAGIMAESFITEGNQPMTDLDNLTYGQSITDPCLSWEHTAQMLDMLATAVKESR

SEQ ID NO: 75386 - DNA, 1053 bp, Vibrio vulnificus CMCP6
  CDS (1)..(1053): transl_table=11
atgttccaaacagatgatgtaagaattaataacgttaaagagttacttccaccagtagctgttttagagaagtacccggcgactgaaaccgcttcttcgacaactttccaatcgagaaacgacattcacaacattctcatcggcaaggacgatcgcctgctggttattgtcggcccttgctctatccacgatcctgtggccgcggttgaatacggcaagcgtttgaaaacgttgcgtgacgagctcaaaggtgagctcgaaattgttatgcgcgtttactttgaaaagccacgtaccactgtgggttggaaaggtttgattaatgacccgtaccttaacgacacctacaagttgaatgatggtttacgcatgggccgaaaactgttgttggatcttaccgatatgggtcttccaacggcgagtgagttccttgacatgatcacaccacagtatgtggctgatttgatcagttggggtgcgattggtgcacgtactacggaatctcaggttcaccgtgaactggcgtcgggtctttcttgtccggttggttttaaaaatggcacggatggcaacattaagattgcaagtgatgcgattcgctcagcaagtgcttctcaccatttcctatcggtaacgaaatacggccattctgctatcgttgaaaccgcgggtaatccagactgccacattattttgcgtggtggtaaagagccaaactacagtgcagcgcatgtttcagcagtaaaagaagagctagctacatcgggtttaccacaaaaagtgatgatcgacttcagccacgccaacagctccaagcagtataagcgtcaaatgttggtggccgacgatgtctctgagcagctagcggccggtgaagaggcaatctttggggtgatgatcgaatcacatcttgtggaaggtcgacaagatcttgttgatggtaaagcggcgacttatggtcagtcgattaccgacgcttgcatcggttgggaagatactgaaactgtgcttcgccaattggcaaatgcagtggcagctcgtcgagcgaaatag

SEQ ID NO: 75387 - protein, 350 aa, Vibrio vulnificus CMCP6
MFQTDDVRINNVKELLPPVAVLEKYPATETASSTTFQSRNDIHNILIGKDDRLLVIVGPCSIHDPVAAVEYGKRLKTLRDELKGELEIVMRVYFEKPRTTVGWKGLINDPYLNDTYKLNDGLRMGRKLLLDLTDMGLPTASEFLDMITPQYVADLISWGAIGARTTESQVHRELASGLSCPVGFKNGTDGNIKIASDAIRSASASHHFLSVTKYGHSAIVETAGNPDCHIILRGGKEPNYSAAHVSAVKEELATSGLPQKVMIDFSHANSSKQYKRQMLVADDVSEQLAAGEEAIFGVMIESHLVEGRQDLVDGKAATYGQSITDACIGWEDTETVLRQLANAVAARRAK

SEQ ID NO: 75388 - DNA, 1071 bp, Vibrio vulnificus CMCP6
  CDS (1)..(1071): transl_table=11
atgcctacgctcagcaaattgattcactccactccttgtggaacactcccttctgtggaagagatcattcaacacgcctcactggacgaagagagcgaagcgtttatccgacaacgtcgccaagacatcactcgaattctgaatggccaagaccctcgattactggtgatcatcggcccatgttcaattcacgacccgcaagcaggcctagaatatgcgcagaaactggccaacattcagcatcagcatgaaaagcaacttctgattgtgatgcgaacttactttgaaaaaccgcgcacacgcgcaggatggaaagggctgatcgtcgatcccgatctcgataacagccacgacattaataaaggtctgcggcttgctcgacaattcttacagcaagtcatcaagcttggccttgcgacggcaaccgagtatttagacaccacgacttacccctatatttctgacctcatttgctggggtgccattggcgcgaggacaactgaatctcaaattcaccgtcaaatggcctcggcgcttccctgtcctattggtttcaaaaacgggaccgacggcaatgttgatattgctatcgacgcgatacacgcggcaaactcaccccatctcatctgtgtgccaggatttggggcacgtactctcacagccatcagtcatggtaaccccaatggccatatcattttgcgaggtggcaaaacgccaaactacaccaccgagcatgtttgccaaatcagccaacaactggaagccaacgatcttaacccgcgcctgatcattgattgcagccatggcaatagcctgaaagtggcaaagaaccaactcgatgtggcgagaaacatcgcctgtcagttgatcgaaggagaaaaatgcattgcaggcgtgatggcggagagcttcttggtagcaggcgcgcaaaagatcaccgatcgtccgttggtcaaaggcatgtcgattactgatgaatgtttggggtgggaagagacggaaagtattctcaatatttttgcggaagcggtgaatgtcgtgatgacggagcgcttttccaccgttgcctaa

SEQ ID NO: 75389 - protein, 356 aa, Vibrio vulnificus CMCP6
MPTLSKLIHSTPCGTLPSVEEIIQHASLDEESEAFIRQRRQDITRILNGQDPRLLVIIGPCSIHDPQAGLEYAQKLANIQHQHEKQLLIVMRTYFEKPRTRAGWKGLIVDPDLDNSHDINKGLRLARQFLQQVIKLGLATATEYLDTTTYPYISDLICWGAIGARTTESQIHRQMASALPCPIGFKNGTDGNVDIAIDAIHAANSPHLICVPGFGARTLTAISHGNPNGHIILRGGKTPNYTTEHVCQISQQLEANDLNPRLIIDCSHGNSLKVAKNQLDVARNIACQLIEGEKCIAGVMAESFLVAGAQKITDRPLVKGMSITDECLGWEETESILNIFAEAVNVVMTERFSTVA

SEQ ID NO: 75390 - DNA, 1086 bp, Bradyrhizobium japonicum USDA 110
  CDS (1)..(1086): transl_table=11
gtgctgagcacgactgacgatcttcgtatccgtgaactgaaagagctgagcacgccggatgaggtaatgcgggaggtcccgcgcacgctcaccgcaacgcgtgtggtgatggcggcgcgcaacgccatccatgccatcctcaccggccaggacgaccgcctgctggtggtggtcggcccgtgctcggtgcatgatccccgggccgcgctcgactacgctgagcgtctgacaaaactgcgcgaggacctcgccgaccagctcgagatcgtaatgcgggtctatttcgagaagccgcgcaccaccgtcggctggaagggcctgatcaacgaccccgatctcgacggcagcttcgacatcaacaagggcctgcggctggcgcgcaacgtgctgtcagcggtgaacaatctcggcctcccggccggcgccgaattcctggacatgacgacgccgcaatacatcgctgacctcgtgtcctgggccgcgatcggcgcgcgcacgaccgagagccagatccatcgcgagctggcctccgggctgtcctgcccggtcggcttcaagaacggcaccgatggcaatgtgcggatcgcggcggacgcagtgaagtcggcctcgcatccgcatcatttcatggcggtgaccaagctcggccgctcggcgatcgcctcgaccgcgggcaacgaggactgccacatcatcctgcgcggcggcagcacgccgaactacgatgcggcaagcgtcgcggcggcctgcaacgagctggcgaaatccggcgtcgcgccgctggtgatggtggatgcgagccacgccaattcgagcaagaagccggagaaccagccgctggtcatggccgacattgccggccagatttccggtggcgagagccgcatcatgggtgtgatgatcgagagcaatctcgtcgccggccgccaggacgtggttccgggcaagccgctcacctacggccagagcatcacggacggctgtatcgactgggcgaccacggcaactgtgctcgagcagctcgccgatgcggtcgaaatccggcgcaacgcccagcgcgcggggctgcacgagcgctcggcgtaa

SEQ ID NO: 75391 - protein, 361 aa, Bradyrhizobium japonicum USDA 110
MLSTTDDLRIRELKELSTPDEVMREVPRTLTATRVVMAARNAIHAILTGQDDRLLVVVGPCSVHDPRAALDYAERLTKLREDLADQLEIVMRVYFEKPRTTVGWKGLINDPDLDGSFDINKGLRLARNVLSAVNNLGLPAGAEFLDMTTPQYIADLVSWAAIGARTTESQIHRELASGLSCPVGFKNGTDGNVRIAADAVKSASHPHHFMAVTKLGRSAIASTAGNEDCHIILRGGSTPNYDAASVAAACNELAKSGVAPLVMVDASHANSSKKPENQPLVMADIAGQISGGESRIMGVMIESNLVAGRQDVVPGKPLTYGQSITDGCIDWATTATVLEQLADAVEIRRNAQRAGLHERSA

SEQ ID NO: 75392 - DNA, 1095 bp, Xylella fastidiosa Temecula1
  CDS (1)..(1095): transl_table=11
atgccaccatttaccgacgacctccgtatccgaaaaattgaaccactgacacctcctaacaagctcctcttacaactaccatgcgatgagcaggcatcgctgactgttgcgacctcacgcaacgcactgcacgatatcctgcacggccacaatgaccgtttagccgtcgtgataggcccatgctcaatccatgatccaattgcagccattgattactcgcaacgtctacgcccattgcgtgagatgtacaaggatgcactagaaatcgtgatgcgagtttactttcagaaaccgcgcaccactattggttggaaaggattggtcaacgatccggatcttgatggcagcttccagatcaataagggcttgcatatcgcgcgcaacctgctgcgcgatatcaatcatctcggcttacccgctggtgtggaatttctagacacgatttcgccgcaatatctggctgacttagtcgcctggggtgccattggtgctcgcaccactgaaagccaaatacaccgtgaaatggcttcaggtttatcgtgcccgattggctttaaaaacagtaccagtggtgatgtgaagattgctgctgacgcgattaaagcagcttcgcatccgcaccatttcctttcagtgacaaagacaggtgttgccgcagtcgtcgccacccagggtaaccccgattgtcacgtgattctgcgtggaggcaaggtcccgaattacgacgcaatcaatgtcgaagctgccagccaaacattgcttaaatccaagctaccggtgcgactgatgattgatgcgagccatgccaatagcggcaaaaatccaaacaatcaacctaaggtgatcgagaacatcgtagaacagcttaaagccggtgaacgccgcatcatcggtgtcatgattgaaagccacattgttggtggccggcaagaattagtccttggaaacacacttaactatggacagagcattaccgatgcttgcatcgactgggatacctcggttgcaatgttagaacagctcgctcaggccgtacgcgtcagacagactctaccaacgaccactacagctaacaaaacatcaaaaacccaataa

SEQ ID NO: 75393 - protein, 364 aa, Xylella fastidiosa Temecula1
MPPFTDDLRIRKIEPLTPPNKLLLQLPCDEQASLTVATSRNALHDILHGHNDRLAVVIGPCSIHDPIAAIDYSQRLRPLREMYKDALEIVMRVYFQKPRTTIGWKGLVNDPDLDGSFQINKGLHIARNLLRDINHLGLPAGVEFLDTISPQYLADLVAWGAIGARTTESQIHREMASGLSCPIGFKNSTSGDVKIAADAIKAASHPHHFLSVTKTGVAAVVATQGNPDCHVILRGGKVPNYDAINVEAASQTLLKSKLPVRLMIDASHANSGKNPNNQPKVIENIVEQLKAGERRIIGVMIESHIVGGRQELVLGNTLNYGQSITDACIDWDTSVAMLEQLAQAVRVRQTLPTTTTANKTSKTQ

SEQ ID NO: 75394 - DNA, 1077 bp, Pseudomonas syringae pv. tomato str. DC3000
  CDS (1)..(1077): transl_table=11
atggctgatttaccgattaacgacctcaacgttgcctccaacgagactctgatcacaccggatcagctcaagcgcgacatcccgctgaccgacgctgcactgcagactgtcagccagggtcgcgaagtgattcgcaacattctcgatggcaatgatcaccgcctgttcatcgtgatcggcccgtgctcgatccacgacctgaaagcggccaaagagtacgccgagcgcctcaaggtactggcggcggaagtttccgacacgctgtatctggtcatgcgcgtgtacttcgagaagcctcgcaccacagtgggctggaaaggcctgatcaacgacccgtacctggatgactcgttcaagatccaggatggcttgcacatcggccgccaactgctgctggacctggctgaaatgggcctgccgaccgcaaccgaagcgctggacccgatctccccgcaatacctgcaggacctgatcagctggtcggccatcggcgcgcgcaccaccgaatcgcagacccaccgcgagatggcttccggcctgtcttcggccgtcggcttcaagaacggcaccgacggcggcctgaccgttgccatcaacgctctgcagtcggtctcaagcccgcatcgcttcctgggcatcaaccaggaaggcggcgtgtcgatcgtgaccaccaagggcaacgcctatggccacgtcgtgctacgcggtggcaatggcaagcccaactatgattcggtcagcgtcgcgctctgcgagcaggcgctgaacaaggccggcattcgccccaacatcatggtcgattgcagccacgccaactccaacaaggacccggccctgcaaccgctggtgatggaaaacgtcgccaaccagattctggaaggcaacgagtcgatcatcggcctgatggtcgagagccatctgaactggggttgtcaggcgattcccaaggatctgtcggaattgcagtacggcgtctccatcaccgatgcctgcatcgactgggaaagcactgaaaaaaccctgcgcagcatgcatgccaagctcaagggcgtactgccggcgcgcacgcgtaaatga

SEQ ID NO: 75395 - protein, 358 aa, Pseudomonas syringae pv. tomato str. DC3000
MADLPINDLNVASNETLITPDQLKRDIPLTDAALQTVSQGREVIRNILDGNDHRLFIVIGPCSIHDLKAAKEYAERLKVLAAEVSDTLYLVMRVYFEKPRTTVGWKGLINDPYLDDSFKIQDGLHIGRQLLLDLAEMGLPTATEALDPISPQYLQDLISWSAIGARTTESQTHREMASGLSSAVGFKNGTDGGLTVAINALQSVSSPHRFLGINQEGGVSIVTTKGNAYGHVVLRGGNGKPNYDSVSVALCEQALNKAGIRPNIMVDCSHANSNKDPALQPLVMENVANQILEGNESIIGLMVESHLNWGCQAIPKDLSELQYGVSITDACIDWESTEKTLRSMHAKLKGVLPARTRK

SEQ ID NO: 75396 - DNA, 1083 bp, Pseudomonas syringae pv. tomato str. DC3000
  CDS (1)..(1083): transl_table=11
atgaattcgcccgttgccgtaaaatcgtccgacctgtccagccatgccgtcacattggcggacaacaaccccgcctcgaaacgcctgcccagcacgcttgagcttaaaatgcgcctgccactcaatgccacgctgaccgaacaggttgcagcccatcgccgcgccgtgcgcgccattctcaatggcgaagactcacgactgctggtcatcgtgggcccctgctcgatccatgatccgcaatccgcgctggaatatgccgagcgactcgccagcctggccgcagaagtcagcgatcagatgctgctggtgatgcgtgcctacgtcgaaaaaccgcgcaccaccgtaggctggaaaggcctggcgtacgaccccgacctggatggcagtgacgacatggccggcggcttgacgctgtcgcggcagttgatgcgtgacatgctgggcatgggcctgccgatcgccaccgaaatactgcagcccatggctgccggctacttcgacgacctgctcagctgggtcgccattggcgctcgcaccaccgaatcgcagatccaccgggaaatggccagcgggctgcccatggcggttggcttcaagaacggcacggatggcggcgtagcggtggccagcgacgcaatgcgctcagcggcgcacccgcatcgtcatttcggcatggacgctcacggtcacccggcgatcatcgagacgcagggcaatccggacacgcacatcgtgcttcgcggcggacacagcggccccaactacgatcgccagagcgttgctcaggtgcaggccggcctgagcaataacgccatagcgtcgcgaatcatggtcgattgcagccacgccaacagcggcaaggacccggcgcgtcagcctcacgtgttcaacgatgtgcttgaacagcgcttgtccggcaacccgtcactgattggcatgatgatcgagagccatctacacgatggctgccaggcgctgggcgaaacgctgcagtacggggtgtcggttaccgacggctgcctgggctggaccgcgaccgagcagttgttgcgtgaagcggtcgaccgcttgcgttacagataa

SEQ ID NO: 75397 - protein, 360 aa, Pseudomonas syringae pv. tomato str. DC3000
MNSPVAVKSSDLSSHAVTLADNNPASKRLPSTLELKMRLPLNATLTEQVAAHRRAVRAILNGEDSRLLVIVGPCSIHDPQSALEYAERLASLAAEVSDQMLLVMRAYVEKPRTTVGWKGLAYDPDLDGSDDMAGGLTLSRQLMRDMLGMGLPIATEILQPMAAGYFDDLLSWVAIGARTTESQIHREMASGLPMAVGFKNGTDGGVAVASDAMRSAAHPHRHFGMDAHGHPAIIETQGNPDTHIVLRGGHSGPNYDRQSVAQVQAGLSNNAIASRIMVDCSHANSGKDPARQPHVFNDVLEQRLSGNPSLIGMMIESHLHDGCQALGETLQYGVSVTDGCLGWTATEQLLREAVDRLRYR

SEQ ID NO: 75398 - DNA, 1074 bp, Vibrio parahaemolyticus RIMD 2210633
  CDS (1)..(1074): transl_table=11
atgcaaaaaagtgaattgagcaatattaacatcagcgatgaacaggttcttattacgccagatgagctaaaagtgaagcttcctcttagtgaaaaggcacgccgttttattcaagaatctcgccaaaccatcgccaacatcattcacaaaaaagaccatcgcctacttgtcgtatgtggaccatgctctatccatgacattgaagccgcaaaggattacgcgaagcgtctaaaagctctttctgaacaactaagcgaccaactgtatattgtaatgcgtgtttactttgagaagccgcgcaccacggtcggctggaaaggcctgatcaatgacccacacctagatggcagcttcgacattgaacacggtctgcatgtaggacgtgaactgctggtggaactggcggaaatggaaatcccacttgcaaccgaagctcttgacccaattagcccacaatacttagccgatacttttagttgggcagcgatcggcgcacgcacaacagaatcacaaacacaccgtgagatggctagtggtctttcgatgccgattggctttaagaatggcacagatggtagtttggcaaccgcaatcaatgcgatgcaggcagcctcttctagccaccgctttatgggtatcaaccgtgaaggtcaagttgcgttgctcacaacccaaggtaacccgaatggccacgtgatcctacgtggtggtaaacagacgaactacgattcagtatccgttacggaatgcgaacaagaaatggcgaaatcaggtcttgaagcgtcattgatggtggattgcagccatgcaaactcacgcaaagattaccgtcgtcagccattggtcgcagaagatgtgattcaccaaatccgtgaagggaacaagtcgatcatcggtttgatgatcgagagccacatcaatgaaggtaatcaatcttctgagctggcgttggatgagatgaaatacggcgtatctatcactgacgcttgtattaattgggagtcaactgaggcactattacgtcatgcacacgaagagctggtgcctttcttagaaaaccgccttaaaggctaa

SEQ ID NO: 75399 - protein, 357 aa, Vibrio parahaemolyticus RIMD 2210633
MQKSELSNINISDEQVLITPDELKVKLPLSEKARRFIQESRQTIANIIHKKDHRLLVVCGPCSIHDIEAAKDYAKRLKALSEQLSDQLYIVMRVYFEKPRTTVGWKGLINDPHLDGSFDIEHGLHVGRELLVELAEMEIPLATEALDPISPQYLADTFSWAAIGARTTESQTHREMASGLSMPIGFKNGTDGSLATAINAMQAASSSHRFMGINREGQVALLTTQGNPNGHVILRGGKQTNYDSVSVTECEQEMAKSGLEASLMVDCSHANSRKDYRRQPLVAEDVIHQIREGNKSIIGLMIESHINEGNQSSELALDEMKYGVSITDACINWESTEALLRHAHEELVPFLENRLKG

SEQ ID NO: 75400 - DNA, 1053 bp, Vibrio parahaemolyticus RIMD 2210633
  CDS (1)..(1053): transl_table=11
atgcctataaaaacagatgaattgagaacccaacctttgggtccaatgcctaccccagcggagctaggtagtgtacatccgatcacggatgacgttgcagatcgcatcgctcaatctcgtcgtcagattgaaaacattttaacaggtgaagacgatcgccttcttgctatcgttggtccatgttctgttcacgatactgaagccgcaattgattacgcgaaacgcttgagtgaaatccaagataagtacaaagacgagctatttatcgttatgcgtacttactttgaaaagcctcgtacagtagttggttggaaaggtcttatcaccgaccctaacctagacggttcttacgcgcttgaagctggccttcacaaagctcgtaaactgctactggatatcaacaagcttggtcttgcgactgctactgagtttcttgatatgatcactggccaatacattgcggatttgatcacttggggcgcaattggcgcacgtacgacagaatctcaaattcaccgtgaaatggcatcagcgctatcttgccctgttggctttaaaaatggcacaaacggtaatgtgaaaatcgcgattgacgcgattcgtgcctcccaagcttcacactacttctactcgccagataagaatggtcgtatgacggtgtaccgcacaagtggcaacccattcggtcatattattttgcgtggcggcgaaaaaggtccaaactttgacgaagcatctgtgaagcaagcgtgtgattcacttgctgagtttggtttacctgagcgtcttattgtagacttcagtcatgcaaactgtcagaagcagcaccgaaaacaacttgatgttgcgagcgacatttgtactcaaattaagtcaggcagcactcgcattgcgggtatcatggcggaaagcttcattatggaaggcaaccagccaatgactgacattaacaacctaacttacggtcaatcaattactgacccttgtttaggttgggacgatacagtaactatgctagatatgctggcagaagctgtaaaatccactaagtaa

SEQ ID NO: 75401 - protein, 350 aa, Vibrio parahaemolyticus RIMD 2210633
MPIKTDELRTQPLGPMPTPAELGSVHPITDDVADRIAQSRRQIENILTGEDDRLLAIVGPCSVHDTEAAIDYAKRLSEIQDKYKDELFIVMRTYFEKPRTVVGWKGLITDPNLDGSYALEAGLHKARKLLLDINKLGLATATEFLDMITGQYIADLITWGAIGARTTESQIHREMASALSCPVGFKNGTNGNVKIAIDAIRASQASHYFYSPDKNGRMTVYRTSGNPFGHIILRGGEKGPNFDEASVKQACDSLAEFGLPERLIVDFSHANCQKQHRKQLDVASDICTQIKSGSTRIAGIMAESFIMEGNQPMTDINNLTYGQSITDPCLGWDDTVTMLDMLAEAVKSTK

SEQ ID NO: 75402 - DNA, 1053 bp, Vibrio parahaemolyticus RIMD 2210633
  CDS (1)..(1053): transl_table=11
atgtttcaaactgatgatgtaagaattaatagagtaaaagagttattgccccctgttgcagttctagagaagttcccagcgaccgaaaccgcttcttcgaccacttttgattgccgtaatgccattcacaatattcttgaaggaaaagatgatcgtttacttgtgatcgttggtccttgctctatccatgatcctgcagctgcagttgaatacggcaaaaagctgaaagtgttgcgtgatgaacttggtgagcaactggaagttgtgatgcgagtttactttgaaaaaccacgtacgacagtcggctggaaaggtttgatcaacgacccatacctgaacgacacatttaagctaaatgacggtcttcgtattggacgtaagctgcttttggatctcactgacatgggcctaccaacagcgagtgaattcctagacatgattacgcctcaatacgttgcggatttgatcagctggggcgcgattggtgcacgcacgacggaatcgcaagttcaccgcgaactcgcttctggtctttcttgcccggttggtttcaaaaacggtactgacggtaacattaaaatcgcgagtgatgctattcgctctgcaagcgcttctcaccatttcctatcggtaacgaagtacggtcattcagcgattgttgaaaccgcaggtaacccagactgccacatcattttacgtggtggtaaagaaccaaactacagtgcagcacacgttgctcaaatcaaagacgagttggacgcggctggtctaccgaagaaagtgatgatcgattttagccacgcgaacagctctaagcagttcaaacgtcaaatgcttgtgtctgatgatgtatcagagcaaatcgctggtggtgaagatgcaatctttggcgtgatgatcgagtctcatttggttgaaggccgccaagatttagtggatggtaaagtggcaacttacggtcagtcgattactgatgcatgtattggttgggacgatacggaaacggtacttcgtcagctttctgaagcagtaaaagcgcgccgtagcaaataa

SEQ ID NO: 75403 - protein, 350 aa, Vibrio parahaemolyticus RIMD 2210633
MFQTDDVRINRVKELLPPVAVLEKFPATETASSTTFDCRNAIHNILEGKDDRLLVIVGPCSIHDPAAAVEYGKKLKVLRDELGEQLEVVMRVYFEKPRTTVGWKGLINDPYLNDTFKLNDGLRIGRKLLLDLTDMGLPTASEFLDMITPQYVADLISWGAIGARTTESQVHRELASGLSCPVGFKNGTDGNIKIASDAIRSASASHHFLSVTKYGHSAIVETAGNPDCHIILRGGKEPNYSAAHVAQIKDELDAAGLPKKVMIDFSHANSSKQFKRQMLVSDDVSEQIAGGEDAIFGVMIESHLVEGRQDLVDGKVATYGQSITDACIGWDDTETVLRQLSEAVKARRSK

SEQ ID NO: 75404 - DNA, 1053 bp, Salmonella enterica subsp. enterica serovar Typhi Ty2
  CDS (1)..(1053): transl_table=11
atgaattatcagaatgacgatttacgcattaaagaaatcaacgagttattacctccggtcgcgctgctggaaaagtttcccgccacggaaaatgcagcaaataccgttgctcacgcacgcaaagccatccataaaattctcaaaggcaatgacgatcgtctgctggtggtgatcggtccttgttcaattcatgatccggcagcggcgaaagagtatgccgcccgtttgctggcgctacgcgatgagcttcaaggcgagcttgaaattgtcatgcgcgtctattttgagaaaccgcgtactaccgtcggctggaaagggctgattaacgatccgcacatggataacagcttccagattaacgacggtctgcgtattgcgcgcaaactgctgctggatattaacgacagcggcctgcctgccgccggcgaattcctcgatatgatcacgccgcaatatctggccgatctgatgagctggggcgccattggcgcacggactactgaatcccaggttcatcgcgaactggcgtctggcctctcttgtccggtcggttttaaaaatggtactgatggcacgattaaagtcgccattgacgccatcaacgccgccggcgcgccgcattgcttcctctccgtcactaaatggggtcattcggcgattgtgaataccagcggcaacggcgactgccatatcattctgcgcggcggtaaagcgccaaactatagcgcgcaacatgttgctgaggtgaaagaaggcctcatcaaagcgggactgacgccgcaggtcatgatcgatttcagccatgccaactcctgtaagcaatttcaaaagcagatggaggtttgcgccgatgtctgtcagcagatagcgggcggtgaaaaagcgattattggcgtgatggtagagagtcatctggtagaaggaaaccagagtctggaaagcggtcagccgctgacctacggtaaaagcattactgacgcctgtattggctgggaagataccgatgcgctgcttcgtcagttgtcggcagcggtaaaagcccgtcgaggttaa

SEQ ID NO: 75405 - protein, 350 aa, Salmonella enterica subsp. enterica serovar Typhi Ty2
MNYQNDDLRIKEINELLPPVALLEKFPATENAANTVAHARKAIHKILKGNDDRLLVVIGPCSIHDPAAAKEYAARLLALRDELQGELEIVMRVYFEKPRTTVGWKGLINDPHMDNSFQINDGLRIARKLLLDINDSGLPAAGEFLDMITPQYLADLMSWGAIGARTTESQVHRELASGLSCPVGFKNGTDGTIKVAIDAINAAGAPHCFLSVTKWGHSAIVNTSGNGDCHIILRGGKAPNYSAQHVAEVKEGLIKAGLTPQVMIDFSHANSCKQFQKQMEVCADVCQQIAGGEKAIIGVMVESHLVEGNQSLESGQPLTYGKSITDACIGWEDTDALLRQLSAAVKARRG

SEQ ID NO: 75406 - DNA, 1083 bp, Coxiella burnetii RSA 493
  CDS (1)..(1083): transl_table=11
atgcagaaaactgacaatttaagaataaaagccatccaccccctgatgctccccgcccttctcatcgaagagctgcccatcacagccgctgtagcttcaaccgtcaacctagctcgattagctgccagagacatcattcacggccaagatgaccgtttgttagtagtccttggcccttgctccattcacgacgttaaagccgccctcgaatacgctaatcgactcaaacgctgtattgatcgacacgctaaggaactgtgcatcatcatgcgcgtttattttgaaaaaccccgaacgaccgttggatggaagggcttgattaacgacccccagctcgatggaagtttccacattaaccaagggctgcgggtcgcccggcgtttactgctcgacattaatgaaatcggggttcctaccggaagcgaatttctagacaccattataccccagtatatttctgatttaacttcgtggtccgccatcggcgctcgcacgaccgaaagccaaacccaccgagagctagcttctggcctttcaatgccaattggcttcaaaaacggtaccacgggcaatgtccaaatcgccattgatgcagtgctggctgcccgacaagcccatcattttttaggggtatccaaacaaggcatcgctgctattatcattacaaaaggaaaccctgacggtcacgtgattttgcgcggctcctcccagagcaccaactatgatcccaaatccattgaagaagccattctgaaactcaaagctaaccatttacccccctcggtgatggttgactgtagccacggcaatagccgcaaaaaccacaaaaatcaaatgcgagttgttgacgccttatacgatcaaattacccaaggcagctcttatttattgggcgccatgattgaaagtaatttagttgaagggaaacaaaccctcgaatccggaaaagctttaacctatgggcagagcatcaccgatgcttgcatctcgtgggaagataccgaacttgcgttggaaaaactggcacaagccgttattattcggcgccaacacagcgaagagagaaaacatcatggcgaataa

SEQ ID NO: 75407 - protein, 360 aa, Coxiella burnetii RSA 493
MQKTDNLRIKAIHPLMLPALLIEELPITAAVASTVNLARLAARDIIHGQDDRLLVVLGPCSIHDVKAALEYANRLKRCIDRHAKELCIIMRVYFEKPRTTVGWKGLINDPQLDGSFHINQGLRVARRLLLDINEIGVPTGSEFLDTIIPQYISDLTSWSAIGARTTESQTHRELASGLSMPIGFKNGTTGNVQIAIDAVLAARQAHHFLGVSKQGIAAIIITKGNPDGHVILRGSSQSTNYDPKSIEEAILKLKANHLPPSVMVDCSHGNSRKNHKNQMRVVDALYDQITQGSSYLLGAMIESNLVEGKQTLESGKALTYGQSITDACISWEDTELALEKLAQAVIIRRQHSEERKHHGE

SEQ ID NO: 75408 - DNA, 1179 bp, Nitrosomonas europaea ATCC 19718
  CDS (1)..(1179): transl_table=11
atgaagtcgggcagtctgtattgccagtgtggcaaggaagtgcaaaaagaaatagtcatcaaggaatcatctgtggaacataaaactgacgaccggcgcattatcagaggagatgagctgatcacgccggtgaaactgcttcatgatcatcctctgactgaacaggcgactgaaactgtggttactgccagacaggagtgccacgatattttgcggggagaggatgaccggttactggtggtatgtggcccatgctcgattcatgatgtggatgcggcagtggaatatgcttcccgactgagtcatctgcgtcaggagctgaaagatcagttacatatcatcatgcgggtttatttcgagaaacctcgcacaacagttggctggaaaggcctgatcaacgacccagacctggataacagtttcaacattgacaagggattgcggcttgcccgcgacctgttgctgaaactgggtaatataaatatgccggctgcaactgaatttcttgatctgatcagcccgcaatatgtggctgacctcatcagttgggcggccatcggcgcacgcacgactgaaagccagggacatcgtgaactggcctccggtgtttcgtgtccagtggggttcaagaatggtacctacggcaatctgaatatcgcaatcgatgcgattggtgctgcatcccacccgcataatttcctgtcagtcaccaaagaaggccgggttgctactttcaccaccaggggaaatgaagattgtcatatcatcctgcgcggcggaagatcaccgaattacgatgcagagagtgttgcttctgcggtcgaagcactgcggaaagccaagctgcctccttatctgatgatcgattgcagtcacgccaacagccacaaggattaccggcgtcagccggaagtggctgccgatgtggctcagcaaattgcggaaggaaactgctcaatcagcgggatcatgcttgaaagtcacctggtggccggcaggcagaatgttgaaggtaagcggcgggaagagctggtttacgggcaaagcatcacggatggctgtatcgatttcgatacgacacagcaggtgctgttcgagctggcggaagcggtggaaaaacgaagaaatttgcagaataccccgatactggttccagatcattccactgcgctttcctga

SEQ ID NO: 75409 - protein, 392 aa, Nitrosomonas europaea ATCC 19718
MKSGSLYCQCGKEVQKEIVIKESSVEHKTDDRRIIRGDELITPVKLLHDHPLTEQATETVVTARQECHDILRGEDDRLLVVCGPCSIHDVDAAVEYASRLSHLRQELKDQLHIIMRVYFEKPRTTVGWKGLINDPDLDNSFNIDKGLRLARDLLLKLGNINMPAATEFLDLISPQYVADLISWAAIGARTTESQGHRELASGVSCPVGFKNGTYGNLNIAIDAIGAASHPHNFLSVTKEGRVATFTTRGNEDCHIILRGGRSPNYDAESVASAVEALRKAKLPPYLMIDCSHANSHKDYRRQPEVAADVAQQIAEGNCSISGIMLESHLVAGRQNVEGKRREELVYGQSITDGCIDFDTTQQVLFELAEAVEKRRNLQNTPILVPDHSTALS

SEQ ID NO: 75410 - DNA, 1053 bp, Rhodopirellula baltica SH 1
  CDS (1)..(1053): transl_table=11
atgatccgcaccgatgaccttcgtatcggcgccatcaaaaatctgatgtcccccagtgaattgctatccgaaattccggccagcgatgcgatttcacagacggtcgctgacggtcgaaccgcgatccaaaacgtgcttcagcagaaggacgaccgtttgctcgtcgtcgtcgggccgtgttcgattcacgatccggattccgctcgtcagtacgcggagaagttggcggtcgagcaaaaaaagcacgccgatgagctgttgatcgtcatgcgggtttacttcgaaaaacctcgaacaacggttggctggaagggtctgatcaacgaccccaaacttgacgacagcttcgaaatcaatcacggattgcgaaccgctcggcgtttgctcagcgacatcaacgcgatgggactgccgaccggaaccgagtttttggatttgatcagcccgcagtatgtggctgacttggtcgggtggggtgccatcggagcacgcacgaccgaaagccaaggtcaccgcgaattggcgtcggggctgtcttgcccggtcggcttcaaaaatggaaccagcggcaacgttcagatcgctgtcgatgcgatttgctccgcacgtcgaccacaccacttcctatccgtcacgaaggaaggaacctcggcgatcttcgcaacaaccggaaacccggactgccacatcattctgcgtggcggaaagcacaccaactacgatgccgccagcatcgatatggcatcgggattgctcgagaaagcggacctgccagcacgaatcatgatcgattgcagccacgcgaacagccgcaagattttcaaacgtcaatcgtacgtttgccgggacatctgtgcccaagtatccgatggcgaccaacgcatcatgggcgtgatgatcgaaagcaatctgctcgagggcaaccaaaaactcagcgattcgccgcttgttcagggtctcagcgtcaccgatgcgtgtatcggttgggaaaccaccgagcaactcttcagcgacctgggaaaatccgtcgccgcacgccgtaaagtcggctga

SEQ ID NO: 75411 - protein, 350 aa, Rhodopirellula baltica SH 1
MIRTDDLRIGAIKNLMSPSELLSEIPASDAISQTVADGRTAIQNVLQQKDDRLLVVVGPCSIHDPDSARQYAEKLAVEQKKHADELLIVMRVYFEKPRTTVGWKGLINDPKLDDSFEINHGLRTARRLLSDINAMGLPTGTEFLDLISPQYVADLVGWGAIGARTTESQGHRELASGLSCPVGFKNGTSGNVQIAVDAICSARRPHHFLSVTKEGTSAIFATTGNPDCHIILRGGKHTNYDAASIDMASGLLEKADLPARIMIDCSHANSRKIFKRQSYVCRDICAQVSDGDQRIMGVMIESNLLEGNQKLSDSPLVQGLSVTDACIGWETTEQLFSDLGKSVAARRKVG

SEQ ID NO: 75412 - DNA, 1038 bp, Wigglesworthia glossinidia endosymbiont of Glossina brevipalpis
  CDS (1)..(1038): transl_table=11
atgaattatatttgtgaaaaaattaaatataaaaaattaataagcccaaaaaaattaaaaaaaatttttaaaataaaaaaagaagaagaattttttgttttaagatctagaaaaactattagtaatattattaataaaaaagacaatagaaaattaattatatgtggtccttgctctattcatgatatagaatccacaattgaatatgcaagaaaattaaatattttgtacaaaaaattaatagataaaatatatattgtaataatgatacgttatgaaaaaaaaataaatttttcagaatggaagggaatgatttatgatccatatttgaatggattacatgatattaatcatggattaaaagttattagaaatttgttaattaagttaataaaaatcaaacaacctatagcaatagatatattgaatccatttttttattattatttcgatgatgttattagttgggcatctattggatctgatctaataaattctcaaattagtttagcattttcgtctaattcatcaatcccaataggttttaaaaatagttcagatggaaatatagaaaatactttaaatgcaattataaagtattctaaaattaatgaatttattggaataaatgaaagtggaaaatcttgtattataagaagcccaggaaatattaataatcatattatattaataggtggaaattttccaaattattttcttcaaaatatatatgattgcaaaaaaagaatgaagaattctagaattactacatctataatgatagattgcaacaatggaaattattataaaaattataatgatcaaatagaagtaattaaatcatgtattaagtttttaaaaaaaaataataaaataattataggactaataataaaaagctatattaattctggaaatcagaagtttatttttcctaaaaataaaataaaatatggattatcaataaccagtccttgtattaatttaaaagatactaaactttttttacataatttatatgaatcaataaatatataa

SEQ ID NO: 75413 - protein, 345 aa, Wigglesworthia glossinidia endosymbiont of Glossina brevipalpis
MNYICEKIKYKKLISPKKLKKIFKIKKEEEFFVLRSRKTISNIINKKDNRKLIICGPCSIHDIESTIEYARKLNILYKKLIDKIYIVIMIRYEKKINFSEWKGMIYDPYLNGLHDINHGLKVIRNLLIKLIKIKQPIAIDILNPFFYYYFDDVISWASIGSDLINSQISLAFSSNSSIPIGFKNSSDGNIENTLNAIIKYSKINEFIGINESGKSCIIRSPGNINNHIILIGGNFPNYFLQNIYDCKKRMKNSRITTSIMIDCNNGNYYKNYNDQIEVIKSCIKFLKKNNKIIIGLIIKSYINSGNQKFIFPKNKIKYGLSITSPCINLKDTKLFLHNLYESINI

SEQ ID NO: 75414 - DNA, 1080 bp, Haemophilus ducreyi 35000HP
  CDS (1)..(1080): transl_table=11
gtggattctgtagcaaatcaagatagtttacataatgtaaatatctctactgaaaaagtattacttactccaaaacaactaaaaactgagtttccattacccgatcatttacgtaagcaaattgaaaaatcacgccaagaaattgccgcgattattcataaaaaagatccacgtaaacttattatcatcggaccttgttctattcacgatatctctgccgcattagagtatggccaaaaactaaaaaaattagccgaccaagtaagcgatcaactttatattgtaatgcgggtatattttgaaaaaccgcgcaccaccgtaggatggaagggcttaattaacgatccacaaatagatggcacttttaatgttgaagccggtttacgcattgcacgtaaattgtgcttagatttaactgaactaggcttaccattagccacagaagcactagatccaatgacaccacaatatttagcagatctttttagctggtcagcgattggagcaagaacgactgaatcacaaacacatcgtgaattagcttctggtttatctatggccgttggctttaaaaatggcactgatggcggcctagctgtggcgattaacgccatgcaatctgccgcacaaccgcatcgtttcattggtatcaatcaaaatggacaggtcaatttattaaataccaaagggaatcctgatggccacgtgattttacgtggcggtaaaaaacctaactttgaacaaaaatatgtaatggaatgtgaaactgcattacgtaaagcgggtttagaagaagcaataatgattgattgtagccacggtaattcaaataaagatcacacacgtcaacctatagttgcagaaaatgtactcacgcaattattggcaggtaaccgatcgatcatcggcttaatgattgaaagccatttaaatgcgggtaatcagccctctgaacaatcattccaagagatgaaatacggcatatccattacagatgcttgtattgattggcaaaccactgaacatatacttctcaacttcgccgcaaaattaagaaatcccccatcttcctttcagtaa

SEQ ID NO: 75415 - protein, 359 aa, Haemophilus ducreyi 35000HP
MDSVANQDSLHNVNISTEKVLLTPKQLKTEFPLPDHLRKQIEKSRQEIAAIIHKKDPRKLIIIGPCSIHDISAALEYGQKLKKLADQVSDQLYIVMRVYFEKPRTTVGWKGLINDPQIDGTFNVEAGLRIARKLCLDLTELGLPLATEALDPMTPQYLADLFSWSAIGARTTESQTHRELASGLSMAVGFKNGTDGGLAVAINAMQSAAQPHRFIGINQNGQVNLLNTKGNPDGHVILRGGKKPNFEQKYVMECETALRKAGLEEAIMIDCSHGNSNKDHTRQPIVAENVLTQLLAGNRSIIGLMIESHLNAGNQPSEQSFQEMKYGISITDACIDWQTTEHILLNFAAKLRNPPSSFQ

SEQ ID NO: 75416 - DNA, 1113 bp, Haemophilus ducreyi 35000HP
  CDS (1)..(1113): transl_table=11
atgccttataaaaatgatgatcttcgtatcactaaaattgaacagctattacccccgatcgctttattagagcgttttccagccagtgatgttgctgagcatactgttgctagagcaagagaagctattcataaaattattcacggtgaagacgatcgtttattagttgttattgggccttgctcaattcatgatccagaatctgctctagattatgctaaacgaattaaagcattacgtgataatccacagattaatcaaaacttagagttagtaatgcgcgtttattttgaaaaaccacgaacaaccgttggttggaaagggttaattaatgacccctatctgaatgaaacttatgcattaaacgatggtttacgaattgcacgaaaagtactgtccgatattaatgatttaaccgtgcctgccgcgggtgagtttttagatatgatcattccacaatatgtagccgattttatgagttggggagccattggagcacggaccgctgaatcacaagttcatcgtgagttagcctcaggtttatcttgtgcggtaggtttcaaaaatgccactaatggcagtgttaaaaccgctttagatgcaataaaatctgctgaagtttcacatcacttcttatccgtgaccaaatttgctcattcagctgttatttctaccgcaggtaatgaggattgccacattattttgcgtggtggcgataatggcacaaattatgatattgcgtctgtaaaaaaagtgtgtgcagatattgagaaagcagggcggcgtcctcacgtaatgattgactttagtcatgctaatagccaaaaacaatttaaacgacaaatggaagtttgtactaatgtatgccaacagattgcaaatggttcatcattaatttctggtgtgatgatagaaagccatttagtcgaaggtcggcaagatcttgtcgaaggtggtttagataaattagtatatggtcaaagtgttacagatgcttgtattggttgggaagacagcgaaacagcactgtttgccttagctgaagcggtcgcattacgccgacaacggaccaacaataatgctaatgatttggttaatcatatagtaaaatag

SEQ ID NO: 75417 - protein, 370 aa, Haemophilus ducreyi 35000HP
MPYKNDDLRITKIEQLLPPIALLERFPASDVAEHTVARAREAIHKIIHGEDDRLLVVIGPCSIHDPESALDYAKRIKALRDNPQINQNLELVMRVYFEKPRTTVGWKGLINDPYLNETYALNDGLRIARKVLSDINDLTVPAAGEFLDMIIPQYVADFMSWGAIGARTAESQVHRELASGLSCAVGFKNATNGSVKTALDAIKSAEVSHHFLSVTKFAHSAVISTAGNEDCHIILRGGDNGTNYDIASVKKVCADIEKAGRRPHVMIDFSHANSQKQFKRQMEVCTNVCQQIANGSSLISGVMIESHLVEGRQDLVEGGLDKLVYGQSVTDACIGWEDSETALFALAEAVALRRQRTNNNANDLVNHIVK

SEQ ID NO: 75418 - DNA, 1074 bp, Prochlorococcus marinus subsp. marinus str. CCMP1375
  CDS (1)..(1074): transl_table=11
atgaccttttcaacgaattttcagatatctgataaaacttccgatctacacgttgttgagactaggccattagtccctccagcttcccttcacaaggatttgccattagatcatcactcttcaaccattgtttctaagacaagaaaaacaatacaagcaattctggcaggatcagattcacgattattggtaattgttggcccttgttcaattcatgatattgctgctgccaaagattatgcaaatcagctgcttccgctaagagaaaaattttctaagcaactcgaaattgtaatgagagtttattttgaaaaacctaggacaactactggttggaagggtctcattaatgatcctcatcttgatgggtcttatgacattaatactggtttaagaagagcgagatctttgcttctagatttagcaaatttaggtattccaacagcaactgagcttttagatcctgttgttcctcaatatatagctgatttaattagttggactgcaattggggcaagaacgactgagagtcaaactcatagagaaatggcttccggattatctatgccaataggatataagaatggaacagatgggactattgctattgctattaatgctatgaaagcagcttcaaagcctcatcattttctaggtattaatcatgaaggccatgcatctattattagtacgacaggcaaccctgatggtcatcttgttttgagagggggaagtagtggtactaattatcatctggaatcagtgcaaaaagttgctcaagaacttctacaatcaggctcaaaaagtaaagtgatggttgactgtagtcacggtaactcagataaggattttcgaaaacaaggtattgtcttgaaagaggttgctaagcaggttaaagaaggttcgtctaatgtcatgggagtgatgcttgagagccatttggttgaaggtaatcaaaaattaactaaggacttatcaacattgatttatggaaaaagtattacagatgcctgtatagatttgaagacgacagaaactttgtttgagcaacttgctgatgctgttactttttaa

SEQ ID NO: 75419 - protein, 357 aa, Prochlorococcus marinus subsp. marinus str. CCMP1375
MTFSTNFQISDKTSDLHVVETRPLVPPASLHKDLPLDHHSSTIVSKTRKTIQAILAGSDSRLLVIVGPCSIHDIAAAKDYANQLLPLREKFSKQLEIVMRVYFEKPRTTTGWKGLINDPHLDGSYDINTGLRRARSLLLDLANLGIPTATELLDPVVPQYIADLISWTAIGARTTESQTHREMASGLSMPIGYKNGTDGTIAIAINAMKAASKPHHFLGINHEGHASIISTTGNPDGHLVLRGGSSGTNYHLESVQKVAQELLQSGSKSKVMVDCSHGNSDKDFRKQGIVLKEVAKQVKEGSSNVMGVMLESHLVEGNQKLTKDLSTLIYGKSITDACIDLKTTETLFEQLADAVTF

SEQ ID NO: 75420 - DNA, 1086 bp, Candidatus Blochmannia floridanus
  CDS (1)..(1086): transl_table=11
atgcaaaagaataatttaggtaatataaatttttgtgatataagttctttgctttctcctaaacaattaaaatctcaatttcctttaacgtatgttgatcaactttttattgaagaaacacaaaatattattataaatattattcaaaaaaaagatcctcgtttgttgattatatgtggtccttgttctattcatgatgtgaacgctgcttttgattatgccaagaaattaaaatctttatcattagaattgcaagatcaattatatattgtaatgagagtatatttagaaaaacctcgtactacaattggatggaaaggattaattaatgatccttatatagatggttcttgtgatattcagtctggattaaaaattgctcgtcaattattattgcaattaataaaaattaaattgcctgtagcgactgaaatattaaatccaaatgttcctcaatatattggagatttatttagttgggtagctattggggctcgtactacagagtcacagatacatcgagaaatagcttctagttttcagtcggtaataggttttaaaaatagtactcatggagatattgatcatgcaattaatgcaatacgtgcagcttccatgtctcataattatattagtattgatcaatctgggcaggtgtgttcattacatactaaaggaaatacaaatagtcatataattttaagaggagggattcaacctaattattatccagaaaatattatttgttgtgaaaaaaaaataacagaaatagggttacctataacattaatgatcgattgtagtcatggtaattctaataaggattatcatcgtcaaatagatgtagctcaatctattttaaatcaaataaagttgggtaatcattctattataggattaatgatggaaagttatatttatcctggaaatcaaatagtagatttgacgcatacttcttctattaaaatgcagtatggggtatctataacagatgcttgtatagattgggattcaactgaacgattattaagatgcttacataaagaattgaaaccatttctttctactcgtttaaaaagagtatga

SEQ ID NO: 75421 - protein, 361 aa, Candidatus Blochmannia floridanus
MQKNNLGNINFCDISSLLSPKQLKSQFPLTYVDQLFIEETQNIIINIIQKKDPRLLIICGPCSIHDVNAAFDYAKKLKSLSLELQDQLYIVMRVYLEKPRTTIGWKGLINDPYIDGSCDIQSGLKIARQLLLQLIKIKLPVATEILNPNVPQYIGDLFSWVAIGARTTESQIHREIASSFQSVIGFKNSTHGDIDHAINAIRAASMSHNYISIDQSGQVCSLHTKGNTNSHIILRGGIQPNYYPENIICCEKKITEIGLPITLMIDCSHGNSNKDYHRQIDVAQSILNQIKLGNHSIIGLMMESYIYPGNQIVDLTHTSSIKMQYGVSITDACIDWDSTERLLRCLHKELKPFLSTRLKRV

SEQ ID NO: 75422 - DNA, 1119 bp, Bordetella parapertussis 12822
  CDS (1)..(1119): transl_table=11
ttgacccgtatcgatgacccgctgcacgatcgcgaggccggccaggccgacgcgacgcaagacaccacccgcatcgacgacgtgcgcatcggcgccgtgcgtcccctgatttcgcccgccctgctgcaggacgaactgccggtatcggcgccgctacaggcgctggtcgaggacagccgcgcgcgcatcgccgacgtgctgcacggccgcgacgaccggctggtggtggtggtcggcccctgctccatccacgaccacgaacaggccatggagtacgcgcgccagctcaaggaggcgaccgacacgctggccgacgacctgctcatcgtcatgcgcgtgtacttcgagaagccgcgcaccaccgtgggctggaagggctacatcaacgatccgcgcctggacggcagtttccgcatcaacgaaggcctgcgccgcgcgcgccacctgctgctggaaatcggcgccctgggactgcccatcgccaccgaattcctggacctgctcagcccgcaatacatcgccgacctgatcgcctggggcgcgatcggcgcgcgcaccaccgaaagccccagccaccggcaactggcctcgggcctgagctgcccgctgggtttcaagaacggcaccgacggcggcatccaggtggcggccgacgccatcgtggccgccagcgccccgcatgccttcatgggcatgaccaagatgggcaccgccgccatcttcgagacgcgcggcaacgacgacacccacgtcatcctgcgcggcggcaagcaaggccccaactacgacgcggccgccatcgacgcctgctgtgcggcgctggccaaggccggcctgcgcgagcaggtcatggtcgactgctcgcacgccaattcgaacaagtcgcacgcgcgccaggtcgacgtggcgcgcgacctggcccggcagctggccggcggcgaccgccgcatcatcggcatcatgatcgaaagcaacctcgaggaaggccgccaggatctcaagcccggcgtgccgctcaagcgcggcgtgtccatcaccgacgcctgcctgagctgggcccagaccgagccggtgctggccgagctggcccaggccgtgcgccagcgccgcgaaggctga

SEQ ID NO: 75423 - protein, 372 aa, Bordetella parapertussis 12822
MTRIDDPLHDREAGQADATQDTTRIDDVRIGAVRPLISPALLQDELPVSAPLQALVEDSRARIADVLHGRDDRLVVVVGPCSIHDHEQAMEYARQLKEATDTLADDLLIVMRVYFEKPRTTVGWKGYINDPRLDGSFRINEGLRRARHLLLEIGALGLPIATEFLDLLSPQYIADLIAWGAIGARTTESPSHRQLASGLSCPLGFKNGTDGGIQVAADAIVAASAPHAFMGMTKMGTAAIFETRGNDDTHVILRGGKQGPNYDAAAIDACCAALAKAGLREQVMVDCSHANSNKSHARQVDVARDLARQLAGGDRRIIGIMIESNLEEGRQDLKPGVPLKRGVSITDACLSWAQTEPVLAELAQAVRQRREG

SEQ ID NO: 75424 - DNA, 1074 bp, Bordetella parapertussis 12822
  CDS (1)..(1074): transl_table=11
gtgtcgcacaataccgatgactttcgtatccgtgaaatcaaagagctgaatcctcctgcgcatgtcatgcgcgagtttccgtgctcgaaggatgtttctgaaatcgtctacgccgcccgccagggcatgcatcgcatcctgcatggcatggatgaccgcctgatcgtcgtgatcggcccttgctcgatccacgataccaaggcggcgctcgaatacgcggatcgcctcaagccggtgcgcgaccgcctggccgccgatctcgaggtggtgatgcgcgtctacttcgaaaagccgcgcaccaccgtgggctggaagggcctgatcaacgaccccgacctggatggcagcttcgatatcaacaagggcgtgcgcgtggcgcgcgaactgctgctggacatcaacagccgcggcctgccggcgggttgcgagttcctcgacatgattaccccgcagtacatcgccgacctggtgtcgtggggggcgatcggggcgcggacgaccgaaagccaggttcaccgcgagctggcttccggcctgtcgtgtcctgtcggtttcaagaacggcaccgacggcaatgtgaagatcgccgtcgacgccatcaaggccgcctcgcaaccgcaccatttcctctcggtgaccaagggcgggcattcggccatcgtctcgaccgcgggcaacgaggactgccacgtcattctgcgcggcggcaaggcgcccaactacgatgccgccagcatcgaagcggcctgccaggacatggccaaggccggcctggcccagcgcatcatgatcgacgccagccacgccaacagcagcaagaaacccgagaatcagccgctggtggtcgatgatgtggccaaccagatcgagcagggcgatgcccgcatcgtgggcctgatgatagaaagccatctgctgggcggccgccaggacctggtgcccggccaggccttgacgtacgggcagagcatcaccgacggttgcatcgactgggatgcttcggtgcaggtgctggagcgcctggcccatgcggtgcgcgaacgccggcgcgcgtcgctgagcgccggcaagtag

SEQ ID NO: 75425 - protein, 357 aa, Bordetella parapertussis 12822
MSHNTDDFRIREIKELNPPAHVMREFPCSKDVSEIVYAARQGMHRILHGMDDRLIVVIGPCSIHDTKAALEYADRLKPVRDRLAADLEVVMRVYFEKPRTTVGWKGLINDPDLDGSFDINKGVRVARELLLDINSRGLPAGCEFLDMITPQYIADLVSWGAIGARTTESQVHRELASGLSCPVGFKNGTDGNVKIAVDAIKAASQPHHFLSVTKGGHSAIVSTAGNEDCHVILRGGKAPNYDAASIEAACQDMAKAGLAQRIMIDASHANSSKKPENQPLVVDDVANQIEQGDARIVGLMIESHLLGGRQDLVPGQALTYGQSITDGCIDWDASVQVLERLAHAVRERRRASLSAGK

SEQ ID NO: 75426 - DNA, 1074 bp, Bordetella bronchiseptica RB50
  CDS (1)..(1074): transl_table=11
gtgtcgcacaataccgatgaccttcgtatccgtgaaatcaaagagctgaatcctcccgcgcatgtcatgcgcgagtttccgtgctcgaaggatgtttctgaaatcgtctacgccgcccgccagggcatgcatcgcatcctgcatggcatggatgaccgcctgatcgtcgtgatcggcccttgctcgatccacgataccaaggcggcgctcgaatacgcggatcgcctcaagccggtgcgcgaccgcctggccgccgatctcgaggtggtgatgcgcgtctacttcgaaaagccgcgcaccaccgtgggctggaagggcctgatcaacgaccccgacctggatggcagcttcgatatcaacaagggcgtgcgcgtggcgcgcgaactgctgctggacatcaacagccgcggcctgccggcgggttgcgagttcctcgacatgattaccccgcagtacatcgccgacctggtgtcgtggggggcgatcggggcgcggacgaccgaaagccaggttcaccgcgagctggcttccggcctgtcgtgtcctgtcggtttcaagaatggcaccgacggcaatgtgaagatcgccgtcgacgccatcaaggccgcctcgcaaccgcaccatttcctctcggtgaccaagggcgggcattcggccatcgtctcgaccgcgggcaacgaggactgccacgtcattctgcgcggcggcaaggcgcccaactacgatgccgccagcatcgaagcggcctgccaggacatggccaaggccggcctggcccagcgcatcatgatcgacgccagccacgccaacagcagcaagaagcccgagaatcagccgctggtggtcgatgatgtggccaaccagatcgagcagggcgatgcccgcatcgtgggcctgatgatagaaagccatctgctgggcggccgccaggacctggtgcccggccaggccttgacgtacgggcagagcatcaccgacggttgcatcgactgggatgcttcggtgcaggtgctggagcgcctggcccatgcggtgcgcgaacgccggcgcgcgtcgctgagcgccggcaagtag

SEQ ID NO: 75427 - protein, 357 aa, Bordetella bronchiseptica RB50
MSHNTDDLRIREIKELNPPAHVMREFPCSKDVSEIVYAARQGMHRILHGMDDRLIVVIGPCSIHDTKAALEYADRLKPVRDRLAADLEVVMRVYFEKPRTTVGWKGLINDPDLDGSFDINKGVRVARELLLDINSRGLPAGCEFLDMITPQYIADLVSWGAIGARTTESQVHRELASGLSCPVGFKNGTDGNVKIAVDAIKAASQPHHFLSVTKGGHSAIVSTAGNEDCHVILRGGKAPNYDAASIEAACQDMAKAGLAQRIMIDASHANSSKKPENQPLVVDDVANQIEQGDARIVGLMIESHLLGGRQDLVPGQALTYGQSITDGCIDWDASVQVLERLAHAVRERRRASLSAGK

SEQ ID NO: 75428 - DNA, 1119 bp, Bordetella bronchiseptica RB50
  CDS (1)..(1119): transl_table=11
ttgacccgtatcgatgacccgctgcacgatcgcgaggccggccaggccgacgcgacgcaagacaccacccgcatcgacgacgtgcgcatcggcgccgtgcgtcccctgatttcgcccgccctgctgcaggacgaactgccggtatcggcgccgctacaggcgctggtcgaggacagccgcgcgcgcatcgccgacgtgctgcacggccgcgacgaccggctggtggtggtggtcggcccctgctccatccacgaccacgaacaggccatggagtacgcgcgccagctcaaggaggcggccgacacgctggccgacgacctgctcatcgtcatgcgcgtgtacttcgagaagccgcgcaccaccgtgggctggaagggctacatcaacgatccgcgcctggacggcagtttccgcatcaacgaaggcctgcgccgcgcgcgccacctgctgctggaaatcggcgccctgggactgcccatcgccaccgaattcctggacctgctcagcccgcaatacatcgccgacctgatcgcctggggcgcgatcggcgcgcgcaccaccgaaagccccagccaccggcaactggcctcgggcctgagctgcccgctgggtttcaagaacggcaccgacggcggcatccaggtggcggctgacgccatcgtggccgccagcgccccgcatgccttcatgggcatgaccaagatgggcaccgccgccatcttcgagacgcgcggcaacgacgacacccacgtcatcctgcgcggcggcaagcaaggccccaactacgacgcggccgccatcgacgcctgctgtgcggcgctggccaaggccggcctgcgcgagcaggtcatggtcgactgctcgcacgccaattcgaacaagtcgcacgcgcgccaggtcgacgtggcgcgcgacctggcccggcagctggccggcggcgaccgccgcatcatcggcatcatgatcgaaagcaacctcgaggaaggccgccaggatctcaagcccggcgtgccgctcaagcgcggcgtgtccatcaccgacgcctgcctgagctgggcccagaccgagccggtgctggccgagctggcccaggccgtgcgccagcgccgcgaaggctga

SEQ ID NO: 75429 - protein, 372 aa, Bordetella bronchiseptica RB50
MTRIDDPLHDREAGQADATQDTTRIDDVRIGAVRPLISPALLQDELPVSAPLQALVEDSRARIADVLHGRDDRLVVVVGPCSIHDHEQAMEYARQLKEAADTLADDLLIVMRVYFEKPRTTVGWKGYINDPRLDGSFRINEGLRRARHLLLEIGALGLPIATEFLDLLSPQYIADLIAWGAIGARTTESPSHRQLASGLSCPLGFKNGTDGGIQVAADAIVAASAPHAFMGMTKMGTAAIFETRGNDDTHVILRGGKQGPNYDAAAIDACCAALAKAGLREQVMVDCSHANSNKSHARQVDVARDLARQLAGGDRRIIGIMIESNLEEGRQDLKPGVPLKRGVSITDACLSWAQTEPVLAELAQAVRQRREG

SEQ ID NO: 75430 - DNA, 1068 bp, Prochlorococcus marinus subsp. pastoris str. CCMP1986
  CDS (1)..(1068): transl_table=11
atgacgacttcatccaataatcaatctttagaaaaaacatctgatttgcatgttgttgaaacacgtccattaatacctccaagcaaacttcataatgatatacctttagattatacctctgcagaaactgtctctaatactagaagatcaatacaaaatattttgcacaataatgatcctcggattctagtcatagtgggaccatgttcaattcatgatattgaggctgctaaagattattcagaatatattcaggaatttagaaaaatttataaagataaattagaaattgtaatgcgagtatatttcgaaaaacccagaactacaattggttggaaaggattaataaatgaccctcatttagatggttcatatgacattaatacaggtttacgaagagcgagaaatttactatcttatttggcaacgcgtgggataccctctgctactgagttattagatccaattgttcctcaatatattgctgatttaatcagttggacagcaattggtgcaaggactaccgaaagtcaaactcatagagaaatggcttcaggattatccatgcctattggttttaaaaatggtactgatggttcttttagtactgctattaatgcgatgcagtcggcttcaaaatctcatcatttcttaggtgttaatgatcaaggttatgcttctattgtaaatacaaccggcaatccagatggacatatagttttaaggggaggttctaaaggagttaatttcgaaaatcaacatgtaaaaagtatttcttccgaattaaaagaaggtaatcttccttacaaagttatgattgattgtagccatggaaattctaataaagattacacaaagcaatctgatgtccttaaaaacgtagcaaatcagattaagaatggtgaaaaaaatattttaggagtaatgcttgaaagtcatctgaaggagggtaatcaaaaactttcaaatatgaaagatcttgaatatggtacgagtattactgatgcttgcataaatatagaaacaacgaaaaatttgcttcagattctatatgattcaattttgtaa

SEQ ID NO: 75431 - protein, 355 aa, Prochlorococcus marinus subsp. pastoris str. CCMP1986
MTTSSNNQSLEKTSDLHVVETRPLIPPSKLHNDIPLDYTSAETVSNTRRSIQNILHNNDPRILVIVGPCSIHDIEAAKDYSEYIQEFRKIYKDKLEIVMRVYFEKPRTTIGWKGLINDPHLDGSYDINTGLRRARNLLSYLATRGIPSATELLDPIVPQYIADLISWTAIGARTTESQTHREMASGLSMPIGFKNGTDGSFSTAINAMQSASKSHHFLGVNDQGYASIVNTTGNPDGHIVLRGGSKGVNFENQHVKSISSELKEGNLPYKVMIDCSHGNSNKDYTKQSDVLKNVANQIKNGEKNILGVMLESHLKEGNQKLSNMKDLEYGTSITDACINIETTKNLLQILYDSIL

SEQ ID NO: 75432 - DNA, 1083 bp, Prochlorococcus marinus str. MIT 9313
  CDS (1)..(1083): transl_table=11
atgaattctggcgaaatgaccaccacttccgacttgcatgtggtggatacgcggcccttggtgtcgccgctcttgcttcatcaggagctgccccttgatctagtggctctcaaaaccgttgcagatactcgtaagcgcatccaggcaattctgcgtggtgaggatccccgcttgctggtgattgttggtccctgctcggttcatgacattgcctctgcaagggactatgcccgtcagttggagccattgcgacagcgatatgccgcccagttggaggtggttttgcgggtctatttcgaaaaacctcgcaccacagttggctggaaaggtctcatcaatgatccccatctcgatggttcctatgacatcaacactggcttgaggcgtgcgcggtcgttgttgctcgaccttgctcgcgagggtatgccgacggccactgaattgctggatccggttgtgcctcaatacatcgctgatttgatcagttggacggcgattggagccagaaccactgagagtcagacccatcgggagatggcttctggattgtcaatgcccgtcggttacaaaaacggtaccgatggcagtgccaagattgcgatccatgcgatgcaggcagcatctagaccgcatcattttcttgggatcaatcggcagggtcaggcttcgattgtgcataccactggaaaccctgatggccatctcgtgttgcggggaggtaatggctgtaccaattaccatcccgaagcggtggaagaggttgcaaaagaattagtgaaggctggcttggttgatcggttgatggtggattgcagccatgacaattcgaagaaagattttcggcgacagtcagaggtgcttcaggctgttgctactcaggtacgccaaggatcaacccatctcatgggtgtgatgttggaaagtcatcttgtcgagggcaatcagaagttgcctgaagacctctctactcttgtctatggtcaaagcattacggatgcttgtatcgatatagagacaacggcaactctccttgaggatttggcggctgcagtggcttcagtgacgttgtcaccaataacttga

SEQ ID NO: 75433 - protein, 360 aa, Prochlorococcus marinus str. MIT 9313
MNSGEMTTTSDLHVVDTRPLVSPLLLHQELPLDLVALKTVADTRKRIQAILRGEDPRLLVIVGPCSVHDIASARDYARQLEPLRQRYAAQLEVVLRVYFEKPRTTVGWKGLINDPHLDGSYDINTGLRRARSLLLDLAREGMPTATELLDPVVPQYIADLISWTAIGARTTESQTHREMASGLSMPVGYKNGTDGSAKIAIHAMQAASRPHHFLGINRQGQASIVHTTGNPDGHLVLRGGNGCTNYHPEAVEEVAKELVKAGLVDRLMVDCSHDNSKKDFRRQSEVLQAVATQVRQGSTHLMGVMLESHLVEGNQKLPEDLSTLVYGQSITDACIDIETTATLLEDLAAAVASVTLSPIT

SEQ ID NO: 75434 - DNA, 1068 bp, Synechococcus sp. WH 8102
  CDS (1)..(1068): transl_table=11
atggccaccacctcggatttgcatgtggtggagacccgtccgctggtggctccggctctgctgcacggagatctgccgattgatgccgccgccacggagacggtcgcatcggcccgtcgtcggatccaggccattttgcgcggcgatgatcagcgtcagctggtggtggtgggcccctgctcggtccacgatgtgaaggcggcgcgggagtacgccgaacggctggccccgatccgggaacggctgaaggatcagctggaggtggtgatgcgggtttatttcgaaaagccgcgtacgacggttggttggaaaggcctcatcaatgacccccacctcgatggctcgtacgacatcaacacaggcctgaggcgggctcgtggcttactgctggacctgtccagggagggcatgccggcagcgacggaactgctggatccggtggttccccagtacatcgctgatctgatcagctggactgcgatcggagcccgcaccacggaaagccagacccatcgggagatggcttcaggcttgtcgatgccgatcggctacaagaacagtaccgatggcagcgcctgcatcgccatcaatgcgatgcaggcggcatcgaaacctcatcattttctgggaatcaaccacgacggccatgcctcgatcgtgagcacgactggcaacccggatggtcatctagtgctgcgtggcggtcatcagggcagcaactaccacctggaggccgttcaggctgctgcagcggaactgagcaaggcgggcctgaaggatcgtctgatggtggactgcagccatgccaactcgaacaaggatttccgccgccaggccgatgtactcgccacggtggctgatcagttgaaggctggttccggccatgtgatgggcgtgatgatcgaaagtcatctggtggaaggcaatcagaaactgaccgctggtctctcccagctcacctatggccagagcattacggatgcctgcatcagcctggagaccacggatgcgctgctgtcccagctggctgcagccgtggccgatcgcagcagcgctttgacggcataa

SEQ ID NO: 75435 - protein, 355 aa, Synechococcus sp. WH 8102
MATTSDLHVVETRPLVAPALLHGDLPIDAAATETVASARRRIQAILRGDDQRQLVVVGPCSVHDVKAAREYAERLAPIRERLKDQLEVVMRVYFEKPRTTVGWKGLINDPHLDGSYDINTGLRRARGLLLDLSREGMPAATELLDPVVPQYIADLISWTAIGARTTESQTHREMASGLSMPIGYKNSTDGSACIAINAMQAASKPHHFLGINHDGHASIVSTTGNPDGHLVLRGGHQGSNYHLEAVQAAAAELSKAGLKDRLMVDCSHANSNKDFRRQADVLATVADQLKAGSGHVMGVMIESHLVEGNQKLTAGLSQLTYGQSITDACISLETTDALLSQLAAAVADRSSALTA

SEQ ID NO: 75436 - DNA, 1059 bp, Chromobacterium violaceum ATCC 12472
  CDS (1)..(1059): transl_table=11
atgcaacgccagaccgacgacgtcagaatccgcgaaatcaaggaactgcttcccccgatcgcccacctttacgagctgccgatcagcgagtcggcctccgagctgatctacaacacccgtcgcgaaatctcggccttgctgcgcggcgaggacgaccgcctgctggtggtgatcggcccctgttccatccacgacgtcgacgccgcggtcgagtacgcgcagaagctggcgccgctgcgccaggcgctggcggatgagctggtggtggtgatgcgggtgtatttcgagaagccgcgcaccacggtcggctggaagggcctgatcaacgacccgcacctgaacgagtcctacgacatcaacgccggcctgcgcatcgcgcgccgcctgctgctgacgctgaacaacctgggcatgccggccgccaccgaattcctcgacatgatcacgccgcagtacttcgccgacctgatcagctggggcgcgatcggcgcccgcaccaccgagagccaggtgcaccgcgagctggcctccggcctgtcctgcccggtcggtttcaagaacggcaccgacggcaacctgaagatcgccgtcgacgccatccgctcgtccagcgtgccgcaccatttcctgtcggtgaccaagaccggccattccgccatcgtttccaccggcggcaacccggactgccacgtgatcctgcgcggcggcaaggaacccaattactcggccgagcatgtgcgcgccgccgccgccgagctgaccgcggtcggcctgccgcacaagctgatggtggacttcagccacgccaacagccgcaaggactaccgccgccagatggaggtcagcgccgacgtggccggccagatcgccggcggcgaccgcaacatcttcggcgtgatggtggaaagccacctggtggaggggcgccaggatcagaagcccggctgcgagctcaagtacggccagagcatcaccgacgcctgcctgggctgggacgacaccgagacgctgctgcgccagctggccgacgccgtcaaggcgcgccgcgccgccgagtaa

SEQ ID NO: 75437 - protein, 352 aa, Chromobacterium violaceum ATCC 12472
MQRQTDDVRIREIKELLPPIAHLYELPISESASELIYNTRREISALLRGEDDRLLVVIGPCSIHDVDAAVEYAQKLAPLRQALADELVVVMRVYFEKPRTTVGWKGLINDPHLNESYDINAGLRIARRLLLTLNNLGMPAATEFLDMITPQYFADLISWGAIGARTTESQVHRELASGLSCPVGFKNGTDGNLKIAVDAIRSSSVPHHFLSVTKTGHSAIVSTGGNPDCHVILRGGKEPNYSAEHVRAAAAELTAVGLPHKLMVDFSHANSRKDYRRQMEVSADVAGQIAGGDRNIFGVMVESHLVEGRQDQKPGCELKYGQSITDACLGWDDTETLLRQLADAVKARRAAE

SEQ ID NO: 75438 - DNA, 1107 bp, Chromobacterium violaceum ATCC 12472
  CDS (1)..(1107): transl_table=11
atgacaacgcttgccaggccggaacacggcctactcgcgcccgaacacggccacgcgtcgccgccgtccagccaggcggactaccgcgcgatggccagccccgccgaactattgcgcagcctgccggccggcccgcgcgccagcgcctcggtccattccggccgcgaggcggtgaaacgcgtactgagcggagcagatccgcgctggctggtggtggtgggcccctgctccatccacgacccgcgcgccggcctggactacgccgcccggctggcggacctcgcctccgagctggacgacacgctgctgatcgtgatgcgcgcctacttcgaaaagccgcgcaccagcgtgggctggaagggcctgatcaacgatccctacatggacgacagctattgcgtggacgagggcatgcacatcgcccgccgcttccttttggccgccgccgaactgggcctgccgctggccggcgaggcgctggacccgatgtcgccgctgtatctggccgacctctatagctggatggcgatcggcgcgcgcaccaccgaatcgcaaatccaccgcgagctggcctcggcgctggacagcgccgtcggattcaagaacagcaccgacggctcgctggacgcggcgctcaacgccatcgtctccgccagcgcgccgcacgcctacctcggcatgggcaaggacggccgggtggcggtggtgaacagccgcggcaacccgcactgccacctggtgctgcgcggcggcggcggccggcccaattacgactcggtgagcatcgcgctggccgagcaggcaatgaagaagcacgacattccgcccgccatcatggtggactgcgcgcacgccaactcatggaagcagcacacgctgcagccgcgcgtgctggccgacgcggtgtcccagatccgccacggcaaccgcagcatccgcgccttcatgctggagagcttcatcgaagccggcaaccagtccatcccggccgatctgtcgcagctgcgctacggctgctcggtgaccgatccctgcgtcgactggcacaccaccgccgacatcctgcgcgacgcgcgcgccaagctgcggccgctgctggaaagctga

SEQ ID NO: 75439 - protein, 368 aa, Chromobacterium violaceum ATCC 12472
MTTLARPEHGLLAPEHGHASPPSSQADYRAMASPAELLRSLPAGPRASASVHSGREAVKRVLSGADPRWLVVVGPCSIHDPRAGLDYAARLADLASELDDTLLIVMRAYFEKPRTSVGWKGLINDPYMDDSYCVDEGMHIARRFLLAAAELGLPLAGEALDPMSPLYLADLYSWMAIGARTTESQIHRELASALDSAVGFKNSTDGSLDAALNAIVSASAPHAYLGMGKDGRVAVVNSRGNPHCHLVLRGGGGRPNYDSVSIALAEQAMKKHDIPPAIMVDCAHANSWKQHTLQPRVLADAVSQIRHGNRSIRAFMLESFIEAGNQSIPADLSQLRYGCSVTDPCVDWHTTADILRDARAKLRPLLES

SEQ ID NO: 75440 - DNA, 1119 bp, Gloeobacter violaceus PCC 7421
  CDS (1)..(1119): transl_table=11
gtgcccggcggctctcgcgatgtcggcgagttcgcctttgagccgctcgacgatttgcggatcgtctcggtgagtgagattcctcctccagtgcaactgcgcgagcaattgcctctggatgcggctgcccagaatacagtgcgccggggccgctcgcagattcgcgctgtattgggcggctttgattcacgcctgttggtggtggtcggcccctgttcggtgcacgacgccgatgcggcgcgcgagtacgcccagaggctggccgagtgcgcccgccgctatgcggacgaactgctcatcgccatgcgcgtttacttcgagaaaccgcgcaccacggtcggctggaaaggactcatcaacgatcccggcctcgacggcagctgtcgtatcggtgagggactgaccaccgcccgcgcgttgctgctcgacattgcccggctcggactgccggcggccaccgaatttctcgacccgatcacccccgagtacatcgtcgatctgatcagttggggggcgattggggcgcgcacggtcgaaagtcaggtgcacaggcaagtggcttcggcgctttcctgtccggtgggttttaaaaacggctcctccggcgacatcgccgttgccgtcgaagcggtgctctcggcgcgcaacgcccatcagttcctttcgcacacccgcgagggtcgcacggctatcgtgctgaccagcggcaatcccgattgccatgtcgtgttgcgcggcggcaaaaacggccccaaccactcggctgaacatctcgcgcaggcagggcggttgttgcgcgaggcgggcttgccggagcgggtgatggtcgactgcagccacgccaacagctccaaagatcaccgccgccagggggaagtctgcaaacagttggcggcacggattgccgagggggatatgcggatgatgggcctgatgatcgaaagtcacctagtcgaagggcggcaggagttaggcgacggctgcaacttgcgccacggtcagagcatcaccgatgcgtgcatcggctgggaacagacagagcaattgcttaccggcctacacgaggcggccggcgctagacggtgtaagccggccgtccgcgccgagttgctggtttga

SEQ ID NO: 75441 - protein, 372 aa, Gloeobacter violaceus PCC 7421
MPGGSRDVGEFAFEPLDDLRIVSVSEIPPPVQLREQLPLDAAAQNTVRRGRSQIRAVLGGFDSRLLVVVGPCSVHDADAAREYAQRLAECARRYADELLIAMRVYFEKPRTTVGWKGLINDPGLDGSCRIGEGLTTARALLLDIARLGLPAATEFLDPITPEYIVDLISWGAIGARTVESQVHRQVASALSCPVGFKNGSSGDIAVAVEAVLSARNAHQFLSHTREGRTAIVLTSGNPDCHVVLRGGKNGPNHSAEHLAQAGRLLREAGLPERVMVDCSHANSSKDHRRQGEVCKQLAARIAEGDMRMMGLMIESHLVEGRQELGDGCNLRHGQSITDACIGWEQTEQLLTGLHEAAGARRCKPAVRAELLV

SEQ ID NO: 75442 - DNA, 1095 bp, Photorhabdus luminescens subsp. laumondii TTO1
  CDS (1)..(1095): transl_table=11
atgttcatgcaaagagatgcacttaataacgttcacatcagtggtgagcaaattcttatcaccccaaaagaattaaagcaacaatacccactgagtgatgatgatctgcatgttattgcaaatgcacgtaaaacaattgcggatattattcagcgccgtgatccccgtttgctggtagtgtgtggtccttgctctattcatgacgtggatgcggcgctggattatgctcaccgtttggccgctctttctgctgaattgagtgatagcttgtacattgtcatgcgtgtctattttgaaaagcctcgaacaacagtgggttggaaaggtcttattaatgatccatacatggatggttcatttgatgtggaagctggcctgcatattgcccgccgcttactacttagtttagtgaaaatgggattgcctcttgcaacagaagctttagatccgaatagcccacaatatttgggggatttattcagttggtctgcaattggtgcgagaaccacagaatcccagacacaccgggaaatggcttcaggtttatctatgccggttggtttcaaaaatgggactgacggtagcttgaacacggcaattaatgcgatgtgtgcagccgctatgccacatcgttttgtgggaataaaccagtcggggcaggtgtgtttattacaaacgcaaggaaacccgaatggacatattatcttgcgtggtggtaagacccctaattacagtgttcaacatgtaatggaatgtgaacagcaaatgatgcaggctggattattgccatccttgatgattgattgtagtcatggtaactctaataaggattttcgtcgccaaagtttggttgtagattctgttgcggatcagatcatttcaggtaatcaatctattactggcattatgttggagagccatattaatgaaggtaaccaatcttctgagcaaccgcgtagtgaaatgaaatatggtgtatcagtcactgacgcgtgtattagttggcagacgacagaagcagttctaagaaaattacatcagcaaattagcatgcaattgtcgcaaagaatggcagtattgaaaaaagcgggataa

SEQ ID NO: 75443 - protein, 364 aa, Photorhabdus luminescens subsp. laumondii TTO1
MFMQRDALNNVHISGEQILITPKELKQQYPLSDDDLHVIANARKTIADIIQRRDPRLLVVCGPCSIHDVDAALDYAHRLAALSAELSDSLYIVMRVYFEKPRTTVGWKGLINDPYMDGSFDVEAGLHIARRLLLSLVKMGLPLATEALDPNSPQYLGDLFSWSAIGARTTESQTHREMASGLSMPVGFKNGTDGSLNTAINAMCAAAMPHRFVGINQSGQVCLLQTQGNPNGHIILRGGKTPNYSVQHVMECEQQMMQAGLLPSLMIDCSHGNSNKDFRRQSLVVDSVADQIISGNQSITGIMLESHINEGNQSSEQPRSEMKYGVSVTDACISWQTTEAVLRKLHQQISMQLSQRMAVLKKAG

SEQ ID NO: 75444 - DNA, 1053 bp, Photorhabdus luminescens subsp. laumondii TTO1
  CDS (1)..(1053): transl_table=11
atgaattaccagaatgacgatataagaattaaagagataaaagaattattacctcctgtggcactacttgaaaaatttccagcaactgaaaaggctgcattgacagtatgtaaggcgcgtaaaacgattcatcaaattctgacgggtgaagatgagcgtctgttggtggtgattgggccatgttctattcatgatcctaaagcagcaatggaatatgccgggcggttgaatgaattgcgtgaagagctgaaagaggatctggaagttgtcatgcgagtttattttgaaaaaccgcgcacaactattggctggaaagggttaattaatgaccctcatatgaatcacagttttgatattaatgatggtttgcgtttagctcgtcagttgttacgggatattaatgatatggggctaccggctgcgggtgaatatctggatatgatttctccacagtatttagccgatttgatgagttggggagcaattggcgctcgtacaacggaatctcaggtccatcgtgagttggcttctggtctttcctgtccggttggttttaaaaatggtactgatggtgcgataaaagttgccattgatgcgattaatgcagcgggttcccctcacagtttcctttctgtcactaagtggggacattctgcgattgtaaataccagcggaaacaacgattgtcatattatcctgcgtggcggtaaagagccgaattacagttctgaacatgttgctgtcgtgaagcaaaacttggaaaaagcaggtttaccggcaagaattatgattgatttcagtcatgccaatagttctaagcaatttaaaaagcagatggatgtgtgttcagatgtgagccggcagcttattgctggggagaaagcgattattggtgtcatggtagaaagtcatttggaagagggaaatcagaacccggatagcggtctgccattggtatatggcaaaagtattactgatgcttgcattggttgggctgacactgaaattttgttacgtcaattgtcgtcggcaataaaagcgcgtcgtggctga

SEQ ID NO: 75445 - protein, 350 aa, Photorhabdus luminescens subsp. laumondii TTO1
MNYQNDDIRIKEIKELLPPVALLEKFPATEKAALTVCKARKTIHQILTGEDERLLVVIGPCSIHDPKAAMEYAGRLNELREELKEDLEVVMRVYFEKPRTTIGWKGLINDPHMNHSFDINDGLRLARQLLRDINDMGLPAAGEYLDMISPQYLADLMSWGAIGARTTESQVHRELASGLSCPVGFKNGTDGAIKVAIDAINAAGSPHSFLSVTKWGHSAIVNTSGNNDCHIILRGGKEPNYSSEHVAVVKQNLEKAGLPARIMIDFSHANSSKQFKKQMDVCSDVSRQLIAGEKAIIGVMVESHLEEGNQNPDSGLPLVYGKSITDACIGWADTEILLRQLSSAIKARRG

SEQ ID NO: 75446 - DNA, 1047 bp, Photorhabdus luminescens subsp. laumondii TTO1
  CDS (1)..(1047): transl_table=11
atgtacaaaacagatggtttaaggactcaccgtgtcgatagtttagtcacacctcaaactcttgcaattcaatttcctgtatccgaaaaaatcgtcaataatgtgacagcgtcacggaaacgtattgccgatattctcagcgggaatgatccacggcttatggtaatcatcggtccttgttctattcatgatattgatgctgctttagattatgctcagcgactgaacaggttacgtgaaaaataccagcacagactggaaattattatgcgcacctattttgagaaaccacgcacagtggtgggctggaaaggtttaatttcagacccctatctcgacggttcttgccaggtaaatcggggtattactttggcccggaaattattggttgatgtcaatgagttgggtttacccacagcaaccgaatttctggatatggtgaccggccaatatattgccgatctgatcagttggggcgcgatcggagccagaacaacagaaagccagattcaccgagaaatggcatctgccctctcctgtccagttggctttaaaaatggaacggatggcaacatccgtatcgccatagatgcaatccgcgcagccggggtctgtcacacattcctctcgccggataagcgcggtcagatgaccatctatcaaaccgaaggcaacccatacggccacattattatgcgtggaggcaaacagcctaattacagtgccaaagatattgctacagcttgtactcaactacgtgaatttaatttaccagaacatttagttatcgatttcagtcatggtaattgtcaaaaaattcataaacgccaactgactatagcaaaagaggtgggtcaccagattcaagagggttctaccgctattgtcggtgtaatggttgaaagttttctggttgaaggcacccagcaagtcattcagggacaaccgctaaattacggtcaatcgatcaccgatccttgtctaaactggcaagatacagaacagcttattgacattctcgccgaagcagtaagttaccgtttctga

SEQ ID NO: 75447 - protein, 348 aa, Photorhabdus luminescens subsp. laumondii TTO1
MYKTDGLRTHRVDSLVTPQTLAIQFPVSEKIVNNVTASRKRIADILSGNDPRLMVIIGPCSIHDIDAALDYAQRLNRLREKYQHRLEIIMRTYFEKPRTVVGWKGLISDPYLDGSCQVNRGITLARKLLVDVNELGLPTATEFLDMVTGQYIADLISWGAIGARTTESQIHREMASALSCPVGFKNGTDGNIRIAIDAIRAAGVCHTFLSPDKRGQMTIYQTEGNPYGHIIMRGGKQPNYSAKDIATACTQLREFNLPEHLVIDFSHGNCQKIHKRQLTIAKEVGHQIQEGSTAIVGVMVESFLVEGTQQVIQGQPLNYGQSITDPCLNWQDTEQLIDILAEAVSYRF

SEQ ID NO: 75448 - DNA, 1245 bp, Vibrio vulnificus YJ016
  CDS (1)..(1245): transl_table=11
ttgaaaaccaaagcgaggcgctttggtttttttataatgtgtaatttattttttacatttgatgttttttattgtttacggttgatttttaattcaaccctgttaacttgtgttcaaacagatttcgactctcagggatatgagggtgtaaaaaataatatacaggtgagtgtcatgcagaaaagtgaactaagcaatattaatatcagcgatgaacaagtgctgattacgccagaacagctaaaacagaaactgccactgagcgacaacgcccgccgcttcattcaagagtcgcgtaataccgtcgccaatattattcataagcaagatcatcgtctgctggtggtttgtggtccttgttctattcacgatctggacgcggcaaaggattatgcgcgtcgcctaaaagcgctctccgccgagttaagcgatcaactgtatattgtgatgcgtgtttactttgaaaaacctcgtacaactgtgggttggaaagggctcatcaacgaccctcatctggatggtagcttcgatattgagcatggtctgcatgttggccgtcaattgctggtggagctggctgaaatggagatccctctggcgacagaagcactcgacccaattagtccgcaatacttggctgatacattcagttgggctgcgattggtgcgcgtacgacagaatcacaaactcaccgtgaaatggccagtggtttgtctatgccgattggttttaaaaatggcacggatggcagcttgtcaacggcgattaacgcaatgcaagcggcctcttcaagccaccgttttatggggatcaaccgtgaaggccaagtggcattgctgacgactcaaggtaacccaaatggtcacgtgattttgcgtggtggtaagcagaccaactacgattctgtgtcggtggcggagtgtgagcaagacatggccaaagtgggtttagatgcgtcattgatggtggattgtagccatgccaattcgcgcaaagattaccgtcgtcagcctttagtcgccgaagacgtgattcatcaaattcgcgaaggcaacaaatcgatcattggtttgatgattgaaagccacattaatgaaggtaatcaatcctcagatttaccgctttctgagatgcagtacggtgtttctattaccgatgcctgtatcaattggcaggcaactgaggcactattgcgtaaagcacacaaagagttagtgccacatttagaaaaccgtctcaaataa

SEQ ID NO: 75449 - protein, 414 aa, Vibrio vulnificus YJ016
MKTKARRFGFFIMCNLFFTFDVFYCLRLIFNSTLLTCVQTDFDSQGYEGVKNNIQVSVMQKSELSNINISDEQVLITPEQLKQKLPLSDNARRFIQESRNTVANIIHKQDHRLLVVCGPCSIHDLDAAKDYARRLKALSAELSDQLYIVMRVYFEKPRTTVGWKGLINDPHLDGSFDIEHGLHVGRQLLVELAEMEIPLATEALDPISPQYLADTFSWAAIGARTTESQTHREMASGLSMPIGFKNGTDGSLSTAINAMQAASSSHRFMGINREGQVALLTTQGNPNGHVILRGGKQTNYDSVSVAECEQDMAKVGLDASLMVDCSHANSRKDYRRQPLVAEDVIHQIREGNKSIIGLMIESHINEGNQSSDLPLSEMQYGVSITDACINWQATEALLRKAHKELVPHLENRLK

SEQ ID NO: 75450 - DNA, 1053 bp, Vibrio vulnificus YJ016
  CDS (1)..(1053): transl_table=11
atgccactaaaaacagatgaattgagaacccaacctttgggtccaatgccaactcccgctgagttgagccaagcccatccgattaccgacgatgtggccgagcgaattgcgaaatctcgcagacaaattgaagatattttaacgggtaaggacaaccgtcttttggtgattgtcggtccttgctctgtgcacgatactgaagccgcgattgattacgcgacgcgtttaagctcgattcaagagcagtatcgcgatgagctgttcatcgttatgcgtacctactttgaaaaaccacgcactgtggtgggctggaaaggcctcattaccgacccaaatctggatggctcgtatgcgctagaagctggcctgcataaagcacgtaagctattgctcgatatcaacaaacttggccttgccaccgcaaccgagtttcttgacatgatcaccggtcaatatattgctgatttgatcacttggggcgcgattggagctcgaaccactgaatcgcaaattcaccgtgaaatggcgtctgcactctcctgcccggttggctttaaaaacggcaccaacggcaacgtgaaaattgcgattgacgcaattcgcgcatcaaaagcttcgcattacttctactctccagataaaaatggccgcatgaccgtttaccgcaccagtggtaacccatatggacatattattctgcgtggtggtgatacaggccctaactttgacgcaaaatcggttgagtctgcctgtcaatcactggctgagttcgatttgccacaacgtttgatcgttgatttcagtcacgctaactgtgaaaagcaacatcgtaaacagctcgatgtcgcgcaagacatttgtaaccaactaaaagcgggcagcacttatatcgcaggcatcatggcagaaagcttcattaccgaaggcaatcagccgatgactgaccttgataacttgacctacggccaatcgatcactgacccttgcctaagctgggaacacacagcgcaaatgctggacatgcttgcgactgctgtaaaagaaagccgttaa

SEQ ID NO: 75451 - protein, 350 aa, Vibrio vulnificus YJ016
MPLKTDELRTQPLGPMPTPAELSQAHPITDDVAERIAKSRRQIEDILTGKDNRLLVIVGPCSVHDTEAAIDYATRLSSIQEQYRDELFIVMRTYFEKPRTVVGWKGLITDPNLDGSYALEAGLHKARKLLLDINKLGLATATEFLDMITGQYIADLITWGAIGARTTESQIHREMASALSCPVGFKNGTNGNVKIAIDAIRASKASHYFYSPDKNGRMTVYRTSGNPYGHIILRGGDTGPNFDAKSVESACQSLAEFDLPQRLIVDFSHANCEKQHRKQLDVAQDICNQLKAGSTYIAGIMAESFITEGNQPMTDLDNLTYGQSITDPCLSWEHTAQMLDMLATAVKESR

SEQ ID NO: 75452 - DNA, 1053 bp, Vibrio vulnificus YJ016
  CDS (1)..(1053): transl_table=11
atgttccaaacagatgatgtaagaattaataacgttaaagagttacttccaccagtagctgttttagagaagtacccagcgactgaaaccgcttcttcgacaactttccaatcgagaaacgacattcacaacattctcatcggcaaggacgatcgcctgctggttattgtcggcccttgctctatccacgatcctgtggccgcggttgaatacggcaagcgtttgaaaacgttgcgtgacgatctcaaaggtgagcttgaaattgttatgcgcgtttactttgaaaagccacgtaccactgtgggttggaaaggtttgattaatgacccgtaccttaacgacacctacaagttgaatgatggtttacgcatgggccgaaaactgttgttggatcttaccgatatgggtcttccaacggcgagtgagttccttgacatgatcacaccacagtatgtggctgatttgatcagttggggtgctattggtgcacgtaccacggaatctcaggttcaccgtgaactggcgtcgggtctttcttgtccggttggttttaaaaatggcacggatggcaacattaagattgcaagtgatgcgattcgctcagcaagtgcttctcaccatttcctatcggtaacgaaatacggccattctgctatcgttgaaaccgcgggtaatccagactgccacattattttgcgtggtggtaaagagccaaactacagtgcagcgcatgtttcagcggtaaaagaagagttagctacatcgggtttgccacaaaaagtgatgatcgacttcagccacgccaacagctccaagcagtataagcgtcaaatgttggtcgccgacgatgtctctgagcagctagcggctggtgaagaggcaatctttggggtgatgatcgaatcacatcttgtggaaggtcgacaagatcttgttgatggtaaagcggcgacttatggtcagtcgattaccgacgcttgtatcggttgggaagatactgaaactgtgcttcgccaattggcaaatgcagtggcagctcgtcgagcaaaatag

SEQ ID NO: 75453 - protein, 350 aa, Vibrio vulnificus YJ016
MFQTDDVRINNVKELLPPVAVLEKYPATETASSTTFQSRNDIHNILIGKDDRLLVIVGPCSIHDPVAAVEYGKRLKTLRDDLKGELEIVMRVYFEKPRTTVGWKGLINDPYLNDTYKLNDGLRMGRKLLLDLTDMGLPTASEFLDMITPQYVADLISWGAIGARTTESQVHRELASGLSCPVGFKNGTDGNIKIASDAIRSASASHHFLSVTKYGHSAIVETAGNPDCHIILRGGKEPNYSAAHVSAVKEELATSGLPQKVMIDFSHANSSKQYKRQMLVADDVSEQLAAGEEAIFGVMIESHLVEGRQDLVDGKAATYGQSITDACIGWEDTETVLRQLANAVAARRAK

SEQ ID NO: 75454 - DNA, 1071 bp, Vibrio vulnificus YJ016
  CDS (1)..(1071): transl_table=11
atgcctacgctcagcaaattgattcactccactccttgtggaacactcccttctgtggaagagatcattcaacacgcctcactggacgaagagagcgaagcgtttatccgacaacgtcgccaagacatcactcgaattctaaatggccaagaccctcgattactggtgatcatcggcccatgttcaattcacgacccgcaagcaggcctagaatatgcgcagaaactggccaacattcagcatcagcatgaaaagcaacttctgattgtgatgcgaacttactttgaaaaaccacgcacacgcgcaggatggaaagggctgatcgtcgatcccgatctcgataacagccacgacattaataaaggtctgcggcttgctcgacatttcttacagcaagtcatcaagcttggcctcgcgacggcaaccgagtatttagacaccacgacttacccctatatttctgacctcatttgttggggggccattggcgcgaggacaactgaatctcaaattcaccgtcaaatggcctcggcgcttccctgccctattggtttcaaaaacgggaccgacggcaatgttgatattgctatcgacgcgatacacgcggcaaactcaccccatctcatctgtgtgccaggatttggggcacgtactctcacagccatcagtcatggtaaccccaatggccatatcattttgcgaggtggcaaaacaccaaactacaccaccgagcatgtttgccaaatcagccaacaactggaagccaacgatcttaacccgcgcctgatcattgattgcagccatggcaatagcctgaaagtggcaaagaaccaactcgatgtggcgagaaacatcgcctgtcagttgatcgaaggagaaaaatgcattgcaggcgtgatggcggagagcttcttggtagcaggcgcgcaaaagatcaccgatcgtccgttgatcaaaggcatgtcgattactgatgaatgtttggggtgggaagagacagaaagtattctcaatatttttgcggaagcggtgaatatcgtgatgacggagcgcttttccaccgttgcctaa

SEQ ID NO: 75455 - protein, 356 aa, Vibrio vulnificus YJ016
MPTLSKLIHSTPCGTLPSVEEIIQHASLDEESEAFIRQRRQDITRILNGQDPRLLVIIGPCSIHDPQAGLEYAQKLANIQHQHEKQLLIVMRTYFEKPRTRAGWKGLIVDPDLDNSHDINKGLRLARHFLQQVIKLGLATATEYLDTTTYPYISDLICWGAIGARTTESQIHRQMASALPCPIGFKNGTDGNVDIAIDAIHAANSPHLICVPGFGARTLTAISHGNPNGHIILRGGKTPNYTTEHVCQISQQLEANDLNPRLIIDCSHGNSLKVAKNQLDVARNIACQLIEGEKCIAGVMAESFLVAGAQKITDRPLIKGMSITDECLGWEETESILNIFAEAVNIVMTERFSTVA

SEQ ID NO: 75456 - DNA, 1095 bp, Rhodopseudomonas palustris CGA009
  CDS (1)..(1095): transl_table=11
gtgttgaccaccacagacgaccttcgccttcagaaaatcaccgagctgagtacgcctgccgaggtgatgggcgagattccgcgcacactgaccgcaacgcgtaccgttgcggcgagccgcagcgcgattcatgccatcctgaacggagccgacgaccggctcctcgtcgtcgtcggcccctgttcgattcacgatccggccgcagccatggactatgccagccgtctggcggcgctgcgcgagaccctggccgaccggctcgagatcgtgatgcgggtgtatttcgaaaagccgcgcaccacggtgggttggaagggactgatcaacgaccccgatctcgatggcagcttccggatcgacaaggggctacggttggcgcgggaagtactctcggccgtgaacaatctcggcctgccagcggcgaccgaattcctcgatctgatcacgcctcaatacatcgcggatctcgtcgcctggggcgcgatcggcgcgcgcaccaccgagagccagatccaccgcgaactcgcgtcaggcctgtcatgcccaatcggcttcaagaatggcaccgacggcaatgtccggatcgccgcggaggcggtgaagtccgcggcgcagccgcatcatttcatggcggtgaccaagggcgggcgcaatgcgatcgcggccaccactggtaacagcgactgccacgtcatcctgcgcggcggcgtcacaccgaactacgatgccgcaagtgtggaagccgccgcagcggtcctcggcaagatcggcctgccgccgcgcctgatgatcgacgccagccacgccaacagcagcaagcagccggacaaccagccgaaggtaacggccgatatcgggcgtcagatggcggctggcgagagccgcatcatcggcgtgatgatcgagagcaatctggtcgccggtcggcaggatgtggcgccgggtcggccgctgcaatacggccagagcatcaccgacggctgtatcgactgggcgacgaccgagacggtgctgcacgagctagccgatgcggtcgagagccggcgagctgcgcggcacgccgcaagcgctcagcagaaaggtgctgcggcgtga

SEQ ID NO: 75457 - protein, 364 aa, Rhodopseudomonas palustris CGA009
MLTTTDDLRLQKITELSTPAEVMGEIPRTLTATRTVAASRSAIHAILNGADDRLLVVVGPCSIHDPAAAMDYASRLAALRETLADRLEIVMRVYFEKPRTTVGWKGLINDPDLDGSFRIDKGLRLAREVLSAVNNLGLPAATEFLDLITPQYIADLVAWGAIGARTTESQIHRELASGLSCPIGFKNGTDGNVRIAAEAVKSAAQPHHFMAVTKGGRNAIAATTGNSDCHVILRGGVTPNYDAASVEAAAAVLGKIGLPPRLMIDASHANSSKQPDNQPKVTADIGRQMAAGESRIIGVMIESNLVAGRQDVAPGRPLQYGQSITDGCIDWATTETVLHELADAVESRRAARHAASAQQKGAAA

SEQ ID NO: 75458 - DNA, 1068 bp, Geobacter sulfurreducens PCA
  CDS (1)..(1068): transl_table=11
atgattcgcacgagcaacctgaagatcaaaagtattacccccatcattgcaccgggggaattacgccaggtgtttccccagtcggaggaggcggccgagttcgtcaactccagccgcgcccatatcaagaatatcctcaagggcaaggatccgcgcctgatggtggtggtgggcccctgttccattcacgatccgaaatcggctctggagtatgcggggcggctggcacgcctggcggccgaactgtcggatcagctattcatcgtgatgcgggtctacttcgaaaagccccgcactaccgtaggctggaagggactcatcaatgaccccgacatgaacggcacccatcagatatccaaggggctcggcatcgcccggcggctgctgtccgaaataacggaaatgctcctgccggtggcaaccgaaatgcttgaccccatcacgcccgactacctcgcggattgcatctcctggggagccatcggcgctcgtaccaccgagagccagacccaccgcgagatggccagcggcctctcgttccccgtgggattcaagaacggcaccgacggcaatctccagatagccatcgacgccatgaatgcggcactccattcccacagctttctcggcgtcaaccgggaggggcgcacctccatcattcagaccaccggcaaccccgatgtccacatcgtcctgcggggaggcaaaaaaccgaactatttccccgaagacatcagaaagaccgaagagatgctggaaaagggggggctcttccccaccatcatggtcgactgcagccacggcaactcggaaaaacgccacgagaagcagcccgacgtactctcttccgtcgtggaccagattgcggccggcaaccgctccatctccggcgtcatgatcgagagttttctggaagaagggaaccagtcgatccccagagatctctcaaccctcaagtacggcgtatccatcaccgacaagtgcattgactggaagaccaccgaaaccatcctgcgctcggcccacgaccgcctcaaggccgcgggaggcaggcccctgcacgggtaa

SEQ ID NO: 75459 - protein, 355 aa, Geobacter sulfurreducens PCA
MIRTSNLKIKSITPIIAPGELRQVFPQSEEAAEFVNSSRAHIKNILKGKDPRLMVVVGPCSIHDPKSALEYAGRLARLAAELSDQLFIVMRVYFEKPRTTVGWKGLINDPDMNGTHQISKGLGIARRLLSEITEMLLPVATEMLDPITPDYLADCISWGAIGARTTESQTHREMASGLSFPVGFKNGTDGNLQIAIDAMNAALHSHSFLGVNREGRTSIIQTTGNPDVHIVLRGGKKPNYFPEDIRKTEEMLEKGGLFPTIMVDCSHGNSEKRHEKQPDVLSSVVDQIAAGNRSISGVMIESFLEEGNQSIPRDLSTLKYGVSITDKCIDWKTTETILRSAHDRLKAAGGRPLHG

SEQ ID NO: 75460 - DNA, 1071 bp, Treponema denticola ATCC 35405
  CDS (1)..(1071): transl_table=11
atgataaaaaaccttattgacctccgaatcgagaggattcattgcataagttctcctgccgaaatggtagaaaaaatacccgcctcggattctctttattcttttatagccgaagcccgaaaaactatcagcaatataataaacggaaaggatgagcgttttttactcatagtcggcccctgctcgattcatgacacggaggcagccgaggattatgctatgcgcctattagagctaaaaaagaaatgctccgattctttctatattataatgcgtacctactttgaaaaacccagaaccgttttaggctggagaggccttatcgtagaacctgaacttgacggctttatcaatattgaaggcggcattcaaaagacaagaaaatttcttattaaacttgccgaaataggcattcctgcagcctccgaaatggtagaccctatgattccccaatacattgccgaccttgtaagctgggcttcgataggagcacgctcagccgaaagtcaaatccacagagaactggcctcaggactttcaatgccggtcggctttaaaaataccacctacggagacataacggccgctataaacggagttattgtttcccgcctgccccatgcctttgtaggcattgcccgaaacggactttcggcaatagtgcacacaaccggaaatcccgacactcacttggttttaaggggaggggtttcaaagcccaattataatagagaagaaattgaaaaagcagcctctcttatgaaggaaaaaatgctgaaaccgagcatagtaatagactgctcccacggaaattcgggaaaggacccgaaaaaacagataaacatctttgaagaaagcttaaaactccgcttcgataagaatgaacctcttgactatataaggggctgtatgattgaaagctttatccaagagggaagcacctcgatcgaaaaagcaaaggaacgcagcgaatacggtaaatccataaccgacccctgcctaggctgggaagaaactcaaacagaaatactaaaaatctatgaaaaatacaaaaggagaaagcaaaaatga

SEQ ID NO: 75461 - protein, 356 aa, Treponema denticola ATCC 35405
MIKNLIDLRIERIHCISSPAEMVEKIPASDSLYSFIAEARKTISNIINGKDERFLLIVGPCSIHDTEAAEDYAMRLLELKKKCSDSFYIIMRTYFEKPRTVLGWRGLIVEPELDGFINIEGGIQKTRKFLIKLAEIGIPAASEMVDPMIPQYIADLVSWASIGARSAESQIHRELASGLSMPVGFKNTTYGDITAAINGVIVSRLPHAFVGIARNGLSAIVHTTGNPDTHLVLRGGVSKPNYNREEIEKAASLMKEKMLKPSIVIDCSHGNSGKDPKKQINIFEESLKLRFDKNEPLDYIRGCMIESFIQEGSTSIEKAKERSEYGKSITDPCLGWEETQTEILKIYEKYKRRKQK

SEQ ID NO: 75462 - DNA, 1113 bp, Magnaporthe grisea 70-15
  CDS (1)..(1113)
atgtcgttcttcatcccaaacaagaatgttggcaacaaggaggaaagtgaagactggaggatccgtggatacaaccctctcacgtctcccgatctcctccaacatgagatcagtcagacccccgagtctaggcagacggtgatgcagggccgcgaggaggcagctgctgttgtcaacggcaacgaccccatgaacaggttgctcgtcatcgtcggcccgtgctccatccatgacccagaagccgcccttcagtactgcgacatgctggtcaaggagaaggagaagcacaaggacgagctgctcatcgtcatgcgagcctacctggaaaagccccggacgaccgtcggctggaagggtctcatcaacgacccggatatcgacaacagcttcaagattaacaagggtctcaagatgtcccgccagctgtttgtcgacctcaccagcaaggggatgccgatcgcttcggagatgcttgacaccatctcaccccagttcctcgccgatctcctttctgcaggcgcagtcggtgcccgcaccaccgagagccagcttcaccgcgagctggcctctggcctatcgttccccgtcggcttcaagaacggcaccgacggcacactgggcgtcgccatcgacgctatcggcgccgttaagcacccccaccacttcttgtcggtgaccaagccgggcgtggtggccatcgtgggcacagtcggcaacgaggactgcttcgtgatcctgcgcggcgggaaaaagggcaccaactatgacgccaagagcatcggcgaggccaaggaggctctggtcaaggccgggctcaggccgcgcctcatggtcgactgcagccatggcaactcgctcaaggaccaccgcaaccagcccaaggtctcccacgagctggccgaacagatcaaggcgggcgaggatgccatcatgggcgtcatgatcgagagcaacatcaatgagggcagccagaaggtgcccaaggagggcaaggctgggctgaagcacggcgtcagcatcacggatgcgtgcatctcatggcaggacaccgttacggtgcttgacgagctcgctgctgctgtcaagcagaggcgggaggctgcgcaaaagtaa

SEQ ID NO: 75463 - protein, 370 aa, Magnaporthe grisea 70-15
MSFFIPNKNVGNKEESEDWRIRGYNPLTSPDLLQHEISQTPESRQTVMQGREEAAAVVNGNDPMNRLLVIVGPCSIHDPEAALQYCDMLVKEKEKHKDELLIVMRAYLEKPRTTVGWKGLINDPDIDNSFKINKGLKMSRQLFVDLTSKGMPIASEMLDTISPQFLADLLSAGAVGARTTESQLHRELASGLSFPVGFKNGTDGTLGVAIDAIGAVKHPHHFLSVTKPGVVAIVGTVGNEDCFVILRGGKKGTNYDAKSIGEAKEALVKAGLRPRLMVDCSHGNSLKDHRNQPKVSHELAEQIKAGEDAIMGVMIESNINEGSQKVPKEGKAGLKHGVSITDACISWQDTVTVLDELAAAVKQRREAAQK

SEQ ID NO: 75464 - DNA, 1152 bp, Magnaporthe grisea 70-15
  CDS (1)..(1152)
atgtccaacggaacgaacatggtgccggcccaggtcgtctttgacgataccagagtcctgggtcaggaccctctgatccctccccagatcttgatggaggagatcccgatcaccaaagccgccctcgagacagtcgttcgcggtcgccaggaggccgtcgcttgcgtcattggccgtgacgaccgccttctcgttatcgttggaccctgctcgattcacgacccggcagcggccctcgaatactgccaacgcctcaaggccctggccgacaagctctcagatgacctctgcatcgttatgcgcgcctacctcgaaaagcccaggaccacggtgggctggaagggtctgatcaacgaccccgatatcgaccagaccttcaagatcaacaagggactgcgcatttcgcgacagatcttctgcgacctgacctcggccggtatgcccatcgccagcgagatgctcgataccatttctcctcagttcctggccgatctgatctcggttggtgctatcggcgcccgcacgaccgaaagccaattgcaccgagagttggcatctggtctttcgttccccgtgggattcaagaatggaacggacggtaacctcggtgtcgcgattgatgccatcggagctgccgcctcaaagcactcatttatgggtgtgacaaagcagggtctggctgccatcacccggacggcgggcaaccaacatggtttcgtcatcctgaggggtggtaccaagggtcccaactttgacaaggctagtgttcaggccgccaaggagacacttgtccagaagggccagaggcaggccattatgattgactgctcgcatggcaattccaacaaggaccaccgcaaccaacccaaggttgccaaggtcattggtgaccagctgcgcgagggtgagaggtccatcattggtgtcatgatcgagtccaacatcaacgagggcaaccagaaggtgccggctgaaggcccgtccggcctcaagaagggcgtcagcatcacggacgcctgtatcgactgggacagcacagtcgctgtcctagaggatctggctgatgcggtacgagcgcggaggagtctttaccccaatgaccgcaacgttgacagggaggagaggctcgcaactcctcttgaggaggactaa

SEQ ID NO: 75465 - protein, 383 aa, Magnaporthe grisea 70-15
MSNGTNMVPAQVVFDDTRVLGQDPLIPPQILMEEIPITKAALETVVRGRQEAVACVIGRDDRLLVIVGPCSIHDPAAALEYCQRLKALADKLSDDLCIVMRAYLEKPRTTVGWKGLINDPDIDQTFKINKGLRISRQIFCDLTSAGMPIASEMLDTISPQFLADLISVGAIGARTTESQLHRELASGLSFPVGFKNGTDGNLGVAIDAIGAAASKHSFMGVTKQGLAAITRTAGNQHGFVILRGGTKGPNFDKASVQAAKETLVQKGQRQAIMIDCSHGNSNKDHRNQPKVAKVIGDQLREGERSIIGVMIESNINEGNQKVPAEGPSGLKKGVSITDACIDWDSTVAVLEDLADAVRARRSLYPNDRNVDREERLATPLEED

SEQ ID NO: 75466 - DNA, 1128 bp, Gibberella zeae PH-1
  CDS (1)..(1128)
atgtcttcctctttctttatcccaaacaagaatgttggcaaccaagctgactctgaagattggagaatccgtggttacaaccctttgactcccccagacctgctccaacacgaaatctcccaatcccccgaatctaaaaagacggtcctcgaaggacgcaatgaaactgtcgctattgtcaatggcaccgacgagaagaaccgattgctcgttgtcattggcccatgttccatccacgaccccgcggctgcccttgcctactgcgacctcctcttgaaggagaaggagaagcataaggatgagcttcttatcgttatgcgatcctaccttgagaagccgcgcacaactgtcggctggaagggtttgatcaacgaccccgatattgatggcagctttaagatcaacaagggtctgcgcatctctcgacagctctttgttgacttgactgccaagggcatgcctatcgccagcgaaatgctggatactatctcaccccagttccttgctgatctactgtcagtcggtgccattggcgctcgtacaactgagagccagctccaccgtgaacttgccagtggcctgagtttccctgtgggtttcaagaacggcactgatggttctctgggcgtcgctattgatgccattggtgcggcccagcatcctcaccatttcctctcagtcaccaagcctggtgttgtcgccattgttggtaccgagggcaacaacgactgcttcgttatcctccgaggtggtaccaagggcaccaacttcgatgctgagaacattgctcttgccaaggaggcgcttcagaagaagggcgttcgacagagagttatgattgactgcagccacggaaactcttccaaggatcacaagaaccagcccaaggttgctgctgatatcgctggtcagatctccaagggcgaggatggcatcatgggagtcatgatcgagagcaacatcaacgagggtaaccaaaaggttcccgccgagggcaagtccgggcttaagtacggcgtcagcatcactgatgcctgtattagctgggaggacaccatctctacgctcaacactcttgcgcaggcagtaaaagaccgccgcaagcttgccagctcaaatggtgcctaa

SEQ ID NO: 75467 - protein, 375 aa, Gibberella zeae PH-1
MSSSFFIPNKNVGNQADSEDWRIRGYNPLTPPDLLQHEISQSPESKKTVLEGRNETVAIVNGTDEKNRLLVVIGPCSIHDPAAALAYCDLLLKEKEKHKDELLIVMRSYLEKPRTTVGWKGLINDPDIDGSFKINKGLRISRQLFVDLTAKGMPIASEMLDTISPQFLADLLSVGAIGARTTESQLHRELASGLSFPVGFKNGTDGSLGVAIDAIGAAQHPHHFLSVTKPGVVAIVGTEGNNDCFVILRGGTKGTNFDAENIALAKEALQKKGVRQRVMIDCSHGNSSKDHKNQPKVAADIAGQISKGEDGIMGVMIESNINEGNQKVPAEGKSGLKYGVSITDACISWEDTISTLNTLAQAVKDRRKLASSNGA

SEQ ID NO: 75468 - DNA, 1098 bp, Gibberella zeae PH-1
  CDS (1)..(1098)
atgccttcagctactatcgacatgtctaccatcgctgccgatgacaccagagtcctcggacaggatcccttgatccctcctgctctcctcacctccgaaatccctctccccgagaaggccacaaacaccgttgtcaagggccgtcaagatgctgccgacattgtccttggccagagcgacagacttctcgtcgttgtcggcccctgttccattcacgaccctgctaccgcccaggaatacgctgcccgactcaaggaggtctctgacagactcgacaaggatctctgcatcgtgatgcgcgcctacctcgagaagccccgaacaaccgttggctggaagggtcttatcaacgaccccgatatcgacaactccttcaagatcaacaagggtctccgtgtttcccgccagctgttcgtcgacctgaccacccagggtctgccaatcgccactgagatgcttgacaccatttctcctcagttccttgctgactgtatctctgttggcgctattggtgcccgtaccaccgagtcccagcttcaccgtgagcttgcctctggtctttctttccccgttggtttcaagaacggtacagacggtagccttaacgttgccattgacgctattggcgccgccgccgctcagcaccacttcatgggtgttaccaagcagggccttgctgctatcaccagaaccaagggtaacgagcactgcttcgttattctccgtggaggaaccaagggtaccaactttgacaaggacagcgtccagaatgccaagaaggtcctccaggacaagaagcagaaggaggctatcatgattgactgctcccacggaaactcttccaaggaccaccgaaaccaacccaaggttgccaaggtcgttggtgagcagctccgtgagggtgagaaggccattattggtgtcatgatcgagtccaacattggcgagggcaaccaaaaggtccccgccgagggccctgccgctctcaagcgcggtgtcagcatcactgatgcttgcattggctgggaggacaccgtcaccgtcctcgaggacctggctgatgctgtccgcactcgtcgcaagctcaacacagcctag

SEQ ID NO: 75469 - protein, 365 aa, Gibberella zeae PH-1
MPSATIDMSTIAADDTRVLGQDPLIPPALLTSEIPLPEKATNTVVKGRQDAADIVLGQSDRLLVVVGPCSIHDPATAQEYAARLKEVSDRLDKDLCIVMRAYLEKPRTTVGWKGLINDPDIDNSFKINKGLRVSRQLFVDLTTQGLPIATEMLDTISPQFLADCISVGAIGARTTESQLHRELASGLSFPVGFKNGTDGSLNVAIDAIGAAAAQHHFMGVTKQGLAAITRTKGNEHCFVILRGGTKGTNFDKDSVQNAKKVLQDKKQKEAIMIDCSHGNSSKDHRNQPKVAKVVGEQLREGEKAIIGVMIESNIGEGNQKVPAEGPAALKRGVSITDACIGWEDTVTVLEDLADAVRTRRKLNTA

SEQ ID NO: 75470 - DNA, 1071 bp, Candida glabrata CBS 138
  CDS (1)..(1071)
atgtctgatgcgaatgctaacgaagacgtgagaatcctgggctacgacccgctggtgtcgcctgcgctgctgcaggtgcaagtgccagccacagaggtgtctatccagaccgctaggcgcgggaggaaagagtccatcgagatcatcaccggccgtgacgaccgtgtgctcgtgatcgtcggaccttgctcggttcacgacctcgacgccgcgcaggagtacgcgcagaggctgaagaagctgtccgacgagctgcagaaggacctgtgcatcgtgatgagagcgtacctggagaaaccaagaaccacggtcggctggaaagggttgatcaacgaccctgacgtcaacaacaccttcaacatcaacaagggcctgcagagcgccagacagctgttcgtgaacttgaccaacaccggtgtccctatcggctctgagatgctggataccatctccccacagtacctcgcagacctgctctccttcggtgccatcggcgcaagaaccaccgagtcccaactgcacagagaactggcatcaggtctgtccttccctatcggcttcaagaacgggaccgacggtaccttgggcgtcgccgtagacgcctgccaggccgcatcccactcccaccacttcatgggtgtcaccaagcatggtgtcgccgccatcaccaccaccaagggtaacgagcactgcttcgtcatcctgagaggtggtaagaaaggtaccaactacgacgccaagtccgtcgccgaggccaagaaacagctaccggagggcgcaaacggcctgatgatcgactactcccacggtaactccaacaaggacttcagaaaccagccaaaggtcaacgacgccgtctgcgagcaaatcgccaacggtgaaaaggccatcgtcggtgtcatgatcgagtccaacatcaacgagggcaaccagtgcatcccaccagaaggtaaggccggcctaaagtacggtgtctccatcacggatgcctgtatctcctgggaaaccaccgaagacgtcttgagaaagttggctgccgccgtcagacaaagaagagaacactacaaataa

SEQ ID NO: 75471 - protein, 356 aa, Candida glabrata CBS 138
MSDANANEDVRILGYDPLVSPALLQVQVPATEVSIQTARRGRKESIEIITGRDDRVLVIVGPCSVHDLDAAQEYAQRLKKLSDELQKDLCIVMRAYLEKPRTTVGWKGLINDPDVNNTFNINKGLQSARQLFVNLTNTGVPIGSEMLDTISPQYLADLLSFGAIGARTTESQLHRELASGLSFPIGFKNGTDGTLGVAVDACQAASHSHHFMGVTKHGVAAITTTKGNEHCFVILRGGKKGTNYDAKSVAEAKKQLPEGANGLMIDYSHGNSNKDFRNQPKVNDAVCEQIANGEKAIVGVMIESNINEGNQCIPPEGKAGLKYGVSITDACISWETTEDVLRKLAAAVRQRREHYK

SEQ ID NO: 75472 - DNA, 1119 bp, Candida glabrata CBS 138
  CDS (1)..(1119)
atgttcatcaagaatgactacagaggtgacagaacccgtctagaagactggagaatcaaaggttacgatccattgactcctcctgatcttcttcagcatgaatacccaatcagtgagaaaggtgctgccaacatactgaaagctagagattctgtgtgtgacatcttgaatggtaaggatgaccgtatggttattgtcattggtccatgctccattcatgacccaaaggcagcttacgaatacgccgataagctagcagtaatcgctgagaagctatccgatgatctacttattatcatgagagcgtacttagagaagccaagaaccaccgttggatggaagggtctgataaatgacccagatattgataactctttccaaatcaacaaaggtttaagaatctcaagagaaatgttcacaaagctgatcgaaaagcttcctattgccggtgaaatgttagacactatctccccacaattcttgagtgactgtttctctctaggtgccattggtgccagaacaactgaatcccaactgcatagagaactagcttcaggtctatctttcccaattggtttcaagaatggtaccgatggtggcctacaagttgccatcgatgctatgagagctgcatctcacgaacattacttcctttctgtcacaaagcctggtgtcaccgctattgttggtactgaaggtaactccgacacttttatcattttaagaggtggtaagcatggtaccaactacgatgctgaaaatgtgaagtccaccaaagaacaactaaggaaagcaaaattgattgatgaagctgacagtaccagaagaataatgattgactgttctcacggtaacagtaataaggactacagaaatcaaccaaaggtcgctcaagagatctacaaccaactgagtgctggtgaaaacggtttgtgtggtgttatgatcgaatctaacctagtggaaggcagacaagatgttcctccagaaggtggtcgtgagggtctaaaatatggttgctctatcactgatgcttgtattggctgggatactaccgaaagcgttttggaacttctagccgaaggtgttagaaacagaagaaagcatttatccaagtaa

SEQ ID NO: 75473 - protein, 372 aa, Candida glabrata CBS 138
MFIKNDYRGDRTRLEDWRIKGYDPLTPPDLLQHEYPISEKGAANILKARDSVCDILNGKDDRMVIVIGPCSIHDPKAAYEYADKLAVIAEKLSDDLLIIMRAYLEKPRTTVGWKGLINDPDIDNSFQINKGLRISREMFTKLIEKLPIAGEMLDTISPQFLSDCFSLGAIGARTTESQLHRELASGLSFPIGFKNGTDGGLQVAIDAMRAASHEHYFLSVTKPGVTAIVGTEGNSDTFIILRGGKHGTNYDAENVKSTKEQLRKAKLIDEADSTRRIMIDCSHGNSNKDYRNQPKVAQEIYNQLSAGENGLCGVMIESNLVEGRQDVPPEGGREGLKYGCSITDACIGWDTTESVLELLAEGVRNRRKHLSK

SEQ ID NO: 75474 - DNA, 1095 bp, Kluyveromyces lactis NRRL Y-1140
  CDS (1)..(1095)
atgtcacaaactccaacacctatgttccatgaacaagaagatgtcagaatcttgggttacgatccattggtttcaccagctctccttcaggcccaagttcctgcctctcaagagtgtctagaaactgcgcaaaagggtagaaaagagtcaattgacatcatcactggtaaagacgacagagttctggttgttgttggtccatgttccatccatgacttgaaagaagcgcaagactacgctaagggattaaaggctttgtctgacgaactaaaaggtgatttatgtattataatgagagcttacttggaaaagccaagaactactgttggttggaaaggtttgatcaacgatccagatgtggataacacttacaacattaacaagggtttgcaagtctctagacaattgtttgtgaatttgactagtttaggtttgccaattggttccgaaatgttggacaccatttctccacaatacttggccgatttgttgtccttcggtgccattggtgccagaaccactgaatcacaattgcatagagaactagcatccggtttgtctttcccagtaggtttcaagaacggtaccgatggtaccttgggtgttgcattggacgctgttcaagctgcctctcactctcaccatttcatgggtgtcaccaagcacggtgtcgctgctattaccaccaccaagggtaacgaacactgtttcgtcattctaagaggtggtaagcaaggtaccaactacgacagtgtttctgtcgcagaagccaagaaagctctacctccaaccggtgttctaatgattgattactctcacggtaattctaataaagacttcagaaaccaaccaaaggttaacgacgccgtttgcgaacaaatcgctaacggtgaagacaaaatcatcggtgtcatgattgaatcccacatcaacgaaggtaagcaatctattccagcggaaggtaaagctggtttgaaatacggtgtttctatcacagatggatgtataagtttggaaacaactgctgaagtactaagaaaattggctgcagcagttagagcaagaagagaactaaaaaagaagaacactgaataa

SEQ ID NO: 75475 - protein, 364 aa, Kluyveromyces lactis NRRL Y-1140
MSQTPTPMFHEQEDVRILGYDPLVSPALLQAQVPASQECLETAQKGRKESIDIITGKDDRVLVVVGPCSIHDLKEAQDYAKGLKALSDELKGDLCIIMRAYLEKPRTTVGWKGLINDPDVDNTYNINKGLQVSRQLFVNLTSLGLPIGSEMLDTISPQYLADLLSFGAIGARTTESQLHRELASGLSFPVGFKNGTDGTLGVALDAVQAASHSHHFMGVTKHGVAAITTTKGNEHCFVILRGGKQGTNYDSVSVAEAKKALPPTGVLMIDYSHGNSNKDFRNQPKVNDAVCEQIANGEDKIIGVMIESHINEGKQSIPAEGKAGLKYGVSITDGCISLETTAEVLRKLAAAVRARRELKKKNTE

SEQ ID NO: 75476 - DNA, 1119 bp, Kluyveromyces lactis NRRL Y-1140
  CDS (1)..(1119)
atgttcatcactaacgatcatattggggacagaagtagtttagaagactggagaatcaagggatatgatccattgaccccaccggacttattacaacatgaatatcccatcggtgaaaaggccaaaaagatcatcgttgaagctagagagaaagtatgtgacattttgaatgggaaggacgaccgtttagttgtagttattgggccatgttctattcatgatccaaaggctgcctacgaatacgcagaccttttgaagaaaatttctgatgaattatccgatgatctattaatcattatgagagcgtacttggagaaacctagaaccactgttggctggaaaggtttgatcaatgatccagatatcgataattctttccaaattaacaaaggtttaagaatttctagagagatgttcaccagattgactgaaaaattaccaatcgctggtgaaatgttggacaccatttctccacaatttttgagtgactgtttctctctgggtgctatcggcgctagaaccactgaatctcaactacatagggaattagcttctggtctttctttcccaattggttttaagaatggtactgacggtggtctccaagttgctgttgatgccatgagatctgctgcacactcacattacttcttgtctgttactaaacctggtgtcactgccatcgttggaacagaaggtaacgaagatacctttgttatcttaagaggtggtaagactggaactaatttcgatgctgaaaacgtaaaaaagacgcaagccgaattggtcaaggcaaaggttgctgatgctgaaggtgtccaaagaagaatcatggttgattgttctcatgggaattcaaagaaagatttcagaaatcaaccaaaggtggctcagtcactttacgaacaactatcagctggtcaaaatgctatctgtggtgtcatgatcgaatctaacttagtcgaaggtagacaagacgttcctccagaaggtggccgtgaaaagttgatttacggatgttctatcaccgatgcctgtatcggttgggaaacaactgaagatgttctaagattattggcaaagggtgttaaaaacagaagagctctttcaaaggcttga

SEQ ID NO: 75477 - protein, 372 aa, Kluyveromyces lactis NRRL Y-1140
MFITNDHIGDRSSLEDWRIKGYDPLTPPDLLQHEYPIGEKAKKIIVEAREKVCDILNGKDDRLVVVIGPCSIHDPKAAYEYADLLKKISDELSDDLLIIMRAYLEKPRTTVGWKGLINDPDIDNSFQINKGLRISREMFTRLTEKLPIAGEMLDTISPQFLSDCFSLGAIGARTTESQLHRELASGLSFPIGFKNGTDGGLQVAVDAMRSAAHSHYFLSVTKPGVTAIVGTEGNEDTFVILRGGKTGTNFDAENVKKTQAELVKAKVADAEGVQRRIMVDCSHGNSKKDFRNQPKVAQSLYEQLSAGQNAICGVMIESNLVEGRQDVPPEGGREKLIYGCSITDACIGWETTEDVLRLLAKGVKNRRALSKA

SEQ ID NO: 75478 - DNA, 1107 bp, Debaryomyces hansenii CBS767
  CDS (1)..(1107)
atgagtaaaacaccaatcccagacgaatacgatgataccaggattttaggatacgatcctttgataccacctgcgttattacagcacgaaatcagagcaagtaaagaatcattggacgttgtgatcagaggacgtattgaatcatcagagattataagcggaaaggatgaccgttgtttggtcattgttggaccatgttctatccatgacactgaagcagcattggaatatgctaccagattgaagaagttgtcgttggaattggaaaatgacttagtaattgtcatgagagcatacttggaaaagccaagaactaccgttggttggaaagggttgatcaacgacccagatgtggacaactcgtttgatatcaacagagggttaagaatctcccgtcagttatactctgatttgaccggcaagactggcttaccaattggttccgagatgttggataccatttctccacaatacttctcagactttttgagttttggtgctattggtgctagaaccaccgagtcgcaattacaccgtgagttagcatctggtttatctttcccaattggtttcaagaatggtaccgatggtaacttaggcgttgccttagatgctgttcaagcgtcttctaagggtcaccacttcatgggtgtcaccaagaatggtactgctgccattactactaccaagggtaacgaaaactgtttcatcatcttgagaggtggtaagaagattaccaactacgaccctgaatctgtcgctgccgcaaaggaagccatcaacaagagtaccgatccaaatatcaagttgatggttgattgctctcatgataattctcaaaaagactacagaaaccaacctaaggtaatggaaagtgttgttgaccaaatctctaagggtgaaaacgctcttatcggtgtcatgattgaatctcacattaatgaaggtaaacaaagcatgccaggtccaaaagaagacaagagcgctttgaagtacggtgtctctatcactgatggatgtgttggttgggaaactactgttgaattattgcacaacttgagtaaggccgtgcaagaaagaagacaaattaataagtctaaagcttaa

SEQ ID NO: 75479 - protein, 368 aa, Debaryomyces hansenii CBS767
MSKTPIPDEYDDTRILGYDPLIPPALLQHEIRASKESLDVVIRGRIESSEIISGKDDRCLVIVGPCSIHDTEAALEYATRLKKLSLELENDLVIVMRAYLEKPRTTVGWKGLINDPDVDNSFDINRGLRISRQLYSDLTGKTGLPIGSEMLDTISPQYFSDFLSFGAIGARTTESQLHRELASGLSFPIGFKNGTDGNLGVALDAVQASSKGHHFMGVTKNGTAAITTTKGNENCFIILRGGKKITNYDPESVAAAKEAINKSTDPNIKLMVDCSHDNSQKDYRNQPKVMESVVDQISKGENALIGVMIESHINEGKQSMPGPKEDKSALKYGVSITDGCVGWETTVELLHNLSKAVQERRQINKSKA

SEQ ID NO: 75480 - DNA, 1122 bp, Debaryomyces hansenii CBS767
  CDS (1)..(1122)
atgttcattactaacgaacacgtcggagatcgttctagattagaagattggagagtccgtggctacgacccattgactcctcctgatttattacaacacgaactcccattgcctcaaaaatcacaagataccatcttaaaaggtagagaggctgcttgtgatatattgaatgggaaggatgatcgtttgattattgtcattggtccttgttcaatccatgatcctaaagctgctcttgagtatgctggaaaattgtacgaagctgctcaaaaatattctggtgaattgcatatcgttatgagagcatacttagaaaaaccgagaactacagttggctggaaggggttaattaatgatccagaaatcgatggttcgttccaaattaacaaaggtttgagaattgccagaaaattattcgtagaattgacagacaaattgccgattgccggcgaaatgttggatacaatttcgccccaattcttgtccgatttattctctcttggtgccatcggtgcaagaactactgagtcacaattgcatcgtgagttatcttccggcttatccttcccagttggtttcaaaaatggtacagatggtactttaggtgtagcaatggatgcagttagagctgcttctcatcctcaccactttttgtcagttaccaagcctggtattgttgctattgttggaacagatggtaatcaagactgttttgttattttaagaggtggtaagaagggtacaaatttcgatgaacaatctgtaaaggagactaaggcagaattaatcaagaataagatcgttacggaagaaaagtcaggtccaaggattatggttgattgttcccatggtaactcaagcaaaaatcacagaaatcaaccgttggttgcggccgaaatttccagacaaatcagtaatggggaggatggtatttgtggtttgatgattgaatcaaatcttgtcgaaggtagacaagatgtaccacctgctgataaaggtggtaaggatgctttgaagtatggttgttctattaccgatgcttgcatcggttgggaagataccgaatctgttttagaaggtttatctaatgccgtgaagcaaagaagaaattcaagaaagtaa

SEQ ID NO: 75481 - protein, 373 aa, Debaryomyces hansenii CBS767
MFITNEHVGDRSRLEDWRVRGYDPLTPPDLLQHELPLPQKSQDTILKGREAACDILNGKDDRLIIVIGPCSIHDPKAALEYAGKLYEAAQKYSGELHIVMRAYLEKPRTTVGWKGLINDPEIDGSFQINKGLRIARKLFVELTDKLPIAGEMLDTISPQFLSDLFSLGAIGARTTESQLHRELSSGLSFPVGFKNGTDGTLGVAMDAVRAASHPHHFLSVTKPGIVAIVGTDGNQDCFVILRGGKKGTNFDEQSVKETKAELIKNKIVTEEKSGPRIMVDCSHGNSSKNHRNQPLVAAEISRQISNGEDGICGLMIESNLVEGRQDVPPADKGGKDALKYGCSITDACIGWEDTESVLEGLSNAVKQRRNSRK

SEQ ID NO: 75482 - DNA, 1089 bp, Yarrowia lipolytica CLIB122
  CDS (1)..(1089)
atgcccgctatgcacaacgcttctaacgctcagggagaccgaaaccggaccgaggactggcgaatccggggctacaaccctctcacagcccccgatctgctccagcatgagatccctctgaccaagcagtccaaggccaccattctcaagggccgacaggacgcctgtgatattctggatggtaaggacgaccgaatcattgttgtggttggcccctgttccatccatgaccccaaggctgccatggagtacgccgagcgactcaagcagatctctgacaagctgtctggcgagcttctgatcgtcatgcgagcctacctcgaaaagcctcgaaccaccgttggctggaagggccttattaatgatcctgacatggacggctctttcaagatcaacaagggcctgcgagtcgctagagatctcttcgtgaagctcaccgagctcaaccccattgcttctgagcttctggacaccatttctccccagttcctggctgatctcttctctgtcggagccattggtgctcgaaccaccgagtcccagcttcaccgagagcttgcctctggtctgtctttccccgttggtttcaagaacggtactgacggaggtattaaggtggctctggacgccatccaggccgccgcccacccccaccacttcctttccgtcaccaagcccggtgtggttgccattgtcggcaccgacggaaacgaggactgcttcctgattctgcgaggaggttccaagggccccaactacgatgctgagcacgtcgccgaggtcaagaagcaggttggagagaccaagggtccccgaatcatggtagactgctcgcacggcaactcatcaaagaaccacaagaaccagcctctggtcgcctctaacgtggctcagcagattgctgctggtgagaagtccatttgcggtcttatgattgagtccaacatccacgagggtcgacaggacatctgcgataacaaggaggacatgaagtacggtgtgtctgtcaccgatgcctgcatcaactgggaggacactgagaaggtgctcgaggagctggcccaggccgtcaagactcgacgaggttag

SEQ ID NO: 75483 - protein, 362 aa, Yarrowia lipolytica CLIB122
MPAMHNASNAQGDRNRTEDWRIRGYNPLTAPDLLQHEIPLTKQSKATILKGRQDACDILDGKDDRIIVVVGPCSIHDPKAAMEYAERLKQISDKLSGELLIVMRAYLEKPRTTVGWKGLINDPDMDGSFKINKGLRVARDLFVKLTELNPIASELLDTISPQFLADLFSVGAIGARTTESQLHRELASGLSFPVGFKNGTDGGIKVALDAIQAAAHPHHFLSVTKPGVVAIVGTDGNEDCFLILRGGSKGPNYDAEHVAEVKKQVGETKGPRIMVDCSHGNSSKNHKNQPLVASNVAQQIAAGEKSICGLMIESNIHEGRQDICDNKEDMKYGVSVTDACINWEDTEKVLEELAQAVKTRRG

SEQ ID NO: 75484 - DNA, 1074 bp, Yarrowia lipolytica CLIB122
  CDS (1)..(1074)
atgtcccgttcctcctctcccaacgcctcctctgctgaggacgtgcgaattctgggctacgaccccctcctcgctcccgctcttctccagactgaggttgcctccaccaaaaacgcccgagagaccgtctccaagggccgaaaggactccattgatgtcatcaccggcaagtccgacaagttgctgtgcattgtcggtccctgctccctccacgaccccaaggccgccatggagtacgcccagcgactcaaggagctgtctgacaagctgtctggtgagctcgtcatcgttatgcgagcctacctcgagaagccccgaaccaccgttggctggaagggtctgatcaacgaccccgacatggacgagtctttcaacatcaacaagggtctgcgactctcccgaaaggtcttctgcgaccttaccgacttgggtctgcccattgcctccgagatgctcgataccatttctccccagttcctggccgacctgctctccctgggtgccattggtgctcgaaccaccgagtcccagctgcaccgagagctcgcctccggtctgtctttccccgttggtttcaagaacggaaccgacggtactctgggtgttgccgttgatgctgtccaggccgcctctcaccctcaccacttcatgggtgtcaccaagcagggtgttgccgccatcaccaccaccaagggtaacgagaactgcttcatcattctgcgaggaggtaagaagggcaccaactacgacgccgagtccgtcgccgagtgcaagaaggccaccgagtccatgctcatggttgactgctctcacggcaactccaacaaggactaccgaaaccagcccaaggtttccaaggccgttgctgagcaggttgctgctggcgagaagaagatcatcggtgtcatgatcgagagtaatatccacgagggcaaccagaaggtccccaaggagggcccctctgcccttaaatacggtgtctccatcaccgacgcctgtgtctcttgggagaccaccgtggacatgctcaccgagctggccaacgccgtcaaggagcgacgaaacaagaactaa

SEQ ID NO: 75485 - protein, 357 aa, Yarrowia lipolytica CLIB122
MSRSSSPNASSAEDVRILGYDPLLAPALLQTEVASTKNARETVSKGRKDSIDVITGKSDKLLCIVGPCSLHDPKAAMEYAQRLKELSDKLSGELVIVMRAYLEKPRTTVGWKGLINDPDMDESFNINKGLRLSRKVFCDLTDLGLPIASEMLDTISPQFLADLLSLGAIGARTTESQLHRELASGLSFPVGFKNGTDGTLGVAVDAVQAASHPHHFMGVTKQGVAAITTTKGNENCFIILRGGKKGTNYDAESVAECKKATESMLMVDCSHGNSNKDYRNQPKVSKAVAEQVAAGEKKIIGVMIESNIHEGNQKVPKEGPSALKYGVSITDACVSWETTVDMLTELANAVKERRNKN

SEQ ID NO: 75486 - DNA, 1143 bp, Aspergillus nidulans FGSC A4
  CDS (1)..(1143)
atgtcctccgaactcatcatatcgcagttcttccttccaaatcctaatttaggagatagcaatcaccttgaggattcaagaatccgcggatacaaccctctcacaccacccaacctcctgcaacatgagattgctctaacagagaaagcgcggcaaacggtccttcaaggccgagccgaggccattgccgtcgcccacggcacagacacagacaagcgccgcctcctcgtcgtcattggaccctgctcaattcacgaccccgaaatggccttagagtactgcgaccggctattgaaattgaaggagaaatacaaggatgagttgctaattgttatgcgctcttatctggagaagccccgaacgaccgtcggttggaagggcctcatcaacgacccggatatcgacaacagcttcaacatcaacaagggcctgcgcatctcgcgtcagctcttcgtcgacttgaccaacaagggaatgccaattgccagtgagatgctggacactatctccccgcagtttctggcggactgtctctccgtcggtgcggtcggcgcacggacaaccgaatcgcaggtccatcgtgaattggcctctgggctctcgttccccgttggcttcaagaacggtacagatggctcgttagacgtcgcggttgatgcgattggatccgtaaaacaccctcatcacttcctgtccgtcaccaagcctggtgttgtcgccattgtcggtaccgttggcaatcctgattgctttgttatcctccgcggcggcaagaaagggccgaactacgatgctgctagcatcaccgaagcaaaggagaagctcatagctaagggtctggcaccccgtctgatggtcgactgcagccacggcaactcacaaaaggatcacaagaaccagcctaaggtggcagctgttcttgcggagcagattgctgcaggcgaaaccgcaatcatgggcgtcatgatagagagtaatatcaacgagggcaaccaaaaggtcccacccgagggcaaggccggcctcaaatacggcgtcagtatcaccgacgcctgtatcaattgggaagacaccgagtcaacgctagagacccttgcaaaggctgttgcgactcggagagaaaagctcgcccccagttcatag

SEQ ID NO: 75487 - protein, 380 aa, Aspergillus nidulans FGSC A4
MSSELIISQFFLPNPNLGDSNHLEDSRIRGYNPLTPPNLLQHEIALTEKARQTVLQGRAEAIAVAHGTDTDKRRLLVVIGPCSIHDPEMALEYCDRLLKLKEKYKDELLIVMRSYLEKPRTTVGWKGLINDPDIDNSFNINKGLRISRQLFVDLTNKGMPIASEMLDTISPQFLADCLSVGAVGARTTESQVHRELASGLSFPVGFKNGTDGSLDVAVDAIGSVKHPHHFLSVTKPGVVAIVGTVGNPDCFVILRGGKKGPNYDAASITEAKEKLIAKGLAPRLMVDCSHGNSQKDHKNQPKVAAVLAEQIAAGETAIMGVMIESNINEGNQKVPPEGKAGLKYGVSITDACINWEDTESTLETLAKAVATRREKLAPSS

SEQ ID NO: 75488 - DNA, 1089 bp, Aspergillus nidulans FGSC A4
  CDS (1)..(1089)
atgagcggtcaaaacgaagatacccgcgtcctgggttacgaccctctgctttcgcctgagtttgttcagtccgagattccttctaacgagcactccattcctacggtccgctctggccgcaaccaggctgtcgaaattattgaacagcgcgatgaccgccttctagtggtcgttggcccttgctccatccacgatcccgaaaccgccctcgaatatgccactcgtcttaaggaacttgctgctcgtctctcctccgacctctgcgtcatcatgcgcgcctacctcgaaaagccccgcacaacagttggatggaaaggtctgatcaacgaccctgatattgacgagtcctaccagatcaacaagggtctccgcgtgtcccgcaagctctacgccgacctcacaggcatgggcatgcctattgccagcgagatgctcgacaccatctccccgcagtacatggctgacctgatttccctcggtgccattggtgcccgcaccaccgagtcgcaactgcaccgtgagcttgcctccggtctcagtttccccatcggttacaagaatggcactgacggcaacctgaccgttgccattgacgcgatcggcgctgctgcccacccccaccgcttccttggtgtcaccaagcaaggtcttgcggccattaccaagaccgccggtaaccctcacggcttcgtgattatgcgtggaggaaacaagggcacaaattacgaccgcgagagcatccagggggcccgcgaagcccttcgcggcaagaagcagcgtgaggttctcatggttgactgctcacatggcaactccaagaaaaaccaccgtaaccagcctctcgttgccaaggaggtcgctgaccaactccgtgagggccaggatgccatcattggtgtcatgattgaatccaacatcaacgagggtaaccagaaggttccccctgagggtccctccggtctcaagaagggtgtcagtatcaccgatgcctgcattgactgggagaccaccgtcactgtgttggaggacctcgccgatgccgtccgtgccaggcgcgccgtcaagtcaaaagccaacggtactgcttaa

SEQ ID NO: 75489 - protein, 362 aa, Aspergillus nidulans FGSC A4
MSGQNEDTRVLGYDPLLSPEFVQSEIPSNEHSIPTVRSGRNQAVEIIEQRDDRLLVVVGPCSIHDPETALEYATRLKELAARLSSDLCVIMRAYLEKPRTTVGWKGLINDPDIDESYQINKGLRVSRKLYADLTGMGMPIASEMLDTISPQYMADLISLGAIGARTTESQLHRELASGLSFPIGYKNGTDGNLTVAIDAIGAAAHPHRFLGVTKQGLAAITKTAGNPHGFVIMRGGNKGTNYDRESIQGAREALRGKKQREVLMVDCSHGNSKKNHRNQPLVAKEVADQLREGQDAIIGVMIESNINEGNQKVPPEGPSGLKKGVSITDACIDWETTVTVLEDLADAVRARRAVKSKANGTA

SEQ ID NO: 75490 - DNA, 1182 bp, Ustilago maydis 521
  CDS (1)..(1182)
atgtcggctagcattgctgccaacacggccaatggccgatccgccgagcccctcgctcaagcgcttcctcaaaatggctccaaggacgagtacgcctacatcaacgacgtccgcgtcgctggctttgaaccactgatctcgccttcgcttttgctccacgagattcccgttcccaaggagtcgcaggccaccatcgcacgtgctcgaggccagtcgagtgccatcatcaacggacaggacgaccgccttctcgtcgtcgtcggtccatgctccattcacgatgtcgatcaggccaaggaatacgcaaagctgctcaaggctggtatcgacgagcgatggtccgagggtcttgtggttgtcatgcgtgcctactttgaaaagcctcgcaccacagttggctggaaaggtctcatcaacgatcccgacatcaatggcagcttccagatcaaccgtggtctcaaaattgcccgtaacttgctcgtcgatcttacggcacaaggagtccccgtcgcttgcgaggtgcttgataccatctcgcctcagtacacttcggacctctactcgtggggtgccatcggtgctcgtaccaccgagtcgcaattgcaccgtgagttggtctcgggtctttccatgccaatcggcttcaagaatggcaccgatggcggtctcggtgttgctgtcgacgccatccgcgcttcgtctcagcctcacgctttcatgggcgttaccgagcagggtcttgcagctatcgtccgaaccgtaggcaacgctgatctccacatcgtccaccgtggtggctccaagggaaccaactacgacgctacctcggtccagacctcgaaagcacagctcaagtcggcgctccctaaccgccacccttcgatcatgattgactgctcgcacggtaactcgaacaaggacttccgcaaccagcccaaggtcgtcgatgccatcgtagagcagctcgaacagggcgaagatgccatcactggtgtcatgatcgagtcgcatctgaacgagggcaagcagggcgagcccaagaatggacagatcgatcagctcaaatacggtgtctcgatcaccgacggatgtgtcggatgggagaccaccgtgcagatgctcgacaagctcaacgccgccgtcctcaagagaagacaggtacaggctcagaacaaggcttga

SEQ ID NO: 75491 - protein, 393 aa, Ustilago maydis 521
MSASIAANTANGRSAEPLAQALPQNGSKDEYAYINDVRVAGFEPLISPSLLLHEIPVPKESQATIARARGQSSAIINGQDDRLLVVVGPCSIHDVDQAKEYAKLLKAGIDERWSEGLVVVMRAYFEKPRTTVGWKGLINDPDINGSFQINRGLKIARNLLVDLTAQGVPVACEVLDTISPQYTSDLYSWGAIGARTTESQLHRELVSGLSMPIGFKNGTDGGLGVAVDAIRASSQPHAFMGVTEQGLAAIVRTVGNADLHIVHRGGSKGTNYDATSVQTSKAQLKSALPNRHPSIMIDCSHGNSNKDFRNQPKVVDAIVEQLEQGEDAITGVMIESHLNEGKQGEPKNGQIDQLKYGVSITDGCVGWETTVQMLDKLNAAVLKRRQVQAQNKA

SEQ ID NO: 75492 - DNA, 1560 bp, Ustilago maydis 521
  CDS (1)..(1560)
atgctaatatcacgaaatgaaaatcgtctcgggctgattggtcccccattcgcacattatgactcgatgctgcagcaaagccaaggccaagaggatggcaaggtccagaccttagccgctggctgctggctaggcccaacctcttcacgctttgtttttctcacgtcgagaagaattcgtggttgcaattacaagtgcgtggtgatttgtcttgagcgcgcattgacctactcggccaagggcgacacttgtgccaccactcacgacttggttcttacctttcacttgggaccctcactgaaagcggatctaccgttcaaaatgacgacgctcacctacaaggatgcgctcaacgagctcgacgatcgacgcatcaagtcaatcaagccgctgattcctccgcagatcctggtcgaggaatatccactgtcgctctccgcagcgcagactgtcgcttctggtcgcaaggctaccgaggaaatcgttaagcaggaagacgatcgcttgctcgtcgtcgtgggcccgtgttcgattcacgatgtgcgttccggtctcgagtacgcgcgcaaactcgccgcttacgcccaaactgccaaggacgatctgcacattgtgatgcgtgtctactttgaaaaacctcgcaccacggtcggctggaaaggtctcatcaacgaccccaacctgaatggttcgttccagatcaacaaaggactgcgtctcgcgcgcggcttcttgctcgaggtcaacaacctcggcttgcctgctggaacagagttcctcgacaccatctcgccgcagtacaccgccgacctgatcagctggggagctatcggcgcacgaaccaccgaatcgcaggttcaccgcgaactcagctcgggtctttcgatgccgatcggcttcaagaacggaaccgacggttcgatcagtatcgccgtggatgctatcaaggcagcttcgtccgaacacgtcttcttgtccgtcaccaagcagggcatctcggcgattgtcgagaccaacggaaacgatgcctgtcacgtcatcctgcgcggagctaacacaggacccaactactcggccgaacacgttggcgcggtatcgtcgaaactcaacgcggccggtttgccagcgagaatcatgatcgactgctcgcacggtaacagcgagaagaagcacgagaaccagatcaacgtcgtcaagtcgatcgcatcccaactcgcagccggcgactcgcaagcttgcaacatctttggcgtcatgatcgaatccaacctggtggccggtaaacagtcgatccctgcgcagggacccacggcactcaagtacggtcagagcatcaccgacgcttgcgtcgactgggacaccaccgttctcgctttggatctcttgcgagaaggcgtccgcaaaagaagatcatcccaccacgctagcaactggttcaaggccaaattgagcaggtccagcagctccgaaggcgtcaacgaccactttctctccaagcagtccgaacaccacaccggcttcaacgacgatgcgctcaccacactgggcaaatccaaataa

SEQ ID NO: 75493 - protein, 519 aa, Ustilago maydis 521
MLISRNENRLGLIGPPFAHYDSMLQQSQGQEDGKVQTLAAGCWLGPTSSRFVFLTSRRIRGCNYKCVVICLERALTYSAKGDTCATTHDLVLTFHLGPSLKADLPFKMTTLTYKDALNELDDRRIKSIKPLIPPQILVEEYPLSLSAAQTVASGRKATEEIVKQEDDRLLVVVGPCSIHDVRSGLEYARKLAAYAQTAKDDLHIVMRVYFEKPRTTVGWKGLINDPNLNGSFQINKGLRLARGFLLEVNNLGLPAGTEFLDTISPQYTADLISWGAIGARTTESQVHRELSSGLSMPIGFKNGTDGSISIAVDAIKAASSEHVFLSVTKQGISAIVETNGNDACHVILRGANTGPNYSAEHVGAVSSKLNAAGLPARIMIDCSHGNSEKKHENQINVVKSIASQLAAGDSQACNIFGVMIESNLVAGKQSIPAQGPTALKYGQSITDACVDWDTTVLALDLLREGVRKRRSSHHASNWFKAKLSRSSSSEGVNDHFLSKQSEHHTGFNDDALTTLGKSK

SEQ ID NO: 75494 - DNA, 1131 bp, Cryptococcus neoformans var. neoformans B-3501A
  CDS (1)..(1131)
atgccctcccctacaagagtatctatccgagacgccatggaactcctcgacgaccgaagggtcaagattgtcaggcctcttatcccccctcagattttacatgaagaacttcccctctcattgaggggcgcccaaactgtgcttgacggccgtcgacaagttgaggctgtcatcaaaggtgatgatgaccgattgcttgtcgttgtcggcccctgttccgtgcacgatcccgaacaggccatcacctatgctaaagctctcaaagagtacgccgacaaggctgctgaagatcttgtgattgttatgcgagtctactttgaaaaacctcgaacaactgttggctggaagggattgatcaacgacccggacatgaatggttcttaccaaattaaccgaggtcttaagattgcacgaaagttgttgttggacattaccgaaattggtttgcccgctgccggcgagttccttgatgtcatttctccccagtacctcgccgaccttttcgcatggggcgccatcggagcccgaaccacggaatcccaagtccaccgagaactcgcgtctgcactctccatgtccgtcggtttcaagaacggtactgacggctctatcgggattgcaattgatgcgatcaaagcagccggatctggacacactttcttgtctgttaccaagcaaggattgtccgcgattgttgagacggaaggaaacagttctacgcatgtcatcttgagaggaagcagcaagggacctaattatggagtggatgatgtggccgcttgtgcggaaaaattgaacaaaagcggattgcctgccaagcttatgattgactgctctcatggtaactcctccaaacaacacctcaaccaaattaaggtcggtgccgacattgcctcccaactttcctctggacccacatccaacgccattgtcggtgtcatgattgagtccaacatctttgaaggtcgacaaaatgttcctgccgagggaccttctggattgaagtacggtatctctgtgacggatgcttgtatttcgatggagcagactattcctttgttggatgagttgagaaagggtgtgcaagcgaggagagaagctgtcaaggctaagagagagggacagcagtaa

SEQ ID NO: 75495 - protein, 376 aa, Cryptococcus neoformans var. neoformans B-3501A
MPSPTRVSIRDAMELLDDRRVKIVRPLIPPQILHEELPLSLRGAQTVLDGRRQVEAVIKGDDDRLLVVVGPCSVHDPEQAITYAKALKEYADKAAEDLVIVMRVYFEKPRTTVGWKGLINDPDMNGSYQINRGLKIARKLLLDITEIGLPAAGEFLDVISPQYLADLFAWGAIGARTTESQVHRELASALSMSVGFKNGTDGSIGIAIDAIKAAGSGHTFLSVTKQGLSAIVETEGNSSTHVILRGSSKGPNYGVDDVAACAEKLNKSGLPAKLMIDCSHGNSSKQHLNQIKVGADIASQLSSGPTSNAIVGVMIESNIFEGRQNVPAEGPSGLKYGISVTDACISMEQTIPLLDELRKGVQARREAVKAKREGQQ

SEQ ID NO: 75496 - DNA, 1068 bp, Prochlorococcus marinus str. AS9601
  CDS (1)..(1068): transl_table=11
atgacgacatcatccaataattcagctttagaaaagacatcagatttacatgttgttgaaacacgtccattaatacctccaagcagattacataatgatatacctttagatcacgcctctgctaatacagtatctaaaacaagaagatcgatacaaaatattttgcatcataatgataagaagcttctagtaatcgtgggcccatgttcaattcatgatcttgaggcggcaaaggaatattcaaaatatattcaaaaattccgagaaatgtataacgataaattagaaataattatgagagtatattttgaaaaaccaaggacaactattggttggaagggattgataaatgatcctcatctagatgattcttatgatattaatactggtttaagaagggcaagaagtttgctttcatatttagcaactcgaggcataccttctgctacagaattactagatccaattgttcctcaatacattgccgatttaataagttggacagccataggtgcgcggaccacggaaagtcaaactcatagagaaatggcatcaggattatcaatgcctataggctttaaaaatggaacggatggttcttttactactgcaattaatgcaatgcagtcagcttcaaaatcccatcacttcttaggtgtaaatgaaaatggaatggcttctatagttaatactacaggaaatccagatggacatatagttttaaggggcggttcaaaaggcccaaattttgaaagtgatcatgtacaaagaatttcagcagaattgaggcagtataatcttccccataaagtgatgattgattgtagtcatggaaattccaataaagatttccgaaaacagtcagaagtgctaaaaaatgtagcttctcaaattagtaatggtgaaaaaaatattttaggagttatgcttgaaagtcatttgaaggaaggaaatcaaaaacttttaaaaaaagaagatctccagtttggaagaagcattacagatgcatgtatagatatagaaacaacaaaagaattaatcgctattttatacgattcacttagctag

SEQ ID NO: 75497 - protein, 355 aa, Prochlorococcus marinus str. AS9601
MTTSSNNSALEKTSDLHVVETRPLIPPSRLHNDIPLDHASANTVSKTRRSIQNILHHNDKKLLVIVGPCSIHDLEAAKEYSKYIQKFREMYNDKLEIIMRVYFEKPRTTIGWKGLINDPHLDDSYDINTGLRRARSLLSYLATRGIPSATELLDPIVPQYIADLISWTAIGARTTESQTHREMASGLSMPIGFKNGTDGSFTTAINAMQSASKSHHFLGVNENGMASIVNTTGNPDGHIVLRGGSKGPNFESDHVQRISAELRQYNLPHKVMIDCSHGNSNKDFRKQSEVLKNVASQISNGEKNILGVMLESHLKEGNQKLLKKEDLQFGRSITDACIDIETTKELIAILYDSLS

SEQ ID NO: 75498 - DNA, 1068 bp, Prochlorococcus marinus str. MIT 9515
  CDS (1)..(1068): transl_table=11
atgacgacttcatcaaataatcaatctttagaaaaaacatctgatttgcatgttgttgaaacacgtccattgatacctccaagcaaacttcataatgatatacctttagattatacctctgctgatactgtctccaatacgaggagatcgatacaaaatattttgcataataatgatcctaggctattagtcattgtgggaccatgctcaatccacgatattaaagctgctaaagagtattcagaatatattcaggaatttagaaaaatctacaatgataaattggaaattgtaatgagagtatattttgaaaaaccgagaactacaatcggatggaaaggattgataaatgacccccatttagatggttcctacgatattaatacaggtttacgtagagctagaagcttgctctcctatcttgcgactagagggatcccttcagctactgagttgttggaccccattgtccctcaatatattgctgatttaatcagctggacagccattggtgcaaggacaactgaaagtcaaactcatagagaaatggcttcaggattatctatgccaattggttttaaaaatggtacagatggttctttcagtacagctattaatgcgatgcagtctgcatcaaaatctcatcactttttaggcgttaatgatcatggttatgcttctattgtaaatacgactggcaatcccgatgggcatatagttttaaggggtgggtctaaaggagttaattttgaaaatcaacatgtaaaaggcatatcttctgaattaaaagccagtaatcttcctcataaggttatgatcgattgtagtcatggtaattctaataaagactttaggaagcaatctgatgttctagaaaacgtagcaactcaaattaagaatggtgaaaaaaatattttaggaattatgcttgaaagtcatcttaaggaaggtaatcaaaaactttcaaataataaagatcttgaatatgggagaagtattactgatgcttgcattaatatagacaagacaaaaaatttgctagagagtttatatgattcaatttcttaa

SEQ ID NO: 75499 - protein, 355 aa, Prochlorococcus marinus str. MIT 9515
MTTSSNNQSLEKTSDLHVVETRPLIPPSKLHNDIPLDYTSADTVSNTRRSIQNILHNNDPRLLVIVGPCSIHDIKAAKEYSEYIQEFRKIYNDKLEIVMRVYFEKPRTTIGWKGLINDPHLDGSYDINTGLRRARSLLSYLATRGIPSATELLDPIVPQYIADLISWTAIGARTTESQTHREMASGLSMPIGFKNGTDGSFSTAINAMQSASKSHHFLGVNDHGYASIVNTTGNPDGHIVLRGGSKGVNFENQHVKGISSELKASNLPHKVMIDCSHGNSNKDFRKQSDVLENVATQIKNGEKNILGIMLESHLKEGNQKLSNNKDLEYGRSITDACINIDKTKNLLESLYDSIS

SEQ ID NO: 75500 - DNA, 1071 bp, Prochlorococcus marinus str. NATL1A
  CDS (1)..(1071): transl_table=11
atgtccacctcatcatatttttcaatggtggatagcacctccgaccttcatgttgtcgagactcgtccattaatgtcaccagcattaattcatagagatttgcctttagataaggcatcctctggagttgtctctactactcgaaacaagattcaatcaattcttcatggtaatgacccaagaattttagtgattgttggaccgtgttcgattcatgatgttgatgctgctattgaatatgcaaatcgtttagcgccattgagggagagatatagtcaaaagcttgagattgttatgcgtgtttattttgagaaaccacgcacaactgttggttggaaaggacttattaatgatcctcatcttgataattcttacgatattaatactggtttaagaaaggcaagaggtctattacttgatttagccaaagcaggaatgccggctgcaactgaattactggatcccgttgttcctcaatatattgctgatttaattagttggactgctattggagcaagaacgacagagagccagactcatcgtgaaatggcgtctggattatcaatgcctgttggttataagaatggtactgacgggacagcaacgatagcgattaatgcaatgcaagcggcttcaaaacctcatcattttttaggaattaatcatgatggtcatgcctcaatagtgagtactacaggtaatccaaatggtcatcttgttttaagaggtggtaagaatgggactaattaccattttgatgcaattaagttaattacagatgagttagaacaatttaagatgcctggaaaagttatggttgattgtagtcatggtaattccaataaagattttcgtagacaatcagaagttttaagagatgtagcatcacagataaaaggtggatcaaagaatttaatgggcgtaatgatagaaagtcatcttgttgagggtaatcagaaattaaatttagatgtgtcaacactcacctatgggcaaagtgttacggatgcatgcataaacttttctacaactgaaattttattagaggaactagctgaatcggttaaataa

SEQ ID NO: 75501 - protein, 356 aa, Prochlorococcus marinus str. NATL1A
MSTSSYFSMVDSTSDLHVVETRPLMSPALIHRDLPLDKASSGVVSTTRNKIQSILHGNDPRILVIVGPCSIHDVDAAIEYANRLAPLRERYSQKLEIVMRVYFEKPRTTVGWKGLINDPHLDNSYDINTGLRKARGLLLDLAKAGMPAATELLDPVVPQYIADLISWTAIGARTTESQTHREMASGLSMPVGYKNGTDGTATIAINAMQAASKPHHFLGINHDGHASIVSTTGNPNGHLVLRGGKNGTNYHFDAIKLITDELEQFKMPGKVMVDCSHGNSNKDFRRQSEVLRDVASQIKGGSKNLMGVMIESHLVEGNQKLNLDVSTLTYGQSVTDACINFSTTEILLEELAESVK

SEQ ID NO: 75502 - DNA, 1083 bp, Prochlorococcus marinus str. MIT 9303
  CDS (1)..(1083): transl_table=11
atgaattctggcgaaatgaccaccacctccgacttgcatgtggtggatacgcggcctttggtgtcacccgtcttgcttcatcaggagctgcccctcgatctagtggctctcaaaaccgttgcagacactcgtagacgcatccaggcaattctgcgtggtgaggatccccgcttgctggtgattgttggtccctgctcggttcatgacattgcctctgcaagggactatgcccgtcagttggagccattgcgacagcgatatgccgcccagttggaggtggttttgcgggtctatttcgaaaaacctcgcaccaccgttggctggaaaggtctcatcaatgatccccatctcgatggttcctatgacatcaacactggcttgaggcgtgcgcggtcgttgttgctcgaccttgcccgcgagggtatgccgacggccactgaattgctggatccggttgttcctcaatacatcgctgatttgatcagttggacggcgattggagccagaaccactgagagtcagacccatcgggagatggcttctggattgtcaatgcccgttggttacaaaaacggtaccgatggcagtgccaagattgcgatccatgcgatgcaggcagcatctaggccgcatcattttctagggatcaatcggcagggtcaggcttcgattgtgcataccactggaaaccctgatggccatctcgtgttgcggggaggcaatggctgcaccaattaccatcccgaagctgtggaaggggttgcaaaagaattagtgaaggctggcttggctgatcggttgatggtggattgcagccatgacaattcgaataaagattttcggcgacagtcagaggtgctgcaggctgttgctactcaggtacgccaaggatcaacccacctgatgggtgtgatgttggaaagtcatcttgtcgagggcaatcagaagttgcctgaagacctctctactcttgtctatggtcaaagcattacggatgcttgtatcgatatagagacaacggcaactctccttgaggatttggcggctgcagtggcttcagtgacgttgtcaccaataacttga

SEQ ID NO: 75503 - protein, 360 aa, Prochlorococcus marinus str. MIT 9303
MNSGEMTTTSDLHVVDTRPLVSPVLLHQELPLDLVALKTVADTRRRIQAILRGEDPRLLVIVGPCSVHDIASARDYARQLEPLRQRYAAQLEVVLRVYFEKPRTTVGWKGLINDPHLDGSYDINTGLRRARSLLLDLAREGMPTATELLDPVVPQYIADLISWTAIGARTTESQTHREMASGLSMPVGYKNGTDGSAKIAIHAMQAASRPHHFLGINRQGQASIVHTTGNPDGHLVLRGGNGCTNYHPEAVEGVAKELVKAGLADRLMVDCSHDNSNKDFRRQSEVLQAVATQVRQGSTHLMGVMLESHLVEGNQKLPEDLSTLVYGQSITDACIDIETTATLLEDLAAAVASVTLSPIT

SEQ ID NO: 75504 - DNA, 1053 bp, Mycobacterium sp. JLS
  CDS (1)..(1053): transl_table=11
atgaacctggcgcagatcgccaccccgccggccacctccgaccggcgcatccgcagcttcagcgcgattcccagcccgcacgaggtgctcgcggagttcccgctgggtgcccggcgcgccgagcgggtggcccgcgaccgcaccgagatcgccgacatcctcgccggccgcgacgaccgactgctggtcgtggtcggtccgtgctcggtgcacgatccggtcgccgcgctggactacgcaagccggctcgcgaagatcgccgacgaactcggcgaccggctcaagatcgtcatgcgcgtgtacttcgagaagccgcggacgacgatcggatggaaggggctgatcaacgatccggggatggacggcacgttcgatgtgtcgcgcggtctgcgcaccgcccgccagctgctgctcgacatcatcgacatcggcctacccgtcggatgcgagttcctggaaccgaccagcccgcagtacatcgccgacgccgtcgcctggggtgccatcggcgcccgcacgaccgaatcgcaggtgcaccgccaactcgcgtcgggtctgtcgatgcccgtcggcttcaagaacggcaccgacggcaacatccaggtggccgtcgacggggtgaaggccgccgcggcccagcacgtcttcttcgggatggacgactccggccgtggcgcggtcgtgagcaccgagggcaacgaggactgccacgtcatcctgcgcggcggtaccgacggacccaactacgacgcggatgccgtgcaggccgccgccgccaagctgaccgccgccggactgccgggacgggtcgtcgtcgactgcagccacgccaactccggcaaggaccacgtccgccaggcggcggtggccgccgaggtggcccagctgatccgcgaggggcttccggtcagtggggtgatgctggagagcttcctggtcgggggtgcgcagtccgccgagtcgcggccgctcacctacgggcaatcggtcaccgacaaatgcatggactggaccgcgacggatctggtgctgcgagaactggcggcgcgctag

SEQ ID NO: 75505 - protein, 350 aa, Mycobacterium sp. JLS
MNLAQIATPPATSDRRIRSFSAIPSPHEVLAEFPLGARRAERVARDRTEIADILAGRDDRLLVVVGPCSVHDPVAALDYASRLAKIADELGDRLKIVMRVYFEKPRTTIGWKGLINDPGMDGTFDVSRGLRTARQLLLDIIDIGLPVGCEFLEPTSPQYIADAVAWGAIGARTTESQVHRQLASGLSMPVGFKNGTDGNIQVAVDGVKAAAAQHVFFGMDDSGRGAVVSTEGNEDCHVILRGGTDGPNYDADAVQAAAAKLTAAGLPGRVVVDCSHANSGKDHVRQAAVAAEVAQLIREGLPVSGVMLESFLVGGAQSAESRPLTYGQSVTDKCMDWTATDLVLRELAAR

SEQ ID NO: 75506 - DNA, 1068 bp, Prochlorococcus marinus str. MIT 9301
  CDS (1)..(1068): transl_table=11
atgatgacatcatcaaataattcagctttagaaaagacatcagatttacatgttcttgaaacacgtccattaatacctccaagcagattacataatgatatacctttagatcacgactctgctaatacagtatctaaaacaagaagatcgatacaaaatattttgcatcataatgatcagaagcttttagtcattgtgggtccatgttcaattcatgatcttgaggcggcaaaggaatattcaaaatatattcaaaaattccgagaaatgtataaagataaattagaaataattatgagagtatattttgaaaaaccaagaacaactattggctggaagggattgataaatgatcctcatctagatgattcttatgatattaatactggtttaagaagagcaagaagtttgctttcatatttagcaactcgtggtataccttctgctacagaattactagatccaattgttcctcaatacattgccgatttaataagttggacagccataggtgcgcggactacagaaagtcaaactcatagagaaatggcatcaggattatcaatgcctataggctttaaaaatggaacggatggttcttttactactgcaattaatgcaatgcagtcagcttcaaaatcccatcacttcttaggtgtaaatgaaaatggaatggcttctatagttaatactacaggaaatccagatggacatatagttttaaggggtggttcaaaaggcccaaatttcgaaaatgatcatatacaaagaatttcagcagaattgaggcaatgtagtcttccccataaagtgatgattgattgtagtcatggaaattccaataaagatttccgaaaacagtcggaagtgctaaaaaatgtggcttctcaaattagtaatggtgaaaaaaatattttaggagttatgcttgagagtcatttgaaggaaggaaatcaaaaacttttaaaaaaagaagatctccagtttggtagaagcattacagatgcatgtatagatatagaaacaacaaaaaaattaatagctattttatacgattcacttagctag

SEQ ID NO: 75507 - protein, 355 aa, Prochlorococcus marinus str. MIT 9301
MMTSSNNSALEKTSDLHVLETRPLIPPSRLHNDIPLDHDSANTVSKTRRSIQNILHHNDQKLLVIVGPCSIHDLEAAKEYSKYIQKFREMYKDKLEIIMRVYFEKPRTTIGWKGLINDPHLDDSYDINTGLRRARSLLSYLATRGIPSATELLDPIVPQYIADLISWTAIGARTTESQTHREMASGLSMPIGFKNGTDGSFTTAINAMQSASKSHHFLGVNENGMASIVNTTGNPDGHIVLRGGSKGPNFENDHIQRISAELRQCSLPHKVMIDCSHGNSNKDFRKQSEVLKNVASQISNGEKNILGVMLESHLKEGNQKLLKKEDLQFGRSITDACIDIETTKKLIAILYDSLS

SEQ ID NO: 75508 - DNA, 1065 bp, Herminiimonas arsenicoxydans
  CDS (1)..(1065): transl_table=11
atgccgcgtacagatgacttacggattaaagaaatgaaagaactgacgcccccatcgcatttgatacgcgaactgggtatctccgaaaaagcggagacaacagttgctgatgcgcgcatcgcgctgcatcgcatcttgcacggtcaggatgatcgcctgatggtggtcatcgggccatgctcgatacatgacactacagcggcgatggagtatgcgaatcgtctggtgaaggaacgtgcgcgttttgccggcgaactggaaatcgtgatgcgcgtctatttcgagaagccacgcaccacggtcggctggaagggcttgatcaacgatccgtacatggacaacagcttccgcattaatgaaggtttgcacattgcgcgcgaattgctgctgaacatcaatgaactcggcctgccggctggaactgaattccttgacgtgatcagtccgcaatacattgccgacctgatcagctggggcgcgatcggcgcacgcacgacggaatcacagattcatcgcgaactggcttccggtttgtcctgtccggtcggtttcaagaacggtaccgacggtaacgtgaaaatcgcagtcgatgcgatcaaggctgcgtcacagtcgcatcatttcctgtcagtgaccaagggcggccattcggctatcgtctcgaccagcggcaatgaagattgccacatcattctgcgcggcggtaaaacgcctaactacgatgcggccagcgtagagcaggcatgcaaggatatcgcagcgaacggtctggcatcgcgtctgatgatcgatacgtcgcacgccaacagctcgaaaaaaccggaaaatcaaatcccggtgtgcgccgatatcgcacagcagattgccggcggcgatacgcgtatcgtcggtgtgatgatcgagtcgcacctggtcgccggtcgccaggatctgatcccgggcaaggaactagtttatggtcagtcggtgactgatggctgcatcagctgggaagacagcctgggtgtgctggaaggtttggcagaagcagtcaaacaacgccgcctcaaggatccggacgcataa

SEQ ID NO: 75509 - protein, 354 aa, Herminiimonas arsenicoxydans
MPRTDDLRIKEMKELTPPSHLIRELGISEKAETTVADARIALHRILHGQDDRLMVVIGPCSIHDTTAAMEYANRLVKERARFAGELEIVMRVYFEKPRTTVGWKGLINDPYMDNSFRINEGLHIARELLLNINELGLPAGTEFLDVISPQYIADLISWGAIGARTTESQIHRELASGLSCPVGFKNGTDGNVKIAVDAIKAASQSHHFLSVTKGGHSAIVSTSGNEDCHIILRGGKTPNYDAASVEQACKDIAANGLASRLMIDTSHANSSKKPENQIPVCADIAQQIAGGDTRIVGVMIESHLVAGRQDLIPGKELVYGQSVTDGCISWEDSLGVLEGLAEAVKQRRLKDPDA

SEQ ID NO: 75510 - DNA, 1131 bp, Burkholderia vietnamiensis G4
  CDS (1)..(1131): transl_table=11
atgcataacctcgacaatccctcccacgatcgcgaggtaggcagcgccgacgcgacgcaagacacgacccgcatcgacgacgtccgcatcggcgccgtgcgcccgctgatctcgcccgcgctgctgcaggacgagctgccggtgccggccggcacgcagacgctcgtcgaggacacgcggcgcgcgatcggcgacatcctgcacggccgcgacgaccggctgctggtcgtcgtcggcccgtgctcgatccacgaccacgaccaggcgctcgagtacgcgcgccgcctgaaggccgccgccgacgcgctgcaggacgatctgctgatcacgatgcgcgtgtacttcgagaagccgcgcacgacggtcggctggaagggctacatcaacgatccgcgtctggacggcagcttccgcatcaacgaagggctgcgcgcggcacgacagctgctgctcgacatcaacgcgctcggcctgccggcgtcgaccgaattcctcgacctgctgagcccgcagtacatcgcggatctgatcgcgtggggcgccatcggcgcgcgcaccaccgagagccagagccatcgtcagcttgcatcgggcctgagctgcccgatcggcttcaagaacggtaccgacggcggcgtgcaggtcgcggccgatgcgatcgtcgccgcgcgcgcgagccacgcgttcatgggaatgacgaagatgggcatggccgcgatcttcgagacgcgcggcaacgacgacgcgcacgtgatcctgcgcggcggcaagaatggtccgaactacgacgccgagcacgtcgaagcgagctgcgcggtgctgcgcaagagcgggttgcgcgagcaggtgatggtcgattgctcgcatgcgaattcgaacaagtcgcacgagcggcagatcgacgtcgcgcaggatctcgcgcgccagctgtcgcagggcgagcagcgcatcatcggcgtgatggtggagagccatctcgaggccggccgtcaggatctgaagccgggcgtgccgctgaagtacggcgtgtcgatcaccgatgcatgtctgagctggtcgcagacggagccggtgctcgacgtgctcgcgcaagccgtgcggcagcgccgcggcgcgtcgcgcaacgcgtga

SEQ ID NO: 75511 - protein, 376 aa, Burkholderia vietnamiensis G4
MHNLDNPSHDREVGSADATQDTTRIDDVRIGAVRPLISPALLQDELPVPAGTQTLVEDTRRAIGDILHGRDDRLLVVVGPCSIHDHDQALEYARRLKAAADALQDDLLITMRVYFEKPRTTVGWKGYINDPRLDGSFRINEGLRAARQLLLDINALGLPASTEFLDLLSPQYIADLIAWGAIGARTTESQSHRQLASGLSCPIGFKNGTDGGVQVAADAIVAARASHAFMGMTKMGMAAIFETRGNDDAHVILRGGKNGPNYDAEHVEASCAVLRKSGLREQVMVDCSHANSNKSHERQIDVAQDLARQLSQGEQRIIGVMVESHLEAGRQDLKPGVPLKYGVSITDACLSWSQTEPVLDVLAQAVRQRRGASRNA

SEQ ID NO: 75512 - DNA, 1074 bp, Burkholderia vietnamiensis G4
  CDS (1)..(1074): transl_table=11
atgcccccgcacaacaccgacgacgtccgcatccgcgaactcaaggaactgacgccgcccgcccacctgatccgcgaattcgcatgctccgaggccgcgtccgagctgatctacgagtcgcgccgttcgatgcaccggatcctgcacgggatggacgaccggctgatcgtcgtgatcgggccgtgctcgatccacgacacgaaggcggcgctcgaatatgcggggcggctcgtgaaggagcgggagcgcttcaagggcgagctggaaatcgtgatgcgcgtgtacttcgaaaagccgcgcacgacggtcggctggaaggggctgatcaacgatccgcatctcgacaacagcttcaagatcaacgaagggctgcgcacggcgcgcgagctgctgctgcagatcaacgagatggggctgccggccgcgaccgaatacctcgacatgatcagcccgcagtacatcgccgacctgatctcgtggggcgcgatcggcgcgcgcacgaccgagtcgcaggtgcatcgcgaactcgcgtcggggctgtcgtgcccggtcggcttcaagaacggcaccgacggcaacgtgaagatcgccgtcgacgcgatcaaggccgcgtcgcagccgcaccatttcctgtcggtgaccaagggcggccattcggcgatcgtgtcgacggccggcaacgaagactgtcacgtgatcctgcgcggcggcaagacgccgaactacgacgcggacagcgtgaacgccgcctgcgcggacatcggcaaggccggcctcgccgcgcgcctgatgatcgacgcgagccatgcgaacagctcgaagaagcacgagaaccagatcccggtgtgcgcggacatcggccgtcaggtcgccgccggcgacgagcggatcgtcggcgtgatgatcgagtcgcacctcgtcgaggggcgccaggacctgaaggaaggctgcgcgctgacctacggccagagcatcaccgacgcatgcatcgcgtgggacgacagcgtgaaggtgctcgaagggctcgcggaagcggtgaaggcgcgccgcgtcgcacgcggcagcggcaactga

SEQ ID NO: 75513 - protein, 357 aa, Burkholderia vietnamiensis G4
MPPHNTDDVRIRELKELTPPAHLIREFACSEAASELIYESRRSMHRILHGMDDRLIVVIGPCSIHDTKAALEYAGRLVKERERFKGELEIVMRVYFEKPRTTVGWKGLINDPHLDNSFKINEGLRTARELLLQINEMGLPAATEYLDMISPQYIADLISWGAIGARTTESQVHRELASGLSCPVGFKNGTDGNVKIAVDAIKAASQPHHFLSVTKGGHSAIVSTAGNEDCHVILRGGKTPNYDADSVNAACADIGKAGLAARLMIDASHANSSKKHENQIPVCADIGRQVAAGDERIVGVMIESHLVEGRQDLKEGCALTYGQSITDACIAWDDSVKVLEGLAEAVKARRVARGSGN

SEQ ID NO: 75514 - DNA, 1080 bp, Dichelobacter nodosus VCS1703A
  CDS (1)..(1080): transl_table=11
atgcctactgcttccaattctcatcattcctttattactcaaactcttttgcccagccccgaatcccttattcatgctttgccagcaaacgccgtcgccgcgcaaaccattcatcaggcgcgccaaactatttgccaaattttaaaccgccacgataaccgcaaattattcatcatcggaccttgttcaattgacgatcccgtcgccgctttagattatgcgcaacgtttaaaacaactcgccgatgaggtaaaagatactttttttatcgtgatgcgcgtttatttagaaaaaccgcgcaccggtgtgggctggaaaggttttatcaatgatcccgatttagaccaaagctttaatattgaaaaaggactttatctcgcccgccaattattaattgatattaatacgttaggtttgccgtgcgcaacagaagcgctcgagcctatttctgtgccctatttaaacgatttaatcagttggacggcaattggcgcgcgcaccgccgaaagccaaattcaccgcgaaatcgcctccgcactggaaacgccggtgggttttaaaaatagtacggacggttgtttagacagtgccatttatgccatgaaatccgccgcacaaccgcaccattttctaagcattaatacgcgcggaatggcggtaattacgcatagttcgggcaatcctcatacgcatatcgttttacgcggtggtcgtttgggcataaattatgacgccgacagcgtggcattgtgcaccaaattgctgcaacaacacggcttaaaaaccaatattatgatcgattgttcgcatgcgaattctggaaaagatcatcaacggcaacccattgttttaaaaaatgtaatcgaacaaatttgccgcggtaaccgcgccattatgggattgatgttagaaagttatttacaagcaggcaatcaacgtttaaccgccggcggttgttcattaaaattgggcacatctttgaccgatccctgcctcgattgggaaacaacgcaatctattgttttacaatcaagagatatgctcaccgcgcatatatcggcagacagtgcgttgccgtaa

SEQ ID NO: 75515 - protein, 359 aa, Dichelobacter nodosus VCS1703A
MPTASNSHHSFITQTLLPSPESLIHALPANAVAAQTIHQARQTICQILNRHDNRKLFIIGPCSIDDPVAALDYAQRLKQLADEVKDTFFIVMRVYLEKPRTGVGWKGFINDPDLDQSFNIEKGLYLARQLLIDINTLGLPCATEALEPISVPYLNDLISWTAIGARTAESQIHREIASALETPVGFKNSTDGCLDSAIYAMKSAAQPHHFLSINTRGMAVITHSSGNPHTHIVLRGGRLGINYDADSVALCTKLLQQHGLKTNIMIDCSHANSGKDHQRQPIVLKNVIEQICRGNRAIMGLMLESYLQAGNQRLTAGGCSLKLGTSLTDPCLDWETTQSIVLQSRDMLTAHISADSALP

SEQ ID NO: 75516 - DNA, 1041 bp, Synechococcus sp. WH 7803
  CDS (1)..(1041): transl_table=11
gtggtggagaccaggcccctggttcctcctgcattgctgcatggagacctgcccattgatgcccgggcaacggagactgtggcgacgtcgcgcagtcggattcaggccatcatgagaggcctggaccggcggctgctggtgatcgttggtccctgctccgtccatgatgtggatgcagcgagggagtacgcccgccgactggctcccttgcgtgaacggcatgcctcggagctcgaggttgtgatgcgcgtttacttcgagaagccgcgcaccacggtgggttggaagggtctgatcaatgatccgaatcttgacggctcctacgacatcaacacggggttgcgcatggcgcgctcgttattgcttgatttggcgagggaaggaatgccttgtgccacagagctgcttgatcctgtggttcctcagtacatcgccgatctgatcagctggaccgcgatcggcgcccgcaccaccgaaagccagacgcaccgcgaaatggcgtcaggcttgtcgatgccgattggctacaaaaacagcaccgatggcagtgccacgattgccatcaatgccatgcaggctgcgtccaaaccccatcactttctggggatcaatcgcgaggggcatgcctcgatcgtgagcaccactggcaatccggatggtcatctcgtgctgcgtgggggaaatcgaggaacgaattaccacctcgaggcgattcaggaggccgctcaagaattgaaagcagcgggactgcccgatcgcttgatggtggattgcagccatggcaactccaacaaagacttccgccgtcaaggggaggtgttgaaggctgtcgccgcccaagtggagcagggttcagcgcatgtgatgggtgtgatgctggaaagccatcttgttgagggcaaccaaaagatcagtacggatcaatcagcgctgacctacggccaaagcgtcaccgacgcttgcatcagtcttgagacgacagctgagctgctggaaggtttggctgattcgctgacaaaggttggcactcgccctgggtga

SEQ ID NO: 75517 - protein, 346 aa, Synechococcus sp. WH 7803
MVETRPLVPPALLHGDLPIDARATETVATSRSRIQAIMRGLDRRLLVIVGPCSVHDVDAAREYARRLAPLRERHASELEVVMRVYFEKPRTTVGWKGLINDPNLDGSYDINTGLRMARSLLLDLAREGMPCATELLDPVVPQYIADLISWTAIGARTTESQTHREMASGLSMPIGYKNSTDGSATIAINAMQAASKPHHFLGINREGHASIVSTTGNPDGHLVLRGGNRGTNYHLEAIQEAAQELKAAGLPDRLMVDCSHGNSNKDFRRQGEVLKAVAAQVEQGSAHVMGVMLESHLVEGNQKISTDQSALTYGQSVTDACISLETTAELLEGLADSLTKVGTRPG

SEQ ID NO: 75518 - DNA, 1092 bp, Candidatus Protochlamydia amoebophila UWE25
  CDS (1)..(1092): transl_table=11
atggaacttctcccctcatataaagaattaaaaagccaatttccggcaagcgcatctcaagataatttcattgaagattgtcgagaaactgtaaaatctattttaaatggtactgataagcgattgttattgattgtagggccctgctcaatccatgattttcattctgctaaggaatttgcatttagattaaaatgcttagcagaatctctttcgtctcattttttcattttaatgcgtgtctattgtgaaaaagcgagaacagcaacgggctggaaaggatttttgtatgatccacttttagacggttccaatcaacttttactcggaatcaaaaagacaagagaattgttgctagagctttgcgatttgcgaatccctgccgcaaccgaatttttagatcctttaaccgcttattattatgaagatttaatttcttgggggtcgattggagcgagaacttcctcttcacaaatccacaggcaatttgcttcgaatttgcaaattccgataggctttaaaaatggaattgctggtaatatttcagctgctgttcaaggagcctatgcggcttctcaaccccatgcttacatggctttacacgaaaatggatggccaattgcaacgcaatctaaaggaaatctcgatactcacattgttttaagaggtggggaaacaaaaaccaattttgactctcattcgatatctgaagcgcttgcaaggttatcccatgcaaacttgccagaaagagtgttgatcgattgttctcatcataattcaaataaaaaacatgaaaaacaaccaattgtttttcaatccattatcgatcaagtactggcaggaaattcctttattaaaggtttaatgatagaaagtcacctttatgccggcaatcaaccttttcatttcaatccacaagagcttcgttatggtgtttcgattacggattcttgcttagattggaattcaactcaaacactcattgaatggggtgctcatcaattgcaagaaaatcttaatccgagtaagaagttatctttgtcttcagaatctctttttagttcgatgatatgtacaaagctaaaaagttaa

SEQ ID NO: 75519 - protein, 363 aa, Candidatus Protochlamydia amoebophila UWE25
MELLPSYKELKSQFPASASQDNFIEDCRETVKSILNGTDKRLLLIVGPCSIHDFHSAKEFAFRLKCLAESLSSHFFILMRVYCEKARTATGWKGFLYDPLLDGSNQLLLGIKKTRELLLELCDLRIPAATEFLDPLTAYYYEDLISWGSIGARTSSSQIHRQFASNLQIPIGFKNGIAGNISAAVQGAYAASQPHAYMALHENGWPIATQSKGNLDTHIVLRGGETKTNFDSHSISEALARLSHANLPERVLIDCSHHNSNKKHEKQPIVFQSIIDQVLAGNSFIKGLMIESHLYAGNQPFHFNPQELRYGVSITDSCLDWNSTQTLIEWGAHQLQENLNPSKKLSLSSESLFSSMICTKLKS

SEQ ID NO: 75520 - DNA, 1056 bp, Acinetobacter sp. ADP1
  CDS (1)..(1056): transl_table=11
atgaacgcgcttaatacattgatccagaaaaatacgacaaaagaaattacacttagcttgccacagcaattaaaagcaaaatattcgcttgctcccatttttttagagcagatcgcagagcatcgtcaaaccattcaaaatatccttgctggcaaagattcacggcttttggtcgtaactggtccatgttcgattcatgatcctgtttctgcgctgcaatacgcacaaaggcttgtcaaattacaagatcaagttaaagatcagatttttttagtgatgcgtgcttatctcgaaaaaccacgtacaacaattggctggaagggttttttatacgatccaaatcttgatggttcatcagatttacagctgggtttagaaaaatctcgcgcattatatttgcaaattattgaaatggggcttccaattgccagtgaaattttaagcccaatggcgactggctattttgatgatttactggcttggggagctattggggcacgtaccagtgaatctcagattcatcgtgaaatttcaagtcatatgccgtttccaattggttttaaaaatggtactgatggttcgattcagatcgcattggatgccattcaatctgcacaaaatgaacatcagtttttagggatgagtcagcttggccagcctgcaattttacaaagttctgggaatccactgccgcatttgatcttgcgtggagcaaatgatggaccaaattatgatattcagtccatttcgaatattagagcaaaacataagggcgaattacctgcgcttgtaattgactgtagtcatggcaatagttcaaaagatccgatgaaacaaccgcaagtacttcgacaaatcattgcagaaagaattgaaagtgatgttcgaggtgtgatgttggaaagccatttggtcgatggaaatcagaagatttcatgcgacataacctatggccaatctgtgactgatggttgccttgggtgggagaagacagagaatttacttttagaaatggctgatcaactcgcacaatgtcctttacgccaatcagcttaa

SEQ ID NO: 75521 - protein, 351 aa, Acinetobacter sp. ADP1
MNALNTLIQKNTTKEITLSLPQQLKAKYSLAPIFLEQIAEHRQTIQNILAGKDSRLLVVTGPCSIHDPVSALQYAQRLVKLQDQVKDQIFLVMRAYLEKPRTTIGWKGFLYDPNLDGSSDLQLGLEKSRALYLQIIEMGLPIASEILSPMATGYFDDLLAWGAIGARTSESQIHREISSHMPFPIGFKNGTDGSIQIALDAIQSAQNEHQFLGMSQLGQPAILQSSGNPLPHLILRGANDGPNYDIQSISNIRAKHKGELPALVIDCSHGNSSKDPMKQPQVLRQIIAERIESDVRGVMLESHLVDGNQKISCDITYGQSVTDGCLGWEKTENLLLEMADQLAQCPLRQSA

SEQ ID NO: 75522 - DNA, 1113 bp, Acinetobacter sp. ADP1
  CDS (1)..(1113): transl_table=11
atgatccaatcagtgacagcaatgaatactttacagtccaatccagtttcacagccagatatcgatgatgttaacatcaaaagcatccagcctcttgttacgcctgccgagttaaaagcagagcttccactgacagaaagtgcttatcaaaccgtactccacggtcgtgaaaccattcgcaacattcttgatggtacagacaaacgtatttttgttgtcattgggccatgctctattcacgaccctaaagcagcgcatgaatacgcaacacgcttaaaagtactcagcgaaaaagtaaaagacagtttgtatattgtgatgcgtgtttattttgaaaaaccacgtacaacagtaggctggaaaggtttgattaatgatcctgatatgaatgactcattcaatattgaaaaaggtctgcgtattggacgtaaattactccttgaactaaacgaacaaggtctaccttgtgctacagaagcgcttgatccaaactctcctcagtattatcaagatctgatttcatggtcggctattggcgctcgtaccactgaaagtcagacacatcgtgagatgtcatctggattatcatcaccagttggctttaaaaacggaacagatggtgggcttacagtcgcaacaaatgcgatgcaatctgtcaaacacggtcacagctttttaggtttgaatgaagctggtcaggtttctgtcattcataccagtgggaatccatatgcacacgttgtattacgtggcggtaacggaaagccaaactatgatgcagggtcagtcgcagaagctgaaaatgcactggcaaaagcaaaagtcagcactaaaatcatgattgatgccagccatgccaattcaaataaagacccatacttacagccacttgtactcaaaaatgtaaccgagcaaatcatcgacggtaataagtcaatagtgggtgtcatggttgaaagtcacctcaaaggcggacgtcaggatattcctgaaaacctatgtgatcttgaatacggcaagtctgttaccgatggctgtattgattgggaaaccacagaaaatgttttgcttgaaatgcatgaagcactcaaagatgttttagctcagcgttaa

SEQ ID NO: 75523 - protein, 370 aa, Acinetobacter sp. ADP1
MIQSVTAMNTLQSNPVSQPDIDDVNIKSIQPLVTPAELKAELPLTESAYQTVLHGRETIRNILDGTDKRIFVVIGPCSIHDPKAAHEYATRLKVLSEKVKDSLYIVMRVYFEKPRTTVGWKGLINDPDMNDSFNIEKGLRIGRKLLLELNEQGLPCATEALDPNSPQYYQDLISWSAIGARTTESQTHREMSSGLSSPVGFKNGTDGGLTVATNAMQSVKHGHSFLGLNEAGQVSVIHTSGNPYAHVVLRGGNGKPNYDAGSVAEAENALAKAKVSTKIMIDASHANSNKDPYLQPLVLKNVTEQIIDGNKSIVGVMVESHLKGGRQDIPENLCDLEYGKSVTDGCIDWETTENVLLEMHEALKDVLAQR

SEQ ID NO: 75524 - DNA, 1056 bp, Erwinia carotovora subsp. atroseptica SCRI1043
  CDS (1)..(1056): transl_table=11
atgaattaccaaaatgatgatttaagaattaaagagattaatgaacttttgccgccggttgctttgctagaaaagtttccagccacggagaaggccgcggaaacggtatcgttcgcgcgtacagccatccataaaattcttaacggcaatgatgaccgcctgctggtggtgattggtccttgctcgatccacgacacgaaagccgcgaaagagtatgccgcacgtctgctgacgctgcgtagcgagctgagcgacgatctggaagtggtcatgcgggtttattttgaaaaaccacgcaccacgattggctggaaagggctaatcaacgatccgcacatggataatagtttccagatcaacgatggtctacgcattgcgcgccagctgctgctggaaattaacgataccggtttacctgctgcgggtgaattcctggatatgattactccgcaatacctggcggatctgatgagctggggcgctattggcgcacgtactacagaatctcaggtacaccgtgaattagcgtctggcctgtcatgtcctgtgggctttaaaaacggcactgacggcacgatcaaagtagcgattgatgcgatcaacgcagccagtgcgccgcactgcttcctgtctgtcaccaaatggggacattcggctatcgtgaataccagtggtaacaacgattgccacatcattctgcgtggtggtaaaacgccgaactatagcgctgagcacgttaaagacgtgaaaattggcttggaaaaagcgggcctgacaccgcaggtcatgatcgatttcagccatgcgaacagcagcaagcagttcaaaaagcagatggaagtctgtactgatgtctgtgggcagatcgcacagggtgaaaaagcgattatgggcgtgatggtggaaagccatctggttgaaggcaaccagaatctggaaagcggcgaacctctggtttatggccgtagcgttaccgatgcctgtattagctgggaagacacagaatcactgttgcgccagttagcgtctgctgtacgagagcgccgcaataagtaa

SEQ ID NO: 75525 - protein, 351 aa, Erwinia carotovora subsp. atroseptica SCRI1043
MNYQNDDLRIKEINELLPPVALLEKFPATEKAAETVSFARTAIHKILNGNDDRLLVVIGPCSIHDTKAAKEYAARLLTLRSELSDDLEVVMRVYFEKPRTTIGWKGLINDPHMDNSFQINDGLRIARQLLLEINDTGLPAAGEFLDMITPQYLADLMSWGAIGARTTESQVHRELASGLSCPVGFKNGTDGTIKVAIDAINAASAPHCFLSVTKWGHSAIVNTSGNNDCHIILRGGKTPNYSAEHVKDVKIGLEKAGLTPQVMIDFSHANSSKQFKKQMEVCTDVCGQIAQGEKAIMGVMVESHLVEGNQNLESGEPLVYGRSVTDACISWEDTESLLRQLASAVRERRNK

SEQ ID NO: 75526 - DNA, 1047 bp, Erwinia carotovora subsp. atroseptica SCRI1043
  CDS (1)..(1047): transl_table=11
atgctacaaacagatgaactgcggagcgcgcgcatcgagagtctggttacgccccaaacgctacttgccagactcccgattacccctgacgttgccgaaaatgtcacctcctcacgcaagaaaattgaagccattctcaccggccacgatccccgtttactcgttgtgattggcccctgttcgatccatcacaccgacagcgccttggactatgcgcgccgtctggctgtgctacgcacgcagtatcaggatcggctggaaattgtcatgcgcacttattttgaaaaaccgcgcacggtggtcggttggaaggggcttatctccgatcccgcactcaatggctcgttccaggtgaacgaagggctggagattgctcgccgtctgctgctggacgtcaatcaacttggattgccgaccgcaacggaattcctcgatatggtcaccggccaatatatcgccgatttgattagctggggcgcgattggtgcgagaaccaccgaaagccaaatccaccgcgagatggcgtctgcactatcctgccctgtcggcttcaaaaacgggacggatggcaatacacgcatcgccgtcgatgcgatccgtgccgcacgcgcccaacacatgttcctctcgccggacaaacaaggcttcatgtcggtttacaaaacgcagggcaacccgtttggccacataattatgcgcggcgggaaaaaaccgaactatcacgcggaagatattgccgctgcctgcgcgcatctcagcgagttttctctgcccgaacatctggtgatcgatttcagccatgctaactgtcagaaacagcatcgccgccagctcgatgttgccgatgatatctgccagcaaattcgcgctggttcacgcgccatcgcaggcatcatggcggaaagtttcttaatcgaagggagtcagccggcgatcaacccgctggcgctgacgtatgggcaatccattaccgatccttgcctaagctggcaggacaccgaaacgctgctggcacgtctggcaagcgctgtcgatagccgattctag

SEQ ID NO: 75527 - protein, 348 aa, Erwinia carotovora subsp. atroseptica SCRI1043
MLQTDELRSARIESLVTPQTLLARLPITPDVAENVTSSRKKIEAILTGHDPRLLVVIGPCSIHHTDSALDYARRLAVLRTQYQDRLEIVMRTYFEKPRTVVGWKGLISDPALNGSFQVNEGLEIARRLLLDVNQLGLPTATEFLDMVTGQYIADLISWGAIGARTTESQIHREMASALSCPVGFKNGTDGNTRIAVDAIRAARAQHMFLSPDKQGFMSVYKTQGNPFGHIIMRGGKKPNYHAEDIAAACAHLSEFSLPEHLVIDFSHANCQKQHRRQLDVADDICQQIRAGSRAIAGIMAESFLIEGSQPAINPLALTYGQSITDPCLSWQDTETLLARLASAVDSRF

SEQ ID NO: 75528 - DNA, 1074 bp, Erwinia carotovora subsp. atroseptica SCRI1043
  CDS (1)..(1074): transl_table=11
atgcaaaaagattcgcttaataatattaatatcagtgcagaacaggttttgattactcccgatgaattgaaagccaagtttccgcttaacgacgtggagcaacgcgacattgcgcaagcgagagcgaccattgcggacatcattcatggccgtgatgaccggttattgatcgtctgcggaccttgctctattcatgatacagatgcagcgctggaatatgcgcgccgcttgcagttgcttgccgctgaattgaacgatcgtctctacattgtgatgcgcgtttattttgaaaagccacgtacaacagtgggttggaaagggctcatcaacgatccattcatggatggttcatttgatgtggaatctgggttgcacatcgctcgtgggctgcttctgcaactggtgaatatggggctgccgctggcgacagaagcgcttgatccgaacagtccgcagtacctgggcgatctatttagctggtcagctatcggcgcacgtacgactgaatcacaaacgcaccgtgagatggcttctggcctgtcgatgcctgttgggttcaaaaacggaacggatggcagtctgggaacggcgatcaatgcgatgagagctgccgcgatgccacatcgcttcgtcggtatcaatcaaactgggcaagtttgtctgctgcaaacgcaggggaatggtgatggccatgtgattctgcgcggtggtaaaaccccaaactacagtgcacaggatgtcgccgaatgtgaaaaacagatgcaggaagcaggactgagacctgcgctgatgatagattgtagccacggtaattcgaataaagactaccgccgtcagccactggttgttgaatctgcgattgaacaaatcaaggcgggaaatcgttcgattataggactgatgctggaaagccaccttaacgaggggagccagtcttcagaacaaccacgttcagatatgcgctacggtgtatcagtcacggatgcttgtatcagttgggaaagtacagaaacgttgctgcgttccgttcatcaagatctgagtgccgcacgtgtgaaacattcaggagagtaa

SEQ ID NO: 75529 - protein, 357 aa, Erwinia carotovora subsp. atroseptica SCRI1043
MQKDSLNNINISAEQVLITPDELKAKFPLNDVEQRDIAQARATIADIIHGRDDRLLIVCGPCSIHDTDAALEYARRLQLLAAELNDRLYIVMRVYFEKPRTTVGWKGLINDPFMDGSFDVESGLHIARGLLLQLVNMGLPLATEALDPNSPQYLGDLFSWSAIGARTTESQTHREMASGLSMPVGFKNGTDGSLGTAINAMRAAAMPHRFVGINQTGQVCLLQTQGNGDGHVILRGGKTPNYSAQDVAECEKQMQEAGLRPALMIDCSHGNSNKDYRRQPLVVESAIEQIKAGNRSIIGLMLESHLNEGSQSSEQPRSDMRYGVSVTDACISWESTETLLRSVHQDLSAARVKHSGE

SEQ ID NO: 75530 - DNA, 1047 bp, Yersinia pseudotuberculosis IP 32953
  CDS (1)..(1047): transl_table=11
atgtacaagacagatgaactgcggaccgctcgcatcgatagcttgattacaccgcagcaactggctgaaaagttaccgatttctgaggttattgcagataacgtgacagcgtcacgtaaacgaatagagaaaatacttattggtgaagacccacgtctactcgtggtgattggcccctgctctattcacgaccttgatgcagccgttgattatgccacccggctcaaggtgctacgagaacgctatcaagaccggctggaaatcgtgatgcgcacctatttcgagaaaccacggactgtagtgggttggaaggggctgatttctgatccggcacttgacggctcatgccaggtgaacttgggtattgaactggcacgtaagctactgttagccgtgaatgaactcgggctgccgaccgctaccgagttcctcgatatggtaacaggccaatatattgccgacctcatcagttggggggcaataggcgcacgtaccaccgaaagccagatccaccgagagatggcctcggcactctcctgccccgtgggtttcaaaaatggtacagatggcaatgtgcgtattgctattgatgccattcgcgccgcacaagccagccatatgttcctttctccggataaaaccggccaaatgacgatttaccaaaccagtggtaacccctatgggcatattattatgcggggtggcaagcaacctaactatgatgcctctgatatcgcagccgcctgtgacagcttgcgggaatttgatttgccagaacatctggtggtggattttagccacggcaattgccagaagatgcatcgccgccagttggatgttgccgaaaatatcgggctacagatccgcgcgggttcaacagcgattgtcggtgttatggctgagagtttcctgattgagggcacacagaagattgttgccggacagcccttaacttatgggcaatccatcactgacccttgcctgaattgggatgatactgaacaactgttaagcctattggcagatgcagtaaacagccggttttaa

SEQ ID NO: 75531 - protein, 348 aa, Yersinia pseudotuberculosis IP 32953
MYKTDELRTARIDSLITPQQLAEKLPISEVIADNVTASRKRIEKILIGEDPRLLVVIGPCSIHDLDAAVDYATRLKVLRERYQDRLEIVMRTYFEKPRTVVGWKGLISDPALDGSCQVNLGIELARKLLLAVNELGLPTATEFLDMVTGQYIADLISWGAIGARTTESQIHREMASALSCPVGFKNGTDGNVRIAIDAIRAAQASHMFLSPDKTGQMTIYQTSGNPYGHIIMRGGKQPNYDASDIAAACDSLREFDLPEHLVVDFSHGNCQKMHRRQLDVAENIGLQIRAGSTAIVGVMAESFLIEGTQKIVAGQPLTYGQSITDPCLNWDDTEQLLSLLADAVNSRF

SEQ ID NO: 75532 - DNA, 1056 bp, Mannheimia succiniciproducens MBEL55E
  CDS (1)..(1056): transl_table=11
atgaaagatagtatccataatgttcatatcattgatgaaaaagtattaattacacctgccgaattaaaacaaaagctcccgctcccaatcgcactgcgtacacaaattgaaacacatcgccgtgaaattgccgatatagtacacaaaaaagacgatcgcttactggtggtcattgggccttgttccgtacatgacaccaaagcggcaatcgattatgccaaacgtctgaaagcgctttcagatgaattaaaggatcagctttatatcgttatgcgggtttattttgaaaaaccgcgtaccacggtaggctggaaagggctcattaatgacccgcgtatcgacggcacatttaatgtggaagaagggctgcatatcggtcgtaaattattgctggatttagctgaaatgggcttgccgttggcaacggaagcgttggatccgatgacgccgcaatatctcgccgatttattcagttggtcggctatcggcgcgcgtactaccgaatcgcaaactcaccgtgaactggcttccggattatctatggcagtcggctttaaaaacggcaccgacggtagtctggctaccgccattaatgccatgaaagccgcctcaatgggacacagttttatcggtattaaccagcaaggacaggtcaatttattacatacggagggcaatcctgacggtcatgttatcctgcgtggcggcaaaaaaccgaattaccaacaggaatttgtcaaccaatgcgaagaagaattagccaaagcaggtctggaaacggcgattatgatcgattgcagccacggtaattcaaataaagattataaacgccagccttcagttgcgaaagatgcggtaaatcaaattgtggcggggaataaatccattatcggtttaatgattgaaagcaacatcaatgcgggtaaccaaagctcggaacaaaaggtttccgagatgaaatacggtgtttccattaccgatgcctgtattgattgggaaacaacggataatttattacgtaaaattgccgccgcattgaaaaatagagcggagtaa

SEQ ID NO: 75533 - protein, 351 aa, Mannheimia succiniciproducens MBEL55E
MKDSIHNVHIIDEKVLITPAELKQKLPLPIALRTQIETHRREIADIVHKKDDRLLVVIGPCSVHDTKAAIDYAKRLKALSDELKDQLYIVMRVYFEKPRTTVGWKGLINDPRIDGTFNVEEGLHIGRKLLLDLAEMGLPLATEALDPMTPQYLADLFSWSAIGARTTESQTHRELASGLSMAVGFKNGTDGSLATAINAMKAASMGHSFIGINQQGQVNLLHTEGNPDGHVILRGGKKPNYQQEFVNQCEEELAKAGLETAIMIDCSHGNSNKDYKRQPSVAKDAVNQIVAGNKSIIGLMIESNINAGNQSSEQKVSEMKYGVSITDACIDWETTDNLLRKIAAALKNRAE

SEQ ID NO: 75534 - DNA, 1155 bp, Mannheimia succiniciproducens MBEL55E
  CDS (1)..(1155): transl_table=11
ttgataagctttaaagtgcggttaaatttttctatttttcggatgatatacagagagttgattatgcctacaaaaaacaaaaataatattcgtgtcgcaaacgacgataccagaattgccaatatcgaacagttgcttccgccggtcgctttattggaaaaatatccggcaagcaatgtcgccgttaaaacggtcagaaacgcccgcaataaagcccatcaaattattcacggtgaagatgatcgcctgttggtgattatcggtccttgttcgattcatgatcctaaagcggcgcttgaatatgccaaccgcatggcgaaaatgcgcgaaaaatataaagataccttagaaatcatcatgcgcgtttattttgaaaaaccgcgtactaccgtgggttggaaagggttaattaacgatccgtatttaaacgatacctatgcattaaacgacggtttacgtattgcgcgcaaactattatcagacatcaatgatctcggtttgccgactgcgggtgaatttttagacatgatcaccccgcaatatgtggctgatttcatgagctggggcgcaattggcgcccgtaccacggaatcgcaggttcatcgtgaactggcttccggtttgtcttgtgcggtgggctttaaaaacggcacaaacggcggtgtgaaaatcgctttagacgctattggtgcggcggaagcttcccaccatttcttatcggttactaaattcgggcattcggcgattgtttcaacaaaaggtaatctggattgccatattattttacgcggcggtgataaaggtacgaattatgatgcggaaaatatcgcaaaagtttgtgctaatatcgagaaaagcggccgtatcggtcatgtaatgatcgacttcagccatgctaacagcagtaaacagttcaaaaaacaagtggaagtttgtcatgatgtcgcaaaacaaatcgcacagggttcaaaccaaattttcggcgtgatggttgaaagccacttggttgaaggtcgtcaggatttagtaaacggaaaagcggaaacttacggtcaaagtatcaccgatgcctgtatcggctgggatgacacggaaatcgtgttacaagaactgtccgatgcggtagccgctcgtcgcaaagtcaacggcaaataa

SEQ ID NO: 75535 - protein, 384 aa, Mannheimia succiniciproducens MBEL55E
MISFKVRLNFSIFRMIYRELIMPTKNKNNIRVANDDTRIANIEQLLPPVALLEKYPASNVAVKTVRNARNKAHQIIHGEDDRLLVIIGPCSIHDPKAALEYANRMAKMREKYKDTLEIIMRVYFEKPRTTVGWKGLINDPYLNDTYALNDGLRIARKLLSDINDLGLPTAGEFLDMITPQYVADFMSWGAIGARTTESQVHRELASGLSCAVGFKNGTNGGVKIALDAIGAAEASHHFLSVTKFGHSAIVSTKGNLDCHIILRGGDKGTNYDAENIAKVCANIEKSGRIGHVMIDFSHANSSKQFKKQVEVCHDVAKQIAQGSNQIFGVMVESHLVEGRQDLVNGKAETYGQSITDACIGWDDTEIVLQELSDAVAARRKVNGK

SEQ ID NO: 75536 - DNA, 1074 bp, Burkholderia mallei ATCC 23344
  CDS (1)..(1074): transl_table=11
atgcccccgcacaataccgacgacgtccgcatccgtgaactgaaggagctgactccgcccgcccacctgatccgcgaattcgcgctcggcgaggcggtgtcggagctcatctacaacgcgcgccaggcgatgcaccggatcctgcacgggatggacgatcgcctgatcgtcatcatcgggccgtgctcgatccacgacacgaaggcggcgctcgaatacgcgggccggctcgtccaggagcgcgagcgcttcgcaagcgaactcgagatcgtaatgcgcgtgtacttcgagaagccgcgcacgacggtcggctggaaggggctcatcaacgatccgcacctggataacagcttcaagatcaacgacggcctgcgcaccgcgcgcgagctgctgctgcagatcaacgagatggggctgcccgccggcaccgaatacctcgacatgatcagcccgcaatacatcgcggacctgatctcgtggggcgcgatcggcgcgcgcacgaccgaatcgcaggtgcaccgcgagctcgcgtcggggctgtcgtgcccggtcggcttcaagaacggcaccgacggcaacgtgaagatcgcggtcgacgcgatcaaggccgcatcgcagccgcaccatttcctgtcggtgacgaagggcgaccattcggcgatcgtgtcgacggccggcaacgaggactgccacgtgatcctgcgcggcggcaaggcgccgaactacgatgccgacagcgtgaacgccgcgtgcgcggacatcggcaaggccggcctcgccgcgcgcctgatgatcgacgcgagccatgcgaacagctcgaagaagcacgagaaccagattccggtatgcgcggacatcggccgccagatcgccgcgggcgacgagcgcatcgtcggcgtgatggtcgagtcgcacctcgtcgaaggccgccaggacctgaaggaaggctgcccgctcacgtacggccagagcatcaccgatgcatgcatcaactgggacgacagcgtgaaggtgctcgaagggctcgccgaagcggtgaaggcgcggcgcgtcgcgcgcggcagcggcaactga

SEQ ID NO: 75537 - protein, 357 aa, Burkholderia mallei ATCC 23344
MPPHNTDDVRIRELKELTPPAHLIREFALGEAVSELIYNARQAMHRILHGMDDRLIVIIGPCSIHDTKAALEYAGRLVQERERFASELEIVMRVYFEKPRTTVGWKGLINDPHLDNSFKINDGLRTARELLLQINEMGLPAGTEYLDMISPQYIADLISWGAIGARTTESQVHRELASGLSCPVGFKNGTDGNVKIAVDAIKAASQPHHFLSVTKGDHSAIVSTAGNEDCHVILRGGKAPNYDADSVNAACADIGKAGLAARLMIDASHANSSKKHENQIPVCADIGRQIAAGDERIVGVMVESHLVEGRQDLKEGCPLTYGQSITDACINWDDSVKVLEGLAEAVKARRVARGSGN

SEQ ID NO: 75538 - DNA, 1074 bp, Burkholderia pseudomallei K96243
  CDS (1)..(1074): transl_table=11
atgcccccgcacaataccgacgacgtccgcatccgtgaactgaaggagctgactccgcccgcccacctgatccgcgaattcgcgctcggcgaggcggtgtcggagctcatctacaacgcgcgccaggcgatgcaccggatcctgcacgggatggacgatcgcctgatcgtcatcatcgggccgtgctcgatccacgacacgaaggcggcgctcgaatacgcgggccggctcgtccaggagcgcgagcgcttcgcaagcgagctcgagatcgtgatgcgcgtgtacttcgagaagccgcgcacgacggtcggctggaaggggctcatcaacgatccgcacctggataacagcttcaagatcaacgacggcctgcgcaccgcgcgcgagctgctgctgcagatcaacgagatggggctgcccgccggcaccgaatacctcgacatgatcagcccgcagtacatcgcggacctgatctcgtggggcgcgatcggcgcgcgcacgaccgaatcgcaggtgcaccgcgagctcgcgtcggggctgtcgtgcccggtcggcttcaagaacggcaccgacggcaacgtgaagatcgcggtcgacgcgatcaaggccgcatcgcagccgcaccatttcctgtcggtgacgaagggcggccattcggcgatcgtgtcgacggccggcaacgaggactgccacgtgatcctgcgcggcggcaaggcgccgaactacgatgccgacagcgtgaacgccgcgtgcgcggacatcggcaaggccggcctcgccgcgcgcctgatgatcgacgcgagccatgcgaacagctcgaagaagcacgagaaccagattccggtatgcgcggacatcggccgccagatcgccgcgggcgacgagcgcatcgtcggcgtgatggtcgagtcgcacctcgtcgaaggccgccaggacctgaaggaaggctgcccgctcacgtacggccagagcatcaccgatgcatgcatcaactgggacgacagcgtgaaggtgctcgaagggctcgccgaagcggtgaaggcgcggcgcgtcgcgcgcggcagcggcaactga

SEQ ID NO: 75539 - protein, 357 aa, Burkholderia pseudomallei K96243
MPPHNTDDVRIRELKELTPPAHLIREFALGEAVSELIYNARQAMHRILHGMDDRLIVIIGPCSIHDTKAALEYAGRLVQERERFASELEIVMRVYFEKPRTTVGWKGLINDPHLDNSFKINDGLRTARELLLQINEMGLPAGTEYLDMISPQYIADLISWGAIGARTTESQVHRELASGLSCPVGFKNGTDGNVKIAVDAIKAASQPHHFLSVTKGGHSAIVSTAGNEDCHVILRGGKAPNYDADSVNAACADIGKAGLAARLMIDASHANSSKKHENQIPVCADIGRQIAAGDERIVGVMVESHLVEGRQDLKEGCPLTYGQSITDACINWDDSVKVLEGLAEAVKARRVARGSGN

SEQ ID NO: 75540 - DNA, 1092 bp, Methylococcus capsulatus str. Bath
  CDS (1)..(1092): transl_table=11
atgcccagcgtgtacaacaccgacgatcttcgcatctgcgagatcaaggaagtcattccgcccgtccaggttcatgaggaattcccgatcacggaccgggccgcactcacgacactgaccgcccgccgagggattcacgcaatcctttccaaggaggacgaccgcctgctggtggtgatcgggccctgttcgatccatgaccccaaggccgcgctcgaatacggggagcggctgctgccactccgccagaaactggcgagacatctggaaatcgtgatgcgggtctatttcgagaagccgcgaacgaccgtcggctggaagggcctgatcaatgatcccgatctggacgagagtttcaacatcaacaaaggcttgcgcctcgcccgcaagctgttgctcgatctgaacgaactgggcatgcccgcggccaccgagtacctcgatctcatcaccccgcagtatgtctccgacctgatcgcttggggcgccatcggtgctcgtaccacggagagccagtctcaccgtgaactggcatcggggctgtcatgtccggttggattcaagaacgccaccgacggcacgatcaaggttgctgtcgacgccataggtgcggcacggcggccacatcatttcctgtctttgaccaaggccggtcattcggcgatcttctccacgaccggtaacgccgactgtcacatcatccttcgtggcggagcccggccgaattacgacgcggccagcgtcgaagcggcggccagggcgctggaagccgtcggcctgccgcccaacatcatggtggactgcagccatgccaacagcatgaaggattacctgaagcagctgcgggtggccgaggacgtggccgaacagatagacggcggcgacaggcggatcatcggcttgatggtggaaagtcacctcaagccgggcaatcagaaactccacaagggcatggttcccgaatacggcgtcagcatcaccgatgcctgcatcggctgggatgacagcgtggccgtgctggaacggctcgccgccgcggtggagagccggcgcggccggtcggcaggcatccggaacgtgcggggggcctga

SEQ ID NO: 75541 - protein, 363 aa, Methylococcus capsulatus str. Bath
MPSVYNTDDLRICEIKEVIPPVQVHEEFPITDRAALTTLTARRGIHAILSKEDDRLLVVIGPCSIHDPKAALEYGERLLPLRQKLARHLEIVMRVYFEKPRTTVGWKGLINDPDLDESFNINKGLRLARKLLLDLNELGMPAATEYLDLITPQYVSDLIAWGAIGARTTESQSHRELASGLSCPVGFKNATDGTIKVAVDAIGAARRPHHFLSLTKAGHSAIFSTTGNADCHIILRGGARPNYDAASVEAAARALEAVGLPPNIMVDCSHANSMKDYLKQLRVAEDVAEQIDGGDRRIIGLMVESHLKPGNQKLHKGMVPEYGVSITDACIGWDDSVAVLERLAAAVESRRGRSAGIRNVRGA

SEQ ID NO: 75542 - DNA, 1083 bp, Azoarcus sp. EbN1
  CDS (1)..(1083): transl_table=11
atgtccgcctcagtcaagattcacatcgatgatgtccgcatccaggagatcaaggaactgattccgcccgcccacgtgctgcgcgaatttccggcgacgccgaaggccgccgaagtggcgtacgaggcgaggcaggggatccaccgcatcctgttcggcgcggacgaccgcctgctggtcgtcatcggaccatgctcgatccacgatctggacgcggcgctcgaatacgcgcgcaagctcaaggccgaggcggtgcgccacaaggacgatctgctcgtcgtgatgcgggtgtatttcgagaaaccgcgcacgacggtcggctggaaaggcctgatcaacgatccctacctcgacaacagcttccgcatcaacgaaggcgtgcggctcgcgcgcaagctgctgtgggagatcagcgagatggggctggcggcgggcacggagttcctcgacatgatcacgccgcagtacatcgccgacctgatcgcgtggggcgcgatcggcgcccgcaccaccgaaagccaggtgcaccgcgaactcgcgtccgggctgtcgtgcccggtcggcttcaagaacggcaccgacggcaatgtcaggatcgccgtcgacgcgatcaaggctgcgcagtcgccgcatcatttcctctccgtcaccaaggcggggcattcggcgatcgtcacgacgctcggcaacgaggactgccacgtcatcctgcgcggcggcaagagcaccaactacgatgccgccagcgtcgatgcggcttgcaaggagctcgctgcttcgggcgtgccgggcaaggtgatgatcgatttctcgcatgccaacagccgcaagcaacatcgcctgcagatcgaggtcgcgcgcgatgtcggcgcgcagatggcgaacggcgacgaccgcctcatcggcgtgatggtcgagtcgcacctgaaggaaggccgccaggacctgatcccgggcaaggagctcgagtacggcaagagcatcaccgacgcgtgcctgggctgggaagacagcgtcaccgtgctcgaaatccttgccgaggcggtacgccagcggcgcgtcaaacgcgccgacctggagtga

SEQ ID NO: 75543 - protein, 360 aa, Azoarcus sp. EbN1
MSASVKIHIDDVRIQEIKELIPPAHVLREFPATPKAAEVAYEARQGIHRILFGADDRLLVVIGPCSIHDLDAALEYARKLKAEAVRHKDDLLVVMRVYFEKPRTTVGWKGLINDPYLDNSFRINEGVRLARKLLWEISEMGLAAGTEFLDMITPQYIADLIAWGAIGARTTESQVHRELASGLSCPVGFKNGTDGNVRIAVDAIKAAQSPHHFLSVTKAGHSAIVTTLGNEDCHVILRGGKSTNYDAASVDAACKELAASGVPGKVMIDFSHANSRKQHRLQIEVARDVGAQMANGDDRLIGVMVESHLKEGRQDLIPGKELEYGKSITDACLGWEDSVTVLEILAEAVRQRRVKRADLE

SEQ ID NO: 75544 - DNA, 1080 bp, Azoarcus sp. EbN1
  CDS (1)..(1080): transl_table=11
atgcccctggccaaaaccgaaaacctcaatatcgtcgccgtcgacccgatgccctcgcccgaggagatcaaggcccgcgtgccgcttaccgagcgcgccgctgcgtccgtcgtcgccggccgccgcgcgctccacgacattctcgaccgcaaggacaggcgcctcttcatcgtcgtcggcccgtgctcgatccacgatccgatcgccggcctcgattatgcgaagcgcctgaaggcgctggccgacgacgtggccgagacgatggtgctggtgatgcgcgtgtatttcgagaagccgcgcacctccaccggctggaaaggcttcatcaacgatccgcacatggacgattcgttccacatcgaggaaggcatggagaaagcccggcgcttcctgctcgacgtgaacgaactcggcctgccggcggcgaccgaagccctcgacccgatcgccccgcagtactacggcgacctgatcgcgtggacggcgatcggcgcgcgcacgtcggagtcgcagacgcatcgtgagatgtcgtcgggcctgtcgacgccggtcggcttcaagaacgccactgacggcgacctcgacgtcgcgatcaacgcgatcgtttccgcgtcgcatccgcacagcttcctcggcatcaacggcaagggccagtccgcgatcctgcgcacgcgcggcaaccgctacggccacgtcgtgctgcgcggcggcggcggacggccgaactacgacacggtgtcgatctcgctcgccgaacaggcgctggcgaaggcgaagctgccgctgaacatcgtcgtcgactgctcgcacgcgaactcgtggaaaaaacccgagctgcagccgctggtcatgaaggacgtggtgcaccagatccgcgagggcaaccgctcggtggtcgggctgatgatggagagcttcctcgaagccggcaaccagccgattccggccgatctgtcgcaactgaagtacggctgctcggtcaccgacgcctgcatcgactgggccagcaccgaggacaccatccgcaaggccgacagcgtgctgcgcgaagcgctgcagcgccggagcgagcgcgcatga

SEQ ID NO: 75545 - protein, 359 aa, Azoarcus sp. EbN1
MPLAKTENLNIVAVDPMPSPEEIKARVPLTERAAASVVAGRRALHDILDRKDRRLFIVVGPCSIHDPIAGLDYAKRLKALADDVAETMVLVMRVYFEKPRTSTGWKGFINDPHMDDSFHIEEGMEKARRFLLDVNELGLPAATEALDPIAPQYYGDLIAWTAIGARTSESQTHREMSSGLSTPVGFKNATDGDLDVAINAIVSASHPHSFLGINGKGQSAILRTRGNRYGHVVLRGGGGRPNYDTVSISLAEQALAKAKLPLNIVVDCSHANSWKKPELQPLVMKDVVHQIREGNRSVVGLMMESFLEAGNQPIPADLSQLKYGCSVTDACIDWASTEDTIRKADSVLREALQRRSERA

SEQ ID NO: 75546 - DNA, 1056 bp, Neisseria gonorrhoeae FA 1090
  CDS (1)..(1056): transl_table=11
atgacacaccattaccccacagacgatattaagattaaagaagttaaagagttgttgccgccgattgcccatctttacgagctgccgatttccaaagaggcttcgggcttggttcaccgcacccgtcaggaaatttccgatttggttcacggcagggacaggcggctgttggtcattatcgggccgtgttcgattcacgatccgaaagcggcgttggaatatgcggaacgtctgttgaaactccgcaagcggtatgaaaacgagcttttgatcgtgatgcgcgtttatttcgagaagccgagaacgacggtgggttggaaaggtttgattaacgacccgcatttggacggtacgttcgacatcaatttcggtttgcgtcaggcgcgcagtctgttgttgtccctgaataatatgggcatgcctgcctctaccgaatttttggatatgattacaccccagtattatgccgacctgatttcttggggggcaatcggcgcgcggacgaccgaaagccaagtccaccgcgaattggcaagcggtctgtcctgccccgtcggctttaaaaacggtacggacggcaatttgaagattgcgatcgacgcaatcggtgcggcgagccattcgcatcatttcttgtctgtaaccaaggccgggcattccgccattgtccataccggcggcaatcccgactgtcatgtcattttgcgcggcggaaaagagccgaattatgatgcgggacacgtcagcgaggcggtggaacaactgcgtgcggcaggggtaaccgacaagctgatgatcgattgcagccacgccaacagccgcaaggattacacccggcagatggaagtggcacaagacattgccgaccaattggaacaggacggcggcaatatcatgggcgtgatggtggaaagccatttggtcgaaggcaggcaggacaagccggaagtgtacggcaagagcattaccgatgcgtgtatcggttggggcgcgactgaagaattgttggcattgttggcgggtgcgaacacaaaacgtatggcgcgcgcaggttga

SEQ ID NO: 75547 - protein, 351 aa, Neisseria gonorrhoeae FA 1090
MTHHYPTDDIKIKEVKELLPPIAHLYELPISKEASGLVHRTRQEISDLVHGRDRRLLVIIGPCSIHDPKAALEYAERLLKLRKRYENELLIVMRVYFEKPRTTVGWKGLINDPHLDGTFDINFGLRQARSLLLSLNNMGMPASTEFLDMITPQYYADLISWGAIGARTTESQVHRELASGLSCPVGFKNGTDGNLKIAIDAIGAASHSHHFLSVTKAGHSAIVHTGGNPDCHVILRGGKEPNYDAGHVSEAVEQLRAAGVTDKLMIDCSHANSRKDYTRQMEVAQDIADQLEQDGGNIMGVMVESHLVEGRQDKPEVYGKSITDACIGWGATEELLALLAGANTKRMARAG

SEQ ID NO: 75548 - DNA, 1089 bp, Pseudomonas syringae pv. syringae B728a
  CDS (1)..(1089): transl_table=11
atgagtaacacgatggctgatttaccgattgacgacctcaacgttgcctccaacgagactctgatcactccggatcagctcaagcgcgacatccccctgaccgatgctgccctgcagaccgtcagccagggccgcgaagtgattcgcaacattctcgatggccatgaccaccgcctgttcatcgtgatcggcccgtgctcgatccacgacctcaaggcagccaaggagtacgccgagcgtctcaaggcgctggcggcggaagtgtctgacacgctgtatctggtgatgcgcgtctacttcgagaagccgcgcaccacggtgggctggaaaggcctgatcaacgacccgtacctggatgactcgttcaagatccaggatggcctgcacatcggtcgccagttgctgctggatctggccgagatgggtctgcccaccgccaccgaagccctggacccgatctccccgcagtatctgcaggacctgatcagctggtcggcaatcggcgcgcgcaccacagaatcccagactcaccgcgagatggcttcgggcctgtcctcggcagtcggtttcaagaacggtaccgacggcggcctgacggttgccatcaacgccttgcaatcggtgtcgagcccgcatcgtttcctgggtatcaaccaggaaggcggcgtgtcgatcgtgaccaccaaaggcaatgcctacggtcatgtggtgctgcgcggcggcaacggcaagcccaactatgactcggtcagcgttgcgctctgcgagcaggcgctgaacaagtccggcattcgcccgaacatcatggtcgactgcagccatgccaactccaacaaggacccggcgctgcaaccgctggtgatggaaaacgtcgccaaccagatcctggaaggcaacgaatcgatcatcggcctgatggtcgagagccatttgaactggggctgccaggcgattcccaaggacctgtcggaattgcagtacggcgtgtcgattaccgatgcctgcatcgattggcaaagcactgaaaagaccctgcgcagcatgcacgcgaaactcaaggatgtgctgccagctcgcaagcgcaagtaa

SEQ ID NO: 75549 - protein, 362 aa, Pseudomonas syringae pv. syringae B728a
MSNTMADLPIDDLNVASNETLITPDQLKRDIPLTDAALQTVSQGREVIRNILDGHDHRLFIVIGPCSIHDLKAAKEYAERLKALAAEVSDTLYLVMRVYFEKPRTTVGWKGLINDPYLDDSFKIQDGLHIGRQLLLDLAEMGLPTATEALDPISPQYLQDLISWSAIGARTTESQTHREMASGLSSAVGFKNGTDGGLTVAINALQSVSSPHRFLGINQEGGVSIVTTKGNAYGHVVLRGGNGKPNYDSVSVALCEQALNKSGIRPNIMVDCSHANSNKDPALQPLVMENVANQILEGNESIIGLMVESHLNWGCQAIPKDLSELQYGVSITDACIDWQSTEKTLRSMHAKLKDVLPARKRK

SEQ ID NO: 75550 - DNA, 1083 bp, Pseudomonas syringae pv. syringae B728a
  CDS (1)..(1083): transl_table=11
atgaattcgcccgttgccgtaaccccgtccgacctgtccagccacgccgtcaagctggcagacaacagccccgtctcgaaacgcctgccaggtactctggaattgaagatgcgtctgcccctcgacgcagcgctcaccgaacaggttgccagccatcgccgcgccgtacgtgccatccttgaaggtcaggactcgcgactgctggtcatcgtcggcccctgctcgatccacgaccctcgatccgcccttgaatacgctgagcgactggccgaccttgccgcgcaagtcagtgatcagatgctgctggtgatgcgcgcctacgtcgaaaaaccgcgcacaacggtgggctggaaaggtctggcttacgatccgcgccttgacggcagtgacgacatggccgagggcctgacgctgtcgcggcaattgatgctggaggtgctgggcctgggcctgccgatcgccaccgagatactgcaaccgatggcggccggctacttcgacgacctgctcagttgggtcgcgattggcgctcggaccaccgaatcgcagatccatcgggaaatggccagcggcctgcccatggccgtcggtttcaagaacggtactgacggcggcgtgacggtggccagcgacgcgatgcgctcggctgcgcatccgcatcgccactttggcatggacggtcatggccacccggcgattatcgagacgcaaggcaatccggatacgcacatcgtgctacgcggcggccacggcgggcccaattacgatcgccagagtgtggccaaggtgcaggcgagcctgagcaagaataatgtcgcgtcgcgaatcatggtcgattgcagccacgccaacagtggcaaggacccgctgcgtcagccaggggtgttcgaggacgttctggaacagcgcttgtcaggcaacacctcgctgatcggcatgatgatcgagagccacctgttcgacggctgccaggcattgggcgggacgctgcagtacggcgtttcgatcaccgacggctgccttggctgggaaggcaccgaacaactgctgcgtcgcgcggttgaccgtctgcgttacagataa

SEQ ID NO: 75551 - protein, 360 aa, Pseudomonas syringae pv. syringae B728a
MNSPVAVTPSDLSSHAVKLADNSPVSKRLPGTLELKMRLPLDAALTEQVASHRRAVRAILEGQDSRLLVIVGPCSIHDPRSALEYAERLADLAAQVSDQMLLVMRAYVEKPRTTVGWKGLAYDPRLDGSDDMAEGLTLSRQLMLEVLGLGLPIATEILQPMAAGYFDDLLSWVAIGARTTESQIHREMASGLPMAVGFKNGTDGGVTVASDAMRSAAHPHRHFGMDGHGHPAIIETQGNPDTHIVLRGGHGGPNYDRQSVAKVQASLSKNNVASRIMVDCSHANSGKDPLRQPGVFEDVLEQRLSGNTSLIGMMIESHLFDGCQALGGTLQYGVSITDGCLGWEGTEQLLRRAVDRLRYR

SEQ ID NO: 75552 - DNA, 1089 bp, Haemophilus influenzae 86-028NP
  CDS (1)..(1089): transl_table=11
atggctaaagagaaaattgaaattgtcgtggcaaacgacgatacgcgaattgaaaaagtcgatcaggtgttaccacccattgccttattagaaaaatacccagcaagtgaacaggctgcggcgttagtgaagcaaactcgtcatgaggcacataatattattcatggtaaagatgatcgtttattagtcgtgattgggccttgctctattcatgatccgaaagttgccattgaatatgcgactcgtttaaaaccattacgtgaaaaatacaaagatagccttgaaattattatgcgtgtgtattttgagaaaccgcgtacaacggtgggttggaaaggtttaattaatgatccatatttgaatgatacttatcgtttaaatgatgggttacgcattgcacggaaattactttcagatattaatgatcttggtgtgcctgcagcgggcgagtttttagatatgattacacctcagtatttggcagattttatgagctggggggcgattggggctagaacaacagaatcacaagttcatcgtgagttggcttcaggtttatcttgtgctgttgggtttaaaaatgccactaatggtggtgtgaaagtcgctttagatgcaattggtgcggcggaagctccccactatttcttatctgtcactaaatttggtcattctgcaattgtttctacaaaagggaatgaagattgccatattattttacgaggtggagataaaggtcctaactatagtgctgaagatgtagaaaaagtttgtgctgatattgaaaaaacagggcgtattccacacgttatggttgattttagccatgcaaacagcagtaaacaatataaaaagcaaatggatgtttgccaagacgtatgtaatcagattgcatttggttctaaacaaatctttggcgtaatggtggaaagccatttagtggaaggtcgtcaagatttagttgatggcaaagcgcagacttatggacaaagtattacggatgcgtgcattggatgggaagattctgaaagattattgcaacaactttctgatgcagttattgctagacgtaaagcgacgagtaattaa

SEQ ID NO: 75553 - protein, 362 aa, Haemophilus influenzae 86-028NP
MAKEKIEIVVANDDTRIEKVDQVLPPIALLEKYPASEQAAALVKQTRHEAHNIIHGKDDRLLVVIGPCSIHDPKVAIEYATRLKPLREKYKDSLEIIMRVYFEKPRTTVGWKGLINDPYLNDTYRLNDGLRIARKLLSDINDLGVPAAGEFLDMITPQYLADFMSWGAIGARTTESQVHRELASGLSCAVGFKNATNGGVKVALDAIGAAEAPHYFLSVTKFGHSAIVSTKGNEDCHIILRGGDKGPNYSAEDVEKVCADIEKTGRIPHVMVDFSHANSSKQYKKQMDVCQDVCNQIAFGSKQIFGVMVESHLVEGRQDLVDGKAQTYGQSITDACIGWEDSERLLQQLSDAVIARRKATSN

SEQ ID NO: 75554 - DNA, 1092 bp, Pseudomonas fluorescens Pf-5
  CDS (1)..(1092): transl_table=11
atgaactcgtccgtatccgccctgcccctgtccgcccacgtcagcgccaatgaaaccctgacccagcgcctgcccagctccctggaactcaagcagcaactgccgctgtccctggccttgaaccaacaagtcgccgctcaccgccaggcggtgcgcgccatcctcgaaggtcgcgacccacgcctgctggtagtcgtcggcccctgctccatccacgacccgcaatcggccctggaatacgccgccaacctagcccgcctggccgatgaagtgcgcgaccagatgctgctggtgatgcgcgcctacgtggaaaagccccgtaccaccgtcggctggaaaggcctggcctacgacccccgcctggatggcagcgacgacatggccggcggcctgcacctgtcccgtgaactgatgcgcgagatgctgcgcctgggcctgccgattgccaccgaactgttgcagcccatggccgccggctacttcgatgacctgctgagctgggtcgccattggtgcgcgcaccaccgaatcgcagatccaccgcgagatggccagcggcctggacatgcccgtgggtttcaagaacggcaccgacggcggcgtcgctatcgcctgtgacgccatgcgctcggcggcccacccgcaccgccacttcggcgtcgacagccagggccacccggcggtcatccagaccccaggcaaccccgacacccatctggtgctgcgcggcggccatcgcgggcccaactacgaccgccagagcgtggcccaggtccagcaggacctgcagaagctgaagatcccggcgcggatcatggtcgattgcagccacgccaacagcggcaaggacccgctgcgtcagccggcggtgttcaacgaggtactggagcagcgcttgcagggcgatacctcgctgatgggggtgatgctggaaagccacctgttcgaaggctgccagcccctgagcgcgaacctgcgctacggcgtttcggtgaccgacggctgcctgggctgggacgccaccgaacaattgctgcgcaatggcgcgcaacaactgcgacacgcagacaaggccgcagccgtccccgcctga

SEQ ID NO: 75555 - protein, 363 aa, Pseudomonas fluorescens Pf-5
MNSSVSALPLSAHVSANETLTQRLPSSLELKQQLPLSLALNQQVAAHRQAVRAILEGRDPRLLVVVGPCSIHDPQSALEYAANLARLADEVRDQMLLVMRAYVEKPRTTVGWKGLAYDPRLDGSDDMAGGLHLSRELMREMLRLGLPIATELLQPMAAGYFDDLLSWVAIGARTTESQIHREMASGLDMPVGFKNGTDGGVAIACDAMRSAAHPHRHFGVDSQGHPAVIQTPGNPDTHLVLRGGHRGPNYDRQSVAQVQQDLQKLKIPARIMVDCSHANSGKDPLRQPAVFNEVLEQRLQGDTSLMGVMLESHLFEGCQPLSANLRYGVSVTDGCLGWDATEQLLRNGAQQLRHADKAAAVPA

SEQ ID NO: 75556 - DNA, 1077 bp, Pseudomonas fluorescens Pf-5
  CDS (1)..(1077): transl_table=11
atggctgatttaccgatcaacgaccttaacgtcgcctccaacgagaccctgatcacccctgatcaactcaaacgagacatcccgctgagcgacaccgccttgcgcaccgtgaccaagggtcgcgaagtgatccgcaatatcctcgacggcactgatcaccgcctgttcatcgtcattgggccctgctcgatccacgacatcaaggcagcccacgaatacgccgagcggctcaaggcactggcggctgaagtctccgacaccctgtacctggtgatgcgcgtttatttcgagaaaccgcggaccaccgtcggctggaaaggcctgatcaacgacccttacctggacgactcgttcaagatccaggacggcctgcacattggtcgtcagttgctgctggacctggctgaaatgggcctgcctactgccactgaagccctggacccgatctccccgcaatacttgcaggacctgatcagctggtcggccattggtgcacgtaccaccgaatcccagactcaccgcgaaatggcttcgggcctgtcctcggccgtgggcttcaagaacggcaccgacggtggcctgactgtggcaatcaacgccttgcagtcggtttccagccctcaccgtttcctggggatcaacccccagggcggcgtgtcgatcgtcaccaccaaaggcaacgcctacggccacgtggtactgcgcggcggcaacggcaagcccaactatgactcggtcagcgtcgccgtctgcgagcaggccctgagcaaggccaagatcaagccaaacatcatgatcgactgtagccacgccaactccaacaaggacccggcactgcagccgctggtcatggaaaacgtggctaaccagatcctcgagggcaaccagtcgatcatcggcctgatggtggaaagtcacttgaactggggttgccaggcgattccgaagaacctgtcggaactgcagtacggcgtatcgatcaccgatgcctgcatcgactgggaaagtaccgagaagaccctgcgcggcatgcacgccaagctcaaggacgtcttgccgaaacgcgatcgcagctga

SEQ ID NO: 75557 - protein, 358 aa, Pseudomonas fluorescens Pf-5
MADLPINDLNVASNETLITPDQLKRDIPLSDTALRTVTKGREVIRNILDGTDHRLFIVIGPCSIHDIKAAHEYAERLKALAAEVSDTLYLVMRVYFEKPRTTVGWKGLINDPYLDDSFKIQDGLHIGRQLLLDLAEMGLPTATEALDPISPQYLQDLISWSAIGARTTESQTHREMASGLSSAVGFKNGTDGGLTVAINALQSVSSPHRFLGINPQGGVSIVTTKGNAYGHVVLRGGNGKPNYDSVSVAVCEQALSKAKIKPNIMIDCSHANSNKDPALQPLVMENVANQILEGNQSIIGLMVESHLNWGCQAIPKNLSELQYGVSITDACIDWESTEKTLRGMHAKLKDVLPKRDRS

SEQ ID NO: 75558 - DNA, 1083 bp, Psychrobacter arcticus 273-4
  CDS (1)..(1083): transl_table=11
atgataacaaccgctacccataatgcagaaattgacgacgtgaatattgaaaaatttattccattaataacacccaatgagctaaaaaccgaactgcctttatcaaacgaagcctataaaaccgttttaaatggtcgtcacactatccaaaacatcttggatggcaaagacaagcgtctgtttgtggttattggtccctgctctattcatgacatcaaagccgctcacgaatatgctgatcgcttagcgatattggcgaaagagattgaagacagcatattcgttgtgatgcgtgtctattttgagaagccgcgcacgaccgttggctggaagggtatgattaacgaccctgatatgaatgacagctttgacattgaaaaaggtctgcgtactgcccgtaagctactgcttgatctcaatgaaaaagggttgccttgcgccaccgaagcgcttgacccgaacacgccgcagtacatgcaggacttgatcagctggtcagcgattggcgcacgtacgactgaaagccaaacacaccgtgagatgagctcaggcttatcatgcccagttggctttaagaatggtaccgatggtggtatgactgtcgcggtcaacgccatgcaagcggtaaaagcgggtcatagctttttaggtctgtcatcagatggcaaagtatctatcatcaaatctaaaggcaacccttatgctcacgtggtattacgtggtggtaacggtaagcccaactacgatgaaacggcagttgctcaagtagaagacgcacttgctaaaggcaaaaccagtagcaaaattatgattgactcaagtcatgccaattcaggtaaagacccttacctgcaaccgatggtcattcaaaacgtcgcggagcaaattaaaaatggcaacaagtctatcatcggtatgatgattgagagtcatttaaaaggcggtcgccaagagctaactgctgatttggacgcgctcgaatacggcatgtcgattactgatggttgcctagattgggacagcacggtcacagcactacacaatttacgtgatatggtcaaagacatcctacctaatcgttaa

SEQ ID NO: 75559 - protein, 360 aa, Psychrobacter arcticus 273-4
MITTATHNAEIDDVNIEKFIPLITPNELKTELPLSNEAYKTVLNGRHTIQNILDGKDKRLFVVIGPCSIHDIKAAHEYADRLAILAKEIEDSIFVVMRVYFEKPRTTVGWKGMINDPDMNDSFDIEKGLRTARKLLLDLNEKGLPCATEALDPNTPQYMQDLISWSAIGARTTESQTHREMSSGLSCPVGFKNGTDGGMTVAVNAMQAVKAGHSFLGLSSDGKVSIIKSKGNPYAHVVLRGGNGKPNYDETAVAQVEDALAKGKTSSKIMIDSSHANSGKDPYLQPMVIQNVAEQIKNGNKSIIGMMIESHLKGGRQELTADLDALEYGMSITDGCLDWDSTVTALHNLRDMVKDILPNR

SEQ ID NO: 75560 - DNA, 1059 bp, Colwellia psychrerythraea 34H
  CDS (1)..(1059): transl_table=11
atgtatcaaactgacgatgtacgcatcaataaaattaaagatcttttacctccaattgctttattggaacgatttcctgcgtcagagcaagcaactaaatcagtcgttgctggcagaactgctattcacaatattctcaaaggtaaagatgatcgcttattagtggttattggaccttgttctatacatgatcctgaagcggcacttgaatacgggcaacgcttagtaaagcttcgtgaagagtacaaagatagtcttgagattgtcatgcgtgtttattttgaaaaaccacgtactaccgttggttggaagggcttaattaatgacccttatatggataacagctttaaattgaatgatggtttacgtttaggtcgtaagttactagtagaactaaatgaccttggtttacctacggcgggcgagttcttagatatgatcacaccgcaatatatggcagatcttatgtgttggggagccattggcgctcgtactactgaatcacaagttcaccgtgaattagcatcaggactttcatgtccagttggatttaaaaacggaactgacggtaccattaaaattgcgattgatgccataggctcagcttctgcatcacatcactttttatcagttacaaaatttggccatgctgccattgttgaaacgacaggtaatagtgattgtcatatcattttacgtggtgggagaacgactaattttgatgctgatagtgttaaagcggtaaccgagcaattaactacctctgatttaaacactaaggtaatgattgattttagccatgctaactcgagcaaaaaatttgaaaatcaaatgatagtctctactgatgtcagtgagcaaattagccaaggcaatgaaaatatctttggtgttatggttgaaagtcatttagttgaaggtaatcaaagtctagttaaaggtagagcagccgtgtatggacaaagtattactgatgcttgtattggctgggatgatactgaaaaattattaagccagttaaatggagccgttgttagtcgccgaagcgttatagactaa

SEQ ID NO: 75561 - protein, 352 aa, Colwellia psychrerythraea 34H
MYQTDDVRINKIKDLLPPIALLERFPASEQATKSVVAGRTAIHNILKGKDDRLLVVIGPCSIHDPEAALEYGQRLVKLREEYKDSLEIVMRVYFEKPRTTVGWKGLINDPYMDNSFKLNDGLRLGRKLLVELNDLGLPTAGEFLDMITPQYMADLMCWGAIGARTTESQVHRELASGLSCPVGFKNGTDGTIKIAIDAIGSASASHHFLSVTKFGHAAIVETTGNSDCHIILRGGRTTNFDADSVKAVTEQLTTSDLNTKVMIDFSHANSSKKFENQMIVSTDVSEQISQGNENIFGVMVESHLVEGNQSLVKGRAAVYGQSITDACIGWDDTEKLLSQLNGAVVSRRSVID

SEQ ID NO: 75562 - DNA, 1053 bp, Colwellia psychrerythraea 34H
  CDS (1)..(1053): transl_table=11
atgaccattaaaactgatgaattacgcaccacgctaattgaaaatttagtctcccctgcacagcttgctgaagaaattcctttaagtacggcaactgcagattttattatgcaaagccgcaaagaaattgaagcggtcattagtggtgaagacaagcgtttattagtcattatcggcccttgctctattcacgacaccacagctgcaattgattacgctaaaaaactcaccgtattacgtgacaagtataaaaatgaattactcattgttatgcgcgtttactttgaaaaaccacgtactaccgttggttggaaaggtttaattagcgatcctgatttagacaagtcatttcatgttgccaaagggttaaaacttgcccgtaacttattagtcgaaattaatgacttaggactacctgcaggtactgaatttttagatatggttaccggtcagtatatttctgatttaatcagctggggcgctattggtgcgcgtacaactgaaagccaagttcaccgagaattagcttctgcgctgtcttgcccagttggctttaaaaatggtactgacggtaatgttaaaattgcccttgacgctattcaagcttcaagcgttccacacgtattatattctccggataaaagtggtcaaatgtgtatttaccaaacccatggtaatccatttgctcatgtaattttacgtggtggcaaagtacctaattatcatgctgctgatattaaagatactcgccagagacttgaaaaagcatcattaccgcaaagtattatggttgattgtagccatggtaatagctataaagatcacaataaacaaattgatgttgcgcgctctattgctgatcagataagccaaggtgaagacagcctttttggtgtcatgattgaaagctttattgaagaaggtaatcaagcagtaaaggctggtacgccgttaacctacggaaaaagtattactgatgcttgtattgatttaactgtcagtgacactatattagcgttattggctgattcggtgaaaacacgtttcgaataa

SEQ ID NO: 75563 - protein, 350 aa, Colwellia psychrerythraea 34H
MTIKTDELRTTLIENLVSPAQLAEEIPLSTATADFIMQSRKEIEAVISGEDKRLLVIIGPCSIHDTTAAIDYAKKLTVLRDKYKNELLIVMRVYFEKPRTTVGWKGLISDPDLDKSFHVAKGLKLARNLLVEINDLGLPAGTEFLDMVTGQYISDLISWGAIGARTTESQVHRELASALSCPVGFKNGTDGNVKIALDAIQASSVPHVLYSPDKSGQMCIYQTHGNPFAHVILRGGKVPNYHAADIKDTRQRLEKASLPQSIMVDCSHGNSYKDHNKQIDVARSIADQISQGEDSLFGVMIESFIEEGNQAVKAGTPLTYGKSITDACIDLTVSDTILALLADSVKTRFE

SEQ ID NO: 75564 - DNA, 1068 bp, Colwellia psychrerythraea 34H
  CDS (1)..(1068): transl_table=11
gtgccgaccagctcaaataacattcatgtgaatgctgagcatgtattaattaccccagaagcgttacgtgctgaattaccactttcagaagaaggtcgtgagtttgtacagcagtcgcgtaaaacgattagtgacatcatccacaagcgagatcctcgtttgctcgttatttcaggtccgtgctctgtacatgatgttgaagcagctaaagattatgctcgtcagttaaaggtgctacacaataaataccaaggctcactattcattgttatgcgtgtttattttgaaaagccaagaacaacagtgggttggaaaggtttgatcaacgaccctcatatggatggtacgtttgatgttgaaacgggccttcgaaaagcacgtgaattgattctttacttaacagaacttggtttgcctttggcaacggaagcgcttgatccgattagcccgcaataccttgcagaagcatttagctggtcagctattggcgcacgtaccactgaatcacaaactcacagagaaatggcaagtggtttatccatgccaataggttttaaaaatggtactaacggtagcctaagtgttgcagtaaacgcattacaatcagcagcttcgccacatcactttatgggtataaaccgtcaagggcaggttgctttaatccaaactagcggtaaccctgacggccatgttattttacgaggtggtgcaacgcctaattacgatgcaaaaagtattgcagagtgtgagcaagccttagctaaacaaggtattgccccaggtattattgttgactgtagtcacggtaactcaagtaaagattacactcgacaaccactggtaacacaagatgttgtcgaacaaatttgtgcgggtaataaatcaattattggtataatgttagagagtaatattaacgcgggtaaccaaagcagtgatttagcaaaagaagacttagcttacggtgtatctgttaccgatgcttgtattgattttgctgaaaccgaacaactattagatgatgctaatgcacgcctatcgggttgtttaactgcacgtaccgcctaa

SEQ ID NO: 75565 - protein, 355 aa, Colwellia psychrerythraea 34H
MPTSSNNIHVNAEHVLITPEALRAELPLSEEGREFVQQSRKTISDIIHKRDPRLLVISGPCSVHDVEAAKDYARQLKVLHNKYQGSLFIVMRVYFEKPRTTVGWKGLINDPHMDGTFDVETGLRKARELILYLTELGLPLATEALDPISPQYLAEAFSWSAIGARTTESQTHREMASGLSMPIGFKNGTNGSLSVAVNALQSAASPHHFMGINRQGQVALIQTSGNPDGHVILRGGATPNYDAKSIAECEQALAKQGIAPGIIVDCSHGNSSKDYTRQPLVTQDVVEQICAGNKSIIGIMLESNINAGNQSSDLAKEDLAYGVSVTDACIDFAETEQLLDDANARLSGCLTARTA

SEQ ID NO: 75566 - DNA, 1077 bp, Pseudomonas syringae pv. phaseolicola 1448A
  CDS (1)..(1077): transl_table=11
atggctgatttaccgattgacgaccttaacgttgcctccaacgagactctgatcaccccggatcagctcaagcgcgacatccctctgaccgacgccgccctgcacaccgtcagccagggccgcgaggtgattcgcaacatcctcgatggcaatgatcaccgcctgttcatcgtgatcggcccctgctcgatccacgacctgaaggcagccaaggaatacgccgagcgcctcaaggcattggcggcagaagtgtccgacacgctgtatctggtcatgcgcgtctatttcgagaagccacgtactaccgtgggctggaaaggcctgatcaacgacccgtacctggatgactcgttcaagatccaggatggcctgcacatcggtcgccagttgctgctggacctggctgaaatgggcttgccaaccgccaccgaagcactggacccgatctccccgcagtatatgcaggacctgatcagctggtcggccattggcgcgcgcaccaccgaatcccagactcaccgcgagatggcttccggcctgtcgtcggcagtcggtttcaagaacggcaccgacggcggtctgaccgttgccatcaacgccttgcaatcggtctcgagcccgcaccgcttcctcggtatcaatcaggaaggtggcgtatcgatcgtgaccaccaagggcaatgcctacggccatgtcgtactgcgcggcggcaatggcaagcccaactatgattcggtcagcgtcgccctgtgcgaacaggcccttaacaagtccggcattcgcccgaacatcatggtcgactgcagccacgccaactccaacaaggacccggccctgcagccgctggtgatggaaaacgtcgccaaccagattctggaaggcaacgaatcgatcatcggcctgatggtcgagagtcacttgaactggggctgtcaggcgattcagaaggacctgtcggaattgcagtacggcgtatccattaccgatgcctgcatcgattgggaaagcactgaaaaaaccctgcgcagcatgcacgcgaaactcaaggctgtactgcccgcccgcaagcgcaagtaa

SEQ ID NO: 75567 - protein, 358 aa, Pseudomonas syringae pv. phaseolicola 1448A
MADLPIDDLNVASNETLITPDQLKRDIPLTDAALHTVSQGREVIRNILDGNDHRLFIVIGPCSIHDLKAAKEYAERLKALAAEVSDTLYLVMRVYFEKPRTTVGWKGLINDPYLDDSFKIQDGLHIGRQLLLDLAEMGLPTATEALDPISPQYMQDLISWSAIGARTTESQTHREMASGLSSAVGFKNGTDGGLTVAINALQSVSSPHRFLGINQEGGVSIVTTKGNAYGHVVLRGGNGKPNYDSVSVALCEQALNKSGIRPNIMVDCSHANSNKDPALQPLVMENVANQILEGNESIIGLMVESHLNWGCQAIQKDLSELQYGVSITDACIDWESTEKTLRSMHAKLKAVLPARKRK

SEQ ID NO: 75568 - DNA, 1083 bp, Pseudomonas syringae pv. phaseolicola 1448A
  CDS (1)..(1083): transl_table=11
atgaattcgtccgttgccgtaaaaccgtccgacctgtccagccatgccgttgctctggcagacaacagcccctcctcaaaacgtctgcccggcacgcttgaactgaaaatgcgcctgccactgaatgcagcgctgaccgaaaaggttgctgcccatcgccgcgccgtacgcgccatccttgaaggtgaagactcgcgactgctcgttatcgtgggtccctgctcgatccatgacccgcaatctgctcgtgaatacgccgagcgactggccggccttgcggcacaagtcagtgatcagatgctgccggtgatgcgcgcctacgtcgaaaaaccgcgcacgacagtgggctggaaaggcctggcgtacgatccccatctggacggcagtgacgatatggctgaaggcctgacgctgtcgcgacaactgatgcgtgacatgctggaaatgggtctgccgattgccaccgagatactgcaacccatggccgcgggctatttcgatgacctgctcagttgggtcgcgatcggcgcacgtaccaccgagtcgcaaatccatcgggaaatggccagcgggctgcccatggcagtcggcttcaagaatggcactgacggtggcgtcgcggtggccagcgatgcaatgcgttcagcggcgcatccgcatcgccacttcggcatggacggtcacggtcatccggcaatcatccagacgcagggcaatccggacactcacattgtgctgcgcggcggccacagcggccccaactacgatggccagagtgtcgctcgggtgcaggccagcctgaccaaaaacaatatcgcatcgcgaatcatggtcgattgcagccacgccaacagtggcaaggacccgtcacgccagccccacgtctttaacgatgttcttgaacagcgcctggccggcaatacctcactgatcggcatgatgatcgagagccatttgttcgatggctgtcagccgctgggggacaggctgcagtacggcgtgtcggtcaccgatggctgccttggctgggaaggcacagaacagctattgcgtcgcgcggttgaccgtctgcgttacagataa

SEQ ID NO: 75569 - protein, 360 aa, Pseudomonas syringae pv. phaseolicola 1448A
MNSSVAVKPSDLSSHAVALADNSPSSKRLPGTLELKMRLPLNAALTEKVAAHRRAVRAILEGEDSRLLVIVGPCSIHDPQSAREYAERLAGLAAQVSDQMLPVMRAYVEKPRTTVGWKGLAYDPHLDGSDDMAEGLTLSRQLMRDMLEMGLPIATEILQPMAAGYFDDLLSWVAIGARTTESQIHREMASGLPMAVGFKNGTDGGVAVASDAMRSAAHPHRHFGMDGHGHPAIIQTQGNPDTHIVLRGGHSGPNYDGQSVARVQASLTKNNIASRIMVDCSHANSGKDPSRQPHVFNDVLEQRLAGNTSLIGMMIESHLFDGCQPLGDRLQYGVSVTDGCLGWEGTEQLLRRAVDRLRYR

SEQ ID NO: 75570 - DNA, 1026 bp, Dechloromonas aromatica RCB
  CDS (1)..(1026): transl_table=11
atgccgacgccggaagaaatcaacgcccgccagccgctcagcgccaaggccgccaaaacggttacccacggccgcaacctgctgcgcaagattctcgaccgcaaggatcaccgcctgttcgtcgttgtcggcccctgctccatccacgacccggtcgccggcctggattacgcccgccgcctgaagaaactggccgatgaagtcggtgacgtgctgcagatcatcatgcgtgtctatttcgaaaaaccgcgcaccacagtgggctggaaaggttatatcaacgacccgttcatggacgactccttccaggtcaatgtcggcatggaaaaggcgcgtgaattcctgctccaggtcaatgagctcggcctgcccgccggtaccgaagccctcgacccctacggcccgcaatactacggcgacctgatcacctggaccgccatcggcgcccgcaccaccgaatcgcagacccaccgcgaaatgtcttccggcctgtcgaccccggtcggcttcaagaacgccaccaatggcgacctgtcagtggccgtcaatgccatcctctccgcctcgcgtccgcactccttccttggtctgaacagcgaaggccgtgtcgccatcgtccgcaccaagggcaacggctacggccacgtcgtgctgcgtggtggtgacggtcgtccgaattacgacacggtctccgtctccatcgccgaacaggccatggtcaaggccaagctgccggccaacatcgtcgtcgattgctcacacgccaacagctccaagaaacctgaattgcagccgctggtcatggccgatgtcgtcaaccagatccgcctcggcaacaaatcactgcttggcgtgatgatcgagtcgaacatcgaagccggcaaccagtccatcccggctgacctcagccagctcaagtacggctgctcggtcaccgatggctgtgtcggttgggacaccaccgaaaagatgatccgcgacgccgccgtgttgttgcgcgacgtgctgccggaacgtctgtcctga

SEQ ID NO: 75571 - protein, 341 aa, Dechloromonas aromatica RCB
MPTPEEINARQPLSAKAAKTVTHGRNLLRKILDRKDHRLFVVVGPCSIHDPVAGLDYARRLKKLADEVGDVLQIIMRVYFEKPRTTVGWKGYINDPFMDDSFQVNVGMEKAREFLLQVNELGLPAGTEALDPYGPQYYGDLITWTAIGARTTESQTHREMSSGLSTPVGFKNATNGDLSVAVNAILSASRPHSFLGLNSEGRVAIVRTKGNGYGHVVLRGGDGRPNYDTVSVSIAEQAMVKAKLPANIVVDCSHANSSKKPELQPLVMADVVNQIRLGNKSLLGVMIESNIEAGNQSIPADLSQLKYGCSVTDGCVGWDTTEKMIRDAAVLLRDVLPERLS

SEQ ID NO: 75572 - DNA, 1080 bp, Dechloromonas aromatica RCB
  CDS (1)..(1080): transl_table=11
atgatgccgcaaagtaaaccgaataccgacgaccttcgcatcaaggaaatcaaggagctggtgccgccagcccacgttttccgcgagtatccggtgtccactcgggcggcgcaaacgacctatgtcgcccgccaggcaattcaccgcgtgctgcatggcgccgacgaccgcctgctggtcgtcatcggcccctgctcgatccatgactacgaactggccatggattacgccaagaaactggccaaggaagccgagaaatacgccgaggacctgatcgtcgtcatgcgcgtctattttgaaaagccgcggaccacagttggctggaaaggcctgatcaacgatccgcgcatggacaacaccttccgcatcaacgaaggcctgcgtctggcccgccgcatcctgcttgaggtcaatgagctggacctgccttgcgccaccgagttcctcgacaccatcacgccgcaatacaccgccgacctgatcgcctggggcgccatcggtgcgcgcaccaccgagtcgcaggtgcaccgcgagctggcttccggcctttcctgcccggtcggtttcaagaacggcaccgacggcaacatgcgcattgccgtggatgcgatccgctcggccaactcgccacaccatttcctgtcggtgaccaagtccggccacaccgccatcgtgtcgacgatgggcaacgaggactgccacgtcatcctgcgcggcggcaaggaaccgaactacgacgcggccagcgtcgatgccgcatgcaccgaaatcgctaaatccggcctcgccgcccggctgatggtcgatttctcgcacggcaacagccgcaagcaatacaagctgcaaatggaagtctgcgacagcgtggccgagcagatcgccggtggcgaagaccgcattgttggcgtcatggtcgaatcgcacctcgtcgaaggccgccaggacatctcgccggacaagccgctgacctacggccagagcgtgactgatgcctgtatcaactgggatgacagcctgaaagtgctcgagaaactggcagctgccgtcagggcaagacgagtcgccgaagcgtcagagtaa

SEQ ID NO: 75573 - protein, 359 aa, Dechloromonas aromatica RCB
MMPQSKPNTDDLRIKEIKELVPPAHVFREYPVSTRAAQTTYVARQAIHRVLHGADDRLLVVIGPCSIHDYELAMDYAKKLAKEAEKYAEDLIVVMRVYFEKPRTTVGWKGLINDPRMDNTFRINEGLRLARRILLEVNELDLPCATEFLDTITPQYTADLIAWGAIGARTTESQVHRELASGLSCPVGFKNGTDGNMRIAVDAIRSANSPHHFLSVTKSGHTAIVSTMGNEDCHVILRGGKEPNYDAASVDAACTEIAKSGLAARLMVDFSHGNSRKQYKLQMEVCDSVAEQIAGGEDRIVGVMVESHLVEGRQDISPDKPLTYGQSVTDACINWDDSLKVLEKLAAAVRARRVAEASE

SEQ ID NO: 75574 - DNA, 1062 bp, Thermobifida fusca YX
  CDS (1)..(1062): transl_table=11
atgtcgaggactaacgacacacgtgtcgtcagctaccagccactcgtcgctccccacgacctcctggccgaactgccgatgggccccgagcgcacggcactagtcgaggaagccagagccgaggtgaaaaaagtactcgatggggaggacgaccggctgctggttgtcgtgggaccgtgctccgtgcacgaccccgagtccgccctggactatgcacgccgtctcaaggcgctgatcccgtccgtctcctctgaattgtgcgtggtcatgcgggtgtacttcgaaaagccgcgcaccaccctgggatggaagggcctgatcaacgaccccgggctcgacgggagcttcgacgtccaccggggcctgcggaccgcacgcaaactgctgctcgacatcggctccctgggcgtgcccgccggcaccgaattcctcgacccgatcaccccgcagtacatcgcggacgcggtgacctggggagcgatcggtgcgcgcaccacggaaagccaggtgcaccgccagctcagcagcggcctcagcatgcccgtgggcttcaagaacggcaccgacggcaacgtccaggtcgccgtggacgcctgccgggccgcagccagctcgcacaccttcttcggcgtggacccgagcggcagcggcgcggtcgtgtccacctccggcaacccggactgccacgtcatcctgcggggcggccgctccggccccaactacgacgcggacagtgtcgccgccgcgctcgacaccatcgaggccgcgggcctgccgcgccgcctcatgatcgacgccagccacgccaacagcggcaaggaccacctgcgccagccgggcgtggcccaggccatcgccgcccaagtcgcggaaggccagaccggaatcatcggggtcatgctggagagcttcctggtgcccggcgcccagaagctcggcgacccggccaagctcacctacggccagagcattacggacaagtgcatgggttgggagaccaccgaggaggtcctggcccatctggccgacgccgtgcgcagccgccgcaaggccacgtcctaa

SEQ ID NO: 75575 - protein, 353 aa, Thermobifida fusca YX
MSRTNDTRVVSYQPLVAPHDLLAELPMGPERTALVEEARAEVKKVLDGEDDRLLVVVGPCSVHDPESALDYARRLKALIPSVSSELCVVMRVYFEKPRTTLGWKGLINDPGLDGSFDVHRGLRTARKLLLDIGSLGVPAGTEFLDPITPQYIADAVTWGAIGARTTESQVHRQLSSGLSMPVGFKNGTDGNVQVAVDACRAAASSHTFFGVDPSGSGAVVSTSGNPDCHVILRGGRSGPNYDADSVAAALDTIEAAGLPRRLMIDASHANSGKDHLRQPGVAQAIAAQVAEGQTGIIGVMLESFLVPGAQKLGDPAKLTYGQSITDKCMGWETTEEVLAHLADAVRSRRKATS

SEQ ID NO: 75576 - DNA, 1071 bp, Prochlorococcus marinus str. NATL2A
  CDS (1)..(1071): transl_table=11
atgtccacctcatcatatttttcaatggtggatagcacctccgaccttcatgtggtcgagactcgtccattaatgtcaccagcattaattcatagagatttgcctttagataaggcatcctctggagttgtctctactactcgcaataagattcaatcaattcttcatggtaatgatccaagaattttggtcattgttggaccgtgttcggttcatgatgttgatgcggccattgaatatgcaaatcgtttagccccattgagggagagatatagtcaaaagcttgagattgttatgcgtgtttactttgagaaaccacgcacaactgttggctggaaaggacttattaatgaccctcatcttgataattcttacgatattaatactggcttaagaaaggcaagaggtctattacttgatttagccaaagcaggaatgccggctgcaactgaattacttgatccagttgttcctcaatatattgctgatttaattagttggactgctattggagcaagaacgacagagagtcagactcatcgtgaaatggcgtctggattatcaatgccggttggttataagaatggtactgatgggacagctacgattgcgattaatgcaatgcaagcggcctcaaaacctcatcattttttaggaattaatcatgatggtcatgcctcaatagttagtactacaggtaatccaaatggtcatcttgttttaagaggtggtaagaatggaactaactaccatcttgatgcaattaatttaattgcagatgaattagcacaatttaatatgcctggaaaagtgatggttgattgtagtcatggtaattctaataaagattttcgtagacaatcagaagttttaaaagacgtagcagcacagataagaggtggatcaaagaatctaatgggcgtaatgatagaaagtcatcttgttgagggtaatcagaaattaaattcagatttgtcaaaacttacctatgggcaaagtgttacggatgcatgcataaacttttctacaactgaaattttattagaagaactagctgaatcggtcaaataa

SEQ ID NO: 75577 - protein, 356 aa, Prochlorococcus marinus str. NATL2A
MSTSSYFSMVDSTSDLHVVETRPLMSPALIHRDLPLDKASSGVVSTTRNKIQSILHGNDPRILVIVGPCSVHDVDAAIEYANRLAPLRERYSQKLEIVMRVYFEKPRTTVGWKGLINDPHLDNSYDINTGLRKARGLLLDLAKAGMPAATELLDPVVPQYIADLISWTAIGARTTESQTHREMASGLSMPVGYKNGTDGTATIAINAMQAASKPHHFLGINHDGHASIVSTTGNPNGHLVLRGGKNGTNYHLDAINLIADELAQFNMPGKVMVDCSHGNSNKDFRRQSEVLKDVAAQIRGGSKNLMGVMIESHLVEGNQKLNSDLSKLTYGQSVTDACINFSTTEILLEELAESVK

SEQ ID NO: 75578 - DNA, 1080 bp, Ralstonia eutropha JMP134
  CDS (1)..(1080): transl_table=11
atgctgaagaacaccgacgacctgcgcattcgtgaactcaaggaactgctgccgcccgcgcacctgatccgcgagttcgcctgctccgaaaaggcttcggacgtgatctacgccgcgcgccagtccatgcatcggatcctgcacggcatggatgaccgcctgatcgtcatcatcggtccgtgctcgatccacgacaccaaggccgcgctcgaatacgcgaagctgctgaaggtccagcgcgagcgctttgccaacgagcttgaaatcgtgatgcgggtctacttcgaaaaaccgcgtaccacggtgggctggaagggcctgatcaacgacccgttcatggacggcagcttcaagatcaacgacggcctgcgcaccgcgcgcgaactgctgctgaatatcagcgaactaggcgtgccgaccggcaccgagtatctcgacatgatcagcccgcagtacatcgccgacctcgtgagctggggcgcgatcggcgcgcgtacgacggagtcgcaggtgcaccgcgagctggcgtcgggactgtcgtgcccggtaggcttcaagaacggcaccgatggcaatgtgaagatcgccgtcgatgctatcaaggctgcatcgcagccgcaccatttcctgtcggtgaccaaaggcggccattcggcgatcgtgtcgacctccggcaacgaggactgccacattatcctgcgcggcggcaaggcgccgaactacgacgccgcgagcgtgcaggaagcctgcgatgcgatcgccaaggcgggcctggccgctcgcctgatgatcgatgcctcgcacgccaacagcagcaagaagcacgagaatcagattcccgtgtgcgaagacatcggccgccagctcgccgccggtgatgaccgcatcgtcggcgtgatggtcgaatcgcacctggtggcaggccgtcaggaccatgcccagggtacgccggtagaaagcctgacctacggccagtcggtaaccgacgcgtgcatcggctgggacgattcggtcaaggtgctggaaacgctggccgaggccgtcaaggcccgccgactggcaagcggcagcggcaactga

SEQ ID NO: 75579 - protein, 359 aa, Ralstonia eutropha JMP134
MLKNTDDLRIRELKELLPPAHLIREFACSEKASDVIYAARQSMHRILHGMDDRLIVIIGPCSIHDTKAALEYAKLLKVQRERFANELEIVMRVYFEKPRTTVGWKGLINDPFMDGSFKINDGLRTARELLLNISELGVPTGTEYLDMISPQYIADLVSWGAIGARTTESQVHRELASGLSCPVGFKNGTDGNVKIAVDAIKAASQPHHFLSVTKGGHSAIVSTSGNEDCHIILRGGKAPNYDAASVQEACDAIAKAGLAARLMIDASHANSSKKHENQIPVCEDIGRQLAAGDDRIVGVMVESHLVAGRQDHAQGTPVESLTYGQSVTDACIGWDDSVKVLETLAEAVKARRLASGSGN

SEQ ID NO: 75580 - DNA, 1134 bp, Ralstonia eutropha JMP134
  CDS (1)..(1134): transl_table=11
atgaataccccacaggcatccacaaacagcatcggcgagggctggccacatccctccgaccgcaccagcggcaccgacgatgcccgcgtcgacgacatcattccgctgcccccgcccgagcatctgatccggttcttccccattgccgggacgccgatcgaatcgctggtcacggcaacgcggcagagcatttcccggatcctgcacggccaggatgaccgcctgctcgtgatcatgggaccgtgctcgatccacgatccgcgcgccgcgctcgactacgcgcagcgcttgatggcacagcgcgtgcgctacgcggatacgctcgaaatcgtgatgcgtgtgtacttcgagaagccccgcaccaccgtgggctggaagggtctgatcaacgacccgtatctcgacgaaagctaccggatcgacgaggggcttcggatggcgcgccatctgctgctggacatcaaccgcctcgggctaccggcggccggcgagttcctggatgtcatctcgccgcagtacatcggcgacctgatcagctggggcgcaatcggcgcccgcacgacggaaagccaggtgcaccgggaactggcgtcgggcacctcggcaccgatcggattcaagaacggcaccgacggcaatatcaagatcgccatcgatgcaatccaggccgcctcccgtccgcatcacttcctgggcgtccataagaacgggcaggtcgcgaccgttcacacccggggcaaccccgactgccacgtcattctgcgcggcggcaaggtgccgaactatgatgccgattccgtggcagccgcctgcaaggatctcgacgcggccggactggaccgccggctgatggtcgattgcagccacgccaacagcagcaagcagcacttgcggcagatcgacgtcgcacgcgacgtagcgcggcaggtcagcggcggcagccggtcagtgtttggcgtgatggtcgaaagccatctgatcggtggtgcgcaaaaattcacgccggggcagcacaacccgtcggaactgacgtacgggcagagcattaccgacgcctgcatcggctgggacgactccctcgcggtgctcgacatgcttgccgaggcggtcgctgcgcgcaggcagaaagcctga

SEQ ID NO: 75581 - protein, 377 aa, Ralstonia eutropha JMP134
MNTPQASTNSIGEGWPHPSDRTSGTDDARVDDIIPLPPPEHLIRFFPIAGTPIESLVTATRQSISRILHGQDDRLLVIMGPCSIHDPRAALDYAQRLMAQRVRYADTLEIVMRVYFEKPRTTVGWKGLINDPYLDESYRIDEGLRMARHLLLDINRLGLPAAGEFLDVISPQYIGDLISWGAIGARTTESQVHRELASGTSAPIGFKNGTDGNIKIAIDAIQAASRPHHFLGVHKNGQVATVHTRGNPDCHVILRGGKVPNYDADSVAAACKDLDAAGLDRRLMVDCSHANSSKQHLRQIDVARDVARQVSGGSRSVFGVMVESHLIGGAQKFTPGQHNPSELTYGQSITDACIGWDDSLAVLDMLAEAVAARRQKA

SEQ ID NO: 75582 - DNA, 1077 bp, Thiobacillus denitrificans ATCC 25259
  CDS (1)..(1077): transl_table=11
atgtctgccacccgaaccgacgacacccgcatcgagcaaagcggcgaactgcttgcgccgatgcagatcatgcgcgagctgcgcgcgagcgaggccgtccatgcgcacgtcgcgcgcgcgcgcggcgcgatccacgacgtcctgcgtggcgccgacgaccgcatgttcgtcgtcgtcggcccctgctcgatccacgaccccgaggccgcgctcgactacgcgcgcaagctcaagcccctcgctgacgagctcgcgcacgaactcatcgtcgtgatgcgggtgtatttcgagaagccgcgcacgaccgtcggctggaaagggctcatcaacgatccccatctcgacgagagcttcgacatcaacgagggcctgcggctcgcgcgaaaattgttgctggagatcaacgaaatcggactgccctgtgcgaccgaattcctcgacctgatctcgccgcagtacatcgccgacctcgtgagctggggtgcgatcggtgcgcgcacgaccgagtcgcagtcgcatcgccagctcgcgtcggggctgtcgtgtcccgtcggcttcaagaacggcaccgacggcagtctgcggatcgcggtcgacgcgatcaaggccgcggcggcgcgccaccatttcatctcggtcaccaagtcgggccacgtcggcgtcttcagcacctcgggcaacgaggacgcccacgtcatcctgcgcggcggcaaggcgccgaactacgacgcggcgagcgtcaatctcgcgagcggcgagctggcggcggcgggtctcagacagcaactgatgatcgatttctcgcacgccaattcgagcaagcagtaccagcgccagatcgaagtcgccgccgacgtcgccgctcaaatcgcgggcggcgacacccgcatcatcggggcgatggtcgagagccacctcaatccgggccgtcaggacctcgtcccggggcagtcgctcgagtatgcgaagtcgatcaccgacgcgtgcatcgggtgggaggacacgattcccctgctgcgcacgctcgccgacgcggtgaaaaaacgccggctggccgcgccggcggatgaggaatga

SEQ ID NO: 75583 - protein, 358 aa, Thiobacillus denitrificans ATCC 25259
MSATRTDDTRIEQSGELLAPMQIMRELRASEAVHAHVARARGAIHDVLRGADDRMFVVVGPCSIHDPEAALDYARKLKPLADELAHELIVVMRVYFEKPRTTVGWKGLINDPHLDESFDINEGLRLARKLLLEINEIGLPCATEFLDLISPQYIADLVSWGAIGARTTESQSHRQLASGLSCPVGFKNGTDGSLRIAVDAIKAAAARHHFISVTKSGHVGVFSTSGNEDAHVILRGGKAPNYDAASVNLASGELAAAGLRQQLMIDFSHANSSKQYQRQIEVAADVAAQIAGGDTRIIGAMVESHLNPGRQDLVPGQSLEYAKSITDACIGWEDTIPLLRTLADAVKKRRLAAPADEE

SEQ ID NO: 75584 - DNA, 1131 bp, Anabaena variabilis ATCC 29413
  CDS (1)..(1131): transl_table=11
atgatgaatttgtgttgtacatttcatctacaatatgtatacccaatctgcctaaaatcctacccagacaatctagagcaatcctccatgcacaataaattaactaacgcaaatattgaaaattatcacgttctcttaactccaaacgaagtaaaagaaaaattaccgttaacagaaactgcggcagaaatagttttacagtttagatgtgaaatagagaaaatattagattttcaagatagacgcaaatttatagtagttgggccttgttctattcatgaccctaatgcagcattggaatacgcccataagttaaaaaaattagccgaacgcgtccaggataaactactgttaattatgcgggtttattttgaaaagccccgcacaactgtaggctggaaaggattaattaatgatccagaaatggatgattcttttctggtggaaaatggcttattactagccagagatttactcatcaagttaacagagttagggctacccaccgctacagaggctctagaccctattgtaccgcaatatattggtgaattgatcacatgggcggcgatcggcgcacgcacaacggaatcccaaactcacagggaaatggctagcggtctctctatgcctgtgggtttcaaaaatggcactgatggtaatattcaagtagctttaaatgctttacattctgccagaatgccgcataattttttgggcattaatcctgacggacaggtaagtgtatttgaaacgaaaggtaatgcctacggtcatgttattttgcgtggaggaaatcaacctaattttgattctgaaagtgttagacaagtagaagaaaaattaaagcaggctaaattacctccaagaattgtcattgattgtagtcatggtaatactaataaaaattacaggctacaatctgatgttttagaaaacgttgtgcaacagatagttgatggtaatacatcgattgtagggatgatgctggaatcaaatttatatgaagggaatcaacccattaactgcaaacgggaagaattgaaatatggggtttctgtaactgacccctgtatcggttgggagcaaacggaaaaaattatcttggctgcttacgaaaaacttaattga

SEQ ID NO: 75585 - protein, 376 aa, Anabaena variabilis ATCC 29413
MMNLCCTFHLQYVYPICLKSYPDNLEQSSMHNKLTNANIENYHVLLTPNEVKEKLPLTETAAEIVLQFRCEIEKILDFQDRRKFIVVGPCSIHDPNAALEYAHKLKKLAERVQDKLLLIMRVYFEKPRTTVGWKGLINDPEMDDSFLVENGLLLARDLLIKLTELGLPTATEALDPIVPQYIGELITWAAIGARTTESQTHREMASGLSMPVGFKNGTDGNIQVALNALHSARMPHNFLGINPDGQVSVFETKGNAYGHVILRGGNQPNFDSESVRQVEEKLKQAKLPPRIVIDCSHGNTNKNYRLQSDVLENVVQQIVDGNTSIVGMMLESNLYEGNQPINCKREELKYGVSVTDPCIGWEQTEKIILAAYEKLN

SEQ ID NO: 75586 - DNA, 1008 bp, Streptococcus agalactiae A909
  CDS (1)..(1008): transl_table=11
atgggatttcatcagttaagtgataaaattaatattgaaatattgaagcagaaaactagcttagatctagaagttagccaaaaaaaattagccaaagaagaagagttaaaaaatatcataaaaggtgaggatcagcggtttctagtaatagtaggtccttgttctgcggataatccaaaggcggtgctaacttatgcaaagcgtttagctaaattggaagctgcctttaaagataaaatgtttttggttatgagagtttataccgctaagccaagaacgaatggtgatggttataaaggcttagttcaccattctgacaaactaggagttttttttcaagcacgtaagatgcactatgacatcattcgagagactggactcctgacagctgatgaattactttatccagagatgttatcagtgatggatgatttagtttcttactatgctattggtgcgcgttcagtggaagatcagggacaccgttttatatcttcaggtatagatgcaccagtaggtatgaaaaatccaacgtctggtaatttaagagtcatgtttaatgcggtctatgcagcacaaaatcaacaggaattattctatcaaaataagcaagttagaacagatggtaatttgctgtcacatgttattttgagaggatatcataatgccgactatcgaagtatccctaattatcattatgaaaaccttttagaaactattactcattatgaagagactgatttgcaaaatccctttattgttgttgatacaaatcatgacaattcaggtaagcaatttttagaacaaattcgcattgtgaaatcagtacttgcagaccgacagtggcatactaaaattagaaactatgttcgtggttttttgatagaatcttatttagaagatggaagacaagataaaccagatgtttttggtaagtctatcacagatccatgtctaggttgggataaaacagaaatgctaattagggatatttacaatagtttgtaa

SEQ ID NO: 75587 - protein, 335 aa, Streptococcus agalactiae A909
MGFHQLSDKINIEILKQKTSLDLEVSQKKLAKEEELKNIIKGEDQRFLVIVGPCSADNPKAVLTYAKRLAKLEAAFKDKMFLVMRVYTAKPRTNGDGYKGLVHHSDKLGVFFQARKMHYDIIRETGLLTADELLYPEMLSVMDDLVSYYAIGARSVEDQGHRFISSGIDAPVGMKNPTSGNLRVMFNAVYAAQNQQELFYQNKQVRTDGNLLSHVILRGYHNADYRSIPNYHYENLLETITHYEETDLQNPFIVVDTNHDNSGKQFLEQIRIVKSVLADRQWHTKIRNYVRGFLIESYLEDGRQDKPDVFGKSITDPCLGWDKTEMLIRDIYNSL

SEQ ID NO: 75588 - DNA, 1077 bp, Pseudomonas fluorescens PfO-1
  CDS (1)..(1077): transl_table=11
atgaactcgtccgtttctgctctgccactgtccaccctgaaccctgccaacgaagcattgaccctgcgtctgccgagttcgctgcaactcaaacagcaattgcccctgagcaatgcgctgaaccagcaagtcgttgcacaccgccaggcggtccgcgcgattctcgatggccatgacccgcgtttgctggtgatcgtcggcccctgctcgatacacgaccctgagtccgcgcttgaatacgccagcaaactttcgcatctggccgaagaagtccgtgatgacatgctgctggtgatgcgtgcctacgtcgaaaaacctcgcaccaccgtcggttggaaaggccttgcctacgaccctcatctggatggcagcgacgacatggctgccggcctcaccctgtcgcgcgaactgatgctcgaaatgatccgcgtcggacttccgattgccaccgaactgctgcagcccatggccgccgggtacttcgatgacttgctgagctgggtcgccattggcgcccgtactaccgagtcccagatccaccgggaaatggccagtggactgagcatgccggtcggcttcaagaacggcaccgatggcggcgtgactgtcgccgttgacgcgatgcgttcggcagcacatccccatcgtcacttcggcgtcgacagccagggccacccggcaatcatccagaccccgggcaaccaggacacacatctggtgctgcgcggtggccaccaagggccgaactacgaccgcgaaagcgtttccagaatcaacgccgagttgaaccgcctgaagatcccgaagcggatgatggttgattgcagtcatgccaacagtggcaaggacccactccggcagccaggcgtgttcaacgatgtgctggagcaacgcttgaagggcgaccgctcgctggtcggcatgatgcttgagtcacacctgtttgaaggatgccagccgttgagcgagtcgcttcggtacggagtttcgattaccgatgcctgcctcgggttcgattccaccaggcagttgctgctggacgcagcgcatcgcatgcgaaaacagacctcagcctga

SEQ ID NO: 75589 - protein, 358 aa, Pseudomonas fluorescens PfO-1
MNSSVSALPLSTLNPANEALTLRLPSSLQLKQQLPLSNALNQQVVAHRQAVRAILDGHDPRLLVIVGPCSIHDPESALEYASKLSHLAEEVRDDMLLVMRAYVEKPRTTVGWKGLAYDPHLDGSDDMAAGLTLSRELMLEMIRVGLPIATELLQPMAAGYFDDLLSWVAIGARTTESQIHREMASGLSMPVGFKNGTDGGVTVAVDAMRSAAHPHRHFGVDSQGHPAIIQTPGNQDTHLVLRGGHQGPNYDRESVSRINAELNRLKIPKRMMVDCSHANSGKDPLRQPGVFNDVLEQRLKGDRSLVGMMLESHLFEGCQPLSESLRYGVSITDACLGFDSTRQLLLDAAHRMRKQTSA

SEQ ID NO: 75590 - DNA, 1077 bp, Pseudomonas fluorescens PfO-1
  CDS (1)..(1077): transl_table=11
atggctgatttaccgatcaacgacctgaacgtcgcttccaacgagaccctgatcactcccgatcagctcaagcgtgatatccctctgagcgacgctgccctgcgcaccgtcacaaagggtcgcgaggtcatccgcaacattctcgatggcaccgaccatcgtctgttcgtggtgatcggcccctgctcgatccacgacatcaaggctgcccacgaatatgccgatcgcctgaaggtgctggcggcagaagtctcggacaccctgtatctggtcatgcgcgtgtatttcgagaaaccacggaccaccgtcggctggaaaggccttatcaacgacccgtacctggatgactcgttcaaaatccaggacggtctgcacatcggtcgccagttgctgctggacctggccgagaaaggcctgccgaccgcaaccgaagccctcgacccgatctccccgcagtatctgcaggacctgatcagctggtcggccatcggcgcccgtaccaccgaatcccagacccaccgcgagatggcttccggcctgtcttcggcggtcggcttcaagaacggcaccgacggcggcctgactgtggcgatcaacgccttgcagtcggtttccagcccgcaccgtttcctgggtatcaaccaggaaggtggcgtgtcgatcgtcaccaccaaaggcaacgcctacggtcatgtggtgctgcgcggcggcaacggcaagccgaactacgactcggtcagcgtcgccctgtgcgagcaggcgctgaacaaggcgaagatcaagccgaacatcatggtcgactgcagccacgccaactccaacaaggatccggccctgcaaccgttggtgatggagaacgtcgccaaccagatcctcgaaggcaaccagtcgatcatcggcctgatggtcgaaagtcacctgaactggggctgccaggcgatcccgaaagacctcgccgacctgcaatacggcgtgtcgatcaccgatgcgtgcatcgactggtccgctaccgaaaacaccttgcgcagcatgcacgccaagctcaaggatgtcctgccgaaacgtcagcgcggctga

SEQ ID NO: 75591 - protein, 358 aa, Pseudomonas fluorescens PfO-1
MADLPINDLNVASNETLITPDQLKRDIPLSDAALRTVTKGREVIRNILDGTDHRLFVVIGPCSIHDIKAAHEYADRLKVLAAEVSDTLYLVMRVYFEKPRTTVGWKGLINDPYLDDSFKIQDGLHIGRQLLLDLAEKGLPTATEALDPISPQYLQDLISWSAIGARTTESQTHREMASGLSSAVGFKNGTDGGLTVAINALQSVSSPHRFLGINQEGGVSIVTTKGNAYGHVVLRGGNGKPNYDSVSVALCEQALNKAKIKPNIMVDCSHANSNKDPALQPLVMENVANQILEGNQSIIGLMVESHLNWGCQAIPKDLADLQYGVSITDACIDWSATENTLRSMHAKLKDVLPKRQRG

SEQ ID NO: 75592 - DNA, 1074 bp, Burkholderia sp. 383
  CDS (1)..(1074): transl_table=11
atgcccccgcacaacaccgacgacgtccgcattcgcgaactcaaggaactgacgccgcccgcccacctgatccgcgaattcgcgtgctccgaagccgcgtccgagctgatctacaactcgcgccagtcgatgcaccgcatcctgcacgggatggacgaccggctgatcgtcgtggtcgggccgtgctcgatccatgacacgaaggcggcgatcgagtacgcgggccggctggtgaaggagcgcgagcgcttcaagggcgaactggaaatcgtgatgcgcgtgtacttcgagaagccacgcacgacggttggctggaagggcctcatcaacgatccgcacctcgacaacagcttcaagatcaacgaggggctgcgcaccgcgcgcgagttgctgctgcagatcaacgagatgggcctgccggccgcgaccgaatacctcgacatgatcagcccgcagtacatcgccgacctgatctcgtggggcgcgatcggcgcgcgtacgacggaatcgcaggtgcaccgcgagctcgcgtcggggctgtcgtgcccggtcggcttcaagaacggcaccgacggcaacgtgaagatcgcggtcgacgcgatcaaggccgcatcgcagccgcaccatttcctgtcggtgacgaagggcggccattcggcgatcgtgtcgacggccggcaacgaggactgccacgtgatcctgcgcggcggcaaggcaccgaactacgacgcggacagcgtgaacgccgcgtgcgcggacatcggcaaggccggcctcgccgcgcgcctgatgatcgacgcgagccacgcgaacagctcgaagaagcacgagaaccagatccccgtctgcgccgacatcggccgccagatcgcggccggcgacgcccgcatcgtcggcgtgatgatcgaatcgcatctcgtcgaggggcgccaggacctgaaggaaggctgcgagctgatctacggccagagcatcaccgatgcgtgcatcgcgtgggacgacagcgtgaaggtgctcgaaggcctcgcggaatcggtgaaggcgcgccgcgtcacacgcggcagcgggaactga

SEQ ID NO: 75593 - protein, 357 aa, Burkholderia sp. 383
MPPHNTDDVRIRELKELTPPAHLIREFACSEAASELIYNSRQSMHRILHGMDDRLIVVVGPCSIHDTKAAIEYAGRLVKERERFKGELEIVMRVYFEKPRTTVGWKGLINDPHLDNSFKINEGLRTARELLLQINEMGLPAATEYLDMISPQYIADLISWGAIGARTTESQVHRELASGLSCPVGFKNGTDGNVKIAVDAIKAASQPHHFLSVTKGGHSAIVSTAGNEDCHVILRGGKAPNYDADSVNAACADIGKAGLAARLMIDASHANSSKKHENQIPVCADIGRQIAAGDARIVGVMIESHLVEGRQDLKEGCELIYGQSITDACIAWDDSVKVLEGLAESVKARRVTRGSGN

SEQ ID NO: 75594 - DNA, 1131 bp, Burkholderia sp. 383
  CDS (1)..(1131): transl_table=11
atgcagaacctcgacaatccttcccacgatcgcgaggtaggcagcgccgacgcgacgcaggacaccacccgcatcgacgacgtccgcatcggcgccgtgcgcccgctgatttccccggcgctgctgctggacgaactgccggtgccggccgccacgcagacgctcgtcgaggatacgcgccgcgcgatcggcgacatcctgcacggccgcgacgaccggctgctgctcgtcgtcggcccctgctcgatccacgatcacgaccaggcactcgactacgcgcgccgcctgaaggtcgccgccgatgcgctgaaggacgacctgctgatcacgatgcgcgtctacttcgagaagccgcgtacgacggtcggctggaagggctacatcaacgatccgcgcctcgacggcagcttccgcatcaacgaagggctgcgcgccgcgcggcaattgctgctcgacatcaacgcgctgggcctgccggcgtcgaccgaattcctcgacctgctgagcccgcagtacatcgccgacctgatcgcgtggggcgcgatcggcgcgcgcacgaccgagagccagagccatcgccagctcgcgtcgggcctgagctgcccgatcggcttcaagaacggcaccgacggcggcgtgcaggtggcgtccgacgcgatcgtcgccgcggcggcgagccatgcgttcatggggatgacgaagatggggatggccgcgatcttcgagacgcgcggcaacgacgacgcgcacgtgatcctgcgcggcggcaagaacggcccgaactacgacgccgagcatgtcgaggcgagttgcgcggtgctgcgcaaggccggcttgcgcgagcaggtgatggtcgattgctcgcacgcgaactcgaacaagtcgcacgaccggcagatcgacgtcgcgcaggatctcgcgcggcaactgtcgcagggcgaacagcggatcgtcggcgtgatggtcgagagccatctcgaagccgggcgccaggacctgaagccgggtgtgccgctgaagtacggcgtatcgatcacggacgcatgcctgagctggacgcagacggaacccgttctcgacgtactggccgatgctgtgcggcaacggcgcgcacagtcgcgcaacgtgtga

SEQ ID NO: 75595 - protein, 376 aa, Burkholderia sp. 383
MQNLDNPSHDREVGSADATQDTTRIDDVRIGAVRPLISPALLLDELPVPAATQTLVEDTRRAIGDILHGRDDRLLLVVGPCSIHDHDQALDYARRLKVAADALKDDLLITMRVYFEKPRTTVGWKGYINDPRLDGSFRINEGLRAARQLLLDINALGLPASTEFLDLLSPQYIADLIAWGAIGARTTESQSHRQLASGLSCPIGFKNGTDGGVQVASDAIVAAAASHAFMGMTKMGMAAIFETRGNDDAHVILRGGKNGPNYDAEHVEASCAVLRKAGLREQVMVDCSHANSNKSHDRQIDVAQDLARQLSQGEQRIVGVMVESHLEAGRQDLKPGVPLKYGVSITDACLSWTQTEPVLDVLADAVRQRRAQSRNV

SEQ ID NO: 75596 - DNA, 1068 bp, Synechococcus sp. CC9605
  CDS (1)..(1068): transl_table=11
atggccaccacctccgatttgcatgtggtggagacacgtcccctggtggcccctgctgtgttgcatcaggaactgcccatggacgcggcggcgctcgagaccgtggcgtcagctcgccgacgcattcaagactttctcagtggccgtgatcagcgcttgctggtggtggtgggcccttgctctgttcacgacgtcaaagctgcccgggagtacgcccagcgcctggctccgatccgcgagcgcttgaaggatcagctcgaggtggtgatgcgggtgtatttcgagaagccgcgcaccacggttggttggaagggacttatcaatgacccccacctcgataactcctacgacatcaacaccggtctgcggcgagcccgaggactgctgttggatctcgcccgggaggggatgcctgctgcaacggaactgctcgatcccgtggttccccagtacatcgctgatttgatcagctggactgcgattggcgccaggacgacggaaagtcagacccaccgcgaaatggcctcagggctgtcgatgccgatcggctacaagaacagcaccaacggcagcgccaccatcgcgatcaatgccatgcaggcagcggggaagccacatcacttcctcggaatcaatcgcgatgggcatgcttcgatcgttagcaccacgggcaacccctacggccacctcgtgctgcggggcggcagccagggcagcaattaccacctggaggctgtgcaggaagccgcagccgagttgagccaggccggtctgcaggatcgactgatggtggattgcagccatgccaacagcaacaaagacttccgtcgacaggcagacgtgctggccagcgttgctgagcagttgcgagggggctccaaccacgtgatgggcgtgatgattgagagccatctggtggaaggcaaccagaagctcaacgccgacctgacgcagctgacctatggccagagcgtcacggatgcctgcatcagcctcgagaccaccgaaaccttgctggaggatctggccgcggccgtggccagtcgcaaacagacggtcaccgcatga

SEQ ID NO: 75597 - protein, 355 aa, Synechococcus sp. CC9605
MATTSDLHVVETRPLVAPAVLHQELPMDAAALETVASARRRIQDFLSGRDQRLLVVVGPCSVHDVKAAREYAQRLAPIRERLKDQLEVVMRVYFEKPRTTVGWKGLINDPHLDNSYDINTGLRRARGLLLDLAREGMPAATELLDPVVPQYIADLISWTAIGARTTESQTHREMASGLSMPIGYKNSTNGSATIAINAMQAAGKPHHFLGINRDGHASIVSTTGNPYGHLVLRGGSQGSNYHLEAVQEAAAELSQAGLQDRLMVDCSHANSNKDFRRQADVLASVAEQLRGGSNHVMGVMIESHLVEGNQKLNADLTQLTYGQSVTDACISLETTETLLEDLAAAVASRKQTVTA

SEQ ID NO: 75598 - DNA, 1068 bp, Geobacter metallireducens GS-15
  CDS (1)..(1068): transl_table=11
atgaccaagacaagcaacctgaaggtcacgagcattacccccatcatcgcccctgccgacctgcggcaagttttcccccaatcgctggaaacagctgaattcgttaatgcgagccgggcccacatcaagaacatcctcaaggggaaagacacccgcctcatggtggtggtgggcccctgttccattcacgaccccaaggccgccctcgactatgcggggcgccttgcgcgactcgccagcgaactctccgaccagcttttcatcgtgatgcgggtctacttcgagaagccccgcaccaccatcggctggaaggggctcatcaacgaccccgacatgaaccacacccaccagatctccaagggactcggcatcgcgcggcggctcctgaacgacatcaccagcatgctcctccccgtggcgtgcgagatgctcgataccatcacccctgaatacctggccgactatatctcgtggggcgccatcggcgcccggaccaccgagagccaatcgcaccgggagatggcgagcggcctttccttccccgtgggcttcaaaaatggcactgacggcaacctgcagatcgccatcgacgccatgaacgcggcgctccacccccacagcttcctcggcatcaatcgggatggcaagacctccatcatccagaccaccggcaacccggacgtgcacatcgtcctgcgtggcggcaagaagcccaactactctcccgaggacatcgccaagaccgaagagatggttgaaaaggggggtatcttcccgaccatcatggttgattgcagccacggcaactcggagaagcgccacgagaagcagccggaggtgcttgacagcatcgtcgaccagatcgaggcgggcaatcgctccatctcgggggtcatgatcgagagcttcctcgaagcggggaaccagcccattcccaaggatctgtcccaactccgctacggggtctccaccaccgacaagtgcatcgactggaagaccaccgaggaaatcctgcgcaaggcccatgaacggctcaagcgctgcggcggaagaccgatgcacggttga

SEQ ID NO: 75599 - protein, 355 aa, Geobacter metallireducens GS-15
MTKTSNLKVTSITPIIAPADLRQVFPQSLETAEFVNASRAHIKNILKGKDTRLMVVVGPCSIHDPKAALDYAGRLARLASELSDQLFIVMRVYFEKPRTTIGWKGLINDPDMNHTHQISKGLGIARRLLNDITSMLLPVACEMLDTITPEYLADYISWGAIGARTTESQSHREMASGLSFPVGFKNGTDGNLQIAIDAMNAALHPHSFLGINRDGKTSIIQTTGNPDVHIVLRGGKKPNYSPEDIAKTEEMVEKGGIFPTIMVDCSHGNSEKRHEKQPEVLDSIVDQIEAGNRSISGVMIESFLEAGNQPIPKDLSQLRYGVSTTDKCIDWKTTEEILRKAHERLKRCGGRPMHG

SEQ ID NO: 75600 - DNA, 1068 bp, Prochlorococcus marinus str. MIT 9312
  CDS (1)..(1068): transl_table=11
atgacgacatcatcaaataattctgctttagaaaagacatcagatttacatgttgttgaaacacgtccattaatacctccaagcagattacataatgatatacctttagatcacgcctctgctaatacagtatctaaaacaagaagatcgatacaaaatattttgcatcataatgatcagaagcttttagtcattgtgggtccatgttcaattcatgatttagaggcggcaaaagaatattcaaaatatattgaaaactttcgagaaatttataaagataaattagaaataatcatgagagtatattttgagaaaccaagaacaactattggttggaagggattgataaatgatcctcatctagataattcttatgatattaatactggattaagaagggcaagaagtttactttcatatttagcaactcgtggaattccttctgctacagaattactagatccaattgttcctcaatatattgccgatttaataagttggacagccataggcgcgcggactactgaaagtcagactcatcgggaaatggcatcaggattatcaatgcctataggttttaaaaatggtacagatggttcttttactactgcaataaatgcaatgcagtcagcttcaaaatctcatcattttttaggtgtaaatcaaaatggaatggcttctattgttaatacaacagggaatccagatggacatatagttttaagaggcggttcaaaaggcccaaattttgaaagtgaacatgttaaaagaatttcctctgaattgaagcaatctcatcttccccataaagtgatgattgattgtagtcatgggaattccaataaagatttccgaaaacagtcggaagtgctaaaaaatatagcttctcaaattagcaatggtgaaaaaaatattttaggagttatgcttgaaagtcatttgaaggagggaaatcaaaaacttttaaaaaaagaggatcttcagtttggcagaagcattacagatgcatgcatagatatagaaacaacaaaagaattactcgctattttgtacaattcacttagttag

SEQ ID NO: 75601 - protein, 355 aa, Prochlorococcus marinus str. MIT 9312
MTTSSNNSALEKTSDLHVVETRPLIPPSRLHNDIPLDHASANTVSKTRRSIQNILHHNDQKLLVIVGPCSIHDLEAAKEYSKYIENFREIYKDKLEIIMRVYFEKPRTTIGWKGLINDPHLDNSYDINTGLRRARSLLSYLATRGIPSATELLDPIVPQYIADLISWTAIGARTTESQTHREMASGLSMPIGFKNGTDGSFTTAINAMQSASKSHHFLGVNQNGMASIVNTTGNPDGHIVLRGGSKGPNFESEHVKRISSELKQSHLPHKVMIDCSHGNSNKDFRKQSEVLKNIASQISNGEKNILGVMLESHLKEGNQKLLKKEDLQFGRSITDACIDIETTKELLAILYNSLS

SEQ ID NO: 75602 - DNA, 1065 bp, Synechococcus elongatus PCC 7942
  CDS (1)..(1065): transl_table=11
atgaaacagacttccgatctccacgtcgtcgagacgcgttccttgatcagtcctgcggaaattcaccagaagctgcccctttccgagacagcagcagacttggtggcttctacccgcgatcgcgttcgtagcattttgcgcaatagcgatcgccgcctgttggtgattgtcgggccctgctccattcacgacgtcaacgcagcttacgactacggccaaaagctcttgccactgcgcgaagagctggcggatgaacttgaaatcgtgatgcgggtctactttgaaaagccccgcacgacggtcggctggaaaggattgatcaacgatccccacctcgacggcagctacgacatcaataccggcatccagcgggctcgcaagttattgctcggtttggcagatatgggcttgcccgccgcgacagaactgctcgacccgattattccgcagtacatcgctgatgtaattgcttggacggcgattggggcgcgaaccaccgaaagtcaaactcaccgcgaaatggcttcgggcctgtcgatgccgatcggcttcaaaaatggcaccgatggtagcttccatatcgcagccaatgccatgctttccgccagccagccccaccatttcctgggaattaaccatgacggtctggccagcattgtctcgaccaccggcaatccagacggtcatttagtgctgcgcggcggcagcaaaggtccaaattacgcagcagcggacattgaagaagcagcctatcaactggctagcatgggcctccatgcacgagtgatggtggactgcagccacggcaactccaacaaggactatcgccgtcagtcagtggtgctctcagatctggccgaacaggttgctgagggatcgcgtcacctgatgggcgtgatgattgaaagccacctggttgaaggcaatcaacccatcccagccgacttgtcagagttgcgctacggccaaagcatcaccgatccctgcgtcgactttccgaccacagagaaaatgctgcgggagctagcccgagcccagcgcggcttagtcccgtccttggcttaa

SEQ ID NO: 75603 - protein, 354 aa, Synechococcus elongatus PCC 7942
MKQTSDLHVVETRSLISPAEIHQKLPLSETAADLVASTRDRVRSILRNSDRRLLVIVGPCSIHDVNAAYDYGQKLLPLREELADELEIVMRVYFEKPRTTVGWKGLINDPHLDGSYDINTGIQRARKLLLGLADMGLPAATELLDPIIPQYIADVIAWTAIGARTTESQTHREMASGLSMPIGFKNGTDGSFHIAANAMLSASQPHHFLGINHDGLASIVSTTGNPDGHLVLRGGSKGPNYAAADIEEAAYQLASMGLHARVMVDCSHGNSNKDYRRQSVVLSDLAEQVAEGSRHLMGVMIESHLVEGNQPIPADLSELRYGQSITDPCVDFPTTEKMLRELARAQRGLVPSLA

SEQ ID NO: 75604 - DNA, 1119 bp, Burkholderia thailandensis E264
  CDS (1)..(1119): transl_table=11
atgcaaaacatcgacaacccgcagcgcgaccgggaagccggctgcgccgacgcgacgcaggacacgacgcgcatcgacgacgtgcgcatcggcgcggtgcgcccgctcatctcgccggcgctgctgcaggacgaactgcccgtgccgggcgccgtccagacgctcgtcgaagcgagccgcgacgcgatcggcggcgtgctgcacggccgcgacgatcgcctgctcgcgatcgtcggcccgtgctcgatccacgatcacgaccaggcgctcgactacgcgcgccggctgaaggccgccgccgacgcgctgcgcgacgacctgctgatcgtgatgcgcgtgtatttcgagaagccgcgcacgacggtcggctggaagggctacatcaacgatccgcgcctcgacggcagcttccgcatcaacgaagggctgcgcgccgcgcgccggctgctcatcgacatcaacgcgctcggcctgcccgccggcaccgaattcctcgatctgctgagcccgcagtacatcgcggacctgatcgcgtggggcgcgatcggcgcgcgcacgacggagagccagagtcaccggcagctcgcgtcggggctgagctgcccgatcggcttcaagaacggcaccgacggcggcgtgcaggtcgcggccgacgcgatcgtcgcggcgcgcgcgagccacgcgttcatgggcatgacgaagatgggaatggcggcgatcttcgagacgcgcggcaacgacaccgcgcacgtgatcctgcgcggcggcaagaagggcccgaactacgatcgcgcgagcatcgacgaagcgtgcgcggcgctgcgcgcggcggacctgcgcgaacaggtgatggtcgactgctcgcatgcgaattcgaacaagtcgcacctgcggcagatcgacgtcgccgaggacctcgcgcggcagttgtcggacggcgagcggcgcattaccggcgtgatggtcgagagcaacctggaggccggccggcaggatctgaagcccggcgcgccgctgcaatacggcgtgtcgatcaccgacgcatgcctgagctgggcgcagaccgagcccgtgctcgacacgctcgcgcaggcggtgcggcggcggcgcaccgcctga

SEQ ID NO: 75605 - protein, 372 aa, Burkholderia thailandensis E264
MQNIDNPQRDREAGCADATQDTTRIDDVRIGAVRPLISPALLQDELPVPGAVQTLVEASRDAIGGVLHGRDDRLLAIVGPCSIHDHDQALDYARRLKAAADALRDDLLIVMRVYFEKPRTTVGWKGYINDPRLDGSFRINEGLRAARRLLIDINALGLPAGTEFLDLLSPQYIADLIAWGAIGARTTESQSHRQLASGLSCPIGFKNGTDGGVQVAADAIVAARASHAFMGMTKMGMAAIFETRGNDTAHVILRGGKKGPNYDRASIDEACAALRAADLREQVMVDCSHANSNKSHLRQIDVAEDLARQLSDGERRITGVMVESNLEAGRQDLKPGAPLQYGVSITDACLSWAQTEPVLDTLAQAVRRRRTA

SEQ ID NO: 75606 - DNA, 1074 bp, Burkholderia thailandensis E264
  CDS (1)..(1074): transl_table=11
atgcccccgcacaataccgacgacgtccgcatccgagaactgaaggagctgactccgcccgcccacctgatccgcgaattcgcgctcggcgaggcggtgtcggagctcatctacaacgcgcgccaggcgatgcaccggattctgcacgggatggacgatcgcctgatcgtcatcatcggaccgtgctcgatccacgacacgaaggcggcgctcgaatacgcgggccggctcgtcaaggagcgcgagcgcttcgcgaacgagctcgagatcgtgatgcgcgtgtacttcgagaagccgcgcacgacggtcggctggaaggggctcatcaacgatccgcacctcgacaacagcttcaagatcaacgatggcctgcgcaccgcgcgcgagctgctgctgcagatcaacgagatggggctgcccgccggcaccgagtacctcgacatgatcagcccgcagtacatcgccgacctgatctcgtggggcgcgatcggcgcgcgcacgaccgaatcgcaggtgcatcgcgagctcgcgtcggggctgtcgtgcccggtcggcttcaagaacggcaccgacggcaacgtgaagatcgcggtcgacgcgatcaaggccgcgtcgcagccgcaccatttcctgtcggtgacgaagggcggccactcggcgatcgtgtcgacggccggcaacgaggactgccacgtgatcctgcgcggcggcaaggcgccgaactacgacgccgacagcgtgaacgccgcgtgcgcggacatcggcaaggcgggcctcgccgcgcgcctgatgatcgacgcgagccacgcgaacagctcgaagaagcacgagaaccagatccccgtgtgcgcggacatcggccgccagatcgcggcgggcgacgagcgcatcgtcggcgtgatggtcgagtcgcacctcgtcgaaggccgccaggacctgaaggaaggctgcccgctcacgtacgggcagagcattaccgacgcgtgcatcaactgggacgacagcgtgaaggtgctcgaagggctcgccgaagcggtgaaggcgcgccgcgtcgcgcgcggcagcggcaactga

SEQ ID NO: 75607 - protein, 357 aa, Burkholderia thailandensis E264
MPPHNTDDVRIRELKELTPPAHLIREFALGEAVSELIYNARQAMHRILHGMDDRLIVIIGPCSIHDTKAALEYAGRLVKERERFANELEIVMRVYFEKPRTTVGWKGLINDPHLDNSFKINDGLRTARELLLQINEMGLPAGTEYLDMISPQYIADLISWGAIGARTTESQVHRELASGLSCPVGFKNGTDGNVKIAVDAIKAASQPHHFLSVTKGGHSAIVSTAGNEDCHVILRGGKAPNYDADSVNAACADIGKAGLAARLMIDASHANSSKKHENQIPVCADIGRQIAAGDERIVGVMVESHLVEGRQDLKEGCPLTYGQSITDACINWDDSVKVLEGLAEAVKARRVARGSGN

SEQ ID NO: 75608 - DNA, 1386 bp, Syntrophus aciditrophicus SB
  CDS (1)..(1386): transl_table=11
gtggtgaaactggtagacgcaggggactcaaaatcccccgatccttgcggtcatgtgggttcgattcccacctccggcaccatttctgatcaatgttgcatctctccactcgattccaccggatttgtcgttcctcttcaaatttttaccaccaaaatccgaatatcattgttcacgaagatccctgaattgcgccgtttcgcaatccagaataaaaaccgcatttgccatcaatattttgattactattttgtgcaggaaagtgtagaaagaagaaaatatcagaagcgattcttttccagcaaccttgaaaaacgaacgatgatcaagaccaacaacctgaaaataaaacgaattacacctgtcattgccccgaaggacttgagacaggttttcccggtttccgatgcggcggggaagtttgttaccctgagtcgaatgcatatcaccaatattctaagggggcttgattcgcgcctcatggtggtcgtgggtccctgctccattcacgatccgaaggccgcactggaatatgccgaaagactttcccatctttccagacaactctccgaccggcttttcatcatcatgcgagtttattttgaaaaaccccgtaccaccatcggatggaaaggattgatcaacgatccggacatggacggcactcatcagatatcaaaaggccttggcattgcgaggagcctgctttgcgccattacggaaaaaaaactgcccatcgccacggagatgctcgaccccatcacccccgaatatctggccgacctgttgagctggggagcaatcggagcgcgcacaacggagtctcagcctcacagggaaatggccagcgggctttccttccccatcggtttcaaaaacgggacagacggcaacctgcagatcgccattgatgcgatcagatcggctctcgtttcccacagttttctcggcatcgacaaagatggaaaaaccgccattctccagacaacgggcaaccccgatctccacatcgttctccggggcagcgcgaaaaaaccgaattacatgcctgaggatatttccagaacggtggaattgatgaagcaggcacagctcccccccagcatcatggtggactgcagtcatggcaattcaggaaaggattacaaaaaacagccttctgtgatggatcagatttttaagcagatcgagtcgggtcagggaagcatctgcgggataatgattgaaagcaatctggaggaggggaatcaaccgattcccaagaacctctctctgatgaaatacggggtgtcgataaccgatccctgccttgactggcgaacgacggaggaaatgctccggtccgcccacgatcgattaagcgcctgcggcggcagaccaatatga

SEQ ID NO: 75609 - protein, 461 aa, Syntrophus aciditrophicus SB
MVKLVDAGDSKSPDPCGHVGSIPTSGTISDQCCISPLDSTGFVVPLQIFTTKIRISLFTKIPELRRFAIQNKNRICHQYFDYYFVQESVERRKYQKRFFSSNLEKRTMIKTNNLKIKRITPVIAPKDLRQVFPVSDAAGKFVTLSRMHITNILRGLDSRLMVVVGPCSIHDPKAALEYAERLSHLSRQLSDRLFIIMRVYFEKPRTTIGWKGLINDPDMDGTHQISKGLGIARSLLCAITEKKLPIATEMLDPITPEYLADLLSWGAIGARTTESQPHREMASGLSFPIGFKNGTDGNLQIAIDAIRSALVSHSFLGIDKDGKTAILQTTGNPDLHIVLRGSAKKPNYMPEDISRTVELMKQAQLPPSIMVDCSHGNSGKDYKKQPSVMDQIFKQIESGQGSICGIMIESNLEEGNQPIPKNLSLMKYGVSITDPCLDWRTTEEMLRSAHDRLSACGGRPI

SEQ ID NO: 75610 - DNA, 1113 bp, Francisella tularensis subsp. holarctica
  CDS (1)..(1113): transl_table=11
atgataggtgataaaaactttgataaagtttctaatataaatataaaaaaggaaaaagtattgattcctgcagaagttctaatccaagatatacctcttttaaagacttcttttgaaactgtaagaaaatctcgtaaagaaatagctaatatcatccatggaaatgatgatagagttgctgtagttgtaggaccttgctctattcatgatcctgctgctgcaattgagtatgctactaaactcaaagagcaagttaagaaatttcataaagatatacttattataatgagggtatattttgaaaaaccacgtactacgattggttggaaaggatttatcaatgaccctgatttagataactcatataatatcaacaaaggtttacgtcttgcgcgtaatttattatcagatttaactaatatgggactaccgtgtgcaactgaatttctagatgtaattactccacaatactttgctgagctaatcacttggggagcaattggcgctagaactgttgaaagtcaggtacatagagaattagcttctggtctttctgcatcgattggttttaaaaatgccactaatggtgatgtccaagtagctgtagatgctgtaaaatctgccacttatccccatcacttcttaagtacgacaaaatctggttctacagcaatatttgcaactaaaggtaaccaaaatggtcatgtaattcttcgtggtggtgcctctggtcctaactttagtaaagagcatgttgatgactgtattgctaaactaaaaaaagctgatattaatactaaggtaatgattgactgtagtcacggcaatagtcaaaaagatcattctaagcaaattagcgtattagctgatatttgtgagcaaataaagcacagtaacgatatttttggggtaatgatagaaagtaatcttgttgctggtaatcaagatatcaataaaaaacctctcacttatgggcaaagtgtcacagataaatgcgttgactttgaagaaacagttaagatgctagaaatgttagctgaagtagtccaggtaagacgtggttctcaaactaaacaacaagttaaagaagagtcacaattttctttactgtaa

SEQ ID NO: 75611 - protein, 370 aa, Francisella tularensis subsp. holarctica
MIGDKNFDKVSNINIKKEKVLIPAEVLIQDIPLLKTSFETVRKSRKEIANIIHGNDDRVAVVVGPCSIHDPAAAIEYATKLKEQVKKFHKDILIIMRVYFEKPRTTIGWKGFINDPDLDNSYNINKGLRLARNLLSDLTNMGLPCATEFLDVITPQYFAELITWGAIGARTVESQVHRELASGLSASIGFKNATNGDVQVAVDAVKSATYPHHFLSTTKSGSTAIFATKGNQNGHVILRGGASGPNFSKEHVDDCIAKLKKADINTKVMIDCSHGNSQKDHSKQISVLADICEQIKHSNDIFGVMIESNLVAGNQDINKKPLTYGQSVTDKCVDFEETVKMLEMLAEVVQVRRGSQTKQQVKEESQFSLL

SEQ ID NO: 75612 - DNA, 1029 bp, Desulfitobacterium hafniense Y51
  CDS (1)..(1029): transl_table=11
atgagtatgaattttatcaagaaattaccgccggcggaagaaattattgcccatttgcctttaagcaaagaagtggctgagctccgggacaaacgggtggacgagatgaagaagatcctgaccaatgaagatcaacggttcttattgattgtcggtccttgctccgccgatcatgaagatcccgtttgtgagtatattgaacgattggccaaagtccaggaaaaggtcaaggataccctcctcatcgtgccccggatctataccaacaaaccccggaccacaggggaagggtataaagggatggttcatcagccggacccggaaaaggccccggatatgtgcgaggggattaaagccattcgccgcctgcatatccgcgccatatcggaatttgggatgccggctgctgacgagatgctctatccggagaattacagctatcttgccgatgtcctgggctatgtggccatcggtgcccgttccgtggaaaaccagcagcatcgccttacggtcagcggtgttgaacttccggtgggcatgaaaaaccccaccagcggcgatatgaccgtgatgtttaattcattgattgcagcacacagcaatcattctttcatctacaatggctgggaagttgaaaccactgggaacccttatgctcacgccgtgttaagaggggctgtgaatgccaatggtgaaaatatccccaattatcattttgaagacctgattcggaccgctcgggaatatgaaagactggaattggttaatccggccattatcgtggatgtgaatcatgccaactccatgaagtgcttttatgagcagccccgtatttccggcgaggtgctgtacagccgtaggtatgattccctgctgaagaagatgatcaaagggctgatgatcgagagctatctggaggaaggaaggcagggcatcggggaaaacatctatggaaaatccattacggatgcttgcttaggctgggagagcacggagaagttgatttactctatagctgaaaatgtctaa

SEQ ID NO: 75613 - protein, 342 aa, Desulfitobacterium hafniense Y51
MSMNFIKKLPPAEEIIAHLPLSKEVAELRDKRVDEMKKILTNEDQRFLLIVGPCSADHEDPVCEYIERLAKVQEKVKDTLLIVPRIYTNKPRTTGEGYKGMVHQPDPEKAPDMCEGIKAIRRLHIRAISEFGMPAADEMLYPENYSYLADVLGYVAIGARSVENQQHRLTVSGVELPVGMKNPTSGDMTVMFNSLIAAHSNHSFIYNGWEVETTGNPYAHAVLRGAVNANGENIPNYHFEDLIRTAREYERLELVNPAIIVDVNHANSMKCFYEQPRISGEVLYSRRYDSLLKKMIKGLMIESYLEEGRQGIGENIYGKSITDACLGWESTEKLIYSIAENV

SEQ ID NO: 75614 - DNA, 1062 bp, Saccharophagus degradans 2-40
  CDS (1)..(1062): transl_table=11
atgtcacacgtagaagacctgaacgtagtgtctcaggaagtgttaattacccccgctgagcttaagcaagaattacctatttctgctgctgcagcgaaaatggtcactgaagggcgcgaaactgtgcgcaatattcttgaccgtaaagatcaccgcttaatggttgttattggcccatgctcaatacacgatccaaaagctgctatcgactatgccaaccgcttgaaagcgttgtccgataaggtgcaagacactctctacattgttatgcgtgtgtattttgagaagccaagaacaactgtaggctggaaaggccttatcaacgacccttacatgaacgactccttcaaaattcaagatgggttgcatgtgggccgcaagttgttattagacatagccgagctgggcctacccacggccaccgaagcgctagaccctatttcgcctcaatacctgcaagatttaatttcttggagcgctattggcgcacgtactaccgagtcgcaaacacacagagaaatggcgagcggcctctcctctgccgtaggctttaaaaacggtactgacggcggtttaacggttgctattaacgcattgcagtcagtttctagcccgcaccgttttttaggtattagcaaagacggctctgttgcggttatgcatacccgtggcaacgagtacggccatgttgtattgcgcggtggtaacggcaagcccaactacgattcagttagcgtagctatttgcgaaaaagagttagagaaagccaaggttccggtaaacatcatgatcgactgcagccacgctaactctaataaaaaccacgagctacagccgctggtaatggaaaatgtgagcaatcaaattattgaaggcaacaaatcgattataggcgtgatgattgaaagtaatattggtgctggcaaccagagcatccctgataatctcgatgatttggcctacggtgtgtctgttaccgatgcctgtattgattggcaatcgacggaagatttactgcttagcactgcaagtaaattacgagaagttttacccaagcgctaa

SEQ ID NO: 75615 - protein, 353 aa, Saccharophagus degradans 2-40
MSHVEDLNVVSQEVLITPAELKQELPISAAAAKMVTEGRETVRNILDRKDHRLMVVIGPCSIHDPKAAIDYANRLKALSDKVQDTLYIVMRVYFEKPRTTVGWKGLINDPYMNDSFKIQDGLHVGRKLLLDIAELGLPTATEALDPISPQYLQDLISWSAIGARTTESQTHREMASGLSSAVGFKNGTDGGLTVAINALQSVSSPHRFLGISKDGSVAVMHTRGNEYGHVVLRGGNGKPNYDSVSVAICEKELEKAKVPVNIMIDCSHANSNKNHELQPLVMENVSNQIIEGNKSIIGVMIESNIGAGNQSIPDNLDDLAYGVSVTDACIDWQSTEDLLLSTASKLREVLPKR

SEQ ID NO: 75616 - DNA, 1083 bp, Methylobacillus flagellatus KT
  CDS (1)..(1083): transl_table=11
atgagcccataccagaaaattgcgactgacgatgttcgcatcaaggaaatcaaggagctgagattaccgtccgagctgcttgaggagctgcctgccagtcccgccatcacggacaacatcttggctacccgcagcgccattcataaaatcttgcacagcgccgacgacaggctgctcgttgtcattggcccctgctccatccatgactatgatgccgggctggaatatgcccgccgcctggtggcgctgcgccctcgcttcgaacaagagctgctgctcgtgatgcgagtctattttgagaaaccacgtaccaccgtgggctggaaaggcctgatcaacgatcctttcctcgacggcagctaccgcattaacgaaggcctggagctggcgcgccgcttcctgctggacgtcaatgccctcggcatgcctgccggcaccgaattccttgacgtcatcacgccgcaatatactgccgacctggtgagctggggggcaatcggcgcacgcacgacagaatcgcagatccaccgtgagctggcgtctggtctctcctgccccgttgggttcaagaacggcacggatggcaatatccgcattgctgtcgacgccatcaaggcagcagccagcccgcaccactttctatccgtgaccaaggaaggccgttccgccatcatctccaccagcggcaacgaagattgccacgtcatcctgcgcggcggcaaaactcccaactacgatgccgccagtgtcgaggatgccgcacgcgaacttgccaatgcaggacttgccgccaaggtgatgatcgactgctcgcatgccaacagcctcaagcaattcaaacgccaaatcgatgtcgtcgccgatgtcaccagtcagatctccagcggtgacgaccgcatcatcggcacgatgatcgagtcgcacctcaatgaaggtcgacaggacctggtaccgggttgccagctggagtatggcaagtcgatcaccgacggctgcctgggttgggatgactcggtcaccctattggatacactggcggaaagcgtacggaagcgccgcaagcttcaggaagaagccgaataa

SEQ ID NO: 75617 - protein, 360 aa, Methylobacillus flagellatus KT
MSPYQKIATDDVRIKEIKELRLPSELLEELPASPAITDNILATRSAIHKILHSADDRLLVVIGPCSIHDYDAGLEYARRLVALRPRFEQELLLVMRVYFEKPRTTVGWKGLINDPFLDGSYRINEGLELARRFLLDVNALGMPAGTEFLDVITPQYTADLVSWGAIGARTTESQIHRELASGLSCPVGFKNGTDGNIRIAVDAIKAAASPHHFLSVTKEGRSAIISTSGNEDCHVILRGGKTPNYDAASVEDAARELANAGLAAKVMIDCSHANSLKQFKRQIDVVADVTSQISSGDDRIIGTMIESHLNEGRQDLVPGCQLEYGKSITDGCLGWDDSVTLLDTLAESVRKRRKLQEEAE

SEQ ID NO: 75618 - DNA, 1119 bp, Burkholderia xenovorans LB400
  CDS (1)..(1119): transl_table=11
ttgaacgccatcgacaatcctttgcacgatcaggaagtcggctcggccgacgccacccaggacaccacgcgcatcgacgacgttcggatcggcgcggtacgtccgctgatttcccctgcgctgttgcaggacgagttgcccacaccgccttcggtgcagacgctggtcgagaagacccgcgcggaaatcgccgacattctgcatggccgcgacgaccggctcgtgatgatcgtcggaccgtgctcgattcacgaccacgaccaggcgatcgactatgcgcgcaagctgaaagtcgccgccgacacttacagggacgacctgctgatcgtaatgcgggtctacttcgagaagccgcgcactaccgtcggctggaaaggctatatcaacgacccgcggctcgacggcagtttccgtatcaatgaaggtctgcgtctcgctcggcaattgctgctcgatatcaacggtctcggcctgtccaccgccaccgagtttctcgacctgctgagcccgcagtacatcgccgatctgatcgcgtggggcgctatcggcgcgcgcacgacggagagtcagagccatcgtcaactcgcttcgggactgagctgcccgatcggcttcaagaacggcacggacggcggcgtgcagatcgccgcggacgcgatcgtcgccgcgcgcgcgagccatgcgttcatgggcatgacgaaaatgggcatggccgcgatcttcgaaacgcgcggcaacgacgacgcgcacgtgatcctgcgcggcggcaagaaagggcctaactacgacagcgcgtcggtggacgcgacttgcgtcgcgctgaaatcagcgggactgcgcgagcaggtcatgatcgactgttcgcatgcgaactcgggcaaatcgcatttgcgtcaactcgaagtggtgcaggatatcgcgctgcagttgtcgcagcgcgagcgccgcattatcggcgtcatgctggaaagtcatctggaagaaggccgccaggatctgaagcctggtgtgccgttgcgtcacggcgtatcgatcacggatgcctgcgtcagctgggcgcagaccgagccggtgctcgaaacactcgccgaggccacccgcaaacgccgcgcgggctaa

SEQ ID NO: 75619 - protein, 372 aa, Burkholderia xenovorans LB400
MNAIDNPLHDQEVGSADATQDTTRIDDVRIGAVRPLISPALLQDELPTPPSVQTLVEKTRAEIADILHGRDDRLVMIVGPCSIHDHDQAIDYARKLKVAADTYRDDLLIVMRVYFEKPRTTVGWKGYINDPRLDGSFRINEGLRLARQLLLDINGLGLSTATEFLDLLSPQYIADLIAWGAIGARTTESQSHRQLASGLSCPIGFKNGTDGGVQIAADAIVAARASHAFMGMTKMGMAAIFETRGNDDAHVILRGGKKGPNYDSASVDATCVALKSAGLREQVMIDCSHANSGKSHLRQLEVVQDIALQLSQRERRIIGVMLESHLEEGRQDLKPGVPLRHGVSITDACVSWAQTEPVLETLAEATRKRRAG

SEQ ID NO: 75620 - DNA, 1074 bp, Burkholderia xenovorans LB400
  CDS (1)..(1074): transl_table=11
atgcccccgcacaacaccgacgatgtccgcatccgcgaattgaaagaactcacgccgcccgctcacctgatccgtgaattcgcctgcgacgaaacggtgtccgacgtgatctataactcgcgcacctcgatgcatcgcattctgcacggcatggaagatcgcctgatcgtgatcatcggaccgtgctcgattcacgatacgaaggcggcgatggaatacgccggccgtctggtcgagcagcgcaagcgctttgccggcgagctcgaaatcgtgatgcgcgtgtacttcgaaaagccgcgcacaactgttggctggaagggtctcatcaacgacccgtacatggacaatagcttcaagatcaacgaaggcctgcgcaccgcgcgcgagttgctgttgcgcatcaacgaactcggcctgccggccggcaccgaatacctcgacatgatcagtccgcagtacatcgccgacctgatctcgtggggcgcaatcggcgcgcggaccaccgaatcgcaggtgcaccgcgaactggcttcgggcctgtcgtgcccggtcggcttcaagaacggcacggacggcaacgtcaagatcgcggtcgacgcgatcaaggccgcctcgcagccgcaccatttcctgtcggtcacgaagggcggccactcggcaatcgtgtcgaccgcgggcaatgaggactgccacatcatcctgcgcggcggcaagacgccgaactacgacgcggacagcgtcaacgccgcgtgcgcggacatcggcaaggccggtctcgccgcgcgcctgatgatcgacgcgagccacgcgaacagctcgaagaagcacgagaatcagattccggtgtgcgcggatatcggccgccagattgcttcgggtgacgaacggattgtcggcgtgatggtggaatcgaatctggtggcgggccgccaggatctgcaggaaggctgcgcgctgacgtacggccagagcatcaccgacgcgtgcatcggctgggacgaaagtgtcgccgtgctggaaggcctcgccgacgcggtgaagcagcgccgtgtggcacgcggcagcggcaactga

SEQ ID NO: 75621 - protein, 357 aa, Burkholderia xenovorans LB400
MPPHNTDDVRIRELKELTPPAHLIREFACDETVSDVIYNSRTSMHRILHGMEDRLIVIIGPCSIHDTKAAMEYAGRLVEQRKRFAGELEIVMRVYFEKPRTTVGWKGLINDPYMDNSFKINEGLRTARELLLRINELGLPAGTEYLDMISPQYIADLISWGAIGARTTESQVHRELASGLSCPVGFKNGTDGNVKIAVDAIKAASQPHHFLSVTKGGHSAIVSTAGNEDCHIILRGGKTPNYDADSVNAACADIGKAGLAARLMIDASHANSSKKHENQIPVCADIGRQIASGDERIVGVMVESNLVAGRQDLQEGCALTYGQSITDACIGWDESVAVLEGLADAVKQRRVARGSGN

SEQ ID NO: 75622 - DNA, 1080 bp, Ralstonia metallidurans CH34
  CDS (1)..(1080): transl_table=11
atgctgaagaacaccgacgacctgcgtattcgagaactcaaggaactgctgccgcccgcgcacctgatccgcgagtttgcttgctcggaggctgcgtccgacgtgatctatggcgcccgccaggccatgcatcgcattctgcacggcatggacgaccgcctgatcgtcatcatcggcccgtgctcgattcacgacacgcgcgcggccctggaatacgccaagctgctcaaggtgcagcgcgaccgcttcgcgggcgagctcgagatcgtgatgcgcgtctacttcgagaagccgcgcacgacggtgggctggaagggcctgatcaacgatccgcacatggatggcagcttcaagatcaacgacggcctgcgcaccgcccgcgaactgctgctgaatatcagcgaaatgggcgtgccgacggggacggaatatctggacatgatcagcccccagtacatcgccgatctggtgagctggggcgcgatcggcgcgcgcaccaccgagtcgcaggtgcatcgcgaactcgcttccggactgtcgtgcccggtcggcttcaagaacggcaccgacggcaacgtgaagatcgccgtcgacgcgatcaaggccgcctcgcagccccaccatttcctgtcggtaaccaagggcggccactcggccatcgtgtcgacctcgggtaacgaggactgccacatcatcctgcgcggcggcaagacaccgaactacgacgcggccagcgtgcaggaagcctgcgacgcgatctcgaagtccggcctggccgcacgcctgatgatcgacgcctcgcacgccaacagcagcaagaagcacgagaaccagatcccggtctgcgaggacattggcaagcagatcgccggcggcgagcagcgcatcgtcggcgtcatggtggaatcgcacctggtagccggccgacaggaccatgtgcagggcactccggtggagaacctgacctacggccagtcggtgaccgacgcctgcatcgcctgggatgactccgtggccgtactggagacgctggccaacgccgtgaagcagcgccgtctggtgaccggcagcggcaactga

SEQ ID NO: 75623 - protein, 359 aa, Ralstonia metallidurans CH34
MLKNTDDLRIRELKELLPPAHLIREFACSEAASDVIYGARQAMHRILHGMDDRLIVIIGPCSIHDTRAALEYAKLLKVQRDRFAGELEIVMRVYFEKPRTTVGWKGLINDPHMDGSFKINDGLRTARELLLNISEMGVPTGTEYLDMISPQYIADLVSWGAIGARTTESQVHRELASGLSCPVGFKNGTDGNVKIAVDAIKAASQPHHFLSVTKGGHSAIVSTSGNEDCHIILRGGKTPNYDAASVQEACDAISKSGLAARLMIDASHANSSKKHENQIPVCEDIGKQIAGGEQRIVGVMVESHLVAGRQDHVQGTPVENLTYGQSVTDACIAWDDSVAVLETLANAVKQRRLVTGSGN

SEQ ID NO: 75624 - DNA, 1143 bp, Ralstonia metallidurans CH34
  CDS (1)..(1143): transl_table=11
atgaatgatccacaaaagtccccgcccagcgttgccgaaggctggcaggcgccgccggaccgcaccagtgtgacggacgatgcgcgcgtggaggacatcatcccgctgcccccgcccgagcacttgatccgtttcttccccatccgtggcacccccgttgaatcgctggtcacccagacgcgccagcgcatctcccgcattctgcatggcagtgatgaccggctgctcgtgatcatgggcccctgctcgatccacgacccgcaggccgcgctcgactacgcacggcgtctggcggccgaacgcgagcgctacgcggactcgctggaaatcgtgatgcgggtgtatttcgagaagccccgcaccacggtcggctggaagggcctgatcaacgacccctacctggacgagagctatcgcatcgacgaaggcctgcgcatcgcgcgcagcctgctggtggatatcaaccgcctcgggttgccggcggccggcgagttcctggacgtcatttcgccccagtacatcggcgatctgatctgctggggcgcgattggcgcccgcacgaccgagagccaggtacaccgggaactggcttcgggcgtctccgcgcccattggcttcaagaatggcaccgacggaaacatcaagatcgcgatcgacgcgatccaggccgcatcgcgcccgcaccacttccttggcgtgcacaagaacggccaggtcgcgacggtccataccaagggcaacccggactgccacgtcattcttcgcggcggcaaggcgcccaactacgacgcggaggttgtcgccgcagcgtgcaaggaactggaagcggcgcggctgcgcaattcgttgatggtcgattgcagccatgccaacagcaacaagcagcaccaacgccagatcgacgtcgcacgcgacgtggcgcagcagatcagcggcggcagccagtcgatcttcggcctgatggtcgagagccatctggtacccggcgcgcagaagttcaccccaggagaacacaacccatcgggtctcacttatggtcagagcatcacggacgcctgcatcgggtgggaggactccgtgacggtgctggaactgctgagcgaggcggtaaatgtacggcgtggggtaaacaggaaggcttaa

SEQ ID NO: 75625 - protein, 380 aa, Ralstonia metallidurans CH34
MNDPQKSPPSVAEGWQAPPDRTSVTDDARVEDIIPLPPPEHLIRFFPIRGTPVESLVTQTRQRISRILHGSDDRLLVIMGPCSIHDPQAALDYARRLAAERERYADSLEIVMRVYFEKPRTTVGWKGLINDPYLDESYRIDEGLRIARSLLVDINRLGLPAAGEFLDVISPQYIGDLICWGAIGARTTESQVHRELASGVSAPIGFKNGTDGNIKIAIDAIQAASRPHHFLGVHKNGQVATVHTKGNPDCHVILRGGKAPNYDAEVVAAACKELEAARLRNSLMVDCSHANSNKQHQRQIDVARDVAQQISGGSQSIFGLMVESHLVPGAQKFTPGEHNPSGLTYGQSITDACIGWEDSVTVLELLSEAVNVRRGVNRKA

SEQ ID NO: 75626 - DNA, 1056 bp, Acidobacteria bacterium Ellin345
  CDS (1)..(1056): transl_table=11
atgatccgcccgaccgaagacttacgcatccagtggacaaaagttgttcttccgccggcgttcctcgacgaggaactgccgacgacggagaacgcttcagcgaccgtcgcgaacgcgcgcaacacggtgcgcgacataattcgtggagaagattcgcggctgctggtggtgctgggaccgtgttccatccatgacgtgaaagcggcgcgcgaatatgcggcgctgctgaaagacgcaatcaccgagctttcgaacgatctcttcctggtaatgcgggtgtacttcgagaagcctcgcaccacgattgggtggaaggggctgatcaacgatccgcacctcgacgagtcgttcaacatcaacgacggcctgcggatttcgcggcatttgctgctggatctcgcggagatgggtgttcccgcaggcacggaatttcttgacatgattacgccgcagtatcttgcgggattggtgtgctggggcgcgatcggagcgcgtaccaccgagagccagatccatcgcgagctggtgagtggactgtcgtgtccggtgggatttaagaatgggacgtcgggaaatgtcggcatcgcgattgaggcggtgcagtcggcagcacatccgcatacgttcctcggacacacgaagtatgggcagtcggcgatcttcgcgaccacgggcaatccggattgccatgtgatcctgcgcggcggacgcaagctggcaaattacgacgcggcgtccgtgaaagaagcgtgtgggctgctggagaaggctgggttgccgcagcgcttgatgatcgattgcagccacgccaacagcaacaaggaccacacgcgtcagggcgcggtggcgcgcgatgtggctgggcagattgccggcggaaacaaagcgatcatcggcgtgatgattgagagcaacctcgtcggtggcgcacagaagttcgtgaagggcaagccgctggtctacgggcagagcattaccgacgcttgcattgactggaaagaaacgcgggggctgctgggggaactggcggctgcggtgcgctctcgccggaagtag

SEQ ID NO: 75627 - protein, 351 aa, Acidobacteria bacterium Ellin345
MIRPTEDLRIQWTKVVLPPAFLDEELPTTENASATVANARNTVRDIIRGEDSRLLVVLGPCSIHDVKAAREYAALLKDAITELSNDLFLVMRVYFEKPRTTIGWKGLINDPHLDESFNINDGLRISRHLLLDLAEMGVPAGTEFLDMITPQYLAGLVCWGAIGARTTESQIHRELVSGLSCPVGFKNGTSGNVGIAIEAVQSAAHPHTFLGHTKYGQSAIFATTGNPDCHVILRGGRKLANYDAASVKEACGLLEKAGLPQRLMIDCSHANSNKDHTRQGAVARDVAGQIAGGNKAIIGVMIESNLVGGAQKFVKGKPLVYGQSITDACIDWKETRGLLGELAAAVRSRRK

SEQ ID NO: 75628 - DNA, 1095 bp, Silicibacter sp. TM1040
  CDS (1)..(1095): transl_table=11
atgaccaccctctctcagacaccgacccatgatctgcgcatcaccgacatgcaggaattgatctgccccgaagccctcgcggtgaaacacccgctgacagatgccgcgcgcgaaaccgtgctctcggcgcgcgccagcatccagaagatcctgcatggcgccgacgaccggctggtcgtcgtggtcggcccctgttcgatccacgacccggaggccgcgctggactatgcgcgccgtcttgcgccgctgcgcgccgagctgggcgatgcgcttgagatcgtgatgcgggtctactttgaaaaaccgcgcaccatcgcgggctggaaggggctgatcaacgaccccaaccttgatgggtctttccgcatcaacaaggggttgtcggtcgcccgcaagctctgcctggatctgagcgaaatgggcctgcccgtggggaccgaattcctcgatgcctcggtgccgcaatacatcagtgatctggtgagctgggccgcgattggcgcccgcaccaccgagagccagatccaccgcgaaatggcttcgggcctgagctgcccggtgggcttcaagaacggcacccgcggcaatgtgcagatcgccattgacgcggtgcgctcggcggccacaccgcatcatttcatggcgctggccccctcgggtctcgcggcgattgcggcgacggccggaaacccggattgccacatcatcctgcgcggcggcggtggtaccaactttgatgccgagagcgtggattcagcctgcaaaaaggccgaagccgatggcatccgtccgcaggtgatgatcgacgcaagccacgccaactctgccaaggatcccgccaaacagcccgaggtgctctcggatgtggccggccagatggcacagggtgagacccgcatcaccggcatcatgatcgaaagccacctcgaacagggtcgtcaggatctgcccaaggacggggacctgtcgaaactcacctatggtcagtcgatcaccgacggctgcatcggctgggagcaaaccgaggccgagctgcgcaaactggcccaggcggtcaaaacacgccgcacgcagggcgcccgcctggcgggttga

SEQ ID NO: 75629 - protein, 364 aa, Silicibacter sp. TM1040
MTTLSQTPTHDLRITDMQELICPEALAVKHPLTDAARETVLSARASIQKILHGADDRLVVVVGPCSIHDPEAALDYARRLAPLRAELGDALEIVMRVYFEKPRTIAGWKGLINDPNLDGSFRINKGLSVARKLCLDLSEMGLPVGTEFLDASVPQYISDLVSWAAIGARTTESQIHREMASGLSCPVGFKNGTRGNVQIAIDAVRSAATPHHFMALAPSGLAAIAATAGNPDCHIILRGGGGTNFDAESVDSACKKAEADGIRPQVMIDASHANSAKDPAKQPEVLSDVAGQMAQGETRITGIMIESHLEQGRQDLPKDGDLSKLTYGQSITDGCIGWEQTEAELRKLAQAVKTRRTQGARLAG

SEQ ID NO: 75630 - DNA, 1062 bp, Rubrobacter xylanophilus DSM 9941
  CDS (1)..(1062): transl_table=11
gtgagaaccagtgatctgcgcgtagagagcatccgacccctgatcccgcccgccatcctcctggaggagctccccctctcggaggacggggccctcacggtgagccgggcgcgggaggagatagtgcgcatcctcgagggcgaggacgaccgcctcatcgccgtggtcggcccctgctcggtgcacgacacctcggcggcgctggagtacgcccggcggctgcgggggctcgcggaggagctgcgcggggagctctgcgtgatcatgcgggtgtacttcgagaagccccggaccacggtcgggtggaaggggctcatcaacgacccgcacctggacgggagcttcgccgtgaacgaggggctcaggatggcgcgcggcctgctgctcgacgtggcggagctgggattgcccgccggctgcgagtttctggaccccatctcgccgcagtacttcaccgacgcggtggcctgggcggccatcggggcgcgcaccaccgagagccaggtgcaccggcagctggcctccggcctctccatgccggtgggcttcaagaacggcaccggcggcggggtgcagatagcggtggacgcggtgcgcgccgccgcccacccgcacagcttccccggggtgacccggcaggggctcgcggcggtcgtcaccaccaccggcaacccggactgccacgtcatcctgcgcggcggcaggagcggcccgaactacgacgagcggagcgtcggggaggccctggaggcgctgcgccgggccggcctcccgccccgcctgatggtggacgccagccacgccaacagcggcaaggactaccgccggcagccgctcgtgatccgggacgtggccgaccaggtcgcccggggccagagggggatcgtgggcgtgatgctggagagcttcctggtcgaggggagccaggagctcacggaccgctcccggctgacctacggccagagcatcaccgactcctgcatgggctgggagatgacggtccccaccctgcgcgagctggccgaggcggtcagggcccggcgcaccgtccgcgtcggctga

SEQ ID NO: 75631 - protein, 353 aa, Rubrobacter xylanophilus DSM 9941
MRTSDLRVESIRPLIPPAILLEELPLSEDGALTVSRAREEIVRILEGEDDRLIAVVGPCSVHDTSAALEYARRLRGLAEELRGELCVIMRVYFEKPRTTVGWKGLINDPHLDGSFAVNEGLRMARGLLLDVAELGLPAGCEFLDPISPQYFTDAVAWAAIGARTTESQVHRQLASGLSMPVGFKNGTGGGVQIAVDAVRAAAHPHSFPGVTRQGLAAVVTTTGNPDCHVILRGGRSGPNYDERSVGEALEALRRAGLPPRLMVDASHANSGKDYRRQPLVIRDVADQVARGQRGIVGVMLESFLVEGSQELTDRSRLTYGQSITDSCMGWEMTVPTLRELAEAVRARRTVRVG

SEQ ID NO: 75632 - DNA, 1089 bp, Rhodococcus sp. RHA1
  CDS (1)..(1089): transl_table=11
atgactgtcactctcgacaccactaccagcagtgaccggctggacgaccagcgcaccgccagcatcagcccgctggtggccccgtcggttgtgcgccgcgaatacgcccccgacgacgtcgcgtccgcgaccgtccgctccggccgcgccgacacggtgaacgtgctgaacggcgaggacgatcgactgctcgtcgtggtgggcccgtgctcggtgcacgacccggacgccgccatggactacgcccgccggctcgccgcgaaggccgaggaattgcgcgacgacctgcacatcgtgatgcgggtctacttcgagaagccgcgcaccacgctcggctggaagggtctgctcaacgacccgcacctggacggcacgttcgacatcgacaccgggatccgcatgggccgcaagctgctgctcgacgtgtcctcgctcggcctgccggtcggctgtgagttcctcgacccgatcatgccgcagtacatcgcggacctcgtcacgtacggcgcgatcggtgcccgcaccgccgccagccaggtgcaccggcagctgtgcagcgcgctgtcgatgccggtcggaatcaagaactcgacggaaggtgacgtgcaggtggcggtcgacggcacccgcgccgccgcggcgagccacgtgttccccggcaccgacctcgacgggcaggccgcgctgatccgcacggtcggcaaccccgactgccacgtcatcctccgcggcggcagcgacggaccgaactacgacgcggagacggtggcggacacgctcgcccggctgcgcaagggcggtctgccggagcgagtcgtcatcgacgccagccacggcaacagcagcaagaaccacgagaagcaggtcgacgtgctgaacgacatcgcggcccggctcgaggacggcgagaaggggatcgtcggtgtgatggtggaaagcttcatcgaagccggtcgtcaggacctcaccctcggaaaggccgaggacctcacgtacggccagtccatcaccgacgcgtgcatcgactggaacacgacggcatcgcagctggaccgtctcgcccaggcagtcgccgcgcgccggaagtga

SEQ ID NO: 75633 - protein, 362 aa, Rhodococcus sp. RHA1
MTVTLDTTTSSDRLDDQRTASISPLVAPSVVRREYAPDDVASATVRSGRADTVNVLNGEDDRLLVVVGPCSVHDPDAAMDYARRLAAKAEELRDDLHIVMRVYFEKPRTTLGWKGLLNDPHLDGTFDIDTGIRMGRKLLLDVSSLGLPVGCEFLDPIMPQYIADLVTYGAIGARTAASQVHRQLCSALSMPVGIKNSTEGDVQVAVDGTRAAAASHVFPGTDLDGQAALIRTVGNPDCHVILRGGSDGPNYDAETVADTLARLRKGGLPERVVIDASHGNSSKNHEKQVDVLNDIAARLEDGEKGIVGVMVESFIEAGRQDLTLGKAEDLTYGQSITDACIDWNTTASQLDRLAQAVAARRK

SEQ ID NO: 75634 - DNA, 1080 bp, Haemophilus somnus 129PT
  CDS (1)..(1080): transl_table=11
atggctaagaataaaaataatattcgtattgcaaatgatgacaccagaattgcaaaagttgagcaagttttgcccccgattgcattattagaaaaatttcctgcaagtgatgtagccattaaaacagtaaaaaaagcccgcttggcagcacataacattattcatcaaaaagatgatcgtttactcgttattattggaccttgttctattcatgatcctgcttctgcgttggaatatgctaaacgcattaaagaaatgcgtataaaatatcatgatacgttggaaattataatgcgtgtgtattttgaaaaaccacgtacaactgtgggttggaaaggattagtgaatgatcctcatttagatggtagttatgctttaaatgatggtttgcgtattgcacgtaaattgttatctgatattaacgatatggaaatgcctactgccggtgaatttttagatatgatttcaccgcaataccttgcggactttatgagttggggggctattggagcaagaacaacggaatcgcaagttcatcgtgaattggcatccggtttgtcatgtgcggtgggctttaagaatggaactaacggtggagttcgcattgctcttgatgcaataggtacggcagaagcaccacattattttctatctgtcacaaaattcggtcattcagcaattgtgtctacaaaaggaaatgaggattgtcatattattttgcgtggaggtgagaaaggtcctaattatagtgcggaagatgttcggacagtttgtgcggatatagaaaaaaccggtcgcattccgcatgttatggtggattttagtcatgcgaacagtagtaaacaatttaaaaaacagttagatgtttgcactgatgtctgtactcaaattgccaatggttcaaaacaaatttttggtgtcatggttgaaagccatttagtcgaaggtcgtcaagatttagttgaagcaaaagcacttacctatggacaaagtattaccgatgcttgtattggttggtcagatacagaaatcgtattacaacaattgtctgaggcattaattgaacgacgtaagaagtaa

SEQ ID NO: 75635 - protein, 359 aa, Haemophilus somnus 129PT
MAKNKNNIRIANDDTRIAKVEQVLPPIALLEKFPASDVAIKTVKKARLAAHNIIHQKDDRLLVIIGPCSIHDPASALEYAKRIKEMRIKYHDTLEIIMRVYFEKPRTTVGWKGLVNDPHLDGSYALNDGLRIARKLLSDINDMEMPTAGEFLDMISPQYLADFMSWGAIGARTTESQVHRELASGLSCAVGFKNGTNGGVRIALDAIGTAEAPHYFLSVTKFGHSAIVSTKGNEDCHIILRGGEKGPNYSAEDVRTVCADIEKTGRIPHVMVDFSHANSSKQFKKQLDVCTDVCTQIANGSKQIFGVMVESHLVEGRQDLVEAKALTYGQSITDACIGWSDTEIVLQQLSEALIERRKK

SEQ ID NO: 75636 - DNA, 1059 bp, Synechococcus sp. CC9311
  CDS (1)..(1059): transl_table=11
atgaccaccacccacgatctccatgtggtggacacgcgaccactgatccctcccgctctgttgcatcgcgatctgccaattgatccaacggctttagagacagtggtgacggctcgcagccgcattcaagccatcttgcgtggattagaccgccgactgctggtgattgttggtccttgttctgtgcacgatgtggaggctgctcgcgactacgcccgtcgtttggcgcctctgcgtgagcgtcatgcagccgagctggagattgtgatgcgggtgtatttcgaaaaaccccgtaccactgttggatggaaggggttgattaacgatccccatctcgatggctcttacgacatcaatacagggctacggatggcccgctccctgttgcttgatttggctcgagaaggaatgcccacagcgactgagttattggatcctgtagtccctcagtacatcgcggatctaatcagctggacagcgattggtgcacgcaccactgaaagccagacccatcgtgaaatggcttcaggcttatcgatgcccattggctacaagaacagcaccgatggcagcgccacgattgccattaatgcaatgcaggctgcagccaagcctcatcatttcttgggtatcaatcgtgagggccatgcttcgatcgtcagtacctctggaaacccaaatgggcacttggttttgcgtggtggcaatcgtggaaccaactaccacctggaagcgattcaggattcagctgccgaactgacgggtgccggtctcccggatcgcttgatggtggactgcagccatgccaattccagtaaagactttcgccgtcagagcgaggttttacaggcagttgcctctcaggtcgatcagaagtcagaccatgtgatgggagtcatgcttgaaagccacctcgtggaaggcaatcaaaagttgtctgcggacaggagctctctgacgtatgggcagagcgtgacggatgcttgtatcagtcttgaaaccactgctgaattgcttggagagctcgctgcttcagttgctcgagcaaggttcagctag

SEQ ID NO: 75637 - protein, 352 aa, Synechococcus sp. CC9311
MTTTHDLHVVDTRPLIPPALLHRDLPIDPTALETVVTARSRIQAILRGLDRRLLVIVGPCSVHDVEAARDYARRLAPLRERHAAELEIVMRVYFEKPRTTVGWKGLINDPHLDGSYDINTGLRMARSLLLDLAREGMPTATELLDPVVPQYIADLISWTAIGARTTESQTHREMASGLSMPIGYKNSTDGSATIAINAMQAAAKPHHFLGINREGHASIVSTSGNPNGHLVLRGGNRGTNYHLEAIQDSAAELTGAGLPDRLMVDCSHANSSKDFRRQSEVLQAVASQVDQKSDHVMGVMLESHLVEGNQKLSADRSSLTYGQSVTDACISLETTAELLGELAASVARARFS

SEQ ID NO: 75638 - DNA, 1065 bp, Shewanella sp. MR-4
  CDS (1)..(1065): transl_table=11
atgaccattaaaacagacgaattacgcacttccttattagctaaagtcatctcacctgcacaactggcatctgagtacccgttaacccaagatgcagccgattatctcgtacaacaacgtcgtgaagtcgaagccattattatgggcgaagatcaacgcctattagtgatcattggcccctgctcaatccatgatactcaagccgccctcgactacgctcgccgtttagcggtattgcaccaagagttaaaagacgatctctgcattttaatgcgtgtgtattttgaaaaaccccgcactatcgtcggttggaaagggttaatctccgatcctgatttagatggcagcttcgagccaaataaaggattacgtattgcccgtgagttactgcagcaaattactgaactgaagttaccgattgccaccgaatttttagacatggtgaatggtcaatatattgccgatttaatcacctggggcgctatcggtgcccgcaccaccgaaagccaagttcaccgcgaaatggcctcggcgctctcctgccccgttggctttaaaaacggtaccgatggcaatattaatatcgccgtcgatgcggtgcgcgcagcaaaagtgccacatatcttctattcaccggataaagatggcgccatgtcggtgtatcgcacccatggtaatccttacgggcatatcattttacgtggcggcaaaaaaccgaattactttgagcaagatattgaagaagcaagattaaagcttgagtcggtcaatgtgacgccgcgcgtggtagtcgattttagccacggcaacagtgaaaagaaccacctgaagcagcttgtggttgccgataatatcatggcgcaaatgcgcgcgggcagcacggcgattgccggggtgatggcagaaagtttcttacaggaaggcaatcaaaaagtggttgagggtcaacctctgtgttacggccaaagcatcacagatgcttgcctgcattgggatgactcggagaaattactgcgcgatctggctaaagcctcccgtgatagacgtgagttcctcggcaaataa

SEQ ID NO: 75639 - protein, 354 aa, Shewanella sp. MR-4
MTIKTDELRTSLLAKVISPAQLASEYPLTQDAADYLVQQRREVEAIIMGEDQRLLVIIGPCSIHDTQAALDYARRLAVLHQELKDDLCILMRVYFEKPRTIVGWKGLISDPDLDGSFEPNKGLRIARELLQQITELKLPIATEFLDMVNGQYIADLITWGAIGARTTESQVHREMASALSCPVGFKNGTDGNINIAVDAVRAAKVPHIFYSPDKDGAMSVYRTHGNPYGHIILRGGKKPNYFEQDIEEARLKLESVNVTPRVVVDFSHGNSEKNHLKQLVVADNIMAQMRAGSTAIAGVMAESFLQEGNQKVVEGQPLCYGQSITDACLHWDDSEKLLRDLAKASRDRREFLGK

SEQ ID NO: 75640 - DNA, 1092 bp, Shewanella sp. MR-4
  CDS (1)..(1092): transl_table=11
atgcaacaggatacgatcaataacgtacacatcagttcagagaaagttcttattacaccgcaggagctaaaagcggccctgccactctctgagcatgcgtatcgttatatcctcaatgcacgcaaaacagtggcggatattgtccataagcgcgataaccgcgtgcttatcgtcactggaccttgttctatccatgatatcgatgccgccaaggaatacgccttaaagcttaaaaaactacacgatgaactcagcgatgagttttacatcctgatgcgagtctactttgagaagccacgtaccacagtgggttggaaggggatgattaacgatcctgatatggacgagtccttcgatgttgagaagggtttaaagatggcccgtgagctgatgatttggttggccgaactcgaactgcctgtggcaaccgaagcgctcgatccgatcagcccacagtacatctcggaattagtcacttggtcggccattggtgctcgcacgactgagtcgcaaacccacagggaaatggcgtcgggtttatctatgcccgtcggctttaaaaatggcacagatggaaagctcgatgtagcgattaacgcgctgaaatcggcggccagcagccacagatttatggggattaaccagcagggccaagtggcgttattgcaaaccgcgggaaatcccgatggacatgtgatcctgcgtggcggcgccacgccaaactacgatgcaaagagcgttgccgagtgtgaagcgcagttacataaagccaaactcaatgctcgccttattatcgattgtagccacggtaattcgtctaaggactacacaaggcaagtccctgtgtgtgaagatgtatttgcccagatttacaacggcaataaatccatcattggcgtgatgttagaaagccatttaaatgaaggtaatcagagttgtgataaaccattgagcgaattggcctatggggtttctgtgacagactcctgtattaattgggaaaaaaccgaaagcgttttacgtgcgggcgcatcgaagttatcttcggtattagcaacccgtttcgatatgctcaaagtggccaatgcttaa

SEQ ID NO: 75641 - protein, 363 aa, Shewanella sp. MR-4
MQQDTINNVHISSEKVLITPQELKAALPLSEHAYRYILNARKTVADIVHKRDNRVLIVTGPCSIHDIDAAKEYALKLKKLHDELSDEFYILMRVYFEKPRTTVGWKGMINDPDMDESFDVEKGLKMARELMIWLAELELPVATEALDPISPQYISELVTWSAIGARTTESQTHREMASGLSMPVGFKNGTDGKLDVAINALKSAASSHRFMGINQQGQVALLQTAGNPDGHVILRGGATPNYDAKSVAECEAQLHKAKLNARLIIDCSHGNSSKDYTRQVPVCEDVFAQIYNGNKSIIGVMLESHLNEGNQSCDKPLSELAYGVSVTDSCINWEKTESVLRAGASKLSSVLATRFDMLKVANA

SEQ ID NO: 75642 - DNA, 1059 bp, Shewanella sp. MR-4
  CDS (1)..(1059): transl_table=11
atgtattaccaaaatgatgacgttcgcattaatgaagtcaaagagttacttccaccaattgcgattctagaacgatttcctgcctccgaaaacgctgctgcaactgtgtttaacgcccgtcaaagcattcataacattcttgcccgccaagatgatcgtttgttagtggtcattggtccttgctcaattcacgatcctaaggccgcattggaatatggccagcgattggttgcgctcagagaacgttatcaagatcagctcgaagtggtgatgcgtgtttattttgaaaagccgcgtactacagtgggttggaagggactcatcaacgatccttatatggataacagcttcaaactgaacgatggtttgcgtaccgcgcgtaaacttttagtcgatttgaatgactctggcatgccgaccgcgggtgagtttctcgatatgatcactccgcaatatgtggcggatatgatgtgctggggcgcgattggtgcgcgcaccactgaatcgcaggtgcaccgtgaattagcgtctgggttgtcttgccctgtaggctttaaaaatggcaccgacggcacgatcaaggtggcgattgatgccattggcgccgcgaatgcgccgcaccacttcttatcggtaaccaaatttggccattcggcgattgtgtcgaccaaaggtaatcctgattgccatatcattctgcgtggtggccgtgagcctaattacagtgccagccatgttgcgcagatcagcgaacaactgaaaaaggccaagcttgtcgataacattatgatcgactttagccatgccaatagcagcaaacaatatcaacgccagatggatgtcgcgaacgatgtggccgagcaagtggccgcgggtaataaggcaattttcggtgtgatggttgaaagccacttagtggaaggtcgccaagatctgattgaaggccaggcgttatgttatggccagagtattacggatgcctgtattggctgggatgataccgagcgtctgttagatgtgttaaatcagagcgttattgcacgccgccagcgggtctaa

SEQ ID NO: 75643 - protein, 352 aa, Shewanella sp. MR-4
MYYQNDDVRINEVKELLPPIAILERFPASENAAATVFNARQSIHNILARQDDRLLVVIGPCSIHDPKAALEYGQRLVALRERYQDQLEVVMRVYFEKPRTTVGWKGLINDPYMDNSFKLNDGLRTARKLLVDLNDSGMPTAGEFLDMITPQYVADMMCWGAIGARTTESQVHRELASGLSCPVGFKNGTDGTIKVAIDAIGAANAPHHFLSVTKFGHSAIVSTKGNPDCHIILRGGREPNYSASHVAQISEQLKKAKLVDNIMIDFSHANSSKQYQRQMDVANDVAEQVAAGNKAIFGVMVESHLVEGRQDLIEGQALCYGQSITDACIGWDDTERLLDVLNQSVIARRQRV

SEQ ID NO: 75644 - DNA, 1059 bp, Shewanella sp. MR-7
  CDS (1)..(1059): transl_table=11
atgtattaccaaaatgatgacgttcgcattaatgaagtcaaagagttacttccaccgattgcgattctagaacgatttcctgcctccgaaaacgctgctgcaactgtgtttaacgcccgtcaaagcattcataacattcttgcccgccaagatgatcgtttgttagtggtcattggtccttgctcaattcacgatcctaaggccgcattggaatatggccagcgactggttgcgctcagagaacgttatcaagatcagcttgaagtggtgatgcgtgtttattttgaaaagccacgtactacagtgggttggaagggactcatcaacgatccttatatggataacagcttcaaactgaacgatggtttacgtaccgcgcgtaaacttttagtcgatttgaatgactctggcatgcctaccgcaggtgagtttctcgatatgatcactccgcaatatgtggcggatatgatgtgctggggcgcgattggtgcgcgcaccacagaatcgcaggtgcaccgtgaattagcgtctgggttatcttgccctgtaggctttaaaaatggcaccgatggcacgatcaaggtggcgattgatgccattggcgccgcgaatgcgccgcaccactttttatcggtgaccaaatttggccattcggcgattgtgtcgaccaaaggtaatcctgattgccatatcattttgcgtggcggccgtgagcctaattacagtgccagccatgttgcgcagatcagcgaacaactgaaaaaagccaagcttgtcgacaacattatgatcgactttagccatgccaatagcagcaaacaatatcaacgccaaatggatgtcgcgaacgatgtggccgagcaagtggccgcgggtaataaggcgatttttggtgtgatggttgaaagccacttagtggaaggtcgccaagatctgattgaaggtcaggcgctatgttatggccagagcgttacggatgcctgtattggctgggatgataccgagcgtctgttagcggtgttaaatcagagcgttattgcacgccgccagcgggtctag

SEQ ID NO: 75645 - protein, 352 aa, Shewanella sp. MR-7
MYYQNDDVRINEVKELLPPIAILERFPASENAAATVFNARQSIHNILARQDDRLLVVIGPCSIHDPKAALEYGQRLVALRERYQDQLEVVMRVYFEKPRTTVGWKGLINDPYMDNSFKLNDGLRTARKLLVDLNDSGMPTAGEFLDMITPQYVADMMCWGAIGARTTESQVHRELASGLSCPVGFKNGTDGTIKVAIDAIGAANAPHHFLSVTKFGHSAIVSTKGNPDCHIILRGGREPNYSASHVAQISEQLKKAKLVDNIMIDFSHANSSKQYQRQMDVANDVAEQVAAGNKAIFGVMVESHLVEGRQDLIEGQALCYGQSVTDACIGWDDTERLLAVLNQSVIARRQRV

SEQ ID NO: 75646 - DNA, 1092 bp, Shewanella sp. MR-7
  CDS (1)..(1092): transl_table=11
atgcaacaggatacgatcaataacgtacacatcagttcagagaaagttcttattacaccgcaggagctaaaagcggtcctgccactctctgagcacgcgtatcgttatatcctcaatgcacgcaaaacagtggcggatattgtccataagcgcgataaccgcgtgcttatcgtcactggaccctgttctatccatgatatcgatgccgccaaggaatacgccttaaaacttaaaaaattacacgatgaactcagcgatgagttttacatcttgatgcgagtgtactttgagaagccacgtaccacagtgggttggaaggggatgattaacgatcctgatatggacgagtccttcgatgttgagaagggtttaaaaatggcccgtgagctgatgatttggttagccgaacttgaactgcctgtggcaaccgaagcgctcgaccctatcagcccacagtacatctcggaattagtcacttggtcggccattggtgcccgcacgactgagtcgcaaacccacagggaaatggcgtcgggtttatctatgcccgtcggctttaaaaatggcacagacggtaagctcgatgtagcaattaacgcgctgaaatcggcggccagcagccacagatttatggggattaaccagcagggccaagtggcgttattgcaaaccgcgggaaatcccgatggacatgtgatcctgcgtggcggcgccacgccaaactacgatgcaaagagcgttgccgagtgtgaggcgcagttacataaggccaaactcaatgctcgccttattatcgattgtagccatggtaattcctctaaggactacacaaggcaagtccctgtgtgtgaggatgtatttgaccagatctacaacggcaataagtccatcatcggcgtgatgttagaaagccatttaaacgaaggtaatcaaagttgtgataaaccattgagcgaattggcctatggggtttctgtgacagactcctgtattaattgggaaaaaaccgaaagcgttttacgtgggggcgcatcgaagttatcttcggtattagcaacccgtttcgatatgctcaaagtggccaatgcttaa

SEQ ID NO: 75647 - protein, 363 aa, Shewanella sp. MR-7
MQQDTINNVHISSEKVLITPQELKAVLPLSEHAYRYILNARKTVADIVHKRDNRVLIVTGPCSIHDIDAAKEYALKLKKLHDELSDEFYILMRVYFEKPRTTVGWKGMINDPDMDESFDVEKGLKMARELMIWLAELELPVATEALDPISPQYISELVTWSAIGARTTESQTHREMASGLSMPVGFKNGTDGKLDVAINALKSAASSHRFMGINQQGQVALLQTAGNPDGHVILRGGATPNYDAKSVAECEAQLHKAKLNARLIIDCSHGNSSKDYTRQVPVCEDVFDQIYNGNKSIIGVMLESHLNEGNQSCDKPLSELAYGVSVTDSCINWEKTESVLRGGASKLSSVLATRFDMLKVANA

SEQ ID NO: 75648 - DNA, 1077 bp, Alkalilimnicola ehrlichei MLHE-1
  CDS (1)..(1077): transl_table=11
atgtctgatcgtactgtggacgacctgaacgtcgagaagatcgagcacctccccacccccgccgagatcaaggcccagctgccgctcagcgagcaagcccgccgtctggtggtcgagggtcgggagaccgttcgcaacatcctggatggcaaggatcaccggctgttggtggtggtggggccctgttccatccacgaccccaaagcggcgctggactatgccaagcaactgaaagcgctgagtgatcaggtgggcgacagtctgttcatcgtcatgcgggtctattttgagaagccgcgcacggtgaccgggtggaaggggctgatcaacgaccccgacatggacgactccttccggatcgacaatggcctgttccaggcgcgcaaactgctgctggacctggctgagatgggactgcccacagccaccgaagcgctcgacccgatcatcccgcagtacctgcaggacctgatcacctggacggccattggtgcccgcaccaccgaatcgcagacccaccgcgagatggccagcggcctctccacgccggtcggattcaagaatggcaccgacggcagcctggacgtggccatcaacgccatgaagtccgccgcccatccgcacagcttcctgggcatcaactcccgcggcgagtgcagtatcatccggacccgcggcaacagctacggccacgtggtgctgcgcggcggccatggccagcccaattacgacagcgtgcacattgccctgtgcgagcaggagctggaaaaggcggggctgcccgcgcggatcgtggtcgactgcagccacgccaactccaacaaggacccggcgctgcagcccatggtgctgaaggacctggtgcaccagatcctggagggcaaccagtcgctggtgggcgtcatgctggagagcaacctgggctggggcaaccagaagctgggggccgatcccgctgccctcgactacggggtctccatcaccgatgcctgtatcgactggccgaccaccgagcagggtctgctggaggcggcggaaaagctgcgcgaggtgttgccccggcgggccgcggcctga

SEQ ID NO: 75649 - protein, 358 aa, Alkalilimnicola ehrlichei MLHE-1
MSDRTVDDLNVEKIEHLPTPAEIKAQLPLSEQARRLVVEGRETVRNILDGKDHRLLVVVGPCSIHDPKAALDYAKQLKALSDQVGDSLFIVMRVYFEKPRTVTGWKGLINDPDMDDSFRIDNGLFQARKLLLDLAEMGLPTATEALDPIIPQYLQDLITWTAIGARTTESQTHREMASGLSTPVGFKNGTDGSLDVAINAMKSAAHPHSFLGINSRGECSIIRTRGNSYGHVVLRGGHGQPNYDSVHIALCEQELEKAGLPARIVVDCSHANSNKDPALQPMVLKDLVHQILEGNQSLVGVMLESNLGWGNQKLGADPAALDYGVSITDACIDWPTTEQGLLEAAEKLREVLPRRAAA

SEQ ID NO: 75650 - DNA, 1062 bp, Rhizobium leguminosarum bv. viciae 3841
  CDS (1)..(1062): transl_table=11
gtgtctgataccattgacgatctgcgtatcgtcgaaattacccccctgaccaagcctgccgatatcatcgcggaaattccccgcaatgctgatgtcagtaagaccgtgaccagcaatcgcgatgcgatccaccaaattcttcggggcgaagacgatcgcctgatcgtcgtcatcggcccctgctcgatccatgatcccgttgccgccagggactatgccgctcggctcacggaacagcggcagcgcttcgccggcgatctcgagatcgtcatgcgcgtctatttcgaaaagccccgcaccaccgtcggctggaagggtctgatgaacgacccgcatctcgacggcagctaccgcattgaggaaggcttgcgcatcgccaggcgtctgctgctcgacatcaatgcgatgggccttcccgccggcgtcgaattcctcgacacgatcacgccgcagtacatcgccgacctcgtcagttggggcgcgatcggcgcgcgcacgaccgaaagccagatccatcgccagctcgcctccggcctctcctgcccgatcggcttcaagaacggcaccgacggcggcgtccgcgttgcgctggatgccatcctcgccgcctcgcagccgcatcacttcccggcggtaacgaaggacggccaagcggccatcgcctcgacgacaggcaatgaggattgccacatcatcctgcgcggtggcaagcggccgagctatgaagctgccgacgtcgaagcggtgaccggcgaagccgtcaagcttggcgtcgccccgcgcatcctcatcgatgccagccacgccaacagcggcaaggacccgatgaaccagccgctcgtcgtcaaatccgtcgccgcacagattgccgccggaaacagcgacatcaagggcatgatgatcgaaagcaacctcgtcgccggccgccaggatctcgttcccggcaaaccgctggtctacggccagtccatcaccgacggttgcatcgactgggagatgtcggtcgcagtgctggaagacctggcaaaatccgcccgcgagcgccgccggacccgcgcttaa

SEQ ID NO: 75651 - protein, 353 aa, Rhizobium leguminosarum bv. viciae 3841
MSDTIDDLRIVEITPLTKPADIIAEIPRNADVSKTVTSNRDAIHQILRGEDDRLIVVIGPCSIHDPVAARDYAARLTEQRQRFAGDLEIVMRVYFEKPRTTVGWKGLMNDPHLDGSYRIEEGLRIARRLLLDINAMGLPAGVEFLDTITPQYIADLVSWGAIGARTTESQIHRQLASGLSCPIGFKNGTDGGVRVALDAILAASQPHHFPAVTKDGQAAIASTTGNEDCHIILRGGKRPSYEAADVEAVTGEAVKLGVAPRILIDASHANSGKDPMNQPLVVKSVAAQIAAGNSDIKGMMIESNLVAGRQDLVPGKPLVYGQSITDGCIDWEMSVAVLEDLAKSARERRRTRA

SEQ ID NO: 75652 - DNA, 1095 bp, Pseudomonas aeruginosa UCBPP-PA14
  CDS (1)..(1095): transl_table=11
atgaactcatccgtatccgcactgaccgccctttcgccgaacgcccaggccgtcgccctgcccagcgccaccgcccgtaccgccctggaacgcctgcccagcccgctcgaactcaaggctcgccagccgttgccgctggagctggccagccaggtcgccgccagccgcgacgccatccgcgccatcctcgacggcgacgacccacgcctgctggtggtagtcggtccctgttcgatccacgatccccgctccgccctcgaatacgccgaacgcctcgccgcgctgagcgacgaactcgacggccagttgctcctggtgatgcgcgcctacgtggaaaagccacgcaccacggtgggctggaagggcctcgcctacgacccgcacctggatggcagcgacgacatggccgccggcctggcgctatcccggcaactgatgctggacatgctgcgcctcggcctgccgctggccaccgaactcctgcaaccgctggccgccggctacttcgacgacctgctgagctgggcggcgatcggcgcgcgcaccagcgaatcgcagatccaccgcgagctggtcagcggcctcggcctgccggtgggcttcaagaacggcaccgacggcggcgtcggcatcgcctgcgacgcgatccgttcggcggcccacggccaccgccatttcggcctcgacccgcacggtcacccggcgctgatcgagacccgcggcaatccggacacccatgtggtgctgcgcggcggccgccacggttcgaactacggtcccgagcaggtgcaggccgtacgccaggccctggaaagccagggcatcgccacgcggatgatggtcgattgcagtcacgccaacagcggcaagaacccgctgaaccagcccggcgtcctcgccagcgtgctggaccagcgcctggtcggcgccagcgacctggtcggggtaatgctggaaagccacctgttcgacggttgccaggcgctcggcggcgaactgcgctacggcgtctcgatcaccgacggctgcctcggctgggaaggcaccgagcggattctccgcgacgccgcccggcggctcgccgaggggcgctga

SEQ ID NO: 75653 - protein, 364 aa, Pseudomonas aeruginosa UCBPP-PA14
MNSSVSALTALSPNAQAVALPSATARTALERLPSPLELKARQPLPLELASQVAASRDAIRAILDGDDPRLLVVVGPCSIHDPRSALEYAERLAALSDELDGQLLLVMRAYVEKPRTTVGWKGLAYDPHLDGSDDMAAGLALSRQLMLDMLRLGLPLATELLQPLAAGYFDDLLSWAAIGARTSESQIHRELVSGLGLPVGFKNGTDGGVGIACDAIRSAAHGHRHFGLDPHGHPALIETRGNPDTHVVLRGGRHGSNYGPEQVQAVRQALESQGIATRMMVDCSHANSGKNPLNQPGVLASVLDQRLVGASDLVGVMLESHLFDGCQALGGELRYGVSITDGCLGWEGTERILRDAARRLAEGR

SEQ ID NO: 75654 - DNA, 1077 bp, Pseudomonas aeruginosa UCBPP-PA14
  CDS (1)..(1077): transl_table=11
atggctgatttacagatcgacgaccttaacgttgcctccaacgagaccctgatcacgccggagcagctcaagcgtgaaattcccctgaccgacaaggccctgcagaccgtggcccatggtcgccaggtggtgcgcgacatcctggatggcaaggaccaccgtctgttcgtggtgatcggcccctgctccatccacgacatcaaggccgcccacgaatacgccgaccgcctcaaggcgctcgcggccgaagtggcggatacgctgttcctggtgatgcgcgtgtacttcgagaagccgcgtaccacggtgggctggaaaggcctgatcaacgatccgtacctggacgactcgttcaagatccaggatggcctgcacatcggtcgccaactgctccgcgacctcgccgagaaaggcttgcccaccgccaccgaagcgctcgacccgatttccccgcagtacctgcaggacctgatcagctggtcggcgatcggcgcccgtaccaccgaatcgcagacccaccgcgagatggcctccggcctgtcttccgcggtcggcttcaagaacggcaccgatggcagcctgaccgtggcgatcaatgccctgcagtcggtctccagcccgcatcgcttcctcggcatcaaccagcagggcggcgtatccatcgtcaccaccaagggcaaccgctacggtcacgtggtgttgcgcggcggcaacggcaagccgaactacgattcggtcagcgtcgcgctctgcgagcaggacctgaacaaggcgaaaatcccgctgaacatcatggtcgactgcagccacgccaactccaacaaggacccggccctgcaaccgctggtgatggacaacgtcagcaaccagatcgtcgaaggcaacaactcgatcgtcggcctgatggtggaaagccacctgggctggggcagccagccgattccgaaggatctcgaccaacttcagtacggcgtctccatcaccgacgcctgcatcgactgggcgaccaccgagaagagcatccgcagcatgcacgccaagctcaaggacgtgctgccgaaacgccagcgcggctga

SEQ ID NO: 75655 - protein, 358 aa, Pseudomonas aeruginosa UCBPP-PA14
MADLQIDDLNVASNETLITPEQLKREIPLTDKALQTVAHGRQVVRDILDGKDHRLFVVIGPCSIHDIKAAHEYADRLKALAAEVADTLFLVMRVYFEKPRTTVGWKGLINDPYLDDSFKIQDGLHIGRQLLRDLAEKGLPTATEALDPISPQYLQDLISWSAIGARTTESQTHREMASGLSSAVGFKNGTDGSLTVAINALQSVSSPHRFLGINQQGGVSIVTTKGNRYGHVVLRGGNGKPNYDSVSVALCEQDLNKAKIPLNIMVDCSHANSNKDPALQPLVMDNVSNQIVEGNNSIVGLMVESHLGWGSQPIPKDLDQLQYGVSITDACIDWATTEKSIRSMHAKLKDVLPKRQRG

SEQ ID NO: 75656 - DNA, 1065 bp, Shewanella sp. ANA-3
  CDS (1)..(1065): transl_table=11
atgaccattaaaacagacgaattacgcacttccttattagctaaagtcatctcacctgcacaactggcatctgagtacccgttaacccaagatgcagccgattatctcgttcagcaacgtcgtgaagtcgaagccattattatgggcgaagatcaacgcctattagtgatcattggcccctgctccatccatgatactcaagccgccctcgactacgctcgccgtttagcagtattgcatcaagagttgaaggacgatctctgcattttaatgcgcgtatattttgaaaagccacgcactatcgtcggttggaaagggttaatctccgatcctgatttagacggcagcttcgagccaaataaaggtttacgtattgcacgcgagttattgcagcaaatcacagagctcaaattaccgattgccaccgaatttttagatatggtgaacggtcaatacattgccgacctaatcacctggggcgctatcggtgcccgcaccaccgaaagccaagtccaccgcgaaatggcctcggcactctcctgccccgtgggctttaaaaacggtaccgatggcaatattaatatcgccgtcgatgcggtgcgcgcagcaaaagtgccacatatcttctattcgcctgataaagacggtgccatgtctgtctatcgcacccatggtaatccttacggccacatcattttacgtggcggtaaaaagccgaattactttgagcaagacattgaagaagcaagattaaaacttgagtctgtcgatgtaacaccacgtatggtggttgattttagccatggtaatagcgaaaagaatcacctgaagcagttagttgttgccgacaatatcatggcgcaaatgcgcgcaggcagcacggcaattgcgggggtgatggccgaaagtttcttacaggaaggcaatcaaaaagtggttgagggtcaacctctgtgttacggccaaagcatcacagatgcgtgcctgcattgggatgactcggaaaagttactgcgcgatctggctaaagcctcccgcgatagacgtgagtttctcggcaaataa

SEQ ID NO: 75657 - protein, 354 aa, Shewanella sp. ANA-3
MTIKTDELRTSLLAKVISPAQLASEYPLTQDAADYLVQQRREVEAIIMGEDQRLLVIIGPCSIHDTQAALDYARRLAVLHQELKDDLCILMRVYFEKPRTIVGWKGLISDPDLDGSFEPNKGLRIARELLQQITELKLPIATEFLDMVNGQYIADLITWGAIGARTTESQVHREMASALSCPVGFKNGTDGNINIAVDAVRAAKVPHIFYSPDKDGAMSVYRTHGNPYGHIILRGGKKPNYFEQDIEEARLKLESVDVTPRMVVDFSHGNSEKNHLKQLVVADNIMAQMRAGSTAIAGVMAESFLQEGNQKVVEGQPLCYGQSITDACLHWDDSEKLLRDLAKASRDRREFLGK

SEQ ID NO: 75658 - DNA, 1092 bp, Shewanella sp. ANA-3
  CDS (1)..(1092): transl_table=11
atgcaacaggatacgatcaataacgtacacatcagttcagagaaagttcttattacaccgcaggagctaaaagcgactctgccactctctgagcacgcgtatcgttatatcctcaatgcacgcaaaaccgtggcggatattgtccataagcgtgataaccgcgtgcttattgtcaccggaccttgctctatccatgatatcgatgccgccaaggaatacgccttaaagcttaaacaactccacgatgaactcagcgatgagttttacatcttgatgcgagtctactttgagaagccacgtaccacagtgggttggaaggggatgattaacgatcctgatatggatgaatccttcgatgtcgagaagggcttgaagatggcccgtgagctgatgatttggttggccgaactcgaactgcctgtggcaaccgaagcgctcgaccctatcagcccgcagtacatctcagaattagtgacttggtcagccattggtgcccgcacgactgagtcgcaaacccacagggaaatggcgtcgggtttatctatgcccgtcggttttaaaaatggtacagacggaaagctcgatgtagccattaacgcgctgaaatcggcggctagtagccacagatttatggggattaaccaacagggccaagtcgcgttattgcaaactgcgggtaacccagatgggcatgtgatcctccgcggtggcgcaacgccaaactacgatgctcagagcgtcgccgaatgtgaggcgcagttacataaggccaaactcaatgcgcgccttatcatcgattgcagccacggtaattcctctaaggattacaccaggcaaattccggtgtgtgaagatgtatttaaccaaatctacaacggcaataagtccatcattggcgtgatgttagaaagccatttaaatgaaggtaatcaaagttgtgataaaccattgagcgaactggcctatggggtttctgtgacagactcctgtattaattgggaaaaaaccgaaagcgttttacgtgcgggcgcatcgaagttatcttcggtattagcaacccgtttcgatatgctcaaagtggccaatgcttaa

SEQ ID NO: 75659 - protein, 363 aa, Shewanella sp. ANA-3
MQQDTINNVHISSEKVLITPQELKATLPLSEHAYRYILNARKTVADIVHKRDNRVLIVTGPCSIHDIDAAKEYALKLKQLHDELSDEFYILMRVYFEKPRTTVGWKGMINDPDMDESFDVEKGLKMARELMIWLAELELPVATEALDPISPQYISELVTWSAIGARTTESQTHREMASGLSMPVGFKNGTDGKLDVAINALKSAASSHRFMGINQQGQVALLQTAGNPDGHVILRGGATPNYDAQSVAECEAQLHKAKLNARLIIDCSHGNSSKDYTRQIPVCEDVFNQIYNGNKSIIGVMLESHLNEGNQSCDKPLSELAYGVSVTDSCINWEKTESVLRAGASKLSSVLATRFDMLKVANA

SEQ ID NO: 75660 - DNA, 1059 bp, Shewanella sp. ANA-3
  CDS (1)..(1059): transl_table=11
atgtattaccaaaatgatgacgttcgcattaatgaagtcaaagagttacttccaccgattgcgattctagaacgatttcctgcttccgaaaacgctgctgcaactgtgtttaacgcccgtcaaagtatccataacattctcgctcgccaagatgatcgtttgttagtcgtcattggtccttgctcaatccatgatcctaaggccgcattggaatacggccagcgactggttgcgctaagagaacgttatcgagatcagctcgaagtggtgatgcgtgtttattttgaaaagccgcgtaccacagtgggttggaagggactcatcaacgatccttatatggataacagcttcaaactgaacgatggtttgcgtaccgcgcgtaaactcttggtcgatttgaatgactcaggcatgcctaccgcgggtgaattcctcgatatgatcaccccgcaatatgtggcggatatgatgtgctggggcgccatcggcgcgcgcaccacagaatcgcaggtacaccgcgagctggcctcggggctgtcttgccctgtaggctttaaaaatggtaccgatggcacgattaaggtggcaatcgatgccattggcgccgcgaatgcgccgcaccacttcttatcggtaaccaaatttggccattcggcgattgtgtcgactaaaggtaatcctgattgccatatcattctgcgcggcggccgtgagccaaattacagtgccagccatgtggcgcagatcagcgaacaactgaaaaaggccaagctggtcgataacataatgatcgatttcagccatgccaacagcagcaaacaatatcaacgccaaatggaagtcgcgaacgatgtggccgaacaaatggctgcgggtaataaggcgattttcggtgtgatggtcgaaagccacttagtggaagggcgtcaggatctgattgaaggtcaagcgttatgctacggtcagagcatcacagatgcctgtattggttgggacgataccgagcgtttactcgcagtgttaaatcagagtgttatcgaacgtcgtcagcgggtttaa

SEQ ID NO: 75661 - protein, 352 aa, Shewanella sp. ANA-3
MYYQNDDVRINEVKELLPPIAILERFPASENAAATVFNARQSIHNILARQDDRLLVVIGPCSIHDPKAALEYGQRLVALRERYRDQLEVVMRVYFEKPRTTVGWKGLINDPYMDNSFKLNDGLRTARKLLVDLNDSGMPTAGEFLDMITPQYVADMMCWGAIGARTTESQVHRELASGLSCPVGFKNGTDGTIKVAIDAIGAANAPHHFLSVTKFGHSAIVSTKGNPDCHIILRGGREPNYSASHVAQISEQLKKAKLVDNIMIDFSHANSSKQYQRQMEVANDVAEQMAAGNKAIFGVMVESHLVEGRQDLIEGQALCYGQSITDACIGWDDTERLLAVLNQSVIERRQRV

SEQ ID NO: 75662 - DNA, 1062 bp, Mycobacterium avium 104
  CDS (1)..(1062): transl_table=11
atgtccctcaccgaatgcgccaccgcggccgtcgatacctccgatcaccggatcgtgtcgtttcgggaactgtcggcgccggccgcgattcgcgccgaactgccgctgacgccccggcgcgcccgagcggtccagcgcgaccgcgacgacatcgcggccatcctggccggtgctgacgaccggctgctcctggtggtcggcccctgctcggtgcacgatccggtcgccgcgctcgactacgcgcgccggctcgcgccgatcgccgccgagttcgcggaccggctgaagatcgtgatgcgcgtctacttcgaaaagccgcgcaccaccatcggctggaagggtctgatcaacgaccccgccatggacagcagcttcgacgtggagcgcggcatccgcaccgcgcgtgcgctgctgctcgacatcatcgacgtgggcctgccggtgggatgtgaattcctggaacccaccagcccgcagtacatcgccgacgccgtcgcgtggggcgcgatcggcgcccggaccaccgaatcgcaggtgcaccgccaactggcgtcggggctgtcgatgccgatcgggttcaagaacggcaccgacggtaacgtccaggtcgccatcgacggtgtcaaggccgcggcggcgccgcaccacttcttcggaaccgacgacgtgggccgggccgccgtcgtcgagaccatgggcaaccccgactgccatgtgatcctgcgcggcggcaccgccggacccaactacgacgccggctcggtggccggcgccatcgaacggttaagtgcggcagggctttccccgcgggtcatggtcgactgctcacacgccaactccgccaaggaccatgtgcggcaagccgaagtcgccgccgaactgatcgcccgcatcgccgccggcgagcgcgggatcgggggcctgatgctggaaagcttcctggtggccggtgcccaaccgctcggcggcgaactgacctacggccaatccgtcaccgatgaatgcatggattttgcgaccacggcccggttgctggccgggttgtacgcggcgatgggctga

SEQ ID NO: 75663 - protein, 353 aa, Mycobacterium avium 104
MSLTECATAAVDTSDHRIVSFRELSAPAAIRAELPLTPRRARAVQRDRDDIAAILAGADDRLLLVVGPCSVHDPVAALDYARRLAPIAAEFADRLKIVMRVYFEKPRTTIGWKGLINDPAMDSSFDVERGIRTARALLLDIIDVGLPVGCEFLEPTSPQYIADAVAWGAIGARTTESQVHRQLASGLSMPIGFKNGTDGNVQVAIDGVKAAAAPHHFFGTDDVGRAAVVETMGNPDCHVILRGGTAGPNYDAGSVAGAIERLSAAGLSPRVMVDCSHANSAKDHVRQAEVAAELIARIAAGERGIGGLMLESFLVAGAQPLGGELTYGQSVTDECMDFATTARLLAGLYAAMG

SEQ ID NO: 75664 - DNA, 1053 bp, Mycobacterium smegmatis str. MC2 155
  CDS (1)..(1053): transl_table=11
atgaatctggcgcagatcgccaacccgcccgcgacgtcggatcggcgtatccgcagcttcagcgcgatccccagcccgcacgacgtgctcaccgaattcccgctgggtgcccgtcgcgccgagcgtgtggccgccgaccgcgacgaggtcgccgacatcctcgcaggccgcgacaaccggctgctggtcgtggtgggcccgtgctcggtgcacgacccggccgccgcgctcgaatacgcgagccgtctggtcaaggtggccgaggagctcaaggacaccgtcaagatcgtgatgcgggtgtatttcgagaagccgcgcaccacgatcggctggaagggcctgatcaacgatccgggcatggacggcacgttcgacgtcgcgcgcggtctgcgcatcgcacgtcaactgctgctcgacatcatcgacatcggtctgccggtcgggtgtgagttcctggagcccaccagcccgcagtacatcgccgacgccgtcgcgtggggcgcgatcggtgcccgcaccaccgagtcgcaggtgcaccgtcagctggcctcgggcctgtcgatgccggtgggcttcaagaacggcaccgacggcaacgtccaggtcgccgtggacggcgcgaaatccgccgcggccgagcacgtgttcttcggcatggacgacatgggccgcggcgccgtggtgagcaccgccggcaacgaggactgccacgtgatcctgcgcggcggcacccggggacccaattacgacgccgagtcggtgcgggccgccgccgccaagctggccaaggcgggactgcccggtcgcgtcgtgatcgattgcagccacgccaattccggcaaggaccacatccgccaggccgtcgtcgcgaccgaggtcgcccagatggtgcgtgacggtcagccgatcagcggtgtgatgctggagagcttcctcgtcggtggtgcgcagagcccggacgcagagacgctgacctacggccagtccgtcaccgacaagtgcatggattgggacgcaaccgatctcgtgctgcgcgagctcgcccggcgttag

SEQ ID NO: 75665 - protein, 350 aa, Mycobacterium smegmatis str. MC2 155
MNLAQIANPPATSDRRIRSFSAIPSPHDVLTEFPLGARRAERVAADRDEVADILAGRDNRLLVVVGPCSVHDPAAALEYASRLVKVAEELKDTVKIVMRVYFEKPRTTIGWKGLINDPGMDGTFDVARGLRIARQLLLDIIDIGLPVGCEFLEPTSPQYIADAVAWGAIGARTTESQVHRQLASGLSMPVGFKNGTDGNVQVAVDGAKSAAAEHVFFGMDDMGRGAVVSTAGNEDCHVILRGGTRGPNYDAESVRAAAAKLAKAGLPGRVVIDCSHANSGKDHIRQAVVATEVAQMVRDGQPISGVMLESFLVGGAQSPDAETLTYGQSVTDKCMDWDATDLVLRELARR

SEQ ID NO: 75666 - DNA, 1077 bp, Azoarcus sp. BH72
  CDS (1)..(1077): transl_table=11
atgtctgtcgcccagaccgaaaacctcaacatcgccaccgtcgaccacatgccgtcgcccgaagagatcaaggcgcgcgtgccgctgtccgaccgcgcggcggccaccgtgttggcggggcgcaaggcgctcgccgacatcctcgaaggccgcgacaagcgcctgttcgtcgtcgtcggcccctgctccatccacgacccggtcgccgggctggactacgcgcggcgcctgaaggcgctcgccgacgaagtctccgacaccatgctgctggtgatgcgcgtctatttcgagaagccgcgtacctcgaccggctggaagggcttcatcaacgaccccttcatggacgactccttccgcatcgacgtgggcatggaaaaggcccgccgcttcctgctcgacgtgtgcgagatcggcctgcccaccggcaccgaggcgctggacccgaacgcgccccagtactacggcgacctggtgacgtggaccgcgatcggtgcccgtacctcggaatcgcagacccaccgggagatggcctccgggctgtcgaccccggtgggcttcaagaacgccaccgacggcgatcttgaagtggcgatcaacgcgatcatctcggcggcgcacccgcacagttttctcggcatcaacggccagggtcagtccgccatcctgcgcacccgcggcaaccgccacggccatgtggtgctgcgcggcggcggcggccgccccaactacgacacggtgtcggtgtcgcttgccgagcaggcgctggccaaggccaagctgccggtgaacatcgtggtcgattgttcgcacgccaactcgtggaagaagcccgagttgcagccgctggtgatgaaggacgtgatccaccagatccgcgaaggcaaccgctcggtggtcgggctgatgatcgagagcaacctcgaagccggcaaccaggcgatcccggccgacctgtcgcagctgaagtacggctgttcggtcaccgacgcctgcgtgggctgggacacgacggtggacatgatccgcagcgcccacggcgtgctgcgcgacgcgctggcccgccgggagcgcgcatga

SEQ ID NO: 75667 - protein, 358 aa, Azoarcus sp. BH72
MSVAQTENLNIATVDHMPSPEEIKARVPLSDRAAATVLAGRKALADILEGRDKRLFVVVGPCSIHDPVAGLDYARRLKALADEVSDTMLLVMRVYFEKPRTSTGWKGFINDPFMDDSFRIDVGMEKARRFLLDVCEIGLPTGTEALDPNAPQYYGDLVTWTAIGARTSESQTHREMASGLSTPVGFKNATDGDLEVAINAIISAAHPHSFLGINGQGQSAILRTRGNRHGHVVLRGGGGRPNYDTVSVSLAEQALAKAKLPVNIVVDCSHANSWKKPELQPLVMKDVIHQIREGNRSVVGLMIESNLEAGNQAIPADLSQLKYGCSVTDACVGWDTTVDMIRSAHGVLRDALARRERA

SEQ ID NO: 75668 - DNA, 1086 bp, Azoarcus sp. BH72
  CDS (1)..(1086): transl_table=11
atgtccgcctcaatgaagatccatatcgacgacgtccgcatcaaggagatcaaggaactggtgccgcccgcccatgtgctgcgcgagtttccggcgaccgccaagtccgcggaaacggcgtacgaggcgcgccaggcgatccaccgcatcctctacggcgccgacgaccgcctgctggtggtggtggggccgtgctccatccacgatgctgacgcggcgatggaatatgcccgccgcctgaaggtcgaggctgagcggctgaagaacgacctgctggtggtgatgcgggtgtatttcgagaagccgcgcaccacggtgggctggaagggcctgatcaatgacccccacctggacggcagcttcgcgatcaacgaaggcgtacggctcgcgcgcaagctgctgtgggaaatcaacgaactcggcctgcccgccggcaccgagttcctcgacatgatcacgccgcagtacatcgccgacctgatcagctggggcgcgatcggcgcccgcaccaccgagagccaggtgcaccgcgaactggcctccggcctgtcgtgcccggtgggcttcaagaacggcaccgacggcaacgtacgcatcgcggtcgatgcgatcaaggcggcgcagtcgccgcatcatttcctcagcgtcaccaaggcgggccactcggccatcgtctccacccgcggcaacgaggactgccacgccatcctgcgcggcggcaagagcaccaactacgatgccgccagcgtggatgccgcgtgcaaggaactcgcggcctccggcgtgccgggcaaggtcatgatcgacttctcgcacgccaacagccgcaagcagcaccgcctgcagatcgaggtggcgcacgacgtcgcggcccagctggcgcgcggcgaggaccgcatcatcggggtgatggtggagtcccacctgaaggaaggccgtcaggacctcaagccgggctgcacgctggaatacggcatgagcatcaccgacgcctgcatcggctgggaagactcggtcggcgtgctcgacacgctggccggcgccgtgcgccagcgccgcgtggagcgcgcggccgagacggagtaa

SEQ ID NO: 75669 - protein, 361 aa, Azoarcus sp. BH72
MSASMKIHIDDVRIKEIKELVPPAHVLREFPATAKSAETAYEARQAIHRILYGADDRLLVVVGPCSIHDADAAMEYARRLKVEAERLKNDLLVVMRVYFEKPRTTVGWKGLINDPHLDGSFAINEGVRLARKLLWEINELGLPAGTEFLDMITPQYIADLISWGAIGARTTESQVHRELASGLSCPVGFKNGTDGNVRIAVDAIKAAQSPHHFLSVTKAGHSAIVSTRGNEDCHAILRGGKSTNYDAASVDAACKELAASGVPGKVMIDFSHANSRKQHRLQIEVAHDVAAQLARGEDRIIGVMVESHLKEGRQDLKPGCTLEYGMSITDACIGWEDSVGVLDTLAGAVRQRRVERAAETE

SEQ ID NO: 75670 - DNA, 1053 bp, Mycobacterium sp. KMS
  CDS (1)..(1053): transl_table=11
atgaacctggcgcagatcgccaccccgccggccacctccgaccggcgcatccgcagcttcagcgcgattcccagcccgcacgaggtgctcgcggagttcccgctgggtgcccggcgcgccgagcgggtggcccgcgaccgcaccgagatcgccgacatcctcgccggccgcgacgaccgactgctggtcgtggtcggtccgtgctcggtgcacgatccggtcgccgcgctgaactacgcaagccggctcgcgaagatcgccgacgaactcggcgaccggctcaagatcgtcatgcgcgtgtacttcgagaagccgcggacgacgatcggatggaaggggctgatcaacgatccggggatggacggcacgttcgatgtgtcgcgcggtctgcgcaccgcccgccagctgctgctcgacatcatcgacatcggcctacccgtcggatgcgagttcctggaaccgaccagcccgcagtacatcgccgacgccgtcgcctggggtgccatcggcgcccgcacgaccgaatcgcaggtgcaccgccaactcgcgtcgggtctgtcgatgcccgtcggcttcaagaacggcaccgacggcaacatccaggtggccgtcgacggggtgaaggccgccgcggcccagcacgtcttcttcgggatggacgactccggccgtggcgcagtcgtgagcaccgagggcaacgaggactgccacgtcatcctgcgcggcggtaccgacggacccaactaccacgcggatgccgtgcaggccgccgccgccaagctgaccgccgccggactgccgggacgggtcgtcgtcgactgcagccacgccaactccggcaaggaccacatccgccaggcggcggtggccgccgaggtggcccagctgatccgcgacgggcttccggtcagcggggtgatgctggagagcttcctggtcgggggtgcgcagtccgccgagtcgcggccgctcacttacgggcaatcggtcaccgacaaatgcatggactggaccgcgacggatctggtgctgcgagaactggcggcgcgctag

SEQ ID NO: 75671 - protein, 350 aa, Mycobacterium sp. KMS
MNLAQIATPPATSDRRIRSFSAIPSPHEVLAEFPLGARRAERVARDRTEIADILAGRDDRLLVVVGPCSVHDPVAALNYASRLAKIADELGDRLKIVMRVYFEKPRTTIGWKGLINDPGMDGTFDVSRGLRTARQLLLDIIDIGLPVGCEFLEPTSPQYIADAVAWGAIGARTTESQVHRQLASGLSMPVGFKNGTDGNIQVAVDGVKAAAAQHVFFGMDDSGRGAVVSTEGNEDCHVILRGGTDGPNYHADAVQAAAAKLTAAGLPGRVVVDCSHANSGKDHIRQAAVAAEVAQLIRDGLPVSGVMLESFLVGGAQSAESRPLTYGQSVTDKCMDWTATDLVLRELAAR

SEQ ID NO: 75672 - DNA, 1056 bp, Neisseria meningitidis FAM18
  CDS (1)..(1056): transl_table=11
atgacacaccattaccccacagacgatattaagattaaagaagttaaagagttgttgccgccgattgcccatctttacgagctgccgatttccaaagaggcttcgggcttggttcaccgcacccgtcaggaaatttccgatttggttcacggcagggacaagcggctgttggttattatcgggccgtgttcgattcacgatccgaaagcggcgttggaatatgcggagcgtttgttgaaactccgcaagcagtatgaaaacgagcttttgattgtgatgcgcgtttatttcgagaagccgaggacgacggtgggttggaaaggtttgattaacgacccgcatttggacggtacgtttgacatcaatttcggtttgcgtcaggcgcgcagcctgttgttgtcgctgaacaatatgggtatgcctgcctctaccgagtttttggatatgattacgccgcaatattatgcggacttgatttcttggggggcaatcggtgcgcggacgaccgaaagccaagttcaccgcgaattggcaagcgggctgtcctgccccgtcggctttaaaaacggtacggacggcaatttgaagattgccatcgacgcaatcggtgcggcgagccattcgcatcatttcctgtctgtaaccaaggccgggcattccgccattgtccataccggcggcaatcctgactgtcatgtcattttgcgcggcggaaaagagccgaattatgatgcgggacacgtcagcgaggcggcggaacaactgcgtgcggcaggggtaaccgacaagctgatgatagattgcagccacgccaacagccgcaaggattacacccggcagatggaagtggcacaagatattgccgcccaattggaacaggacggcggcaatatcatgggcgtgatggtggaaagccatttggtcgaaggcaggcaggacaagccggaagtgtacggcaaaagcattaccgatgcgtgtatcggttggggcgcgactgaagaactgttggcattgttggcaggtgcaaacaaaaaacgtatggcgcgcgccggttga

SEQ ID NO: 75673 - protein, 351 aa, Neisseria meningitidis FAM18
MTHHYPTDDIKIKEVKELLPPIAHLYELPISKEASGLVHRTRQEISDLVHGRDKRLLVIIGPCSIHDPKAALEYAERLLKLRKQYENELLIVMRVYFEKPRTTVGWKGLINDPHLDGTFDINFGLRQARSLLLSLNNMGMPASTEFLDMITPQYYADLISWGAIGARTTESQVHRELASGLSCPVGFKNGTDGNLKIAIDAIGAASHSHHFLSVTKAGHSAIVHTGGNPDCHVILRGGKEPNYDAGHVSEAAEQLRAAGVTDKLMIDCSHANSRKDYTRQMEVAQDIAAQLEQDGGNIMGVMVESHLVEGRQDKPEVYGKSITDACIGWGATEELLALLAGANKKRMARAG

SEQ ID NO: 75674 - DNA, 1101 bp, Acidovorax sp. JS42
  CDS (1)..(1101): transl_table=11
atgaccctgaccgaacgcctcgcatccccgctcaccacccacgacaccacgcgcatcgacgacctgcgcatcaaagccgtgcgcccgctcatcacgcccgcgctgctgcaggaatggcagcccgcgcccgaggcggcgcagacgctggtggaaagcagccgcgtggccatctcgcgcgtgctgcacgggcaggacgaccgcctcatcgtcgtggtggggccgtgctccatccacgaccatgaccaggccatggagtacgcgcgcctgttgaaggagcaggcggatgcgttggcgcaggacctgctcatcgtgatgcgcgtgtacttcgagaagccccgcaccaccgtgggctggaagggctacatcaacgacccgcacctggacggcagcttcgccatcaacgaaggcctggagcgcgcccgcgcattgctgctggacgtgctggcgctgggcctgcccgtgggcacggaattcctggacctgctgtcgccgcagttcatcagcgacctggtgagctggggcgccatcggcgcgcgcaccaccgaaagccagagccaccggcaactggccagcggcctgtcctgccccgtgggcttcaagaacggcacggatggcggcgtgaaggtggcggccgacgccatccaggccgcgcaggcaccgcatgccttcatgggtatgacaaagatggggcaggcggcgatcttcgagacgcgcggcaaccacgactgccatgtgatcctgcgcggcggcaagaccccgaactacggcgcggccgacgtgcaggccgcctgcgagatgctggagaaggccggccagcgcccgcaggtgatgatcgacctgtcgcatgccaacagcagcaagcagcaccgccgccagatcgacgtggcgcaggacgtggcccagcagatcgccgccggcgatgcacgcatcaccggcgtgatgatcgagagccacctgcaggagggccgccaggacatcgtggacggccagccgctcacacccggcgtgtcggtcaccgacgcctgcatcagcttcgcacagaccgtgccggtactgcagcagctggctgcggccgtgcgcgaacgccgcacgcgcggctga

SEQ ID NO: 75675 - protein, 366 aa, Acidovorax sp. JS42
MTLTERLASPLTTHDTTRIDDLRIKAVRPLITPALLQEWQPAPEAAQTLVESSRVAISRVLHGQDDRLIVVVGPCSIHDHDQAMEYARLLKEQADALAQDLLIVMRVYFEKPRTTVGWKGYINDPHLDGSFAINEGLERARALLLDVLALGLPVGTEFLDLLSPQFISDLVSWGAIGARTTESQSHRQLASGLSCPVGFKNGTDGGVKVAADAIQAAQAPHAFMGMTKMGQAAIFETRGNHDCHVILRGGKTPNYGAADVQAACEMLEKAGQRPQVMIDLSHANSSKQHRRQIDVAQDVAQQIAAGDARITGVMIESHLQEGRQDIVDGQPLTPGVSVTDACISFAQTVPVLQQLAAAVRERRTRG

SEQ ID NO: 75676 - DNA, 1119 bp, Acidovorax sp. JS42
  CDS (1)..(1119): transl_table=11
atgaacgcccatgtctccagcagcgatgcctggtatcccaacgtcgagaaaaccagcgagaccgacgaccaacgcatcaaggacatcaccgtgcttcctcctccagaccacctgattcgcttcttcccgatccgcgggtcggaggtggagtcgctgattgccaacacacgccgcagcatccagcgcatcatgagcggcgaggacgaccggctgctcgtcatcatcggcccctgttcgatccacgacccgcacgccgcggtggactatgcgcgcaagctcaaggccgtgcgtgagcagtacaaggatcaactggaagtggtgatgcgcgtgtacttcgagaagccccgcaccaccgtgggctggaagggcctgatcaacgacccctacctggacggcagctaccgcatcgacgagggcctgcgcatcgcgcgccagctgctcatcgacatcaaccgcctgggcgtgccggcgggcagcgagttcctggacgtgatctcgccccagtacatcggcgacctgatcagttggggcgccatcggcgcgcgcaccaccgaaagccaggtccaccgcgaactggcctccggcatttcggcccccatcggcttcaagaacggcaccgatggcaacatccgcatcgccaccgatgccatccagtccgccagccgcggccaccacttcctgtcggtgcacaagaacggccaggtggccatcgtgcacaccgcgggcaacaaggattgccacgtgatcctgcgcggcggcaaggcgcccaactacgacgcagccagcgttgccgcggcctgcaaggacctggaggccgccggcctgccggcgtcgctgatggtggactgcagccatgccaacagcagcaagcagcacgagaagcagcgcgatgtggcgcgcgacatcgccgcgcagatcgcaggcggctcgcgcagcgtgttcggcgtgatggtggaaagccacctgcagcccggagcgcagaagttcacgccgggcaaggacgatgccacgacgctggaatacggcaagagcatcaccgatgcctgcctgggatgggacgactccgttgcctgcctggccgagctggcggccgccgtgcaagcgcggcgcgcgcgttga

SEQ ID NO: 75677 - protein, 372 aa, Acidovorax sp. JS42
MNAHVSSSDAWYPNVEKTSETDDQRIKDITVLPPPDHLIRFFPIRGSEVESLIANTRRSIQRIMSGEDDRLLVIIGPCSIHDPHAAVDYARKLKAVREQYKDQLEVVMRVYFEKPRTTVGWKGLINDPYLDGSYRIDEGLRIARQLLIDINRLGVPAGSEFLDVISPQYIGDLISWGAIGARTTESQVHRELASGISAPIGFKNGTDGNIRIATDAIQSASRGHHFLSVHKNGQVAIVHTAGNKDCHVILRGGKAPNYDAASVAAACKDLEAAGLPASLMVDCSHANSSKQHEKQRDVARDIAAQIAGGSRSVFGVMVESHLQPGAQKFTPGKDDATTLEYGKSITDACLGWDDSVACLAELAAAVQARRAR

SEQ ID NO: 75678 - DNA, 1059 bp, Nostoc punctiforme PCC 73102
  CDS (1)..(1059): transl_table=11
atgcacaacaaattatttaatagtaatatcgacaacgctaacattgagaacgatcgcattttattaactcccaatgaaataaaatcaaaattacctttaacacaattagccgaacaaagagttttagcatacaggcaggaaatagaagatattctcgattttcaggatcggagaaagtttatagtagttgggccatgctcaatccacgacccaaaagcagcgctcgaatattctgaaaggttgaaagcgttgtctgaggaagttaaggataagctactactaataatgcgtgtatactttgaaaagccaagaacaaccgtcggttggaaaggattaattaacgatccagatatggatgattctttccatgtagagaatggtttattaattgcacgcgatttgttattaaaaattacagaattgggattacctgcgggtacagaagcactagatccaatcatacctcaatacattagtgaactgattacctggtctgctattggggcacgcacgaccgaatcacaaactcaccgtgaaatggcaagtgggctttcgatgcctgtgggttttaaaaacggtactgatggcaatattcaagtagctttgaatgccctacaatcagctagaaacccgcataattttctgggaattaatcaaaacggacaagtcagcgtctttcaaactaaagggaatggctatggtcacgtaattttaagaggtggtagtcaacccaactttgatgcagctaatgtcaaattagtagaagataaattaaaacaggcgaatttaccaccaagaattgtgatcgactgtagccacggaaatactaataaagattacaaattacaaggtgctgttttagaaaatattattcagcaaatagtagatggtaatacatcaatagttggcatgatgctggaatcacatttgtatgaaggtagtcaaccaattaccgataaacaagaagaattaaaatatggggtttctgtaactgataaatgtattagttgggaagaaaccgaaaaaattattttggctgcttacgaaaaacttaagtaa

SEQ ID NO: 75679 - protein, 352 aa, Nostoc punctiforme PCC 73102
MHNKLFNSNIDNANIENDRILLTPNEIKSKLPLTQLAEQRVLAYRQEIEDILDFQDRRKFIVVGPCSIHDPKAALEYSERLKALSEEVKDKLLLIMRVYFEKPRTTVGWKGLINDPDMDDSFHVENGLLIARDLLLKITELGLPAGTEALDPIIPQYISELITWSAIGARTTESQTHREMASGLSMPVGFKNGTDGNIQVALNALQSARNPHNFLGINQNGQVSVFQTKGNGYGHVILRGGSQPNFDAANVKLVEDKLKQANLPPRIVIDCSHGNTNKDYKLQGAVLENIIQQIVDGNTSIVGMMLESHLYEGSQPITDKQEELKYGVSVTDKCISWEETEKIILAAYEKLK

SEQ ID NO: 75680 - DNA, 1089 bp, Haemophilus influenzae R2846
  CDS (1)..(1089): transl_table=11
atggctaaagagaaaattgaaattgtcgtggcaaacgatgatacgcgaattgaaaaagtcgatcaggtgttaccaccgattgccttattagaaaaatatccagctagtgaacaggctgcggcattagtaaagcaaactcgtcatgaggcgcataatattattcaggctaaagatgatcgtttattagtcgtgattggaccttgctccattcacgatccgaaagctgccattgaatatgcgactcgtttaaaaccattacgtgataaatataaagatagcctcgaaattattatgcgtgtgtactttgagaaaccgcgtacaacggtgggctggaaaggtttaattaatgatccgtatttaaatgatacttatcgtttaaatgatggtttacgtattgcacggaaattactttcagatattaatgatcttggtgtgcctgctgcgggcgagtttttagatatgattacacctcaatatttggctgattttatgagctggggggcgattggggctagaacaacagaatcacaagttcatcgtgagttggcttcaggtttatcttgtgctgttggttttaaaaatgccactaatggcggagtaaaagtcgctttagatgcaattggtgcggcagaagctccccactatttcttatctgtcactaaatttggtcattctgccattgtttctacaaaagggaatgaagattgccatattattttacgaggtggagataaaggccctaactatagtgctgaagatgtagaaaaagtttgtgctgatattgaaaaaacagggcgtattccacacgttatggttgattttagccatgcaaacagcagtaaacaatataaaaaacaaatggaggtttgccaagatgtgtgtcatcaaatcgcatctggttctaaacaaatctttggtgtaatggtggaaagtcatttagtggaaggtcgtcaagatttagttgatggcaaagcgcagacttatggacaaagtattacggatgcgtgcattggatgggaagattctgaaagattattgcaacaactttctgatgcagttattgctagacgtaaagcgacgagtaattaa

SEQ ID NO: 75681 - protein, 362 aa, Haemophilus influenzae R2846
MAKEKIEIVVANDDTRIEKVDQVLPPIALLEKYPASEQAAALVKQTRHEAHNIIQAKDDRLLVVIGPCSIHDPKAAIEYATRLKPLRDKYKDSLEIIMRVYFEKPRTTVGWKGLINDPYLNDTYRLNDGLRIARKLLSDINDLGVPAAGEFLDMITPQYLADFMSWGAIGARTTESQVHRELASGLSCAVGFKNATNGGVKVALDAIGAAEAPHYFLSVTKFGHSAIVSTKGNEDCHIILRGGDKGPNYSAEDVEKVCADIEKTGRIPHVMVDFSHANSSKQYKKQMEVCQDVCHQIASGSKQIFGVMVESHLVEGRQDLVDGKAQTYGQSITDACIGWEDSERLLQQLSDAVIARRKATSN

SEQ ID NO: 75682 - DNA, 1089 bp, Haemophilus influenzae R2866
  CDS (1)..(1089): transl_table=11
atggctaaagagaaaattgaaattgtcgtggcaaacgacgatacgcgaattgaaaaagtcgatcaggtgttaccacccattgccttattagaaaaatacccagcaagtgaacatgctgcggcgttagtgaagcaaactcgtcatgaggcacataatattattcatggtaaagatgatcgtttattagtcgtgattgggccttgctctattcatgatccgaaagttgccattgaatatgcgactcgtttaaaaccattacgtgaaaaatacaaagatagccttgaaattattatgcgtgtgtattttgagaaaccgcgtacaacggtgggttggaaaggtctaattaatgatccatatttgaatgatacttatcgtttaaatgatgggttacgtattgcacggaaattactttcagatattaatgatcttggtgtgcctgcagcgggcgagtttttagatatgattacacctcagtatttggcagattttatgagctggggggcgattggggctagaacaacagaatcacaagttcatcgtgagttggcttcaggtttatcttgtgctgttgggtttaaaaatgccactaatggtggtgtgaaagtcgctttagatgcaattggtgcggcggaagctccccactatttcttatctgtcactaaatttggtcattctgcaattgtttctacaaaagggaatgaagattgccatattattttacgaggtggagataaaggccctaactatagtgctgaagatgtagaaaaagtttgtgctgatattgaaaaaacagggcgtattccacacgttatggttgattttagccatgcaaacagcagtaaacaatataaaaagcaaatggatgtttgccaagacgtatgtaatcagattgcatttggttctaaacaaatctttggcgtaatggtggaaagccatttagtggaaggtcgtcaagatttagttgatggcaaagcgcagacttatggacaaagtattacggatgcgtgcattggatgggaagattctgaaagattattgcaacaactttctgatgcagttattgctagacgtaaagcgacgagtaattaa

SEQ ID NO: 75683 - protein, 362 aa, Haemophilus influenzae R2866
MAKEKIEIVVANDDTRIEKVDQVLPPIALLEKYPASEHAAALVKQTRHEAHNIIHGKDDRLLVVIGPCSIHDPKVAIEYATRLKPLREKYKDSLEIIMRVYFEKPRTTVGWKGLINDPYLNDTYRLNDGLRIARKLLSDINDLGVPAAGEFLDMITPQYLADFMSWGAIGARTTESQVHRELASGLSCAVGFKNATNGGVKVALDAIGAAEAPHYFLSVTKFGHSAIVSTKGNEDCHIILRGGDKGPNYSAEDVEKVCADIEKTGRIPHVMVDFSHANSSKQYKKQMDVCQDVCNQIAFGSKQIFGVMVESHLVEGRQDLVDGKAQTYGQSITDACIGWEDSERLLQQLSDAVIARRKATSN

SEQ ID NO: 75684 - DNA, 1071 bp, Prosthecochloris aestuarii DSM 271
  CDS (1)..(1071): transl_table=11
atgcagcaattacaggatttacgtgtttcaaacattactcgactgactgcaccgcaaaccttcaagcaacgccttccggtgacggaagagattgccagaacggttttagacggtcgcgaggaagttgaaaatattttatccggaaaagattcccggatgcttgttatcgtcggtccgtgttcgattcacgatatcaaggcggcaatggagtatgccgttcgactcaaggctctgcgcgatgaactgaaggatgatctttgtatcgtcatgcgtgtttatttcgagaaaccaaggacaacgatcggctggaaagggtttatcaacgacccgcacctcgatggttcatttgatatcgagcatggattgcattatgcccgcaaactgcttcttgatatcaatgccctggggcttcctacagctacggagtttctcgatccgtttacacctcagtatgtatctgatcttgtcagctgggcggcgattggagcaagaaccatcgagtctcagacacatcgtcagatggccagcggcctgtcgatgccggtagggttcaagaactccaccgatggtcgtattcaggctgccattgatgcattacggtcggccatgcatgctcacagttttcttggtatcgatcaggaggggcacagcagtgtcatcaccacgacgggcaatccgtttggccatattgtgctgcgtggcggttcccagaagccgaactacgatccggacaatattgccgacgctgagcggaggctgcaggcagcacatctgccatctgccattatggttgattgcagtcatgccaattcggggaaaaagcatgaacagcaggccaacgtctgggataatattgtcgaacagcgcgtcaacggtacgacaagtatcatcggcgtgatgatcgaaagtaatctgttctgcggaaatcagccttttcctgacgatccatcttccctgcagtacggtgtttcgattaccgatgcctgcattgcatggaatgaaactgagacgctcttaaggaaaggcgcggtgagacttcatgaagtgcttcgaaaatctgagctttcttaa

SEQ ID NO: 75685 - protein, 356 aa, Prosthecochloris aestuarii DSM 271
MQQLQDLRVSNITRLTAPQTFKQRLPVTEEIARTVLDGREEVENILSGKDSRMLVIVGPCSIHDIKAAMEYAVRLKALRDELKDDLCIVMRVYFEKPRTTIGWKGFINDPHLDGSFDIEHGLHYARKLLLDINALGLPTATEFLDPFTPQYVSDLVSWAAIGARTIESQTHRQMASGLSMPVGFKNSTDGRIQAAIDALRSAMHAHSFLGIDQEGHSSVITTTGNPFGHIVLRGGSQKPNYDPDNIADAERRLQAAHLPSAIMVDCSHANSGKKHEQQANVWDNIVEQRVNGTTSIIGVMIESNLFCGNQPFPDDPSSLQYGVSITDACIAWNETETLLRKGAVRLHEVLRKSELS

SEQ ID NO: 75686 - DNA, 1164 bp, Xylella fastidiosa Dixon
  CDS (1)..(1164): transl_table=11
atgtgtttggcggcttttttattgtctcctccgcttggtctatgtctaaatgttctgagattacatcccatgccaccatttaccgacgacctccgtatccgaaaaattgaaccactgacacctcctaacaagctcctcttgcaactaccatgcgatgagcaggcatcgctgactgttgcgacctcacgcaacgcactgcacgatatcctgcacggccacaacgaccgtttagccgtcgtgataggcccatgctcaatccatgatccaattgcagccattgattacgcgcaacgtctgcacccattgcgagagatgtacaaggatgcactagagatcgtgatgcgggtttactttcagaaaccgcgcaccactattggttggaaaggattggtcaacgatccggatcttgatggcagcttccagatcaataagggcttgcatatcgcgcgcaacctgctgcgcgatatcaatcatctcggcttacccgccggtgtggaatttctagacacgatttcgccgcaatatctggctgacttagtcgcctggggtgccattggtgcacgcaccactgagagccaaatacaccgtgaaatggcttcaggtttatcgtgcccgattggctttaaaaacagtaccagtggtgatgtgaagattgctgctgacgcgattaaagcagcttcgcatccgcaccatttcctttcagtgacaaagacaggtgttgccgcagtcgtcgccacccagggtaaccccgattgtcacgtgattctgcgtggaggcaaggtcccgaattatgacgcaatcaatgtcgaagctgccagccaaacattgcttaaatccaagctaccggtgcgactgatgattgatgcgagccatgccaatagcggcaaaaatccaaacaatcaacctaaggtgatcgagaacatcgtagaacagcttaaagccggtgaacgccgcatcatcggtgtcatgattgaaagccaccttgttggtggtcggcaagaattagtccttggaaacacacttacctatggacagagcattaccgatgcttgcatcgactgggatacctcggtcgcaatgttagaacagctcgctcaggccgtacgcgtcagacagactctaccaacgaccgctacagctaacaaaacatcaaaaacccaataa

SEQ ID NO: 75687 - protein, 387 aa, Xylella fastidiosa Dixon
MCLAAFLLSPPLGLCLNVLRLHPMPPFTDDLRIRKIEPLTPPNKLLLQLPCDEQASLTVATSRNALHDILHGHNDRLAVVIGPCSIHDPIAAIDYAQRLHPLREMYKDALEIVMRVYFQKPRTTIGWKGLVNDPDLDGSFQINKGLHIARNLLRDINHLGLPAGVEFLDTISPQYLADLVAWGAIGARTTESQIHREMASGLSCPIGFKNSTSGDVKIAADAIKAASHPHHFLSVTKTGVAAVVATQGNPDCHVILRGGKVPNYDAINVEAASQTLLKSKLPVRLMIDASHANSGKNPNNQPKVIENIVEQLKAGERRIIGVMIESHLVGGRQELVLGNTLTYGQSITDACIDWDTSVAMLEQLAQAVRVRQTLPTTATANKTSKTQ

SEQ ID NO: 75688 - DNA, 1164 bp, Xylella fastidiosa Ann-1
  CDS (1)..(1164): transl_table=11
atgtgtttggcggcttttttattgtctcctccgcttggtctatgtctaaatgttctgagattacatcccatgccaccatttaccgacgacctccgtatccgaaaaattgaaccactgacacctcctaacaagctcctcttgcaactaccatgcgatgagcaggcatcgctgactgttgcaacctcacgcaacgcactgcacgatatcctgcacggccacaatggccgtttagccgtcgtgataggcccatgctcaatccatgatccaattgcagccattgattactcgcaacgtctacgcccattgcgtgagatgtacaaggatgcactagagatcgtgatgcgagtttactttcagaaaccgcgcaccactattggttggaaaggattggtcaacgatccggatcttgatggcagcttccagatcaataagggcttgcatatcgcgcgcaacctgctgcgcgatatcaatcatctcggcttacccgctggtgtggaatttctagacacgatttcgccgcaatatctggctgacttagtcgcctggggtgccattggtgctcgcaccactgaaagccaaatacaccgtgaaatggcttcaggtttatcgtgcccgattggctttaaaaacagtaccagtggtgatgtgaagattgctgctgacgcgattaaagcagcttcgcatccgcaccatttcctttcagtgacaaagacaggtgttgccgcagtcgtcgccacccagggtaaccccgattgtcacgtgattctgcgtggaggcaaggtcccgaattacgacgcaatcaatgtcgaagctgccagccaaacattgcttaaatccaagctaccggtgcgactgatgattgatgcgagccatgccaatagcggcaaaaatccaaacaatcaacctaaggtgatcgagaacatcgtagaacagcttaaagccggtgaacgccgcatcatcggtgtcatgattgaaagccacattgttggtggccggcaagaattagtccttggaaacacacttacctatggacagagcattaccgatgcttgcatcgactgggatacctcggtcgcaatgttagaacagctcgctcaggccgtacgcgtcagacagactctaccaacgaccgctacagctaacaaaacatcaaaaacccaataa

SEQ ID NO: 75689 - protein, 387 aa, Xylella fastidiosa Ann-1
MCLAAFLLSPPLGLCLNVLRLHPMPPFTDDLRIRKIEPLTPPNKLLLQLPCDEQASLTVATSRNALHDILHGHNGRLAVVIGPCSIHDPIAAIDYSQRLRPLREMYKDALEIVMRVYFQKPRTTIGWKGLVNDPDLDGSFQINKGLHIARNLLRDINHLGLPAGVEFLDTISPQYLADLVAWGAIGARTTESQIHREMASGLSCPIGFKNSTSGDVKIAADAIKAASHPHHFLSVTKTGVAAVVATQGNPDCHVILRGGKVPNYDAINVEAASQTLLKSKLPVRLMIDASHANSGKNPNNQPKVIENIVEQLKAGERRIIGVMIESHIVGGRQELVLGNTLTYGQSITDACIDWDTSVAMLEQLAQAVRVRQTLPTTATANKTSKTQ

SEQ ID NO: 75690 - DNA, 1038 bp, Streptococcus suis 89/1591
  CDS (1)..(1038): transl_table=11
atgaaagagggagatctattgtttacaccaatcagcgaaaaaattgacatcaatcaagtacgagaacattcaaaactttctccagaaacacttgctaaaaaacaagctcgtgaccgtgaacttgaagccatcttaaaaggtgaagataatcgtcttctcctagtaattggaccatgttcttctgacaatgaagaggctgtcttagattatgctcaccgcttggccaagctccaagaagaggtcaaagataaaatttttatggtcatgcgcgtctatactgccaagccacgtaccaatggtgatggttataaaggactcatgcaccaaccagatacagatgctgcaccaagcctcatcaacggaatcaaagcagttcgtaacctccactatcgtgtcattacggaaacaggtttaactactgctgacgagatgctctaccctgaaaacctgcctttggttgatgacttggtttcctacatcgctatcggagctcgttcggttgaaaatcagcagcaccgttttgtagcgtcaggcatcgatgttccaacaggcttgaaaaatccaacatctggtaacctcaaagtcatgttcaacggtctttttgctgctcagaagaagcaatccttcctcttcaacaatactgaagttgaaacatctggcaacccacttactcacgttattcttcgtggcgcagtcaatgaaaatggtaaatacctaccaaactattactatgacaatcttctagaaaccattgacctctatgatcaatttggtttgaaaaatccatttattattatcgataccaaccatgacaattctgggaaaaattatttggaacaaatccgtatcgtccgtcaaaccttaatcaaccgtgactggaacgaatccattcgtaactacgttcgcggattcatgattgaatcctacattgaagacggtcgccaagacaatccagatgtctatggaaaatccatcacagacccttgcttaggctgggaaaaaacacaagaactcatccgagaaatttacaacagatag

SEQ ID NO: 75691 - protein, 345 aa, Streptococcus suis 89/1591
MKEGDLLFTPISEKIDINQVREHSKLSPETLAKKQARDRELEAILKGEDNRLLLVIGPCSSDNEEAVLDYAHRLAKLQEEVKDKIFMVMRVYTAKPRTNGDGYKGLMHQPDTDAAPSLINGIKAVRNLHYRVITETGLTTADEMLYPENLPLVDDLVSYIAIGARSVENQQHRFVASGIDVPTGLKNPTSGNLKVMFNGLFAAQKKQSFLFNNTEVETSGNPLTHVILRGAVNENGKYLPNYYYDNLLETIDLYDQFGLKNPFIIIDTNHDNSGKNYLEQIRIVRQTLINRDWNESIRNYVRGFMIESYIEDGRQDNPDVYGKSITDPCLGWEKTQELIREIYNR

SEQ ID NO: 75692 - DNA, 1026 bp, Streptococcus suis 89/1591
  CDS (1)..(1026): transl_table=11
atgggaattcacaaacgtagcaccagtttagacatcgataaagtaaaggaactttccaagttagaaggagaatttctagctgcaaaaaatcggcgcgatgaagaactgaaaagaattatccgaggcgaagatgatcgtctgctcttggttatcggtccttgctcatcagataatgaagaggctgttctagaatatgcacgtcgtctctctaagcttcaagaggaagtcaaagataaaatcttcatggtcatgcgggtttacacagctaagccacgtaccaatggggaaggctataaaggactggttcatcagccagatacttctaaattaccagacctcattaacggaattgcagccgttcgtaatttgcattaccgtgtcattactgagaccggactcacaactgctgatgaaatgctctactctgccaactatccactggtggaagacttggtgtcctaccatgctatcggagcacgttcggttgaagaccaagaacatagatttgttgcatcaggtgtcgatatgccaactggtatgaaaaacccaacttctggtaatttgaccgttatgttcaatggtatctacgccgcacaaaacaaacagaactttatttaccgtgatgcagaagttgatacagatggcaaccctctagctcatgctatccttcgtggtgccaatactgaaaagggcggttatgagccaaactactactatgatattctcttgaaaaccatcaaacagtatgaacaatttggtcttaaaaatccatttatcgtaattgataccaaccacgacaattctggtaaaacttacctggaacaaatccgtatcgtccgtcaaaccctcatcaaccgagcttggaacgaatctattcgcaaatatgtccgtggtttcatgattgaatcctacttagaagacggccgtcaagatagccctgaggtattcggcaaatccattaccgacccttgcttaggttggaaaaaaacggaagctctgattcgtgaaattcatcaaaccgtctaa

SEQ ID NO: 75693 - protein, 341 aa, Streptococcus suis 89/1591
MGIHKRSTSLDIDKVKELSKLEGEFLAAKNRRDEELKRIIRGEDDRLLLVIGPCSSDNEEAVLEYARRLSKLQEEVKDKIFMVMRVYTAKPRTNGEGYKGLVHQPDTSKLPDLINGIAAVRNLHYRVITETGLTTADEMLYSANYPLVEDLVSYHAIGARSVEDQEHRFVASGVDMPTGMKNPTSGNLTVMFNGIYAAQNKQNFIYRDAEVDTDGNPLAHAILRGANTEKGGYEPNYYYDILLKTIKQYEQFGLKNPFIVIDTNHDNSGKTYLEQIRIVRQTLINRAWNESIRKYVRGFMIESYLEDGRQDSPEVFGKSITDPCLGWKKTEALIREIHQTV

SEQ ID NO: 75694 - DNA, 1074 bp, Prochlorococcus marinus str. MIT 9211
  CDS (1)..(1074): transl_table=11
atggtcatttctccagatcttaatttgttcgataaaacttctgatcttcatattgttgagactagacctttggtctcaccttctttgttgcatcatgacttaccgctggatttaaaagctgcagaaattgttgctcaaactcgtaaacggattcaagcaatccttgctggggatgattcacgtttattagtgatagtaggaccttgctcagttcatgatgtaagtgcagctaaggaatacgctaagaaacttattcctttaagagaacgtttttcagatgcactggaaattgtgatgagagtttattttgaaaaacctagaacaactattggatggaaagggcttataaatgatccgcatttagatggatcatacgatatcaatacaggcttaagacgggcaagagccttacttttagatttagcccggtctgggatgccagcagcaacagaactattagatcccatagtgcctcaatatattgcagatttgattagttggactgctattggtgcaagaactacagaaagtcaaactcatagagaaatggcttcaggtttatccatgcctataggttataagaatgggacggatggaactgtagctattgcaattaatgcaatgcaggcagcatcaagggctcatcattttttaggcattaatcacaaaggttttgcttcaataatcagcacaacaggtaatcctgatggtcatcttgttttgcgaggtggtagtagtggcactaattatcacgttgaatctgttttgaatgcagcgaaagagctttctaaggcatctttaggtgacaaagtaatgattgattgcagtcatggcaactctaataaagattttcggcaacaatcacatgttcttcgagaagtatctaagcagattaaagaaggtttctctcatgtaatgggagttatgcttgaaagtcatcttgtagaaggtaatcaaaagttagtagcagatctttcacaattgaagtatggccaaagtattactgatgcatgtatagatataaaggctacggaaagtcttttagaagagcttgcagtttctatgagggcatag

SEQ ID NO: 75695 - protein, 357 aa, Prochlorococcus marinus str. MIT 9211
MVISPDLNLFDKTSDLHIVETRPLVSPSLLHHDLPLDLKAAEIVAQTRKRIQAILAGDDSRLLVIVGPCSVHDVSAAKEYAKKLIPLRERFSDALEIVMRVYFEKPRTTIGWKGLINDPHLDGSYDINTGLRRARALLLDLARSGMPAATELLDPIVPQYIADLISWTAIGARTTESQTHREMASGLSMPIGYKNGTDGTVAIAINAMQAASRAHHFLGINHKGFASIISTTGNPDGHLVLRGGSSGTNYHVESVLNAAKELSKASLGDKVMIDCSHGNSNKDFRQQSHVLREVSKQIKEGFSHVMGVMLESHLVEGNQKLVADLSQLKYGQSITDACIDIKATESLLEELAVSMRA

SEQ ID NO: 75696 - DNA, 1089 bp, Synechococcus sp. RS9917
  CDS (1)..(1089): transl_table=11
atgaccaccacctccgatctgcatgtggtggagaaccgcccactggtggctccagctctgttgcatgcggatctcagaaccgatgcggcggccacagccacggtggcgggcacccgcaggaccattcagtccatcctccgcggcgacgatcagcgactgctggtgatcgtcggcccctgctcggtgcacgatgtggaggcggcgcgggagtacgcgtgtcgtctggcgccgctgcgcgagcggcatgccgccgaactggaagtggtgatgcgggtgtatttcgagaaaccgcgtaccaccgtgggttggaaagggctgatcaatgacccgcacctcgatggctcttacgacatcaacaccggcctgcgtctggcgcgcgctctgctgctcgacctggcccgcgccggcatgccggcggccacggagctgctcgatccggtggtgccccaatacatcgccgacctgatcagctggacggccatcggcgcccggaccaccgaaagccagacccaccgcgagatggcctcaggtctgtcgatgccggttggctacaaaaacagcaccgatggcagtgtcaccatcgccattcacgcgatccaggcggcatccaggccccatcattttctgggcatcaacgggcagggcattgcctcgatcgtgagcaccaccggcaacccggatggccatctcgtgctgcgaggcggcagccggggaaccaactatcacctggatgcggtgcaggagtcggcggcggccctggcggcggcaggcctgcccgatcgtttgatggtggattgcagccatggcaattccaacaaggattaccggcgccagggtgaggtgctggaggcggtggctgcccaggtgcggcagggttccgaccatgtgatgggcgtgatgctggagagccatctggtggaaggcaaccagaagctcaatgccgatcgcacggcgatgacctacggccagagcatcaccgatgcctgcatcagcatcgacaccaccgaaagcttgctggagcagttggcagcggcggtggcggcgggccggccgttggcactctcgcggcaagagtgccagcttgcttga

SEQ ID NO: 75697 - protein, 362 aa, Synechococcus sp. RS9917
MTTTSDLHVVENRPLVAPALLHADLRTDAAATATVAGTRRTIQSILRGDDQRLLVIVGPCSVHDVEAAREYACRLAPLRERHAAELEVVMRVYFEKPRTTVGWKGLINDPHLDGSYDINTGLRLARALLLDLARAGMPAATELLDPVVPQYIADLISWTAIGARTTESQTHREMASGLSMPVGYKNSTDGSVTIAIHAIQAASRPHHFLGINGQGIASIVSTTGNPDGHLVLRGGSRGTNYHLDAVQESAAALAAAGLPDRLMVDCSHGNSNKDYRRQGEVLEAVAAQVRQGSDHVMGVMLESHLVEGNQKLNADRTAMTYGQSITDACISIDTTESLLEQLAAAVAAGRPLALSRQECQLA

SEQ ID NO: 75698 - DNA, 1074 bp, Synechococcus sp. WH 5701
  CDS (1)..(1074): transl_table=11
atgctcaccacctccgacctccacatcgtggagacacggccgctggtggcaccggcggttctccatcgcgaactgcccctgagccagacggcggcccgcaccgtgcttgacgcccgtgagcggatcaaggcgattctgcatgggcaggattcccgcctgctggtgatcgtcggtccctgctcggtgcacgacgtggaggccgccagagcctatgccgatgccatcgccgaggtgcgtgagcgccaccgcgaccagctggaggtggtgatgcgggtgtacttcgagaagccccgcaccaccgtgggctggaagggcctgatcaacgatccccacctcgacggcagctacgacatcaacaccggcctgcgcctggcgcggggcctgctggtgcacctggccgagatggggctgcccgccgcaaccgagctgctcgatccggtggtgccccagtacatcgccgacctgatcggctggacagcgatcggggcgcgcaccaccgaaagccagacccaccgggagatggcctcgggcctgtcgatgccgatcggcttcaagaacggcaccgacggcagcgccgtcacggccatccatgccatgcaggccgcctccaagccccaccatttcctgggcatcagccagctgggccatgccgcgatcgtctccaccaccggcaaccccgatggccatctggtgctgcgcggcggtaagggaggcaccaattaccacccggaggcgatcgagcaggcggcccttgcgctgcagaaggagggtctcccggcgaggctgatggtcgactgcagtcacggcaactccaacaaggactaccggcgccagggggaggtgctcgccgaggtggccggccaggtgcgcggtgggtccagccatgtgatgggggtgatgatcgaaagtcacctggtggccggcaatcagaagatcccagccgatctgagccagctcgcttacggccagagcatcaccgatgcctgcatcgacctggagaccacccgcacggtccttgacggtctggccgaagccgtggcagaggcccaggccgccaacctggcgccggtctga

SEQ ID NO: 75699 - protein, 357 aa, Synechococcus sp. WH 5701
MLTTSDLHIVETRPLVAPAVLHRELPLSQTAARTVLDARERIKAILHGQDSRLLVIVGPCSVHDVEAARAYADAIAEVRERHRDQLEVVMRVYFEKPRTTVGWKGLINDPHLDGSYDINTGLRLARGLLVHLAEMGLPAATELLDPVVPQYIADLIGWTAIGARTTESQTHREMASGLSMPIGFKNGTDGSAVTAIHAMQAASKPHHFLGISQLGHAAIVSTTGNPDGHLVLRGGKGGTNYHPEAIEQAALALQKEGLPARLMVDCSHGNSNKDYRRQGEVLAEVAGQVRGGSSHVMGVMIESHLVAGNQKIPADLSQLAYGQSITDACIDLETTRTVLDGLAEAVAEAQAANLAPV

SEQ ID NO: 75700 - DNA, 1065 bp, Synechococcus sp. WH 7805
  CDS (1)..(1065): transl_table=11
atgaccaccacacacgaccttcatgtggtggacaccaggcctctggttcctcccgccttgctgcatggagatctgccgattgatgccagggcgacggagaccgtggccacctcgcgcagccgaattcaagccattctcaggggtctggaccggcgactgctggtgatcgtcggcccctgctctattcatgatgtggatgcagcgagggagtacgccagcaaactggctcccctgcgtgaacgtcatgcctctgagctcgaggtggtgatgcgtgtgtacttcgagaagccacgcaccacggtgggatggaagggcctcatcaatgatccgaacctcgacggctcctacgacatcaacacggggttgcgaatggctcggtcgttactgctcgatttggccagggatggaatgccctgtgccactgaactgctcgatcctgtagttcctcagtacatcgctgatctgatcagttggacggcgatcggcgcccgtaccaccgaaagccagacgcaccgcgaaatggcttcaggcttgtcgatgccgatcggctacaaaaacagcaccgacggcagtgccaccattgccatcaacgccatgcaggccgcgtccaaaccccatcattttcttgggatcaatcgcgaggggcatgcatcgatcgtgagcaccaccggaaatccggatggtcatctggtgctgcggggagggaaccgaggcacgaattaccatctcgaggcgattcaggatgctgctgaagaattgaaagcagcgggactacccgaccggttgatggtcgattgcagtcatggcaactccaacaaggattatcgccggcaaggtgatgtgttgaaagctgtggcagctcaggtggaacaggggtcagcgcatgtgatgggtctgatgctcgaaagccatcttgttgagggcaaccaaaagatcagttcggatcgttcagcactgacccatggccaaagcgtcacggacgcatgcatcagcattgagacgacagcggagctgctggagggtttggctgattcgctgaagaaagttggcactcgtgttgcttga

SEQ ID NO: 75701 - protein, 354 aa, Synechococcus sp. WH 7805
MTTTHDLHVVDTRPLVPPALLHGDLPIDARATETVATSRSRIQAILRGLDRRLLVIVGPCSIHDVDAAREYASKLAPLRERHASELEVVMRVYFEKPRTTVGWKGLINDPNLDGSYDINTGLRMARSLLLDLARDGMPCATELLDPVVPQYIADLISWTAIGARTTESQTHREMASGLSMPIGYKNSTDGSATIAINAMQAASKPHHFLGINREGHASIVSTTGNPDGHLVLRGGNRGTNYHLEAIQDAAEELKAAGLPDRLMVDCSHGNSNKDYRRQGDVLKAVAAQVEQGSAHVMGLMLESHLVEGNQKISSDRSALTHGQSVTDACISIETTAELLEGLADSLKKVGTRVA

SEQ ID NO: 75702 - DNA, 1059 bp, Photobacterium sp. SKA34
  CDS (1)..(1059): transl_table=11
atgccaatgaaaacagatgaacttcgcaccgtgagtttaggcttgatgccaactccagctgaaattgaagcaacatcaccaatgactgatgaaattgcggcgcatgtagatcactcccgcaaacagattgaggcgattttaacgggtcaagattcccgtttactggtgattgttggaccatgttctatacatgataccgatgcagcagttgattatgcgaaacgccttgttgctgtacaagaaacatataaagaccaattgtttatcgtaatgcgtacctatttcgaaaaaccacgtaccgtggtcggctggaaaggtttagttacggatcctcatttagatggcagtttagacttagtaactggtttagaaaaagcacgcaaactattaattgatattaactcactaggcttacccactgcgactgaattcctcgatatgatcactggtcaataccttgctgatcttatcagttggggtgccattggtgcgcgtactacagaatctcagatccaccgtgaaatggcatcagcactgtcttgccctgttggctttaaaaacggcacagacggtaatacaaaaattgcgattgatgctattcgcgccactcgtgaatctcaccttttctgttcaccggcaaaaaatggacaaatgacgatttaccgtacttccggtaacccttacggtcatattattttacgtggcggtaagatgccaaattatcacgctgaagacgtcgcaacagcatgtgaggcattagccgagtttgaattaccacagagattaattgtcgattttagtcatggcaactgccaaaaacagcataaacgtcaattagatgtcacagctgaaatttgtgaacaattaaaaaatagtagccagtctattgcgggtatcatggcagaaagctttattgaagaagggaatcaagcagttattgaaaacaaacttgatgagcttgtttacggtaaatctattactgacccttgtattcactggaacgacacgcttaagatgctcgatatgctagcggatgccgttaaaacagcacaacgctaa

SEQ ID NO: 75703 - protein, 352 aa, Photobacterium sp. SKA34
MPMKTDELRTVSLGLMPTPAEIEATSPMTDEIAAHVDHSRKQIEAILTGQDSRLLVIVGPCSIHDTDAAVDYAKRLVAVQETYKDQLFIVMRTYFEKPRTVVGWKGLVTDPHLDGSLDLVTGLEKARKLLIDINSLGLPTATEFLDMITGQYLADLISWGAIGARTTESQIHREMASALSCPVGFKNGTDGNTKIAIDAIRATRESHLFCSPAKNGQMTIYRTSGNPYGHIILRGGKMPNYHAEDVATACEALAEFELPQRLIVDFSHGNCQKQHKRQLDVTAEICEQLKNSSQSIAGIMAESFIEEGNQAVIENKLDELVYGKSITDPCIHWNDTLKMLDMLADAVKTAQR

SEQ ID NO: 75704 - DNA, 1071 bp, Photobacterium sp. SKA34
  CDS (1)..(1071): transl_table=11
atgcaaaaagaccaactcaataacgttcatatcgaagatgaatctgttcttattacgccagcaaagttgaaacaagacttatctgtctctaaacaagcgttgtcttttgtggagcaatcacgtcaaaccatcgcagatattattcataagcgcgatcatcgtttattggtcgtgtgtgggccttgttctattcatgatgttgagcaagcaaaagcttacggacataagttaaagctattagcagaagagcttagcgatcaactctatattgttatgcgagtttattttgaaaagccacgcactactgtggggtggaaaggtttaattaacgacccatatattaatggttcatttgctgttgaagaaggcttgcatattggtcgtcagctattagtcgacttagtggaagatggtattcctttagcgaccgaagcacttgatcccattagtccgcaatatttaggtgatttatttagttgggctgcaattggtgcgcgtacgacagagtcacaaacccaccgtgaaatggcaagtggactatcaatgcctgtaggctttaaaaatggtactgatggtagcttggcaacagcgattaatgcgatgcaagcggctgcgtcaggccataaatttatgggaattaaccctgatgggcaagttgctctgctaaatactgaaggtaatcctgatggtcatgttattttacgtggcggtaagcaaactaattacgattcagtgtcagttagagagtgtgaaaacgagatggtcggatccggtctttcaccagccttaatggtagactgtagccacgctaattctcgtaaagattatcgtcgccagcctttggtagctgaagatgtaattcatcagatccgcgaaggaaatcagtctattataggattgatgatcgaaagccaccttgatgaagggaaccagagtgccgatcttcctcgagatgaaatgaagtacggtgtatcgataactgatgcatgtattggttgggacaccactgagaaactactgcgtcaggcacataaggaattagtgccgttcttacaagatcgaattaaataa

SEQ ID NO: 75705 - protein, 356 aa, Photobacterium sp. SKA34
MQKDQLNNVHIEDESVLITPAKLKQDLSVSKQALSFVEQSRQTIADIIHKRDHRLLVVCGPCSIHDVEQAKAYGHKLKLLAEELSDQLYIVMRVYFEKPRTTVGWKGLINDPYINGSFAVEEGLHIGRQLLVDLVEDGIPLATEALDPISPQYLGDLFSWAAIGARTTESQTHREMASGLSMPVGFKNGTDGSLATAINAMQAAASGHKFMGINPDGQVALLNTEGNPDGHVILRGGKQTNYDSVSVRECENEMVGSGLSPALMVDCSHANSRKDYRRQPLVAEDVIHQIREGNQSIIGLMIESHLDEGNQSADLPRDEMKYGVSITDACIGWDTTEKLLRQAHKELVPFLQDRIK

SEQ ID NO: 75706 - DNA, 1068 bp, Oceanospirillum sp. MED92
  CDS (1)..(1068): transl_table=11
atgacagatacacgcgtagaagatttaaacatcgaatcaaacacccccctggtatcacccgatgcccttaaagcagaaatgcctatttctgaagcagctgctgaagctgttatgcaaggccgcgctgtaatacgcgatattttagatcgcaaagacccgcgccttttcgttgttgtaggcccatgctctattcacgatactgaagcagctattgcctatggcaagaagctacaagcgcttcaggaaaaggttaaagattcgctctatcttgtcatgcgtgtgtattttgaaaagccaaggacgaccgtaggctggaaaggtctgattaacgacccacacctaaacgactcttttgaaatcgaagagggcctgcacattgcgcgtaagctgctgatcgatctatctgaaatgggattaccgctcgctacagaagcacttgatccgatctctccgcagtacatgcaggacctgatctcctggtctgctattggcgcacgtaccaccgagtcacaaacacaccgtgagatgtcttctgggctgtcatgcgcagtaggattcaaaaacggtactgatggtggtcttgatgttgctacaaacgccctgaaatctgtgagcgcccctcaccgcttccttggtatcaatgaagagggtcaggtttctattgttcacactaaaggtaaccagtatggccatgttgtactgcgtggcggtggcggaaagccgaattacgattcagtaaatgttgcactttgtgagcaggcgcttgataaagcaggcctggcaaacaacatcatgattgattgcagtcatgcaaactcaagtaaagaccctgcccttcagccgctggttgctgagaatgccgcaaaccagattattgaaggcaacaaatctatcgttggtctgatgattgaaagtaacctgggctggggtaatcagtctattccggataaccttgaagatctggaatatggcgtatccgttactgatgcatgtattgactgggatactaccgagaagtgcctggttgagatgaatgaaaaactaaaagacgcgctgaaaagccgttaa

SEQ ID NO: 75707 - protein, 355 aa, Oceanospirillum sp. MED92
MTDTRVEDLNIESNTPLVSPDALKAEMPISEAAAEAVMQGRAVIRDILDRKDPRLFVVVGPCSIHDTEAAIAYGKKLQALQEKVKDSLYLVMRVYFEKPRTTVGWKGLINDPHLNDSFEIEEGLHIARKLLIDLSEMGLPLATEALDPISPQYMQDLISWSAIGARTTESQTHREMSSGLSCAVGFKNGTDGGLDVATNALKSVSAPHRFLGINEEGQVSIVHTKGNQYGHVVLRGGGGKPNYDSVNVALCEQALDKAGLANNIMIDCSHANSSKDPALQPLVAENAANQIIEGNKSIVGLMIESNLGWGNQSIPDNLEDLEYGVSVTDACIDWDTTEKCLVEMNEKLKDALKSR

SEQ ID NO: 75708 - DNA, 1068 bp, gamma proteobacterium HTCC2207
  CDS (1)..(1068): transl_table=11
atggattcacaggctgtagaaaatattaatatcgaaccaccagtggttctgattaccccagcggaattgaagagtgaaatcccgctgagtgacaaagcccgagaggtcatctctaagggtcgtaaaaatatcgagaacatactagagcgcaaagatcatcgcctaatggttgtagtgggtccctgctctatccacgatcttaaggccgctcatgactatgccaacagactcaaagccctagaagagaaagtcggcgatacactgctgattgttatgcgcgtgtattttgaaaagccccgcaccaccaccggttggaaaggcttgatcaacgatccatttatgaatgactcatttaagattaccgatggtctgcatattggtcgtcagctgctgcacgatattttggaaattggcctgcccactgccaccgaagcactggatcccatttcacctcagtatctgcaagacttgatagcctggtcggcgattggtgcacgcaccacagaatctcagactcaccgagagatggcctctggcctgtcctcgtctattggttttaaaaatggtaccgatggcagcttgaccgtagccatcaatgccttgcagtcagtttcaagcccacaccgttttttaggcattaattcagacggcaatgtctcgattgttacgactaaaggcaatccctacgcccatgtcgttttgcgcggcggcaatggcaagcctaactatgattcggttagcgtttcaatttgcgagcaggagctcgttgccgccggtatcgatgccaatatcatggttgactgcagtcacgccaattccaataaagaccacaatctgcagcctttggtgctggataatgttgccaaccagatcgtcgaaggcaataagtcaattattggtgtgatgctggagagtaatatcaatgcgggtaatcagaagctctcaagtaatccagatgatatggactacggtgtctcagtaactgatgcctgtatcgactgggaaaccacggaaagaacattgatctcaatggcagataaattacgcgatgttttaaaaacccgctaa

SEQ ID NO: 75709 - protein, 355 aa, gamma proteobacterium HTCC2207
MDSQAVENINIEPPVVLITPAELKSEIPLSDKAREVISKGRKNIENILERKDHRLMVVVGPCSIHDLKAAHDYANRLKALEEKVGDTLLIVMRVYFEKPRTTTGWKGLINDPFMNDSFKITDGLHIGRQLLHDILEIGLPTATEALDPISPQYLQDLIAWSAIGARTTESQTHREMASGLSSSIGFKNGTDGSLTVAINALQSVSSPHRFLGINSDGNVSIVTTKGNPYAHVVLRGGNGKPNYDSVSVSICEQELVAAGIDANIMVDCSHANSNKDHNLQPLVLDNVANQIVEGNKSIIGVMLESNINAGNQKLSSNPDDMDYGVSVTDACIDWETTERTLISMADKLRDVLKTR

SEQ ID NO: 75710 - DNA, 1053 bp, Oceanobacter sp. RED65
  CDS (1)..(1053): transl_table=11
atgcacgcacaaactgacgatttacgcattcgaaatgttaaagaattgttaccccccatcgcgttactcgaaaaattcccattgtctagtgaggcggccgatacagtagcccaggctcgtagcgacatacaatctcgtttacaaaacaaagatgatcgattacttgtgattattggtccatgttcgattcatgaccctcaagctgcacttgagtacgctgggcgcctaatccgcatgcgtgagaaatacaaagatcaattaaatatcgtcatgcgtgtgtattttgaaaagcctcgtactactgtgggctggaaaggcttaattaatgatccgtacttggataatagttttgccatcaacgatggtttgcgtttggcgcgaaagctattgttggatctcaatgatatgggcatgcccgcagcaaccgaatttctcgatatgattacgccccagtacatcgcagacttaatctgttggggagccattggtgcgcgtacgacagaatctcaagtgcatcgtgaattggcatccggtttatcctgcccagtcggttttaaaaacggtactgatggcacaagtaaaattgctttggatgccattggcgcagctgctgcttctcaccattttttatcagtgacaaagtttggtcatagtgcgattgttgaaacggaaggaaatcctgattgccacatcattttacgtggtggtaaagagccaaactatgatgaagagagcgtgacggcaattgctaaagatttagaaaagaaaaacctgccgcagaatattatggtggacttcagtcatgccaatagtcaaaagcagtttaaaaagcaaatggaagtggctacagatgttgctcgtcagatagcgaagggcgatagtccaattatgggggtgatggtggaaagtcacctagaagaaggacgtcaggatttagaagacaaaggcagtttacactatggtcaaagcatcactgatgcatgtatcggttggccagatacggaagagctgttggcgacgctggcgaacgctgtagagcaatctcgtaaatag

SEQ ID NO: 75711 - protein, 350 aa, Oceanobacter sp. RED65
MHAQTDDLRIRNVKELLPPIALLEKFPLSSEAADTVAQARSDIQSRLQNKDDRLLVIIGPCSIHDPQAALEYAGRLIRMREKYKDQLNIVMRVYFEKPRTTVGWKGLINDPYLDNSFAINDGLRLARKLLLDLNDMGMPAATEFLDMITPQYIADLICWGAIGARTTESQVHRELASGLSCPVGFKNGTDGTSKIALDAIGAAAASHHFLSVTKFGHSAIVETEGNPDCHIILRGGKEPNYDEESVTAIAKDLEKKNLPQNIMVDFSHANSQKQFKKQMEVATDVARQIAKGDSPIMGVMVESHLEEGRQDLEDKGSLHYGQSITDACIGWPDTEELLATLANAVEQSRK

SEQ ID NO: 75712 - DNA, 1068 bp, Oceanobacter sp. RED65
  CDS (1)..(1068): transl_table=11
atgaccaacaatcgggttgaagatttaaatattgagcgtacagaaacgcttaccactccagaacagcttaagcaaagcttaccaatctcggaaaaggccctgcaatcagttgaggccggccgcgaggcagtaaaaaacatcttagacaggaaagaccctcgcttgtttttggtgcttggcccctgctctattcacgatgtaaaagcagcaaaagaatatgctgaacgcttaaaagatctcgcagccaaagtaagcgacactcttctgcttgtaatgagagtttatttcgagaagcctcgcaccactgttggatggaaaggattaattaatgatccgtatttaaacgacagcttcaaaattgaagatggtctccacatctcgcgcaagcttctaattgatcttgcagagcttggcctgcctctttcaaccgaagcacttgaccctatttcaccacagtatatgcaggatctaattagctggtctgctattggggcacgcacaactgagagccaaactcacagagaaatggcaagcggcctttcttgtgccgtcggattcaaaaatggaaccgatggaagcctaacggtggcgatcaatgctcttcagtccaccgccaaccctcaccgttttctggggatcaatggtgatgggcaggtaagtgtagtcaccacaaaaggtaatgagtatgggcacgtggtgctgcgcggcggcggcggcaaacctaactacgattctgttagtgttgcactctgcgagcaagaactggagaaagccggagttgccagcaatatcatggtagattgcagtcacgcaaactcaaacaaagacccaggtcttcaaccgctagttatggataatgtgacaaatcaaattctagagggaaacaagtcaatcgttggattaatgattgagtcaaatcttcaatttggcaatcaaaaaatcccctcaaatcttgacgatctagaatacggcaagtccatcactgatggatgcatttcttgggagcaaaccgaagaagctgtgttaaagatgcgcgataaattgaaagacgttattgccaagcgataa

SEQ ID NO: 75713 - protein, 355 aa, Oceanobacter sp. RED65
MTNNRVEDLNIERTETLTTPEQLKQSLPISEKALQSVEAGREAVKNILDRKDPRLFLVLGPCSIHDVKAAKEYAERLKDLAAKVSDTLLLVMRVYFEKPRTTVGWKGLINDPYLNDSFKIEDGLHISRKLLIDLAELGLPLSTEALDPISPQYMQDLISWSAIGARTTESQTHREMASGLSCAVGFKNGTDGSLTVAINALQSTANPHRFLGINGDGQVSVVTTKGNEYGHVVLRGGGGKPNYDSVSVALCEQELEKAGVASNIMVDCSHANSNKDPGLQPLVMDNVTNQILEGNKSIVGLMIESNLQFGNQKIPSNLDDLEYGKSITDGCISWEQTEEAVLKMRDKLKDVIAKR

SEQ ID NO: 75714 - DNA, 1062 bp, Synechococcus sp. RS9916
  CDS (1)..(1062): transl_table=11
atgaccaccacttccgatctccatgtggtggagacccgtcccctgctcgctcccgctctgttgcatgcggatctgccgattgaccctggagcggcggatacggtggccggcgcccgccgccggattcaatccatcctcagcggtgaagatcgccgcatgctggtgatcgtcggtccttgttccgtgcacgacgtggaggcggcacgggagtacgcccgtcgtctggcaccgctgcgcgaacgccacatcaacgagctggaagtggtgatgcgggtctatttcgagaagccccgcaccacggtgggctggaagggtctgatcaatgacccccacctcgatggctcttacgacatcaataccgggctgcgtctgtcccgttcattgctgctggatctggcccgcgatggcatgcccaccgccacggagctgctcgacccagtggttccccaatacatcgccgacttgatcagctggaccgccatcggcgcccgcaccacggaaagccagacccaccgggagatggcatctgggctttcgatgccgatcggctacaagaacagcaccgatggcagcgccaccatcgccatcaatgcgatgcaggcggcctccaagccccaccatttcctgggcatcaaccacagcggtcaggcctcgatcgtgagcaccaccggcaatccccatggccatctggtgctgcgtggtggcaatcgcggcaccaatttccatctggaggcggtggaatctgcggcagccgagctggcgaatgccggtctggtggatcgcttgatggtggattgcagccatggcaattccaacaaggactatcgccgccagggcgaagtgctgcaggcggtcgctgagcaagtgcagcagggctccacccatttaatgggcgtgatgctggagagccatctggtggaaggcaaccagaagctcaatgctgatcgtgcggcgatgacctacggccagagcgtgaccgacgcttgcatcagcctcgacaccacggctgggctgctggagcagctggcttctgcggttgccgctgcgcctgtggctgtctga

SEQ ID NO: 75715 - protein, 353 aa, Synechococcus sp. RS9916
MTTTSDLHVVETRPLLAPALLHADLPIDPGAADTVAGARRRIQSILSGEDRRMLVIVGPCSVHDVEAAREYARRLAPLRERHINELEVVMRVYFEKPRTTVGWKGLINDPHLDGSYDINTGLRLSRSLLLDLARDGMPTATELLDPVVPQYIADLISWTAIGARTTESQTHREMASGLSMPIGYKNSTDGSATIAINAMQAASKPHHFLGINHSGQASIVSTTGNPHGHLVLRGGNRGTNFHLEAVESAAAELANAGLVDRLMVDCSHGNSNKDYRRQGEVLQAVAEQVQQGSTHLMGVMLESHLVEGNQKLNADRAAMTYGQSVTDACISLDTTAGLLEQLASAVAAAPVAV

SEQ ID NO: 75716 - DNA, 1077 bp, Vibrio sp. Ex25
  CDS (1)..(1077): transl_table=11
atgcagaaaagtgagttgagcaatattaatattagcgaagagcaggttcttattaccccagaggagctaaaaaccaagcttcctttgagtgaaaaagcgcgccgctttattcaagagtctcgccaaactatcgctaatattattcataaaaaggatcatcgcctgctggttgtatgtggtccatgttctatccacgacgtggaagcggcgaaggattacgcaaaacgtcttaaagcgctctctgaacaactaagtgaccaactgtatattgttatgcgtgtttactttgaaaaaccacgcaccacggtcggctggaaagggctgattaacgatccgcacctcgatggcagcttcgatattgaacatggtctgcatgttggacgcgaactgctagtggaattggcagagatggaaatcccgctcgcgactgaagctctggacccaattagcccacaatacttggcggatacttttagttgggctgcgatcggcgcacgtactacggagtcacaaactcaccgtgaaatggcaagtggcctgtctatgccaatcggttttaaaaatggcacggatggcagtttggcaaccgcaatcaatgcgatgcaagctgcgtcttctagccaccgttttatgggaattaaccgtgagggacaagtagcgctattgaccactcagggtaatgctaatgggcatgtgatcttacgtggcggcaagcaaactaactacgactcagtgtcagttactgagtgtgagcaagaaatggcgaaatctggccttgatgcatcattaatggtggattgtagtcacgccaactcacgtaaagattaccgtcgccagccattagtcgcagaagatgttattcaccaaatccgtgaaggtaataagtccattatcggccttatgattgaaagccatatcaatgaaggaaatcaatcttctgacttagctctcgaagaaatgaaatacggtgtatctatcactgacgcatgtatcaattgggattcaactgaggcactattacgtcatgcacatgaagagctagtgcctttcttagaaaatcgtccaaaggctaattaa

SEQ ID NO: 75717 - protein, 358 aa, Vibrio sp. Ex25
MQKSELSNINISEEQVLITPEELKTKLPLSEKARRFIQESRQTIANIIHKKDHRLLVVCGPCSIHDVEAAKDYAKRLKALSEQLSDQLYIVMRVYFEKPRTTVGWKGLINDPHLDGSFDIEHGLHVGRELLVELAEMEIPLATEALDPISPQYLADTFSWAAIGARTTESQTHREMASGLSMPIGFKNGTDGSLATAINAMQAASSSHRFMGINREGQVALLTTQGNANGHVILRGGKQTNYDSVSVTECEQEMAKSGLDASLMVDCSHANSRKDYRRQPLVAEDVIHQIREGNKSIIGLMIESHINEGNQSSDLALEEMKYGVSITDACINWDSTEALLRHAHEELVPFLENRPKAN

SEQ ID NO: 75718 - DNA, 1050 bp, marine gamma proteobacterium HTCC2143
  CDS (1)..(1050): transl_table=11
atgaccaatcaaaacagtaccgacgacgttcatattgccgaaatgcgacctctagtctctcctgctattctgatggaagagttgcccttgggcgaagagcctgcttcgatgatacaaaaaaaacgcgctgatatcggccgcatatttaagggccaagacgaccgcttattagtcgttgtaggcccctgctccattcatgacccagaagcggccattgaatatgctacgcgcctgcgggacattataggattatttgattccgagctgctgattgtcatgcgcgtctatttcgaaaagccccgcactaccgtgggctggaagggactcatcaatgatccgcacttggatggcagcttcaatatcaatcaaggactccgggtagcaagacatttgctgcttgatgtggccgcgatgggcattcctgccggctgcgaatttctagatacaatttcaccgcagttttttgctgatctagttgcctggggcgctattggcgcgcgtaccactgaaagtcaggttcatcgtgaattagcatctgggctttcaatgccagtggggtttaaaaatggaactgacggcagtatacaaattgcaatagacgccattggtgctgcctctcatcctcaccactttctttccgtcaccaagcaaggtatttccgccattgtcaccactagcggtaacaccgactgccatattatcttgcgcggctctaataagggtcccaactatgagaaagaagccgtcaccgcggcaactgacatgttggtaaaaagcgggttgccacctcatctgatggttgattgcagccatggaaacagcagcaaagacttcagcagacagcctattgtcgcagcggatatcgccgatcaaatcgccgccggcaatgctgccatcgccggcgtaatgattgaaagcaatttaattgaaggcaaccaaaaaaacccagatatctacggtgtcagcattaccgatgcttgtatttcctgggaaaccaccgtgactactttggaaacattggctgctgcggtaaaggcgagacgaggctaa

SEQ ID NO: 75719 - protein, 349 aa, marine gamma proteobacterium HTCC2143
MTNQNSTDDVHIAEMRPLVSPAILMEELPLGEEPASMIQKKRADIGRIFKGQDDRLLVVVGPCSIHDPEAAIEYATRLRDIIGLFDSELLIVMRVYFEKPRTTVGWKGLINDPHLDGSFNINQGLRVARHLLLDVAAMGIPAGCEFLDTISPQFFADLVAWGAIGARTTESQVHRELASGLSMPVGFKNGTDGSIQIAIDAIGAASHPHHFLSVTKQGISAIVTTSGNTDCHIILRGSNKGPNYEKEAVTAATDMLVKSGLPPHLMVDCSHGNSSKDFSRQPIVAADIADQIAAGNAAIAGVMIESNLIEGNQKNPDIYGVSITDACISWETTVTTLETLAAAVKARRG

SEQ ID NO: 75720 - DNA, 1098 bp, marine gamma proteobacterium HTCC2143
  CDS (1)..(1098): transl_table=11
atgagcagtgacagcaataacgccaacaacgaaaaactggttgataatcttaatgtggaatcacaggaaatactgattacacctgagcagctcaaaacagccctacccatgtcggccaaagccgctaatagcattgccgaaagccgtgaagtcattcgcaatatactcgacggcaatgacccgagactttttgtggtggttggcccctgctcgattcatgatgtcgacgccgcgatagattatgctcaccgcttgaaagcgcttgctgaggaagttgccgacacgttatacattgtcatgcgtgtctattttgaaaagccccgcacaacggttggctggaaaggtctaattaatgacccctatttaaacgacacttttaaaatacaagaaggtcttcacattggacgtaaattactgctggatatcgcagatataggccttccgacttcgacggaagcgctggacccgatttcaccacaatacatgcaagactgtattgcctggtcagcgattggcgcacgaaccaccgaatcacaaacacaccgtgaaatggccagcggcctgtcttctgccgtcggatttaagaatggcactgatggcggacttgatgttgcgatgaatgctattcaatcggctcaaaacccccaccgctttctcggcatcaatggtgagggacaggttgctattattcacacgaaaggcaacccttatgcccacgtagttttgcgcggcggatcaaatggacccaactttgattcggtccatattgaattgaccgaacaggcattaagcaaagcaggtgctgccaataatattatggttgattgctctcacgccaactccagcaaggaacctgagttgcaaccgaaagttatggaagatatcagcaatcaaatcgttgttggtaaccaatcaattgtcggtttgatgattgagtccaacatcaataaaggcaaccaatcgataccagctgatctgacgaagctcagctacggcgtttctgtaacagatggctgtattgattgggataccacggcaacagcgattcgaaacatgcgcgaccgactaaaagacgtgcttcccagccgaaaaaactaa

SEQ ID NO: 75721 - protein, 365 aa, marine gamma proteobacterium HTCC2143
MSSDSNNANNEKLVDNLNVESQEILITPEQLKTALPMSAKAANSIAESREVIRNILDGNDPRLFVVVGPCSIHDVDAAIDYAHRLKALAEEVADTLYIVMRVYFEKPRTTVGWKGLINDPYLNDTFKIQEGLHIGRKLLLDIADIGLPTSTEALDPISPQYMQDCIAWSAIGARTTESQTHREMASGLSSAVGFKNGTDGGLDVAMNAIQSAQNPHRFLGINGEGQVAIIHTKGNPYAHVVLRGGSNGPNFDSVHIELTEQALSKAGAANNIMVDCSHANSSKEPELQPKVMEDISNQIVVGNQSIVGLMIESNINKGNQSIPADLTKLSYGVSVTDGCIDWDTTATAIRNMRDRLKDVLPSRKN

SEQ ID NO: 75722 - DNA, 1077 bp, marine gamma proteobacterium HTCC2080
  CDS (1)..(1077): transl_table=11
atgtccaaaccccatgttcacaatgttaacgtcgccgcccagaaaattctggtagcacctgccgccttacgcgacatagttggcgtcgatgacgcactacaagatcgtgtcgctaagaccagagaggcgatcgaaaacatcctcgatagaaaagaccatcgtcttatggttgtcgtaggtccttgctccatccacgatgttgatgccgccatggaatatgctcataggcttaagcgtgtggccgaacaggtcggcgatacgctgcttttggtcatgcgcgtttattttgagaagccccgaacgacggttggttggaagggactgatcaatgaccctcatctcgatgattcctttgacattgaagcgggccttacgattgggcgctcacttttgaaagacattcaacagctgggcttacccacggctaccgaagcgctggacccgatcaccccacagtacttacaagacttaattagctggtcagcaataggcgctagaacaaccgaatctcaaacccatcgagaaatggccagcggcttgtcttcagcggttgggttcaaaaatggtaccgatggcggacttgaagttgccgtcaatgccatgaaatcagtatgtaacccccatcgttttctgggtattaacagcgaaggaaaagtctcggtatttgagactcgaggcaatccctatggccatgtcgttttaagaggtggttctgctggccccaactacaacagtcaacatattgggctgtgtgaagaggcactcgaacaagccgccttgcctgccaacatcatggttgattgcagtcatgccaataccgaaaaacaacccgaccgccagcccgcagtggctgcagacgtaactgagcagattatcgcaggcaatcgatcaatcattggtttaatgctcgagagtaaccttaaagccggcaaccagaaaattcccagcaacctcgatgatctggagtacggggtttcagtcaccgatggctgcattgattgggacaccacagaaaccttgcttgtggatattgcgaataaactgcggaacgttctgcctgggcgcgctacggcttaa

SEQ ID NO: 75723 - protein, 358 aa, marine gamma proteobacterium HTCC2080
MSKPHVHNVNVAAQKILVAPAALRDIVGVDDALQDRVAKTREAIENILDRKDHRLMVVVGPCSIHDVDAAMEYAHRLKRVAEQVGDTLLLVMRVYFEKPRTTVGWKGLINDPHLDDSFDIEAGLTIGRSLLKDIQQLGLPTATEALDPITPQYLQDLISWSAIGARTTESQTHREMASGLSSAVGFKNGTDGGLEVAVNAMKSVCNPHRFLGINSEGKVSVFETRGNPYGHVVLRGGSAGPNYNSQHIGLCEEALEQAALPANIMVDCSHANTEKQPDRQPAVAADVTEQIIAGNRSIIGLMLESNLKAGNQKIPSNLDDLEYGVSVTDGCIDWDTTETLLVDIANKLRNVLPGRATA

SEQ ID NO: 75724 - DNA, 1071 bp, marine gamma proteobacterium HTCC2080
  CDS (1)..(1071): transl_table=11
atgccttcaattaccgatgatactcgtatttcgtccctcaaagagctggctgcgcccagtgatttgctgaatcagatacccctcgatgagaccgttgctactcacgtgacgcaggccagaggagcaatacataacgtactgaaaggtgacgatgaccgtcttgtagtggtggtgggtccctgcagtattcatgacgtagatgcggcgattgattacggcaggcgcctccagcccctcgctgaaaaattgagtgatcgcctgctagttgttatgcgggtgtattttgaaaagcccagaacgacggtagggtggaaaggattaattaatgatcccgatctagacgattcctttcaaatcaacaagggtcttcgtttggctaggcaactgttggtagacctcaataaattggggttgcccacaggcaccgagtatcttgatcttatatctcctcaatatttcgctgatctagtgagttggggtgcaataggtgcaagaacaacggagagtcaaacccatagagagctcgcctcggggctgtcatgccctgttggctttaaaaatggtaccgatggagatgtgcaaatggcggtcgatgcaattggtgcagcgcgtcaaccccatcattttctttctgttactaaagaggggcagtcggcaattttcgaaacactgggtaacgaagattgtcatgtgattctgcgcggcggacataagccaaactacgacatgtttgcggtcgacgatgcccgggcgctgctgggcaaagcaggtttgtccgatcgtttaatgattgacgcgagccacgctaacagccgcaagcaaccggagcgtcagcttgaagttctggccaatatcggtcaacaggtagcgggtggaaacgaggccattattggcgtcatgatcgaaagctttctggaggctggtcgtcagaatgttgttgagggtggcacactgatctacggccaaagcattactgatccttgtatcgattgggctgctactgaagatattttgatccgtctcgccgatgacgtggcccaaagacgcctgaaacagggaggtagttcgtga

SEQ ID NO: 75725 - protein, 356 aa, marine gamma proteobacterium HTCC2080
MPSITDDTRISSLKELAAPSDLLNQIPLDETVATHVTQARGAIHNVLKGDDDRLVVVVGPCSIHDVDAAIDYGRRLQPLAEKLSDRLLVVMRVYFEKPRTTVGWKGLINDPDLDDSFQINKGLRLARQLLVDLNKLGLPTGTEYLDLISPQYFADLVSWGAIGARTTESQTHRELASGLSCPVGFKNGTDGDVQMAVDAIGAARQPHHFLSVTKEGQSAIFETLGNEDCHVILRGGHKPNYDMFAVDDARALLGKAGLSDRLMIDASHANSRKQPERQLEVLANIGQQVAGGNEAIIGVMIESFLEAGRQNVVEGGTLIYGQSITDPCIDWAATEDILIRLADDVAQRRLKQGGSS

SEQ ID NO: 75726 - DNA, 1062 bp, Pseudomonas putida GB-1
  CDS (1)..(1062): transl_table=11
atgcaagcttccaacctcgccctgcctctgacccagccgcaagcggccaacaccaccgtcagcaaacgcctgcccagcccgcacctgctcaagcagcagatgccactgcccagcgaactggcccagcaagtccaggcccatcgccaggctatccgcaacatcctcgaaggccgcgatcagcgcctgctggtcatcgtcggcccctgctcgattcacgaccctcgctcagccctggaatacgccgaccgcctggccgccctcagccgcgaagtcgatgacaagctgctgctggtgatgcgcgcctacgtcgaaaaaccgcgtaccacagtgggttggaaaggcctggcctacgacccgcacctggatggcagcgacgacatgcactcggggcttgccttgtcccgtgggctgatgctgagcatgatcgagcgcggcctgcccatcgccaccgagctgttgcaaccgatggccgccggctacttcgatgacctgctggcctgggccgcgattggcgcacgcaccaccgaatcgcaaatccaccgcgaaatggtcagtggcctggagctgccggtgggcttcaagaacggcaccgacggcggtattgccatcgccagcgacgccatgcgcagcgctgcccactcgcaccgccacttcggcatggatgcgcagggccacccggcaatcatcgataccctgggcaacccggacacacacctggtactgcgtggcggccacaaaggcccgaactacgatggcgacagtatcgccatggcccgccaggcattggccaaagccggcctgcaggcacggatcatggtcgattgcagccacgccaacagcggcaaggacccggcgcgccagccggccgtcttcaatgatgttttggcgcagcgtctggccggcgaccgttcgctggtcggcgtgatgatcgaggggcacctgttcgagggttgccaggcgctgggcaagggcgcactgaaatacggcgtgtcgattaccgatggctgcctgggctgggcctcgaccgaatccctgttgcgcgaggcggcacaaaaactctag

SEQ ID NO: 75727 - protein, 353 aa, Pseudomonas putida GB-1
MQASNLALPLTQPQAANTTVSKRLPSPHLLKQQMPLPSELAQQVQAHRQAIRNILEGRDQRLLVIVGPCSIHDPRSALEYADRLAALSREVDDKLLLVMRAYVEKPRTTVGWKGLAYDPHLDGSDDMHSGLALSRGLMLSMIERGLPIATELLQPMAAGYFDDLLAWAAIGARTTESQIHREMVSGLELPVGFKNGTDGGIAIASDAMRSAAHSHRHFGMDAQGHPAIIDTLGNPDTHLVLRGGHKGPNYDGDSIAMARQALAKAGLQARIMVDCSHANSGKDPARQPAVFNDVLAQRLAGDRSLVGVMIEGHLFEGCQALGKGALKYGVSITDGCLGWASTESLLREAAQKL

SEQ ID NO: 75728 - DNA, 1077 bp, Pseudomonas putida GB-1
  CDS (1)..(1077): transl_table=11
atggctgatttaccgatcgatgacttgaacgttgcctccaacgagaccctgatcacccctgatcagctcaagaaggaaatccccctcagcgccaaggccctgcagaccgtgactgccggccgtgaagtggtgcgcaatattctcgacggcaaggaccatcgcctgttcgtcgtggtcggcccttgctcgatccacgacatcaaggccgcccacgagtatgccgagcgcctgaaagtgctggccgaagaagtgtccgatacgctgtacctggtcatgcgcgtgtacttcgaaaagccacgcaccaccgtcggctggaaaggcctgatcaacgacccatacctggatgactcgttcaagatccaggacggcctgcacatcggccgccagctgctgctggacctggctgaaatgggcctgccgactgccaccgaggcgctcgacccgatttccccgcaatacctgcaagaccttatcagctggtcggccattggtgctcgcaccaccgagtcgcaaacccaccgcgagatggcctcgggcctgtcctcggcggtcggcttcaagaacggcaccgacggcggcctgaccgttgccatcaacgctttgcagtcggtgtccaagccgcatcgcttcctgggtatcaaccaggaaggcggtgtatcgatcgttaccaccaagggcaacccttacggccacgtggtactgcgcggcggcaacggcaagccgaactacgactcggtcagcgttgccctgtgcgaacaggacctggccaaggccaagatcaaggccaacatcatggtcgactgcagccatgccaattccaacaaggacccggccctgcaaccgctggtcatggaaaacgttgccaaccagatcctcgaaggcaaccagtcgatcatcggcctgatggtcgaaagccacctgaactggggctgccagtcgataccgaaaaacctggacgagctgcagtatggtgtgtcgatcaccgacgcctgcatcgactggtcggctaccgagaagaccctgcgcagcatgcgtaccaagctgaaagatgtgctgccgcagcgcaagcgcggctaa

SEQ ID NO: 75729 - protein, 358 aa, Pseudomonas putida GB-1
MADLPIDDLNVASNETLITPDQLKKEIPLSAKALQTVTAGREVVRNILDGKDHRLFVVVGPCSIHDIKAAHEYAERLKVLAEEVSDTLYLVMRVYFEKPRTTVGWKGLINDPYLDDSFKIQDGLHIGRQLLLDLAEMGLPTATEALDPISPQYLQDLISWSAIGARTTESQTHREMASGLSSAVGFKNGTDGGLTVAINALQSVSKPHRFLGINQEGGVSIVTTKGNPYGHVVLRGGNGKPNYDSVSVALCEQDLAKAKIKANIMVDCSHANSNKDPALQPLVMENVANQILEGNQSIIGLMVESHLNWGCQSIPKNLDELQYGVSITDACIDWSATEKTLRSMRTKLKDVLPQRKRG

SEQ ID NO: 75730 - DNA, 1083 bp, Marinobacter sp. ELB17
  CDS (1)..(1083): transl_table=11
atgaatatgccattaagtgctgttgagaatccgatggagaatgccgtaaaaagcgccgtaaaacatgcggtaaaaattgccccagcccgtcgccgcgaggtggctttgcccacgcctgatcagttgcgcggagattttccgctagtagcgaagcttgaggcacaggttgaacatcagcgccaggcgattcgtaatatcctcaatggagcggacgaccgcctgctggtagtgatcgggccatgttccattcacgacgaggtggccgccctggaatacgcgcaaaggctgaaacagcttgcggcggatgttagtgaccgtatgttgattgtgatgcgcgcctacttggagaaaccccgcaccacagttggctggaaaggtctgttatacgatcctgaacgcagcgggcagggcgatttgcatcagggcttggtgcgctcgcggcaattgttgctgaatctggcggccaccggcctgccgctagccacggaagcgctgagcccgtttgctatggattatctgggagacctggtgagctggacggctattggtgcccgtaccacggagtcgcagctgcatcgcgaaatggccagcggcttgccaatgccggtgggttttaaaaatggcaccgacggcggcatcgcggtggccaccaatgccatgcagtccgcggcccacggccaccatcatccagggctgtctgccagaggcacgccggtcatgatttctacagagggcaacgctgacacccatttggttttacgtggcggtcgcggtatcaccaattatgacagtcacagcattgcccgcgcgacccatgcgctgcagcaggcgggcctgaatccggcggtgatggtggactgcagccacgataacgcctgcaagcaacacgagcgccagcaggagatagcccgcgatgtcgtcgcccaacggcgcgccggtaatcgccacatttgtgggctaatgttggaaagctttttacagccgggccgccagaacgacggcgctgaccttcagtacggttgctcgattaccgatccgtgcctgggatgggagcagacagaggctctgatccgctcactgtag

SEQ ID NO: 75731 - protein, 360 aa, Marinobacter sp. ELB17
MNMPLSAVENPMENAVKSAVKHAVKIAPARRREVALPTPDQLRGDFPLVAKLEAQVEHQRQAIRNILNGADDRLLVVIGPCSIHDEVAALEYAQRLKQLAADVSDRMLIVMRAYLEKPRTTVGWKGLLYDPERSGQGDLHQGLVRSRQLLLNLAATGLPLATEALSPFAMDYLGDLVSWTAIGARTTESQLHREMASGLPMPVGFKNGTDGGIAVATNAMQSAAHGHHHPGLSARGTPVMISTEGNADTHLVLRGGRGITNYDSHSIARATHALQQAGLNPAVMVDCSHDNACKQHERQQEIARDVVAQRRAGNRHICGLMLESFLQPGRQNDGADLQYGCSITDPCLGWEQTEALIRSL

SEQ ID NO: 75732 - DNA, 1077 bp, Marinobacter sp. ELB17
  CDS (1)..(1077): transl_table=11
atgtcaggcacgaaattagagaacctgaacgtggcgagccaggaaacattgatgccgcctgaaacacttaaacaagatctgccgcttacagacaaagcagccgccaccgtggcgaaaggtcgccaggatatatacaacattatggacggcaccgatcaccggctttttctggtgttaggcccctgctccattcacgatgttgatgctgccttggattatgcccgacgcctgaaaaagctggctgatgaagtaagcgatacactgttgattgtgatgcgggtctattttgaaaaaccccgcaccaccgtgggctggaaaggcctgattaacgatccccggctggacgacacctttgatattcagcagggcctccacatcggccgcaaactgcttattgatatcagcgaactgggcctgcccacggccaccgaggcgctagaccccatttccccgcagtatttacaagatgcgatttcctggtcggccattggtgcccgcaccaccgaatcgcaaacccaccgggaaatgagcagtggcttgtctatggccattggctttaaaaacggcaccgatggcaatctcgacgttgccgtaaacgccatgaaatccgtgtcacacccccacagctttctgggcataaaccagcaaggccaggttgccattattcgtaccaagggtaacaactacggccacgtggttctgcgcggtggtggtggcaaacccaattatgattcagtcaacgttgccctgtgcgaacgggctctagagaagtctggcctgcgaaaagccatcatggtggactgcagccacgccaactccagcaaagacccggctattcaacccctggtgatgaacgacgtgtctaaccagattctggacggcaacacctccatccagagcctgatgattgaaagcaacatcaactggggcaaccagtcgatcccgcagaatctggcagacttgaagtatggcgtatcggttaccgatgcctgtattgactgggaaaccaccgaaaaagccgttcacgacatgcgtcacaagctcaaagatgtgctgccaaaacgcgccagagcttaa

SEQ ID NO: 75733 - protein, 358 aa, Marinobacter sp. ELB17
MSGTKLENLNVASQETLMPPETLKQDLPLTDKAAATVAKGRQDIYNIMDGTDHRLFLVLGPCSIHDVDAALDYARRLKKLADEVSDTLLIVMRVYFEKPRTTVGWKGLINDPRLDDTFDIQQGLHIGRKLLIDISELGLPTATEALDPISPQYLQDAISWSAIGARTTESQTHREMSSGLSMAIGFKNGTDGNLDVAVNAMKSVSHPHSFLGINQQGQVAIIRTKGNNYGHVVLRGGGGKPNYDSVNVALCERALEKSGLRKAIMVDCSHANSSKDPAIQPLVMNDVSNQILDGNTSIQSLMIESNINWGNQSIPQNLADLKYGVSVTDACIDWETTEKAVHDMRHKLKDVLPKRARA

SEQ ID NO: 75734 - DNA, 1074 bp, Herbaspirillum seropedicae
  CDS (1)..(1074): transl_table=11
atgccgcgcactgacgatcttcgcatccgagaaatgaaagaactggtccccccctcgcatctcatccgcgaattcgcctgcaccgaaaaggtcgagcgcaccacggctgaagctcgcaccgcgctgcatcgcatcctgcatggccaggacgaccgcctgatggtcgtcatcggcccttgctccatccacgacaccaaggcggccatggaatatgctcgccgcctggtggtcgagcgcgagcgccacaagaatgagctggaaatcgtcatgcgcgtctacttcgaaaagccgcgcaccacggtgggctggaaggggctgatcaacgacccgtacatggacaacagcttccgcatcaatgacggtctgcgcgcggcccgtgagttgctgctcaacatcaacgagctgggcctgccggcaggcaccgagttcctggacgtgatcagcccgcaatacatcgccgacctgatcagctggggcgccatcggcgcccgcaccaccgagtcgcaggtgcaccgcgagctggcctccggcctgtcctgcccggtgggcttcaagaatggcaccgacggcaacgtcaagatcgccgtggacgccatcaaggccgcctcgcagccgcaccacttcctgtcggtgaccaagggcggccactcggccatcgtctccaccgccggcaatgaggattgccacatcatcctgcgcggcggcaagcagcccaactacgatgcccccagcgtggaagcagcctgccaggacatcgccaagagcggcctggcggcgcgcctgatgatcgacgcctcgcacgccaacagctccaagaagccggaaaaccagatcccggtctgcgccgacatcggtcgccagatcgccggtggcgacacccgcatcgtcggcgtcatggtggaatcgcacctggtcgccggccgccaggatctggtgccgggcaaggaactgacctatggccagtccatcaccgatggctgcatcaactgggaagaaagcctgcaagtgctgcaaggcctggccgattcggtcaagcagcgccgcctggtgggggatgagcgcgacgccgcctga

SEQ ID NO: 75735 - protein, 357 aa, Herbaspirillum seropedicae
MPRTDDLRIREMKELVPPSHLIREFACTEKVERTTAEARTALHRILHGQDDRLMVVIGPCSIHDTKAAMEYARRLVVERERHKNELEIVMRVYFEKPRTTVGWKGLINDPYMDNSFRINDGLRAARELLLNINELGLPAGTEFLDVISPQYIADLISWGAIGARTTESQVHRELASGLSCPVGFKNGTDGNVKIAVDAIKAASQPHHFLSVTKGGHSAIVSTAGNEDCHIILRGGKQPNYDAPSVEAACQDIAKSGLAARLMIDASHANSSKKPENQIPVCADIGRQIAGGDTRIVGVMVESHLVAGRQDLVPGKELTYGQSITDGCINWEESLQVLQGLADSVKQRRLVGDERDAA

SEQ ID NO: 75736 - DNA, 1089 bp, Amycolatopsis orientalis
  CDS (1)..(1089): transl_table=11
atgacaacatctactcccgccgccgcggtcgacctcgacaaccagaggatcgaccgcatagtcccattggtgacaccggccctgctgcaccatgaactgccgctcagcgccaaggcagccgacaccgtgcgacgaggtcgtgagaacgtccttcgcgtcctcgacggtacggatgaccggctgctcgtgatcactggaccgtgctccatccacgacccggccgcggccctcgactacgccgaccacctcgccacgatggccggccggttcactgacgacctcctgatcgtcatgcgcgtgtacttcgagaaaccgcgaacggtcggtggctggaaagggctcatcaacgacccccacctcgacggcaccggcgacgtgaaccacggcctgcgaatcgcccggcacctgttgctggagctcgccgaacgcggcctgcccgtcgcgtgcgagtggctggacacgaccatcccggcctacctcgccgacaccgtttcctggggcgcgatcggtgcccgcaccgtggaaagccaaaaccaccgcatgctcgccagcggtctgtccatgccggtcggcttcaagaaccgccgcgacggcgacatcaccgtggccatcgacgcgatccgcgctgcggcggcccgtcacgtcgttcctggcgtcgaccccggcggcttgcccgccatcctgcacaccgccggcaaccccgactgccatcttgttctgcgcggcggcaattccgcgcccaaccacgacgcctcgtctgtccacacagcactcaccgcgctgcaggacgccggtcttccccgccgggtcgtgatcgatgccagccatgacaacagccgcaaggaccaccaccggcaacctgttgtcgccgggcagatcgccgaccaggtcaagggcggccaacgcggcattgttggcgtgatgctcgaatccaacctccgcgccggccgccaggacctccgccccggccagcctctgacctacggccagtccatcacggacgcctgcatcgacatccccacgacgcagaccgttctgcagaccctcgccacggcaaccgcggctcggcggcgtctcagccagaactga

SEQ ID NO: 75737 - protein, 362 aa, Amycolatopsis orientalis
MTTSTPAAAVDLDNQRIDRIVPLVTPALLHHELPLSAKAADTVRRGRENVLRVLDGTDDRLLVITGPCSIHDPAAALDYADHLATMAGRFTDDLLIVMRVYFEKPRTVGGWKGLINDPHLDGTGDVNHGLRIARHLLLELAERGLPVACEWLDTTIPAYLADTVSWGAIGARTVESQNHRMLASGLSMPVGFKNRRDGDITVAIDAIRAAAARHVVPGVDPGGLPAILHTAGNPDCHLVLRGGNSAPNHDASSVHTALTALQDAGLPRRVVIDASHDNSRKDHHRQPVVAGQIADQVKGGQRGIVGVMLESNLRAGRQDLRPGQPLTYGQSITDACIDIPTTQTVLQTLATATAARRRLSQN

SEQ ID NO: 75738 - DNA, 1074 bp, Vibrio anguillarum
  CDS (1)..(1074): transl_table=11
atgaaatctctacataatgtgatgaacgcttcatcaatcactcctttacctaatctataccttctagaccaatcatcagaaaccgataatcaacgatcaatggccgttcaccaacaccgccaagacattcaaaatatcttgtcgggtcgtgactcaaggatgttggtgattattgggccatgttcaatccacgaccctgaggctgcaattgactatgcacaacgactcgcaaaggcacaaaaacagttcagcagcactctcaagttggtgatgagaacttattttgaaaaaccgagaacgcggactggctggaaaggatacatggttgaccctgatctcaacggtcaatttaacttactcaaagggctcagctctagccgtgaattactcaagtcagtcctagcgctgggtgtaccaacagcaactgagtttttagatacgcatatcgcaccgtatatcgcggaccttatttgttggggtgcggttggcgcaagaaccactgaatcacaaccgcatcgccaactcgcttcggcattgcactgccctattggttttaaaaatggtactgacggcaatacgaccattgcaatcgatgcgattcatgccgctaacgattcacatctgttgattatggcgggtgagaatggacaaccggttgcggtgcaaactcaaggtaatccatattgccatatcattttacgtggtggtgtcacgccaaactatgcaagtcacagtgttaaaagtgcggcttatcaattacaccatagccagctcagcagcaggctggtgattgactgcagccacggtaatagtgggaaaatcgctaagaatcaattggatgtaataaacaacatagcccagcaactgctgtctggagagcgccgcattgcgggggtaatgtgcgaaagctttttgcaaggcggtagccaagctttgaataaaggtccgctctgctacggccaatccatcactgatgagtgcttaagttgggaggatacaatgtgctttttaaatacgctcgatgatgcggtcgcaacacttcaacagcagcaatattgtcacgctccagtgtaa

SEQ ID NO: 75739 - protein, 357 aa, Vibrio anguillarum
MKSLHNVMNASSITPLPNLYLLDQSSETDNQRSMAVHQHRQDIQNILSGRDSRMLVIIGPCSIHDPEAAIDYAQRLAKAQKQFSSTLKLVMRTYFEKPRTRTGWKGYMVDPDLNGQFNLLKGLSSSRELLKSVLALGVPTATEFLDTHIAPYIADLICWGAVGARTTESQPHRQLASALHCPIGFKNGTDGNTTIAIDAIHAANDSHLLIMAGENGQPVAVQTQGNPYCHIILRGGVTPNYASHSVKSAAYQLHHSQLSSRLVIDCSHGNSGKIAKNQLDVINNIAQQLLSGERRIAGVMCESFLQGGSQALNKGPLCYGQSITDECLSWEDTMCFLNTLDDAVATLQQQQYCHAPV

SEQ ID NO: 75740 - DNA, 1074 bp, Vibrio anguillarum
  CDS (1)..(1074): transl_table=11
atgaaatctctacataatgtgatgaacgcttcatcaatcactcctttacctaatcaataccttctagaccaatcatcagaaaccgataatcaacgatcaatggccgttcaccaacaccgccaagacattcaaaatatcttgtcgggtcgtgactcaaggatgttggtgattattgggccatgttcaatccacgaccctgaggctgcaattgactatgcacaacgactcgcaaaggcacaaaaacagttcagcagcactctcaagttggtgatgagaacttattttgaaaaaccgagaacgcggacttgctggaaaggatacatggttgaccctgatctcaacggtcaatttaacttactcaaagggctcagctctagccgtgaattactcaagtcagtcctagcgctgggtgtaccaacagcaactgagtttttagatacgcatatcgcaccgtatatcgcggaccttatttgttggggtgcggttggcgcaagaaccactgaatcacaaccgcatcgccaactcgcttcggcattgcactgccctattggttttaaaaatggtactgacggcaatacgaccattgcaatcgatgcgattcatgccgctaacgattcacatctgttgattatggcgggtgagaatggacaaccggttgcggtgcaaactcaaggtaatccatattgccatatcattttacgtggtggtgtcacgccaaactatgcaagtcacagtgttaaaagtgcggcttatcaattacaccatagccagctcagcagcaggctggtgattgactgcagccacggtaatagtgggaaaatcgctaagaatcaattggatgtaataaacaacatagcccagcaactgctgtctggagagcgccgcattgcgggggtaatgtgcgaaagctttttgcaaggcggtagccaagctttgaataaaggtccgctctgctacggccaatccatcactgatgagtgcttaagttgggaggatacaatgtgctttctaaatacgctcgatgatgcggtcgcaacacttcaacagcagcaatattgtcacgctccagtgtaa

SEQ ID NO: 75741 - protein, 357 aa, Vibrio anguillarum
MKSLHNVMNASSITPLPNQYLLDQSSETDNQRSMAVHQHRQDIQNILSGRDSRMLVIIGPCSIHDPEAAIDYAQRLAKAQKQFSSTLKLVMRTYFEKPRTRTCWKGYMVDPDLNGQFNLLKGLSSSRELLKSVLALGVPTATEFLDTHIAPYIADLICWGAVGARTTESQPHRQLASALHCPIGFKNGTDGNTTIAIDAIHAANDSHLLIMAGENGQPVAVQTQGNPYCHIILRGGVTPNYASHSVKSAAYQLHHSQLSSRLVIDCSHGNSGKIAKNQLDVINNIAQQLLSGERRIAGVMCESFLQGGSQALNKGPLCYGQSITDECLSWEDTMCFLNTLDDAVATLQQQQYCHAPV

SEQ ID NO: 75742 - DNA, 1182 bp, Ustilago hordei
  CDS (1)..(1182)
atgtcgtcgagcattgcaaacaacaccgccaacggacgatccgccgagcctctctcgcaggctatcctcaaaagcggcactaaagacgaatacgcctacgtcaacgatgttcgcgttgctggctttgagcccttgatctctccctcgctcctccttcacgagattcccgtccctaaggaatcacaaaccaccatcgctcgcgcacgtggtcagtccagcgctatcatcaacggccaggacgaccgtcttcttgtcgtcgtcggtccttgctccatccacgatgtggaccaggctaaagaatacgctaagctgctcaaggctggtattgacgagcgctggtctgaaggccttgtcgtcatcatgcgcgcctacttcgaaaagccacgtactactgttggctggaagggtttgatcaacgaccccgacatcaatggcagcttccaaatcaaccgaggtctcaaaatcgcacgtaacctgctcgtcgacttgaccgcccaaggtgtccccgtggcatgcgaggttcttgacaccatctctccccagtacacttccgacctctactcttggggagccattggtgctcgtaccactgaatcgcaattgcaccgagaattagtctccggtctctccatgcccatcggtttcaagaacggcactgacggaggtcttggtgttgccgtcgacgccatccgtgcctcttcccaacctcacgctttcatgggtgtgaccgaacaaggtctcgctgccatcgtccgtactgtcggtaatgccgatctccacattgtccaccgcggcggctcaaatggaaccaacttcgattccgagtcggtcaaatcttccaaagctcgacttcaaaaagctctcccagaccgtcacccttccatcatgatcgattgttcccacggtaattcgaacaaagacttccgcaaccagcccaaggtcgttgatgctatcgcagagcagctcgagcagggagaggatgcgatcacgggtgtaatgatcgagagtcacttgaacgagggtaaacagggtgagcccaagaacggtcagattgatcagttgaagtacggtgttagcattacagatggttgcgtgggttgggagactacggtggagatgttggataagttgaatgcttctgttctgaagaggaggagtttgagggctcagaacaaggcctaa

SEQ ID NO: 75743 - protein, 393 aa, Ustilago hordei
MSSSIANNTANGRSAEPLSQAILKSGTKDEYAYVNDVRVAGFEPLISPSLLLHEIPVPKESQTTIARARGQSSAIINGQDDRLLVVVGPCSIHDVDQAKEYAKLLKAGIDERWSEGLVVIMRAYFEKPRTTVGWKGLINDPDINGSFQINRGLKIARNLLVDLTAQGVPVACEVLDTISPQYTSDLYSWGAIGARTTESQLHRELVSGLSMPIGFKNGTDGGLGVAVDAIRASSQPHAFMGVTEQGLAAIVRTVGNADLHIVHRGGSNGTNFDSESVKSSKARLQKALPDRHPSIMIDCSHGNSNKDFRNQPKVVDAIAEQLEQGEDAITGVMIESHLNEGKQGEPKNGQIDQLKYGVSITDGCVGWETTVEMLDKLNASVLKRRSLRAQNKA

SEQ ID NO: 75744 - DNA, 1065 bp, Pasteurella piscicida
  CDS (1)..(1065): transl_table=11
atgctctctcgtattttccatgctacgtcattcacttctttaccaagcttcaaagagacccatagcgactccccactaggcgataaacaacgtttctttgttgaacaacagcgaaaacaaataaaacgcatactactaggacaagaccctaggttattggtaataattggcccctgctcgattcatgaccctattgcagcattggactacgctagaaagctcgccgcaatccaacatgagtttgccgatacactcaaaattgtcatgcggacctattttgaaaagcctcgcacgcgttttggttggaaaggttttggcatcgaccctgatctcaatggacaacacaatatcgccaaaggaattacgttaactcgccaactgctcaattcgattctcgaactccatgttcctaccgcaactgaatttttagaccccaactttgcaccttacctagcggatatgatctgctggggcgcgattggtgccagaacaacggaatctcaaccacatcgccaattggtgtcagcgctacattgcgcggtgggatttaaaaacagtaccaatggcaatatcgatcatgccattgacgctattcatgcctcgcgtatgccgcaatcactaattcaatccaatagcgagggttgtcacgtcgttatccattctccagggaaccaatatggtcatttaatactacgtggaggtgattcgcccaactacacacaaccacatgttcaagctgctgcttttgcgctaaagcgtaacgacctcgctgcaaagctaattgttgattttagccatggtaatagccagaaaaccgctcacaaccaacttaacgtcgccagtgacattgcagctcaaattcaagcaggtgatgacaaaatagtaggaatcatgtgcgagagctttcttcaaggcgggcaacaacctagcgatcaaagaccactaaactacggtcaatcgatcaccgatgagtgtttaggctggcaagacagcgttgatttgctgcgtattttacaccgtgcatgtatagagaaatgcaagcgtcaccgacccataattgcctaa

SEQ ID NO: 75745 - protein, 354 aa, Pasteurella piscicida
MLSRIFHATSFTSLPSFKETHSDSPLGDKQRFFVEQQRKQIKRILLGQDPRLLVIIGPCSIHDPIAALDYARKLAAIQHEFADTLKIVMRTYFEKPRTRFGWKGFGIDPDLNGQHNIAKGITLTRQLLNSILELHVPTATEFLDPNFAPYLADMICWGAIGARTTESQPHRQLVSALHCAVGFKNSTNGNIDHAIDAIHASRMPQSLIQSNSEGCHVVIHSPGNQYGHLILRGGDSPNYTQPHVQAAAFALKRNDLAAKLIVDFSHGNSQKTAHNQLNVASDIAAQIQAGDDKIVGIMCESFLQGGQQPSDQRPLNYGQSITDECLGWQDSVDLLRILHRACIEKCKRHRPIIA

SEQ ID NO: 75746 - DNA, 1137 bp, Aspergillus oryzae
  CDS (1)..(1137)
atgttactcgattctagtaatttcttcatcgaaaatcccaatgtaggggacaccaaccatctggaggactcgagaattcgaggatataaccctctgacaccccccaaccttctccaacatgagattgctatgacagaaacttccagacagacggtcttgcaagcccgtcaggaggctagcgcagtcgttcatggcaccgacaccgacaagcgccgtctgctggtcgtagtgggaccctgctcgattcacgatcccgaaatggcccttgaatactgtgaccgtcttttaaaactgaaggagaaatacaaggatgagcttttgattgtcatgcgtgcctacctggagaagccacgtaccactgttggctggaagggtctcataaacgaccccgatatcgacaacagcttcaagatcaacaagggtctgcgcacatctcgccaacttttcgtcgatctgaccaacaagggcatgcccattgctagcgagatgctggacactatctccccgcagttcctggctgactgtctctccgttggtgcggttggcgcgcggacaaccgagtcccaggtccaccgtgagctggcttctggtctttccttccccgttggattcaagaacggcaccgatggctctttggatgttgcagtggatgccattggctcggtcaagcacccccatcacttcctctccgtcaccaagcctggtgttgtctccatcgtcggcaccgtgggtaaccccgactgtttcgtcatcctccgtggtggaaagaagggccccaactacgatgctcagagcatcgccgaggccaaggccaaactttctgcacagggcatggagccccgtctcatggtggactgcagccacggtaactcgcaaaagaaccacaagaaccagcccaaggtggctgctgtgctcgcggaacagatcgctgcgggtgagaccgcaatcatgggtgtcatgatcgagagtaacatcaacgagggtaaccagaaggtcccgcctgagggcaaggccggcctcaagtacggtgtcagtatcaccgatgcttgcattcactgggaagacacggaagctgttcttgagaacctcgcccaggccgttcgtactcggaaagagaaattggcggtcaacaactag

SEQ ID NO: 75747 - protein, 378 aa, Aspergillus oryzae
MLLDSSNFFIENPNVGDTNHLEDSRIRGYNPLTPPNLLQHEIAMTETSRQTVLQARQEASAVVHGTDTDKRRLLVVVGPCSIHDPEMALEYCDRLLKLKEKYKDELLIVMRAYLEKPRTTVGWKGLINDPDIDNSFKINKGLRTSRQLFVDLTNKGMPIASEMLDTISPQFLADCLSVGAVGARTTESQVHRELASGLSFPVGFKNGTDGSLDVAVDAIGSVKHPHHFLSVTKPGVVSIVGTVGNPDCFVILRGGKKGPNYDAQSIAEAKAKLSAQGMEPRLMVDCSHGNSQKNHKNQPKVAAVLAEQIAAGETAIMGVMIESNINEGNQKVPPEGKAGLKYGVSITDACIHWEDTEAVLENLAQAVRTRKEKLAVNN

SEQ ID NO: 75748 - DNA, 1095 bp, Aspergillus oryzae
  CDS (1)..(1095)
atgcccctcgttaacacaacagaggtcaatgaggacactcgtgtccttggatacgatccattgctgtcccctcagtaccttcagtccgagatcccagctcctgcagaagccactgccactgtccgctcgggccgtaaccaagccgttgagattattgagcagcgcgatgaccgtctgctggtgatggtcggcccctgctccatccatgaccctgccaccgctctggaatatgccacccgtctcaaggagctcgctgggaagctctcctccgacctttgcatcatcatgcgcgcttatttggagaagccccgcaccacagtgggatggaagggtctgattaacgacccggatattgacgaatcctacaacatcaacaagggtctgcgcatctcacgtaagctctacgccgatctgaccagcatgggcatgccaattgccagtgagatgctcgataccatctctccccagtaccttgcggatctcatctcactcggcgccatcggtgcccgtacgaccgagtcccaattgcaccgtgagctggcctccggtctgagtttccccattggctacaagaacggcacggacggcaacctcgtcgtcgccattgatgctattggtgctgccgctcacccccaccgtttcctcggtgtcactaagcagggtctcgcggccatcaccaagacctccggtaacgagcacggtttcgtgatcttgcgtggaggcagcaagggtaccaactatgaccgggagagcatccgtcaggctcgcgaagccctgcgtagcaagaagcagcgtgaggtgctcatggtcgactgctcccacggcaactccaacaagaaccaccgcaaccagcccctggtcgccaaggaagtcgccgaccagatgcgcgagggccaggatgctattgttggtgtcatgatcgagtccaacattcatgagggcaaccagaaggtccctgccgagggcccgaagggccttaagaagggtgtcagcatcacggatgcctgcattgactgggagaccaccgtcaccgtgttggaggatctcgccgatgccgtccgcgctagacgtgccgccaaggcatccagcgcctga

SEQ ID NO: 75749 - protein, 364 aa, Aspergillus oryzae
MPLVNTTEVNEDTRVLGYDPLLSPQYLQSEIPAPAEATATVRSGRNQAVEIIEQRDDRLLVMVGPCSIHDPATALEYATRLKELAGKLSSDLCIIMRAYLEKPRTTVGWKGLINDPDIDESYNINKGLRISRKLYADLTSMGMPIASEMLDTISPQYLADLISLGAIGARTTESQLHRELASGLSFPIGYKNGTDGNLVVAIDAIGAAAHPHRFLGVTKQGLAAITKTSGNEHGFVILRGGSKGTNYDRESIRQAREALRSKKQREVLMVDCSHGNSNKNHRNQPLVAKEVADQMREGQDAIVGVMIESNIHEGNQKVPAEGPKGLKKGVSITDACIDWETTVTVLEDLADAVRARRAAKASSA

SEQ ID NO: 75750 - DNA, 1466 bp, Paxillus involutus
  CDS (67)..(1239)
atatgcccccatctcatctcccaactaccatcctcctccctcccctcgcaaataccacgatcaaccatgcagtcgtacaacgttactccagttcctgaggatgacaagcaacttctagagtacatgcaagacagacgtgtcctcgggtacgaccccctagtccagcctgctttgctcagacacgaagttactcctaccgaatactcgcgtctcattattgcctctgcccgctataactccgctcgcgtagttgccggacaagatgacagagttctcgtgatcgtcggtccttgctcaatccactccccagagcaagccatcgagtatgccaaactgctccaagctaaaattcccacttgggaaaacctagtcatcgttatgcgggcttacttcgaaaaaccaaggacaaccgtcggctggaaaggcttgattaatgaccctgacatcgatggatccttccacatcaacaagggtcttcgggtcgccagacagctcctttgtgacttaaccaaccttggtatcccagtcggctccgagttactcgataccatctccccacagtacatcgcagatcttatctcttggggtgccatcggtgcccgaacaacggaatcccaactccaccgagagcttgcttctggtgtctccttccccattgggttcaagaacggcactgatggaagtgtgtcggtcgccattgatgccatgcgctcgtcttccaatcctcatgctttcatgggtgtgaccgagcggggtctagccgctattgtcaagactcggggtaaccaggatgttcatgtcatcctccgtggagggaccaagggcccgaactacgcgtctgagcacgtcaagtcggccgcaaaagctatcgagaaggctcgaccacagagccacccaagtctcatgattgactgtagccacggtaactcgcaaaagaatcataacaatcagcccaaggttgtcgatgacatttgcacacagctcgctgctggtgaccgaaccatcacgggtgtcatgatcgagtcgcacatcaacgctggtcgtcaggacgttcctgcagaaggccctggtggactcaagtacggcgtcagtatcaccgacgcttgcgttgactgggaggttaccgttggtatgctcgacaggcttaatgaggcagttggccaacgccgcgcctacctcgttgaacagggtttccagagacctgctgggttccaacgagagacacctttgacgccttgaagggctttgtgacacagtggtgtacctgttctccaaatcatctcacttgctgctgttgtacctctagatgcttcttatttgttggatgtctacgaacaccttcgtgtacagtactagattatccggacgtgcaaattcctttacatctacgcacaattttatgttagattatgcccattatggccattgcaaccgcaacaaacatgcttatatatgcaaaaaaaaaa

SEQ ID NO: 75751 - protein, 390 aa, Paxillus involutus
MQSYNVTPVPEDDKQLLEYMQDRRVLGYDPLVQPALLRHEVTPTEYSRLIIASARYNSARVVAGQDDRVLVIVGPCSIHSPEQAIEYAKLLQAKIPTWENLVIVMRAYFEKPRTTVGWKGLINDPDIDGSFHINKGLRVARQLLCDLTNLGIPVGSELLDTISPQYIADLISWGAIGARTTESQLHRELASGVSFPIGFKNGTDGSVSVAIDAMRSSSNPHAFMGVTERGLAAIVKTRGNQDVHVILRGGTKGPNYASEHVKSAAKAIEKARPQSHPSLMIDCSHGNSQKNHNNQPKVVDDICTQLAAGDRTITGVMIESHINAGRQDVPAEGPGGLKYGVSITDACVDWEVTVGMLDRLNEAVGQRRAYLVEQGFQRPAGFQRETPLTP

SEQ ID NO: 75752 - DNA, 1035 bp, Escherichia coli
  CDS (1)..(1035): transl_table=11
atgcagtcagtcagtaaatcaatctaccgagggaagttgcttagcagtttacctgctgtgggcgagattcataaagaaatcgcagtatcagaagaaaccgtaacatggatctctctgcaacgagagattatagcgaatattttgctgggaaaagatcctcgcttgcttgtgattgttggtccatgctcaatccatgacgttcaggctgccgttgaatatgcgaaacgattgtccgtattacagaataagtacttatcgcaaatgtacattgtaatgcgcacttattttgagaaacctcgaactcgtaaaggctggaaaggaataatgcacgatcctgatctaaatggaagctataatgttgagaaagggatacgatatgctcgccagtgtttgtcctcaatcacaacaatgcgtgtcgcaaccgctacagaattcctcgatcctttccttactccctatattgctgatttaatatgttggggggctgttggtgccagaactactgaatcacaaacgcatcgtcaacttgcgtctggtttacattgtcctgttggatttaaaaacagcactgatggaaatattaacttagctattgatgctattcttgcagcccgtgaacaacatgttgtatatatgacatctttaacaaaatgtatatctaccctattaaccgatggcaatccacatggacatctcatattacgtggtggtagagagccgaactatggtttgtcggatataacgaaggcagtgaaattaatgcatgatgaaggtatcaatcatcgtctgataattgactgtagccatggtaatagtggtaaagtggctgaacggcaaatctctgttgctcgtgaagtcattgataatcggaaaaagatgccgggatatgtagctggaattatgctggaaagctttttacaaggtggaaaacaatcagacagccttccgcgagagtatggtcagtctgttactgatgagtgtctttcatggcaacagacagaacaattattatcaactctggcagcacaactttaa

SEQ ID NO: 75753 - protein, 344 aa, Escherichia coli
MQSVSKSIYRGKLLSSLPAVGEIHKEIAVSEETVTWISLQREIIANILLGKDPRLLVIVGPCSIHDVQAAVEYAKRLSVLQNKYLSQMYIVMRTYFEKPRTRKGWKGIMHDPDLNGSYNVEKGIRYARQCLSSITTMRVATATEFLDPFLTPYIADLICWGAVGARTTESQTHRQLASGLHCPVGFKNSTDGNINLAIDAILAAREQHVVYMTSLTKCISTLLTDGNPHGHLILRGGREPNYGLSDITKAVKLMHDEGINHRLIIDCSHGNSGKVAERQISVAREVIDNRKKMPGYVAGIMLESFLQGGKQSDSLPREYGQSVTDECLSWQQTEQLLSTLAAQL

SEQ ID NO: 75754 - DNA, 1086 bp, Amycolatopsis methanolica
  CDS (1)..(1086): transl_table=11
atgtctctcagcgcaggccccgcggaaatttccgaaggcctcgacaaccagcgcaccctcggcgtcagcccgctgatctcccccgccctgctgcggcaggagctgccggtggacgcggcgatcgccaagaccgtcgcgcatggccggtcgtcggccgtcgacatcctccacggcgacgacgaccgcctcatcgtggtcgtcggcccctgctcggtgcacgaccccgcggccgccctcgactacgcccaccggctggccgagcacgccgccggtgtgcgcgacgaactgcacgtgatcatgcgggtgtacttcgagaagccacgcaccacgctgggctggaagggcctcatcaacgacccggacctggacggcagctacgccgtcaacaagggcctgcggatggcgcgcaagctgctgctggacatctccgcactggggctgccggtcgggtgcgagttcctggacccgatcacgccgcagttcatcgccgacaccgtgagctggggatccatcggcgcgcggaccgcggccagccaggtgcaccgccagctgtgcagcgcgctgtccatgccggtggggatcaagaactccactgagggcgatgtgcaggtggcggtggacgcgacccgcgcggcggcggcgagccacgtgttcgcgggcatcaacaacgacggcctggcggcgctgttcaccacggcgggcaacccggactgccacgtcatcctgcgcggcggttccgcaggcccgaactacgacgcggcgacggtggccgacacgctcgcgcggcaggccaaggccgggctgccggagcgggtgatcatcgacgcgagccacggcaacagcggcaaggaccacgtccgccagggcgtggtggccggggagatcgcggaccggatcgccgccggcgagcgcgggatcgccgggatcatgctggagagcttcctcgaggccgggcggcaggacctggtgctggggcacgcgggcgagctgacctacgggcagtcgatcaccgatgcgtgcctggactggcgaagcacgggtgagctgctggaccgcctctcggaggcggtggcggcgcggcggtga

SEQ ID NO: 75755 - protein, 361 aa, Amycolatopsis methanolica
MSLSAGPAEISEGLDNQRTLGVSPLISPALLRQELPVDAAIAKTVAHGRSSAVDILHGDDDRLIVVVGPCSVHDPAAALDYAHRLAEHAAGVRDELHVIMRVYFEKPRTTLGWKGLINDPDLDGSYAVNKGLRMARKLLLDISALGLPVGCEFLDPITPQFIADTVSWGSIGARTAASQVHRQLCSALSMPVGIKNSTEGDVQVAVDATRAAAASHVFAGINNDGLAALFTTAGNPDCHVILRGGSAGPNYDAATVADTLARQAKAGLPERVIIDASHGNSGKDHVRQGVVAGEIADRIAAGERGIAGIMLESFLEAGRQDLVLGHAGELTYGQSITDACLDWRSTGELLDRLSEAVAARR

SEQ ID NO: 75756 - DNA, 1098 bp, Amycolatopsis balhimycina
  CDS (1)..(1098): transl_table=11
gtggccgcgatgacccacaccgtcgccacgaccgacctcgacaaccagcgcatcgagcggatcgtccccctggtcacccccgccctgctgcatcacgaactgccgctcagcgccaccgcggccgagacggtgcgaaagggccgcgagagcgtcgtccgcgtcctcgacggcacggacgaccggctgctcgtgatcaccgggccgtgctccatccacgaccccgccgcggcgctcgactacgccggccacctcgccgccatcgccggcgaggtcgccggcgacctgctcgtcgtcatgcgcgtgtacttcgagaaaccccggacgatcggcggctggaaggggctcatcaacgacccccacctcgacggcaccggcgacgtcaaccacgggctgcgcacggcccggcacctcctgctggagctcgccgaacgcggcctgcccgccgcgtgcgaatggctggacaccaccattcccgcgtacttcgcggacacggtctcgtggggcgccatcggcgcccgcaccgtggaaagccagaaccaccgcatgctcgccagcggcctgtccatgcccgtcggcttcaagaaccgccgcgacggcgacatcaccgtcgccatcgacgcgatccgggccgccgcggtccgccacgtggtccccggcgtcgaccccggcgggttgcccgccatcctgcacacggcgggcaacccggactgccacgtcgtcctgcgcggtggtgacggcgcgcccaaccacgactccgcgtccgtccacaagacactgaccgcgctggaggccgcgggcctgcccggccgggtggtgatcgacgccagccacgacaacagcggcaaggaccaccaccgccagcccctcgtcgcggccgagatcgcgggccaggtcgagaacgggcggaacggcatcgtcggggtgatgctcgagtccaacctccgcgccggccgccaggacctccagccgggccgtccgccggcatacggccagtccatcaccgacgcctgcatcgacgtccccaccacccggacggtcctccacggcctcgccgcggcggccgcggcccggcgaaagctcggcaagcaagcaagctga

SEQ ID NO: 75757 - protein, 365 aa, Amycolatopsis balhimycina
MAAMTHTVATTDLDNQRIERIVPLVTPALLHHELPLSATAAETVRKGRESVVRVLDGTDDRLLVITGPCSIHDPAAALDYAGHLAAIAGEVAGDLLVVMRVYFEKPRTIGGWKGLINDPHLDGTGDVNHGLRTARHLLLELAERGLPAACEWLDTTIPAYFADTVSWGAIGARTVESQNHRMLASGLSMPVGFKNRRDGDITVAIDAIRAAAVRHVVPGVDPGGLPAILHTAGNPDCHVVLRGGDGAPNHDSASVHKTLTALEAAGLPGRVVIDASHDNSGKDHHRQPLVAAEIAGQVENGRNGIVGVMLESNLRAGRQDLQPGRPPAYGQSITDACIDVPTTRTVLHGLAAAAAARRKLGKQAS

SEQ ID NO: 75758 - DNA, 1143 bp, Xylella fastidiosa
  CDS (1)..(1143): transl_table=11
ttgtctcctccgcttggtctatgtctaaatgttctgagattacatcccatgccaccatttaccgacgacctccgtatccgaaaaattgaaccactgacacctcctaacaagctcctcttacaactaccatgcgatgagcaggcatcgctgactgttgcgacctcacgcaacgcactgcacgatatcctgcacggccacaatgaccgtttagccgtcgtgataggcccatgctcaatccatgatccaattgcagccattgattactcgcaacgtctacgcccattgcgtgagatgtacaaggatgcactagaaatcgtgatgcgagtttactttcagaaaccgcgcaccactattggttggaaaggattggtcaacgatccggatcttgatggcagcttccagatcaataagggcttgcatatcgcgcgcaacctgctgcgcgatatcaatcatctcggcttacccgctggtgtggaatttctagacacgatttcgccgcaatatctggctgacttagtcgcctggggtgccattggtgctcgcaccactgaaagccaaatacaccgtgaaatggcttcaggtttatcgtgcccgattggctttaaaaacagtaccagtggtgatgtgaagattgctgctgacgcgattaaagcagcttcgcatccgcaccatttcctttcagtgacaaagacaggtgttgccgcagtcgtcgccacccagggtaaccccgattgtcacgtgattctgcgtggaggcaaggtcccgaattacgacgcaatcaatgtcgaagctgccagccaaacattgcttaaatccaagctaccggtgcgactgatgattgatgcgagccatgccaatagcggcaaaaatccaaacaatcaacctaaggtgatcgagaacatcgtagaacagcttaaagccggtgaacgccgcatcatcggtgtcatgattgaaagccacattgttggtggccggcaagaattagtccttggaaacacacttaactatggacagagcattaccgatgcttgcatcgactgggatacctcggttgcaatgttagaacagctcgctcaggccgtacgcgtcagacagactctaccaacgaccactacagctaacaaaacatcaaaaacccaataa

SEQ ID NO: 75759 - protein, 380 aa, Xylella fastidiosa
MSPPLGLCLNVLRLHPMPPFTDDLRIRKIEPLTPPNKLLLQLPCDEQASLTVATSRNALHDILHGHNDRLAVVIGPCSIHDPIAAIDYSQRLRPLREMYKDALEIVMRVYFQKPRTTIGWKGLVNDPDLDGSFQINKGLHIARNLLRDINHLGLPAGVEFLDTISPQYLADLVAWGAIGARTTESQIHREMASGLSCPIGFKNSTSGDVKIAADAIKAASHPHHFLSVTKTGVAAVVATQGNPDCHVILRGGKVPNYDAINVEAASQTLLKSKLPVRLMIDASHANSGKNPNNQPKVIENIVEQLKAGERRIIGVMIESHIVGGRQELVLGNTLNYGQSITDACIDWDTSVAMLEQLAQAVRVRQTLPTTTTANKTSKTQ

SEQ ID NO: 75760 - DNA, 1086 bp, Stigmatella aurantiaca
  CDS (1)..(1086): transl_table=11
atgaccgctcgcactgaaaatctgaacgtagttggtttcgaccacatgccctccccctccgagatcaaggagcgcgtgccgatgacaagcctcgcagccgacaccgtgctctccggacggcgcgcgctgatggacatcctcaaccgcaaggatccacgcatcttcgtcatcgtgggcccctgctccatacatgatcccaaggccggcatcgagtacgcccgtcgacttcgcaacctctccgacgagatccgggagacgatcctcgtggtgatgcgggtgtacttcgagaaaccgcgcacctccaccggctggaagggcttcatcaacgacccgaggatggacgactccttccacatcgaggaaggcatggagcggggccgccgcttcttgagggacgtggccgaactgggcctgcccgcggcgaccgaagcgctcgatcccattgccccccagtattacggcgacctgatttcctggacggcgattggcgcgcgcacggcggagtcccagacccaccgcgagatggcctcggggctgtcgacgcccgtgggcttcaagaacggaaccgacggctcgctggacgcggcggtcaacggcatcctctccgcctcgcacccccacagcttcctggggctgaacgagggcggtgaggcggcgatcatccgcaccggaggcaatgcctacagccacctggtgctccgaggcggagggggacggcccaactacgacacggtgtccatcgcgctcgccgaacaggcgctcaccaaggccaagctgccggggaacatcgtggtggactgctcccacgccaactcctggaagaagccggagttgcagcccctggtcatgcgcgacgtggtgcaccagatccgcgaaggcaaccgctccgtggtgggtttgatgctcgaaagcttcctggaagcgggcaaccagcccatccccgccgatctctcgaagctgcgctacggctgctcggtgaccgatgcgtgcgtggactggggcaccaccgaagagacgctgcgcaacgcccacaaggtgctgcgcgaggcattgcccacgcggagctcgggccgcccagcgccctga

SEQ ID NO: 75761 - protein, 361 aa, Stigmatella aurantiaca
MTARTENLNVVGFDHMPSPSEIKERVPMTSLAADTVLSGRRALMDILNRKDPRIFVIVGPCSIHDPKAGIEYARRLRNLSDEIRETILVVMRVYFEKPRTSTGWKGFINDPRMDDSFHIEEGMERGRRFLRDVAELGLPAATEALDPIAPQYYGDLISWTAIGARTAESQTHREMASGLSTPVGFKNGTDGSLDAAVNGILSASHPHSFLGLNEGGEAAIIRTGGNAYSHLVLRGGGGRPNYDTVSIALAEQALTKAKLPGNIVVDCSHANSWKKPELQPLVMRDVVHQIREGNRSVVGLMLESFLEAGNQPIPADLSKLRYGCSVTDACVDWGTTEETLRNAHKVLREALPTRSSGRPAP

SEQ ID NO: 75762 - DNA, 1083 bp, Amycolatopsis mediterranei
  CDS (1)..(1083): transl_table=11
atgacgctctccgccggaccggccaccatcggtgacctcgacgccgcccgcaccacgtcgatcagtccgctcatttcgcccgcactgctgcgcgaagaccatccggtcgacgccgcggtcgcgaaggtggtgcgccacggccgcgccgagacggtcgacatcctcgaaggccgcgacgaccggctgctcgtcgtggtcggcccgtgctcggtgcatgaccccgaagccgccctcgactacgcccgccggctggcggcgaaggccgaggagctgcgcggcgagctgcacgtcgtgatgcgcgtgtacttcgagaagccgcgcaccacgctgggctggaagggcctgatcaacgacccggacctcgacggcacgttctccgtcaacaagggcctgcggatggcgcgcaagctgctgctcgacgtgtccgagctggggttgccggtcggctgcgagttcctcgacccgatcacgccgcagttcatcgcggacatcgtgacgtggggttcgatcggtgcccgcacggcggccagccaggtccaccgccagctgtgcagcgcgctgtcgatgccggtgggcatcaagaactccaccgagggcgacgtccaggtggcgatcgacgccacccgcgcggcggcggccagccacgtgttcccgggcatcaacaccgacggcctggcggcgctgctgacgacgtccggcaacccggactgccacgtgatcctgcgcggccacaacaccggcccgaactacgactcgctcactgtcgccgacaccctggcccggctggcgaaggcgggcctgccggagcgggtgatcatcgacgcttcgcacgggaacagcggcaaggaccacgtgcggcagggcgcggtggtgtccgagctggctgcgcggatcgcggcgggcgagcgcgggatttccgggctgatgatggagagcttcctggccggtgggcggcaggagctttcgctggggcacgcctcggagctgacctacgggcagtcgatcacggacgcgtgcctggcctgggacgacaccgcgccgctgctggacgagctcgcctcggcggtgcgggcgcgccgctga

SEQ ID NO: 75763 - protein, 360 aa, Amycolatopsis mediterranei
MTLSAGPATIGDLDAARTTSISPLISPALLREDHPVDAAVAKVVRHGRAETVDILEGRDDRLLVVVGPCSVHDPEAALDYARRLAAKAEELRGELHVVMRVYFEKPRTTLGWKGLINDPDLDGTFSVNKGLRMARKLLLDVSELGLPVGCEFLDPITPQFIADIVTWGSIGARTAASQVHRQLCSALSMPVGIKNSTEGDVQVAIDATRAAAASHVFPGINTDGLAALLTTSGNPDCHVILRGHNTGPNYDSLTVADTLARLAKAGLPERVIIDASHGNSGKDHVRQGAVVSELAARIAAGERGISGLMMESFLAGGRQELSLGHASELTYGQSITDACLAWDDTAPLLDELASAVRARR

SEQ ID NO: 75764 - DNA, 1125 bp, Emericella nidulans
  CDS (1)..(1125)
atgtcctccttcttccttccaaatcctaatttaggagatagcaatcaccttgaggattcaagaatccgcggatacaaccctctcacaccacccaacctcctgcaacatgagattgctctaacagagaaagcgcggcaaacggtccttcaaggccgagccgaggccattgccgtcgcccacggcacagacacagacaagcgccgcctcctcgtcgtcattggaccctgctcaattcacgaccccgaaatggccttagagtactgcgaccggctattgaaattgaaggagaaatacaaggatgagttgctaattgttatgcgctcttatctggagaagccccgaacgaccgtcggttggaagggcctcatcaacgacccggatatcgacaacagcttcaacatcaacaagggcctgcgcatctcgcgtcagctcttcgtcgacttgaccaacaagggaatgccaattgccagtgagatgctggacactatctccccgcagtttctggcggactgtctctccgtcggtgcggtcggcgcacggacaaccgaatcgcaggtccatcgtgaattggcctctgggctctcgttccccgttggcttcaagaacggtacagatggctcgttagacgtcgcggttgatgcgattggatccgtaaaacaccctcatcacttcctgtccgtcaccaagcctggtgttgtcgccattgtcggtaccgttggcaatcctgattgctttgttatcctccgcggcggcaagaaagggccgaactacgatgctgctagcatcaccgaagcaaaggagaagctcatagctaagggtctggcaccccgtctgatggtcgactgcagccacggcaactcacaaaaggatcacaagaaccagcctaaggtggcagctgttcttgcggagcagattgctgcaggcgaaaccgcaatcatgggcgtcatgatagagagtaatatcaacgagggcaaccaaaaggtcccacccgagggcaaggccggcctcaaatacggcgtcagtatcaccgacgcctgtatcaattgggaagacaccgagtcaacgctagagacccttgcaaaggctgttgcgactcggagagaaaagctcgcccccagttcatag

SEQ ID NO: 75765 - protein, 374 aa, Emericella nidulans
MSSFFLPNPNLGDSNHLEDSRIRGYNPLTPPNLLQHEIALTEKARQTVLQGRAEAIAVAHGTDTDKRRLLVVIGPCSIHDPEMALEYCDRLLKLKEKYKDELLIVMRSYLEKPRTTVGWKGLINDPDIDNSFNINKGLRISRQLFVDLTNKGMPIASEMLDTISPQFLADCLSVGAVGARTTESQVHRELASGLSFPVGFKNGTDGSLDVAVDAIGSVKHPHHFLSVTKPGVVAIVGTVGNPDCFVILRGGKKGPNYDAASITEAKEKLIAKGLAPRLMVDCSHGNSQKDHKNQPKVAAVLAEQIAAGETAIMGVMIESNINEGNQKVPPEGKAGLKYGVSITDACINWEDTESTLETLAKAVATRREKLAPSS

SEQ ID NO: 75766 - DNA, 1107 bp, Candida albicans
  CDS (1)..(1107): transl_table=12
atgtttattacaaacgaacacgttggtgacagaagtcgtatggaagattggagaatccgtggttacgatccattaactcctccagatcttttacaacatgaatacccattaactcctgaatcacagaagattatcgttgaaggtagaaatgctgcttgtgatattttgaacggcaaagaccgaagattgattggaccttgttcgattcatgatcctcaagctgccttggattactgtgaaagattatatcaagcttctgaaaaacacaagggtgaattattgattgttatgagagcatacttggaaaaaccaagaaccacagttggttggaaaggtttaattaacgacccagatatcgatggtaccttccatataaataaggggttgagaattgctagaaagttgtttgttcaattaacttcaaaattaccaattgctggtgaaatgttggatacaatctcacctcaatttttatctgatttattctcagtgggggctattggtgcaagaaccaccgaatcgcaattgcacagagagttggcatctggttatcattcccagttggattcaaaaacggtaccgatggtactttgggtgttgccattgacgcctttgagagctgcttctcatccacatcatttcctttcagtcacaaaacctggtgttgttgctattgttgggactgatgggaaccaagactgttttgttatattaagaggtggtaagaagggtacaaactatgatgccaaatccgtacaagaaacacaagaagaattaatcaaatcaaaagttgttaccgaaatgaaacctggtccaagaattatggttgattgttctcatggtaattctaataaagatcatagaaaccaaccgaaagttgcccaagttgttgctgaacaagtggccggtggtgataaatccatatgtggattaatgattgagagtaatataaatgatggaagacaagatgttccaccaaaggaacaaggtggtaaagatgctttgaaatacggtgtttctattaccgatgcttgtattggttgggaaaccacagaagaagttttggaggttttagccaatgctgtcaaaaccagaagatctttatag

SEQ ID NO: 75767 - protein, 368 aa, Candida albicans
MFITNEHVGDRSRMEDWRIRGYDPLTPPDLLQHEYPLTPESQKIIVEGRNAACDILNGKDRRLIGPCSIHDPQAALDYCERLYQASEKHKGELLIVMRAYLEKPRTTVGWKGLINDPDIDGTFHINKGLRIARKLFVQLTSKLPIAGEMLDTISPQFLSDLFSVGAIGARTTESQLHRELASGYHSQLDSKTVPMVLWVLPLTPLRAASHPHHFLSVTKPGVVAIVGTDGNQDCFVILRGGKKGTNYDAKSVQETQEELIKSKVVTEMKPGPRIMVDCSHGNSNKDHRNQPKVAQVVAEQVAGGDKSICGLMIESNINDGRQDVPPKEQGGKDALKYGVSITDACIGWETTEEVLEVLANAVKTRRSL

SEQ ID NO: 75768 - DNA, 1071 bp, Escherichia coli
  CDS (1)..(1071): transl_table=11
atgcaaaaagacgcgctgaataacgtacatattaccgacgaacaggttttaatgactccggaacaactgaaggccgcttttccattgagcctgcaacaagaagcccagattgctgactcgcgtaaaagcatttcagatattatcgccgggcgcgatcctcgtctgctggtagtatgtggtccttgttccattcatgatccggaaactgctctggaatatgctcgtcgatttaaagcccttgccgcagaggtcagcgatagcctctatctggtaatgcgcgtctattttgaaaaaccccgtaccactgtcggctggaaagggttaattaacgatccccatatggatggctcttttgatgtagaagccgggctgcagatcgcgcgtaaattgctgcttgagctggtgaatatgggactgccactggcgacggaagcgttagatccgaatagcccgcaatacctgggcgatctgtttagctggtcagcaattggtgctcgtacaacggaatcgcaaactcaccgtgaaatggcctccgggctttccatgccggttggttttaaaaacggcaccgacggcagtctggcaacagcaattaacgctatgcgcgccgccgcccagccgcaccgttttgttggcattaaccaggcagggcaggttgcgttgctacaaactcaggggaatccggacggccatgtgatcctgcgcggtggtaaagcgccgaactatagccctgcggatgttgcgcaatgtgaaaaagagatggaacaggcgggactgcgcccgtctctgatggtagattgcagccacggtaattccaataaagattatcgccgtcagcctgcggtggcagaatccgtggttgctcaaatcaaagatggcaatcgctcaattattggtctgatgatcgaaagtaatatccacgagggcaatcagtcttccgagcaaccgcgcagtgaaatgaaatacggtgtatccgtaaccgatgcctgcattagctgggaaatgaccgatgccttgctgcgtgaaattcatcaggatctgaacgggcagctgacggctcgcgtggcttaa

SEQ ID NO: 75769 - protein, 356 aa, Escherichia coli
MQKDALNNVHITDEQVLMTPEQLKAAFPLSLQQEAQIADSRKSISDIIAGRDPRLLVVCGPCSIHDPETALEYARRFKALAAEVSDSLYLVMRVYFEKPRTTVGWKGLINDPHMDGSFDVEAGLQIARKLLLELVNMGLPLATEALDPNSPQYLGDLFSWSAIGARTTESQTHREMASGLSMPVGFKNGTDGSLATAINAMRAAAQPHRFVGINQAGQVALLQTQGNPDGHVILRGGKAPNYSPADVAQCEKEMEQAGLRPSLMVDCSHGNSNKDYRRQPAVAESVVAQIKDGNRSIIGLMIESNIHEGNQSSEQPRSEMKYGVSVTDACISWEMTDALLREIHQDLNGQLTARVA

SEQ ID NO: 75770 - DNA, 1071 bp, Salmonella typhi
  CDS (1)..(1071): transl_table=11
atgcaaaaagacgcgctgaataacgtacgtatcaccgatgaacaggtattaatgacgccggagcagcttaaagcggcctttccgttgagcctggcgcaggaagcgcagatagcgcagtcccggggaatcatttctgacattattgccgggcgcgatccgcgtctgttggtggtatgcggtccttgttctattcacgatcctgaaaccgctctggaatatgcccgtcgatttaaagcccttgccgcagaggtcagcgatagcctctatctggtaatgcgcgtctattttgaaaagccgcggactaccgtcggctggaaagggctgattaacgatcctcacatggatggctcatttgatgtggaagccgggttgaaaatagcgcgtcagctactggtggaactggtgaatatggggttgccattggcgaccgaagcgttggatccgaacagcccgcaatacctgggcgatctgtttagctggtcggcgataggcgcgcgcacaaccgaatcgcaaacccaccgcgaaatggcgtctggtctttctatgccggtcggctttaaaaacggcacggatggcagcctggcgacagcgattaacgccatgcgcgccgctgcgcaacctcatcgttttgttggcattaaccaggccggtcaggttgcgttattgcaaacccagggaaatccgcatggccatgtgattctgcgtggcggcaaagcgccaaactatagcccggcagatgtcgctcagtgtgaaaaagagatggaacaggcggggctacgtccttcgctgatggtagattgcagtcatggtaactccaataaagattatcgccgccagccagccgttgccgaatctgtggttgcgcagattaaagatggcaatcgttcaatcattggcttaatgattgaaagtaatattcatgagggtaatcagtcttccgaacagccgcgcagcgaaatgaagtatggcgtttccgtcaccgatgcttgtattagctgggagatgaccgatgccctgttacgtgaaattcataaagatttgagcggccagctggcggtgcgcgtcgcataa

SEQ ID NO: 75771 - protein, 356 aa, Salmonella typhi
MQKDALNNVRITDEQVLMTPEQLKAAFPLSLAQEAQIAQSRGIISDIIAGRDPRLLVVCGPCSIHDPETALEYARRFKALAAEVSDSLYLVMRVYFEKPRTTVGWKGLINDPHMDGSFDVEAGLKIARQLLVELVNMGLPLATEALDPNSPQYLGDLFSWSAIGARTTESQTHREMASGLSMPVGFKNGTDGSLATAINAMRAAAQPHRFVGINQAGQVALLQTQGNPHGHVILRGGKAPNYSPADVAQCEKEMEQAGLRPSLMVDCSHGNSNKDYRRQPAVAESVVAQIKDGNRSIIGLMIESNIHEGNQSSEQPRSEMKYGVSVTDACISWEMTDALLREIHKDLSGQLAVRVA

SEQ ID NO: 75772 - DNA, 1107 bp, Schizosaccharomyces pombe
  CDS (1)..(1107)
atggacaagcacactcctcttcttcctggcgacagtgttttttcacgttgtaaaactgaagatagtcgtatcaaaggctatgatccagtaatttcacctgctttaattcaatcagaattagcagcctctgatgaaacacttgcttttgtgtcggatcaaagacgccaagccgccgatatcattgcgggacgtgatgatagacttcttctaatcgttggaccctgttctttacacgatcctgttgccgccaaggagtatgccattcgcttgcaaaaggaggctattaagcacaagaaggacttgcatattattatgcgcgcctatcttgaaaagcctcgtacaactgttggatggaaagggttgattaatgatcccgatttggatggatcttataacattaataagggtattcgtgtcgctcgacgcatttttctggagcttctggaaactggtgtcggtatagcgtcagagatgctggacactataagtccccaatatttagctgatctaatttgctggggcgctattggtgctcgtaccactgagtcccaattgcatcgagaacttgcttcagggctttcttttccaataggttttaagaatgctactgacggtaacattggtattgctatagatgctatgaattcttctgccaaccctcatcatttcttgtctgtcacaaagcagggtgttgtagccattgttactactacaggtaaccctgatacacacattattttgcgtggtggtaaaagtgggactaacttcgatgctgattcagtggctggtgccaaggctaaactcgaagaatgcaacaagctacctagtatcatgatcgactgttctcatggaaactcatctaaaaaccataagaatcaacccaaggttgctgcttgtattgctgagcaggtggcaaacggtcagaaagcaattactggtgtcatgatcgaatctcaccttaacgaaggtaagcaagctatacctgaggatgatttgtcaagtatgaaatatggagtcagtgtcaccgatgcttgcattggttgggacgacactaccgccgtttttgaacagttggctgctgccgtccgttctcgtcgttctcattaa

SEQ ID NO: 75773 - protein, 368 aa, Schizosaccharomyces pombe
MDKHTPLLPGDSVFSRCKTEDSRIKGYDPVISPALIQSELAASDETLAFVSDQRRQAADIIAGRDDRLLLIVGPCSLHDPVAAKEYAIRLQKEAIKHKKDLHIIMRAYLEKPRTTVGWKGLINDPDLDGSYNINKGIRVARRIFLELLETGVGIASEMLDTISPQYLADLICWGAIGARTTESQLHRELASGLSFPIGFKNATDGNIGIAIDAMNSSANPHHFLSVTKQGVVAIVTTTGNPDTHIILRGGKSGTNFDADSVAGAKAKLEECNKLPSIMIDCSHGNSSKNHKNQPKVAACIAEQVANGQKAITGVMIESHLNEGKQAIPEDDLSSMKYGVSVTDACIGWDDTTAVFEQLAAAVRSRRSH

SEQ ID NO: 75774 - DNA, 1113 bp, Saccharomyces cerevisiae
  CDS (1)..(1113)
atgttcattaaaaacgatcacgccggtgacaggaaacgcttggaagactggagaatcaaaggttatgatccattaacccctccagatctgcttcaacatgaatttccaatttcagccaaaggtgaggaaaacattatcaaggcaagagactccgtctgtgatattttgaatggtaaagatgatcgtttagttatcgtgatcgggccatgttccctacatgaccccaaagccgcttacgattacgctgacagattggctaaaatttcagaaaagttgtcaaaagacttattgattattatgagagcgtatttagaaaaaccaaggactactgttggctggaaagggttgattaacgaccctgatatgaataactcttttcaaatcaataaaggtctacggatttcgagagaaatgttcataaaactggttgaaaaattacccattgctggtgagatgttggataccatttctccgcagtttttgagtgattgtttctccttgggtgccatcggcgccagaactactgaatcccaactgcacagagaattagcatccggtctatctttccctattggatttaagaacggtactgatggtggtttgcaagtcgccatcgacgctatgagagccgctgcacatgaacattacttcctttctgtcacaaagccaggtgtcactgctatcgtgggcactgaaggtaacaaggataccttcctgatcttgagaggtggtaagaacggtactaactttgacaaagaaagtgttcaaaatactaagaaacagttagaaaaggccggtttgactgatgattcccagaaaagaattatgatcgattgttcccacggcaacagtaataaagatttcaagaaccaaccaaaggttgccaaatgtatttatgaccagctgacggagggtgagaatagtctctgtggtgttatgattgagtccaacataaatgaaggtagacaagatattcccaaagaaggtggcagagagggattgaagtatggttgttctgttacggatgcttgtattggctgggagtccaccgaacaggtattggagctattggcagaaggtgttagaaacagaagaaaggccttgaaaaaatag

SEQ ID NO: 75775 - protein, 370 aa, Saccharomyces cerevisiae
MFIKNDHAGDRKRLEDWRIKGYDPLTPPDLLQHEFPISAKGEENIIKARDSVCDILNGKDDRLVIVIGPCSLHDPKAAYDYADRLAKISEKLSKDLLIIMRAYLEKPRTTVGWKGLINDPDMNNSFQINKGLRISREMFIKLVEKLPIAGEMLDTISPQFLSDCFSLGAIGARTTESQLHRELASGLSFPIGFKNGTDGGLQVAIDAMRAAAHEHYFLSVTKPGVTAIVGTEGNKDTFLILRGGKNGTNFDKESVQNTKKQLEKAGLTDDSQKRIMIDCSHGNSNKDFKNQPKVAKCIYDQLTEGENSLCGVMIESNINEGRQDIPKEGGREGLKYGCSVTDACIGWESTEQVLELLAEGVRNRRKALKK

SEQ ID NO: 75776 - DNA, 1113 bp, Candida albicans
  CDS (1)..(1113): transl_table=12
atgagtaaaactcctgttcctaccgaatacgacgacacaagaatattgggttacgatcctttagttccaccagccttattacaacacgaaataaaggcatctgccgaatcattggatgttgttataaaaggccgttacgattctgctcaaatccttaagggtaatgatgacagatgtattgtaattgttggtccatgttcaattcacgatcctccacaagccttagaatacggtaaacgtttgaagaaattggctgatgaattaaaagatgacttggtgattattatgagagcttatttggaaaaaccaagaactaccgttggttggaaaggtttgatcaatgatcctgatgttgataattcttttgatattaaccgtgggttgaagatatctcgtcaattatattccgatttgactagtgttgttggattaccaattggatcagaaatgttagacaccatttctccacaatacttttccgatttcttgagttttggggccattggagctagaaccaccgaatcacaattacacagagaattagcttctggtttaagcttcccaattggatttaaaaatggtaccgatggtggtttagccgttgccttggatgccgtgcaagcttcttcaaaaggacatcatttcatgggtgtcaccaaaaacggtatggctgccattaccactactaaaggtaacgattgttgtttcattatattaagaggtggtaaaaaaatcactaattacgatgttgaatcagttaaagctgctaaagaagctattgccaaatgtaccgatccaagtatcaagttgatggttgattgctctcacgacaactcaagaaaagactacagaaaccaacctcaagtattagacagtgttgccgaacaaataagtaatggtgaagactccattattggggttatgattgaatccaatattcatgaaggtaaacaaccaatgcccccagcaggtagtggtaaagaagcattgaaatacggtgtgtctatcaccgatggatgtgtttcttgggaaaccactgttgaaatgttgaccaaattgagtcaagcagtccaaactagaagaagtttaaagaaacaaaaagtttccaattaa

SEQ ID NO: 75777 - protein, 370 aa, Candida albicans
MSKTPVPTEYDDTRILGYDPLVPPALLQHEIKASAESLDVVIKGRYDSAQILKGNDDRCIVIVGPCSIHDPPQALEYGKRLKKLADELKDDLVIIMRAYLEKPRTTVGWKGLINDPDVDNSFDINRGLKISRQLYSDLTSVVGLPIGSEMLDTISPQYFSDFLSFGAIGARTTESQLHRELASGLSFPIGFKNGTDGGLAVALDAVQASSKGHHFMGVTKNGMAAITTTKGNDCCFIILRGGKKITNYDVESVKAAKEAIAKCTDPSIKLMVDCSHDNSRKDYRNQPQVLDSVAEQISNGEDSIIGVMIESNIHEGKQPMPPAGSGKEALKYGVSITDGCVSWETTVEMLTKLSQAVQTRRSLKKQKVSN

SEQ ID NO: 75778 - DNA, 1089 bp, Haemophilus influenzae
  CDS (1)..(1089): transl_table=11
atggctaaagagaaaattgaaattgtcgtggcaaacgacgatacgcgaattgaaaaagtcgatcaggtgttaccacccattgccttattagaaaaatacccagcaagtgaacaggctgcggcgttagtgaagcaaactcgtcatgaggcacataatattattcatggtaaagatgatcgtttattagtcgtgattgggccttgctctattcatgatccgaaagcagccattgaatatgcgactcgtttaaaaccattacgtgaaaaatacaaagatagccttgaaattattatgcgtgtgtattttgagaaaccgcgtacaacggtgggttggaaaggtttaattaatgaaccatatttgaatgatacttatcgtttaaatgatgggttacgtattgcacggaaattactttcagatattaatgatcttggtgtgcctgcagcgggcgagtttttagatatgattacacctcagtatttggcagattttatgagctggggggcgattggggctagaacaacagaatcacaagttcatcgtgagttggcttcaggtttatcttgtgctgttgggtttaaaaatgccactaatggtggtgtgaaagtcgctttagatgcaattggtgcagcggaagctcctcactatttcttatctgtcactaaatttggtcattctgcaattgtttctacaaaagggaatgaagattgccatattattttacgaggtggagataaaggccctaactatagtgctgaagatgtagaaaaagtttgtgctgatattgaaaaaacagggcgtattccacacgttatggttgattttagccatgcaaacagcagtaaacaatataaaaagcaaatggatgtttgccaagacgtatgtaatcagattgcatttggttctaaacaaatctttggcgtaatggtggaaagccatttagtggaaggtcgtcaagatttagttgatggcaaagcacagacttatggacaaagtattacggatgcgtgcattggatgggaagattctgaaagattattgcaacaactttctgatgcagttattgctagacgtaaagcgacgagtaattaa

SEQ ID NO: 75779 - protein, 362 aa, Haemophilus influenzae
MAKEKIEIVVANDDTRIEKVDQVLPPIALLEKYPASEQAAALVKQTRHEAHNIIHGKDDRLLVVIGPCSIHDPKAAIEYATRLKPLREKYKDSLEIIMRVYFEKPRTTVGWKGLINEPYLNDTYRLNDGLRIARKLLSDINDLGVPAAGEFLDMITPQYLADFMSWGAIGARTTESQVHRELASGLSCAVGFKNATNGGVKVALDAIGAAEAPHYFLSVTKFGHSAIVSTKGNEDCHIILRGGDKGPNYSAEDVEKVCADIEKTGRIPHVMVDFSHANSSKQYKKQMDVCQDVCNQIAFGSKQIFGVMVESHLVEGRQDLVDGKAQTYGQSITDACIGWEDSERLLQQLSDAVIARRKATSN

SEQ ID NO: 75780 - DNA, 1113 bp, Saccharomyces cerevisiae
  CDS (1)..(1113)
atgagtgaatctccaatgttcgctgccaacggcatgccaaaggtaaatcaaggtgctgaagaagatgtcagaattttaggttacgacccattagcttctccagctctccttcaagtgcaaatcccagccacaccaacttctttggaaactgccaagagaggtagaagagaagctatagatattattaccggtaaagacgacagagttcttgtcattgtcggtccttgttccatccatgatctagaagccgctcaagaatacgctttgagattaaagaaattgtcagatgaattaaaaggtgatttatccatcattatgagagcatacttggagaagccaagaacaaccgtcggctggaaaggtctaattaatgaccctgatgttaacaacactttcaacatcaacaagggtttgcaatccgctagacaattgtttgtcaacttgacaaatatcggtttgccaattggttctgaaatgcttgataccatttctcctcaatacttggctgatttggtctccttcggtgccattggtgccagaaccaccgaatctcaactgcacagagaattggcctccggtttgtctttcccagttggtttcaagaacggtaccgatggtaccttaaatgttgctgtggatgcttgtcaagccgctgctcattctcaccatttcatgggtgttactaagcatggtgttgctgctatcaccactactaagggtaacgaacactgcttcgttattctaagaggtggtaaaaagggtaccaactacgacgctaagtccgttgcagaagctaaggctcaattgcctgccggttccaacggtctaatgattgactactctcacggtaactccaataaggatttcagaaaccaaccaaaggtcaatgacgttgtttgtgagcaaatcgctaacggtgaaaacgccattaccggtgtcatgattgaatcaaacatcaacgaaggtaaccaaggcatcccagccgaaggtaaagccggcttgaaatatggtgtttccatcactgatgcttgtataggttgggaaactactgaagacgtcttgaggaaattggctgctgctgtcagacaaagaagagaagttaacaagaaatag

SEQ ID NO: 75781 - protein, 370 aa, Saccharomyces cerevisiae
MSESPMFAANGMPKVNQGAEEDVRILGYDPLASPALLQVQIPATPTSLETAKRGRREAIDIITGKDDRVLVIVGPCSIHDLEAAQEYALRLKKLSDELKGDLSIIMRAYLEKPRTTVGWKGLINDPDVNNTFNINKGLQSARQLFVNLTNIGLPIGSEMLDTISPQYLADLVSFGAIGARTTESQLHRELASGLSFPVGFKNGTDGTLNVAVDACQAAAHSHHFMGVTKHGVAAITTTKGNEHCFVILRGGKKGTNYDAKSVAEAKAQLPAGSNGLMIDYSHGNSNKDFRNQPKVNDVVCEQIANGENAITGVMIESNINEGNQGIPAEGKAGLKYGVSITDACIGWETTEDVLRKLAAAVRQRREVNKK

SEQ ID NO: 75782 - DNA, 1047 bp, Buchnera aphidicola subsp
  CDS (1)..(1047): transl_table=11
atgaaaaaaacagatgaactacgtacaatacgaattgatccattaataactccagctgaattagcaaggcagtacgcgatcacttcagacatcatggacactgttatcgcaacaagacaaaatattgctcgtattatgactggacaagatgcgcgactacttgttgtaataggaccatgttcagttcatgatcctatcgcagcagtagaatatgcacatcgattgtatgaattacgagtaaaatataaagatcgtcttgaaattataatgcgtacatattttgaaaaaccaagaacagttgttggatggaaagggctgatttctgatccagatttaaatggtagttttcgagttaatcatggattagccgtagcacgtaaattattattagatattaatgcattaggaatgcctgcagcaacagagtttctcgatatagttataggacaatttatagcagatttaattagttggggtgctattggagcaagaactactgaaagtcaaattcatagagaaatggcttccgctctttcctgtccagtaggttttaaaaatggaactgacggtaatatacgcattgcaattgatgctattcgcgcagctaaagttagacatttatttttcgcgcctaataaagatggtcaaatgacgattaatcataccagtggcaatccatatgggcatataatcatgcgaggtggtcgtgcgccgaattaccatcctgatgatattaactcagcagtaaagcatttacgtgaatttgatctattagaacatttaatgattgattttagtcacggtaattgtttaaaagaacatcttcgtcaaaaaaatgtttctaagtctgtttcatatcaaatttctcatggttcgaaagctatttttggtgttatgattgaaagctttttagaagaaggttttcaaacagtaacgaataatcaaccattaatatatggtaaatcgattactgatgcctgtttaaattggaaagacagtgttttaattatcgaacaattagcagatgccgtagatgctcgtttttaa

SEQ ID NO: 75783 - protein, 348 aa, Buchnera aphidicola subsp
MKKTDELRTIRIDPLITPAELARQYAITSDIMDTVIATRQNIARIMTGQDARLLVVIGPCSVHDPIAAVEYAHRLYELRVKYKDRLEIIMRTYFEKPRTVVGWKGLISDPDLNGSFRVNHGLAVARKLLLDINALGMPAATEFLDIVIGQFIADLISWGAIGARTTESQIHREMASALSCPVGFKNGTDGNIRIAIDAIRAAKVRHLFFAPNKDGQMTINHTSGNPYGHIIMRGGRAPNYHPDDINSAVKHLREFDLLEHLMIDFSHGNCLKEHLRQKNVSKSVSYQISHGSKAIFGVMIESFLEEGFQTVTNNQPLIYGKSITDACLNWKDSVLIIEQLADAVDARF

SEQ ID NO: 75784 - DNA, 1047 bp, Escherichia coli O157
  CDS (1)..(1047): transl_table=11
atgaacagaactgacgaactccgtactgcgcgtattgagagcctggtaacgcccgccgaactcgcgctacggtatcccgtaacgcctggcgtcgccacccatgtcaccgactcccgccgcagaattgaaaaaatactcaatggtgaagataagcgactgttggtcattattggcccctgctcgatccacgatctcaccgctgcaatggagtacgccacccgtctgcagtcgctgcgcaaccagtaccagtcacggctggaaatcgtaatgcgcacctattttgaaaaaccacgaactgttgtcggctggaaaggactaatctccgatccagatttaaacggcagctatcggataaatcacggtctggagctggcgcgcaaattacttttacaggtaaatgagctgggcgtcccaaccgcgactgagttcctcgatatggtgaccggtcagtttattgctgatttaatcagttggggcgcgattggcgcacgtactaccgaaagtcagatccaccgtgaaatggcttcggcactctcctgtccggtaggttttaaaaatggtaccgatggcaatacgcggattgctgtggatgctatccgcgcagcccgcgccagccatatgttcctctcgccagacaaaaatggtcagatgaccatctatcagaccagcggcaacccgtatggccacattattatgcgtggcggcaaaaaaccgaattatcatgccgatgatatcgccgcagcctgcgatacgctgcacgagtttgatttacctgaacatctggtggtggatttcagccacggtaactgccagaagcagcaccgtcgccagttagaagtttgtgaggatatttgtcagcaaatccgcaatggctctacggcgattgctggaattatggcggaaagtttcctgcgcgaaggaacgcaaaaaatcgtcggcggtcagccgctcacttacggtcaatccattaccgacccgtgtctgggctgggaagataccgaacgcctggtcgaaaaactagcctctgcggtagatacccgcttctga

SEQ ID NO: 75785 - protein, 348 aa, Escherichia coli O157
MNRTDELRTARIESLVTPAELALRYPVTPGVATHVTDSRRRIEKILNGEDKRLLVIIGPCSIHDLTAAMEYATRLQSLRNQYQSRLEIVMRTYFEKPRTVVGWKGLISDPDLNGSYRINHGLELARKLLLQVNELGVPTATEFLDMVTGQFIADLISWGAIGARTTESQIHREMASALSCPVGFKNGTDGNTRIAVDAIRAARASHMFLSPDKNGQMTIYQTSGNPYGHIIMRGGKKPNYHADDIAAACDTLHEFDLPEHLVVDFSHGNCQKQHRRQLEVCEDICQQIRNGSTAIAGIMAESFLREGTQKIVGGQPLTYGQSITDPCLGWEDTERLVEKLASAVDTRF

SEQ ID NO: 75786 - DNA, 1047 bp, Escherichia coli O6
  CDS (1)..(1047): transl_table=11
atgaacagaactgacgaactccgtactgcgcgtattgagagcctggtaacgcccgccgaactcgcgctacggtatcccgtaacgcctggcgtcgccacccatgtcaccgactcccgccgtagaattgaaaaaatactgaatggtgaagataagcgactgttggtcattattggcccctgctcgatccacgatctcaccgctgcgatggagtacgccacccgtctgcagtcgctgcgcaaccagtaccagtcacggctggaaatcgtaatgcgcacctattttgaaaaaccacgaacggttgtcggctggaaaggactcatctccgatccagatttaaacggtagctatcgggtaaatcacggtctggagctggcgcgcaaattacttttacaggtaaatgagctgggcgtccctaccgcgactgagttcctcgatatggtgaccggtcagtttattgctgatttaatcagttggggtgcgattggcgcacgtactaccgaaagtcagatccaccgcgaaatggcttcggcactctcctgtccggtgggttttaaaaatggtaccgatggcaacacgcggattgccgtggatgctatccgcgcagcccgcgccagccatatgttcctctcgccagacaaaaatggtcagatgaccatctatcagaccagcggcaacccgtatggccacattattatgcgtggtggcaaaaaaccgaattatcatgccgatgatatcgccgcagcctgcgatacgctgcacgagtttgatttacctgaacatctggtggtggatttcagccacggtaactgccagaagcagcaccgtcgccagttagaagtttgtgaggatatttgtcagcaaatccgcaatggctctacggcgattgctggaattatggcggaaagtttcctgcgcgaaggaacgcaaaaaatcgtcggcggtcagccgctcacttacggtcaatccattaccgacccgtgtctgggctgggaagataccgaacgcctggtcgaaaaactcgcctctgcggtagatactcgcttctga

SEQ ID NO: 75787 - protein, 348 aa, Escherichia coli O6
MNRTDELRTARIESLVTPAELALRYPVTPGVATHVTDSRRRIEKILNGEDKRLLVIIGPCSIHDLTAAMEYATRLQSLRNQYQSRLEIVMRTYFEKPRTVVGWKGLISDPDLNGSYRVNHGLELARKLLLQVNELGVPTATEFLDMVTGQFIADLISWGAIGARTTESQIHREMASALSCPVGFKNGTDGNTRIAVDAIRAARASHMFLSPDKNGQMTIYQTSGNPYGHIIMRGGKKPNYHADDIAAACDTLHEFDLPEHLVVDFSHGNCQKQHRRQLEVCEDICQQIRNGSTAIAGIMAESFLREGTQKIVGGQPLTYGQSITDPCLGWEDTERLVEKLASAVDTRF

SEQ ID NO: 75788 - DNA, 1047 bp, Escherichia coli
  CDS (1)..(1047): transl_table=11
atgaacagaactgacgaactccgtactgcgcgtattgagagcctggtaacgcccgccgaactcgcgctacggtatcccgtaacgcctggcgtcgccacccatgtcaccgactcccgccgcagaattgaaaaaatactgaatggtgaagataagcgactgttggtcattattggcccctgctcgatccacgatctcaccgctgcaatggagtacgccacccgtctgcagtcgctgcgcaaccagtaccagtcacggctggaaatcgtaatgcgcacctattttgaaaaaccacgaactgttgtcggctggaaaggactaatctccgatccagatttaaacggcagctatcgggtaaatcacggtctggagctggcgcgcaaattacttttacaggtaaatgagctgggcgtcccaaccgcgaccgagttcctcgatatggtgaccggtcagtttattgctgatttaatcagttggggcgcgattggcgcacgtactaccgaaagtcagatccaccgcgaaatggcttcggcactctcctgtccggtaggttttaaaaatggtaccgatggcaatacgcggattgctgtggatgctatccgcgcagcccgcgccagccatatgttcctctcgccagacaaaaatggtcagatgaccatctatcagaccagcggcaacccgtatggccacattattatgcgtggcggcaaaaaaccgaattatcatgccgatgatatcgccgcagcctgcgatacgctgcacgagtttgatttacctgaacatctggtggtggatttcagccacggtaactgccagaagcagcaccgtcgccagttagaagtttgtgaggatatttgtcagcaaatccgcaatggctctacggcgattgctggaattatggcggaaagtttcctgcgcgaaggaacgcaaaaaatcgtcggcagtcagccgctcacttacggtcaatccattaccgacccgtgtctgggctgggaggataccgaacgcctggtcgaaaaactcgcctctgcggtagatacccgcttctga

SEQ ID NO: 75789 - protein, 348 aa, Escherichia coli
MNRTDELRTARIESLVTPAELALRYPVTPGVATHVTDSRRRIEKILNGEDKRLLVIIGPCSIHDLTAAMEYATRLQSLRNQYQSRLEIVMRTYFEKPRTVVGWKGLISDPDLNGSYRVNHGLELARKLLLQVNELGVPTATEFLDMVTGQFIADLISWGAIGARTTESQIHREMASALSCPVGFKNGTDGNTRIAVDAIRAARASHMFLSPDKNGQMTIYQTSGNPYGHIIMRGGKKPNYHADDIAAACDTLHEFDLPEHLVVDFSHGNCQKQHRRQLEVCEDICQQIRNGSTAIAGIMAESFLREGTQKIVGSQPLTYGQSITDPCLGWEDTERLVEKLASAVDTRF

SEQ ID NO: 75790 - DNA, 1047 bp, Enterobacter agglomerans
  CDS (1)..(1047): transl_table=11
atgaacaaaaccgacgaactgcgtaccgcacgcattggtagtctgattaccccccccagcctggcggctgagcatcctgtctctccggcaattgccgacaatgtcaccgctgcccgtaaacgtattgcctgtattctgacgggtgaagatcaccgcctgctggtggtgattggcccctgctcgctgcacgacccgaaagcggcactggaatatgctgagcgtctgaacgcgttacgccgccgctatgaagatcggctggagattgtgatgcgcgcctactttgaaaagccgcgcaccgtagtgggctggaaaggcttaatctccgatccggatctggatgggagctacgatgtgaaccgcggcataggcatcgcccgccagctgctgattgatatcaacgcgctgggcctgcctaccgccacggaattcctggatatggtgatcggccagtttattgccgatctgattagctggggcgcgattggcgcacgcaccaccgaaagccagatccaccgcgaaatggcatcggccctctcctgcccggtcggctttaaaaacggcaccgatggtaacgtacagattgccgtggatgcgattcgcgccgcgcgcgccagccacatgttcctttcgcccgataagctgggccagatgactatctatcagaccagcggcaacccgcatggtcatgtgatcctgcgtggcggcaaacagcctaactatcatgccagtgatgtcgccgccgcagccgaaagtctgtcggcgtttaatctgccacagcagctggtgatcgacttcagtcacggtaactgcctgaagcagcatcgtcgtcagatggatgtcgcggcagaggtggcagaacagattaaagcgggatcgcaggccgttgccggtgtgatgattgaaagcttcctggaagagggcaatcagaaagtcgtcagcggcgaaccgctggtctatggcaagtcgattaccgatccctgcctcggctggcaggagagcgaaaaggtgctcgccctgctggccgaggcggtttctcaccgcctctga

SEQ ID NO: 75791 - protein, 348 aa, Enterobacter agglomerans
MNKTDELRTARIGSLITPPSLAAEHPVSPAIADNVTAARKRIACILTGEDHRLLVVIGPCSLHDPKAALEYAERLNALRRRYEDRLEIVMRAYFEKPRTVVGWKGLISDPDLDGSYDVNRGIGIARQLLIDINALGLPTATEFLDMVIGQFIADLISWGAIGARTTESQIHREMASALSCPVGFKNGTDGNVQIAVDAIRAARASHMFLSPDKLGQMTIYQTSGNPHGHVILRGGKQPNYHASDVAAAAESLSAFNLPQQLVIDFSHGNCLKQHRRQMDVAAEVAEQIKAGSQAVAGVMIESFLEEGNQKVVSGEPLVYGKSITDPCLGWQESEKVLALLAEAVSHRL

SEQ ID NO: 75792 - DNA, 1047 bp, Salmonella typhimurium
  CDS (1)..(1047): transl_table=11
atgaacagaaccgacgaactccgtactgcgcgtatcgacagcctggtaacaccgaccgaactcgcgcagcggtatcctgtatcgtcctccgtcgccagtcacgttaccgactcccgacgccggatagaaaagattttaaatggtgaagatccacggctactggtcgtcattggcccctgttcgattcacgatctgaatgctgccatggaatacgcgacgcagctccaggcacaacgccaaaagcatcaggcgcgtctggagatcgtcatgcgcacctattttgaaaaaccgcgcaccgtcgtgggatggaaaggcctgatttccgatcccgacttgaatggcagttaccgcgtcaattatgggcttgaactggcgcgtcgcttgctattgcaggtgaacgaactgggagtaccgaccgccacagagtttcttgatatggtcaccggccagtttattgccgatctgatcagttggggagcgattggcgcgcgtaccaccgaaagccaaatccatcgggaaatggcttctgcgctctcttgtccggtcggctttaaaaatggtacggatggcaatacccgcattgccgttgatgctattcgcgcctcccgcgccagtcatatgtttctctcgccggataaagacggacagatgactatctaccagacgagtggcaacccgtatgggcacatcatcatgcgcggcggtaaaaaaccgaactaccacgctgaagatattgccgccgcctgcgatacgttgcatgaatttgatctgccggaacatctggtcgtcgacttcagccacggcaactgtcaaaaacagcatcgccgccagttagaggtatgtgatgatatttgccagcagattcgtaatggctccacggcaattgccgggattatggcagagagttttttacgggaaggcacgcaaaaaattatcagcggtcaaccattaatctatggtcagtccattaccgatccttgcctgaactgggaagatacggaagttttgttggaaaaacttgccgcggcggtagacagccgcttttaa

SEQ ID NO: 75793 - protein, 348 aa, Salmonella typhimurium
MNRTDELRTARIDSLVTPTELAQRYPVSSSVASHVTDSRRRIEKILNGEDPRLLVVIGPCSIHDLNAAMEYATQLQAQRQKHQARLEIVMRTYFEKPRTVVGWKGLISDPDLNGSYRVNYGLELARRLLLQVNELGVPTATEFLDMVTGQFIADLISWGAIGARTTESQIHREMASALSCPVGFKNGTDGNTRIAVDAIRASRASHMFLSPDKDGQMTIYQTSGNPYGHIIMRGGKKPNYHAEDIAAACDTLHEFDLPEHLVVDFSHGNCQKQHRRQLEVCDDICQQIRNGSTAIAGIMAESFLREGTQKIISGQPLIYGQSITDPCLNWEDTEVLLEKLAAAVDSRF

SEQ ID NO: 75794 - DNA, 1047 bp, Shigella flexneri
  CDS (1)..(1047): transl_table=11
atgaacagaactgacgaactccgtactgcgcgtattgagagcctggtaacgcccgccgaactcgcgctacggtatcccgtaacgcctggcgtcgccacccatgtcaccgactcccgccgcagaattgaaaaaatactgaatggtgaagataagcgactgttggtcattattggcccctgctcgatccacgatctcaccgctgcaatggagtacgccacccgtctgcagtcgctgcgcaaccagtaccagtcacggctggaaatcgtaatgcgcacctattttgaaaaaccacgaactgttgtcggctggaaagggctaatctccgatccggatttaaacggcagctatcgggtaaatcacggtctggagctggcgcgcaaattacttttacaggtaaatgagctgggtgtccctaccgcgactgagttcctcgatatggtaaccggtcagtttattgctgatttaatcagttggggcgcgattggcgctcgtactaccgaaagtcagatccaccgcgaaatggcttcagcactctcctgtccggtaggttttaaaaatggtaccgatggcaacacgcggattgccgtggatgctatccgcgcagcccgcgccagccatatgttcctctcgccagacaaaaatggtcagatgaccatctatcagaccagcggcaacccgtatggccacattattatgcgtggcggcaaaaaaccgaattatcatgccgatgatatcgccgcagcctgcgatacgctgcacgagtttgatttacctgaacatctggtggtggatttcagccacggtaactgccagaagcagcaccgtcgccagttagaagtttgtgaggatatttgtcagcaaatccgcaatggctctacggagattgctggaattatggcggaaagtttcctgcgcgaaggaacgcaaaaaatcgtcggcggtcagccgctcacttacggtcaatccattaccgacccgtgtctgggctgggaagataccgaacgcctggtcgaaaaactcgcctttgcggtagatacccgcttctga

SEQ ID NO: 75795 - protein, 348 aa, Shigella flexneri
MNRTDELRTARIESLVTPAELALRYPVTPGVATHVTDSRRRIEKILNGEDKRLLVIIGPCSIHDLTAAMEYATRLQSLRNQYQSRLEIVMRTYFEKPRTVVGWKGLISDPDLNGSYRVNHGLELARKLLLQVNELGVPTATEFLDMVTGQFIADLISWGAIGARTTESQIHREMASALSCPVGFKNGTDGNTRIAVDAIRAARASHMFLSPDKNGQMTIYQTSGNPYGHIIMRGGKKPNYHADDIAAACDTLHEFDLPEHLVVDFSHGNCQKQHRRQLEVCEDICQQIRNGSTEIAGIMAESFLREGTQKIVGGQPLTYGQSITDPCLGWEDTERLVEKLAFAVDTRF

SEQ ID NO: 75796 - DNA, 25 bp, Artificial sequence
  primer
atgaattatcagaacgacgatttac

SEQ ID NO: 75797 - DNA, 22 bp, Artificial sequence
  primer
ttacccgcgacgcgcttttact

SEQ ID NO: 75798 - protein, 348 aa, Artificial sequence
  consensus sequence
  Variant (2)..(3): Xaa in position 2 to 3 is any amino acid
  Variant (5)..(11): Xaa in position 5 to 11 is any amino acid
  Variant (13)..(24): Xaa in position 13 to 24 is any amino acid
  Variant (25)..(25): Xaa in position 25 is any or no amino acid
  Variant (27)..(31): Xaa in position 27 to 31 is any amino acid
  Variant (33)..(36): Xaa in position 33 to 36 is any amino acid
  Variant (38)..(38): Xaa in position 38 is any amino acid
  Variant (39)..(41): Xaa in position 39 to 41 is any or no amino acid
  Variant (44)..(44): Xaa in position 44 is any amino acid
  Variant (46)..(47): Xaa in position 46 to 47 is any amino acid
  Variant (55)..(57): Xaa in position 55 to 57 is any amino acid
  Variant (59)..(60): Xaa in position 59 to 60 is any amino acid
  Variant (63)..(64): Xaa in position 63 to 64 is any amino acid
  Variant (66)..(74): Xaa in position 66 to 74 is any amino acid
  Variant (75)..(77): Xaa in position 75 to 77 is any or no amino acid
  Variant (79)..(80): Xaa in position 79 to 80 is any amino acid
  Variant (84)..(84): Xaa in position 84 is any amino acid
  Variant (92)..(92): Xaa in position 92 is any amino acid
  Variant (94)..(94): Xaa in position 94 is any amino acid
  Variant (101)..(101): Xaa in position 101 is any amino acid
  Variant (104)..(107): Xaa in position 104 to 107 is any amino acid
  Variant (108)..(113): Xaa in position 108 to 113 is any or no amino acid
  Variant (116)..(118): Xaa in position 116 to 118 is any amino acid
  Variant (120)..(120): Xaa in position 120 is any amino acid
  Variant (122)..(129): Xaa in position 122 to 129 is any amino acid
  Variant (130)..(131): Xaa in position 130 to 131 is any or no amino acid
  Variant (133)..(135): Xaa in position 133 to 135 is any amino acid
  Variant (137)..(137): Xaa in position 137 is any amino acid
  Variant (140)..(143): Xaa in position 140 to 143 is any amino acid
  Variant (146)..(147): Xaa in position 146 to 147 is any amino acid
  Variant (150)..(151): Xaa in position 150 to 151 is any amino acid
  Variant (153)..(153): Xaa in position 153 is any amino acid
  Variant (164)..(164): Xaa in position 164 is any amino acid
  Variant (168)..(168): Xaa in position 168 is any amino acid
  Variant (174)..(174): Xaa in position 174 is any amino acid
  Variant (176)..(176): Xaa in position 176 is any amino acid
  Variant (181)..(181): Xaa in position 181 is any amino acid
  Variant (185)..(188): Xaa in position 185 to 188 is any amino acid
  Variant (190)..(191): Xaa in position 190 to 191 is any amino acid
  Variant (193)..(195): Xaa in position 193 to 195 is any amino acid
  Variant (197)..(199): Xaa in position 197 to 199 is any amino acid
  Variant (201)..(201): Xaa in position 201 is any amino acid
  Variant (203)..(208): Xaa in position 203 to 208 is any amino acid
  Variant (210)..(211): Xaa in position 210 to 211 is any amino acid
  Variant (212)..(215): Xaa in position 212 to 215 is any or no amino acid
  Variant (217)..(217): Xaa in position 217 is any amino acid
  Variant (220)..(222): Xaa in position 220 to 222 is any amino acid
  Variant (224)..(225): Xaa in position 224 to 225 is any amino acid
  Variant (230)..(232): Xaa in position 230 to 232 is any amino acid
  Variant (233)..(233): Xaa in position 233 is any or no amino acid
  Variant (236)..(253): Xaa in position 236 to 253 is any amino acid
  Variant (254)..(264): Xaa in position 254 to 264 is any or no amino acid
  Variant (266)..(266): Xaa in position 266 is any amino acid
  Variant (269)..(269): Xaa in position 269 is any amino acid
  Variant (272)..(272): Xaa in position 272 is any amino acid
  Variant (274)..(277): Xaa in position 274 to 277 is any amino acid
  Variant (279)..(280): Xaa in position 279 to 280 is any amino acid
  Variant (282)..(287): Xaa in position 282 to 287 is any amino acid
  Variant (289)..(291): Xaa in position 289 to 291 is any amino acid
  Variant (293)..(295): Xaa in position 293 to 295 is any amino acid
  Variant (296)..(300): Xaa in position 296 to 300 is any or no amino acid
  Variant (302)..(302): Xaa in position 302 is any amino acid
  Variant (304)..(304): Xaa in position 304 is any amino acid
  Variant (307)..(310): Xaa in position 307 to 310 is any amino acid
  Variant (312)..(312): Xaa in position 312 is any amino acid
  Variant (314)..(318): Xaa in position 314 to 318 is any amino acid
  Variant (319)..(329): Xaa in position 319 to 329 is any or no amino acid
  Variant (332)..(332): Xaa in position 332 is any amino acid
  Variant (334)..(334): Xaa in position 334 is any amino acid
  Variant (337)..(337): Xaa in position 337 is any amino acid
  Variant (339)..(340): Xaa in position 339 to 340 is any amino acid
  Variant (342)..(343): Xaa in position 342 to 343 is any amino acid
  Variant (345)..(347): Xaa in position 345 to 347 is any amino acid
LXXPXXXXXXXPXXXXXXXXXXXXXRXXXXXIXXXXDXXXXRLXVXXGPCSIHDXXXAXXYAXXLXXXXXXXXXXXXLXXVMRXYFEKPRTXTXGWKGLIXDPXXXXXXXXXXGLXXXRXLXXXXXXXXXXPXXXEXLDXXXXQYXXDLXXWXAIGARTTESQXHREXASGLSXPXGFKNXTDGXXXXAXXAXXXAXXXHXFXXXXXXGXXXXXXTXGNXXXHXXLRGGXXXXNYXXXXXXXXXXXXXXXXXXXXXXXXXXXXXDXSHXNSXKXXXXQXXVXXXXXXQXXXGXXXXXXXXGXMXESXXXXGXQXXXXXXXXXXXXXXXXYGXSXTDXCXXWXXTXXXL

SEQ ID NO: 75799 - protein, 41 aa, Artificial sequence
  protein pattern
  Variant (2)..(2): Xaa in position 2 is Phe or Tyr
  Variant (3)..(3): Xaa in position 3 is any amino acid
  Variant (4)..(4): Xaa in position 4 is Ala, Gly, Gln or Ser
  Variant (5)..(5): Xaa in position 5 is Asp or Glu
  Variant (6)..(7): Xaa in position 6 to 7 is any amino acid
  Variant (8)..(8): Xaa in position 8 is Ala, Cys, Gly, Ser or Thr
  Variant (9)..(9): Xaa in position 9 is any amino acid
  Variant (10)..(10): Xaa in position 10 is Ala, Gly, Ser or Thr
  Variant (11)..(11): Xaa in position 11 is Ala or Ser
  Variant (12)..(12): Xaa in position 12 is Ile or Val
  Variant (16)..(16): Xaa in position 16 is Asn, Ser or Thr
  Variant (17)..(17): Xaa in position 17 is any amino acid
  Variant (21)..(21): Xaa in position 21 is any amino acid
  Variant (24)..(24): Xaa in position 24 is Glu or Gln
  Variant (25)..(25): Xaa in position 25 is Leu or Met
  Variant (26)..(26): Xaa in position 26 is Ala, Ser or Val
  Variant (28)..(28): Xaa in position 28 is Ala or Gly
  Variant (29)..(29): Xaa in position 29 is any amino acid
  Variant (31)..(31): Xaa in position 31 is any amino acid
  Variant (32)..(32): Xaa in position 32 is Ala, Pro or Ser
  Variant (33)..(33): Xaa in position 33 is Ile or Val
  Variant (35)..(35): Xaa in position 35 is Phe or Tyr
  Variant (38)..(40): Xaa in position 38 to 40 is any or no amino acid
QXXXXXXXXXXXGARXXESQXHRXXXSXXSXXXGXKNXXXG

SEQ ID NO: 75800 - protein, 21 aa, Artificial sequence
  protein pattern
  Variant (2)..(2): Xaa in position 2 is any amino acid
  Variant (3)..(3): Xaa in position 3 is any or no amino acid
  Variant (8)..(8): Xaa in position 8 is Ile or Val
  Variant (11)..(12): Xaa in position 11 to 12 is any amino acid
  Variant (13)..(13): Xaa in position 13 is Ala, Gln, Ser or Thr
  Variant (15)..(15): Xaa in position 15 is any amino acid
  Variant (16)..(16): Xaa in position 16 is Ala, Asp, Glu or Gln
  Variant (18)..(18): Xaa in position 18 is Ala, Cys, Gly or Ser
  Variant (19)..(20): Xaa in position 19 to 20 is any amino acid
  Variant (21)..(21): Xaa in position 21 is Phe, Ile or Leu
VXXGPCSXHDXXXAXXYXXXX

SEQ ID NO: 75801 - protein, 21 aa, Artificial sequence
  protein pattern
  Variant (6)..(6): Xaa in position 6 is Ala, Ile or Val
  Variant (7)..(7): Xaa in position 7 is any amino acid
  Variant (10)..(10): Xaa in position 10 is any amino acid
  Variant (11)..(11): Xaa in position 11 is Ile, Leu, Met or Val
  Variant (12)..(12): Xaa in position 12 is Asp or Asn
  Variant (13)..(13): Xaa in position 13 is Asp, Glu, Gly, Asn or Ser
  Variant (14)..(19): Xaa in position 14 to 19 is any amino acid
  Variant (21)..(21): Xaa in position 21 is Ile, Leu, Met or Val
GWKGLXXDPXXXXXXXXXXGX

SEQ ID NO: 75802 - protein, 24 aa, Artificial sequence
  protein pattern
  Variant (2)..(2): Xaa in position 2 is any amino acid
  Variant (5)..(5): Xaa in position 5 is Ala, Asp or Gly
  Variant (8)..(8): Xaa in position 8 is any amino acid
  Variant (10)..(13): Xaa in position 10 to 13 is any amino acid
  Variant (15)..(16): Xaa in position 15 to 16 is any amino acid
  Variant (18)..(20): Xaa in position 18 to 20 is any amino acid
  Variant (21)..(21): Xaa in position 21 is Ala, Ile, Leu or Val
  Variant (22)..(23): Xaa in position 22 to 23 is any amino acid
DXSHXNSXKXXXXQXXVXXXXXXQ

SEQ ID NO: 75803 - protein, 14 aa, Artificial sequence
  protein pattern
  Variant (2)..(2): Xaa in position 2 is any amino acid
  Variant (3)..(3): Xaa in position 3 is Ile, Leu or Val
  Variant (4)..(4): Xaa in position 4 is Ile or Val
  Variant (7)..(7): Xaa in position 7 is Ala, Ser, Thr or Val
  Variant (9)..(9): Xaa in position 9 is Phe, Leu or Val
LXXXMRXYXEKPRT

SEQ ID NO: 75804 - protein, 18 aa, Artificial sequence
  protein pattern
  Variant (2)..(2): Xaa in position 2 is any amino acid
  Variant (4)..(4): Xaa in position 4 is Ile or Val
  Variant (7)..(7): Xaa in position 7 is Ala, Gly or Pro
  Variant (9)..(9): Xaa in position 9 is Ile or Leu
  Variant (10)..(10): Xaa in position 10 is Ala, Asp, Gly, Asn or Ser
  Variant (11)..(13): Xaa in position 11 to 13 is any amino acid
  Variant (14)..(14): Xaa in position 14 is Ser or Thr
  Variant (15)..(17): Xaa in position 15 to 17 is any amino acid
  Variant (18)..(18): Xaa in position 18 is Phe, Ile, Leu or Val
GXSXTDXCXXXXXXXXXX

SEQ ID NO: 75805 - protein, 14 aa, Artificial sequence
  protein pattern
  Variant (2)..(2): Xaa in position 2 is any amino acid
  Variant (5)..(6): Xaa in position 5 to 6 is any amino acid
  Variant (7)..(7): Xaa in position 7 is Ala, Cys, Gly, Ser or Thr
  Variant (9)..(9): Xaa in position 9 is Ala, Ile, Leu or Val
  Variant (10)..(10): Xaa in position 10 is Ile or Val
  Variant (14)..(14): Xaa in position 14 is Ala, Gly or Ser
TXGNXXXHXXLRGX

SEQ ID NO: 75806 - protein, 19 aa, Artificial sequence
  protein pattern
  Variant (2)..(2): Xaa in position 2 is Asp, Glu, Asn or Ser
  Variant (3)..(4): Xaa in position 3 to 4 is any amino acid
  Variant (5)..(5): Xaa in position 5 is Ile, Leu or Val
  Variant (6)..(6): Xaa in position 6 is any amino acid
  Variant (8)..(8): Xaa in position 8 is any amino acid
  Variant (10)..(10): Xaa in position 10 is any amino acid
  Variant (13)..(13): Xaa in position 13 is any amino acid
  Variant (14)..(14): Xaa in position 14 is Ile or Leu
  Variant (15)..(16): Xaa in position 15 to 16 is any amino acid
  Variant (18)..(18): Xaa in position 18 is any amino acid
GXXXXXGXMXESXXXXGXQ

SEQ ID NO: 75807 - DNA, 1086 bp, Escherichia coli
  CDS (1)..(1086): transl_table=11
atggaaagtggtcatcgctttgatgctcagacgctgcacagttttattcaggctgtatttcgtcagatgggtagcgaggaacaagaagcgaaattagttgccgatcatttaatcgcggcaaacctggcagggcatgattcacatggtattggcatgatcccaagctatgtacgctcctggagtcaggggcacctgcaaattaaccatcatgccaaaaccgttaaagaggcgggggcggcggtcacgctcgatggcgatcgcgcatttggtcaggtcgcggcacatgaagcgatggcgctggggattgagaaagcgcatcagcacggtattgccgccgtggcgctacataactcgcatcatatcggccgtatcggttactgggcggagcagtgtgcagcggcggggtttgtctctatccactttgttagcgtggtcggtattccaatggtcgcgccgttccacggtcgcgacagccgctttggcaccaatccgttctgtgtggttttccctcgtaaagataatttcccgctgttgcttgattacgccaccagcgccattgcatttggcaaaacccgcgtcgcctggcataaaggcgtccccgtgccgccaggttgcctgattgacgttaacggcgtgccgacgaccaatccggcggtaatgcaggagtcgccgttgggttcgctgttgacctttgccgaacataaaggctacgcccttgcagcgatgtgtgaaattcttggcggggcgctttccggcggtaaaacgacgcatcaggaaacgttacaaaccagtcccgatgccattcttaactgcatgaccactatcatcatcaacccggaactcttcggcgcgccggattgtaacgcgcagaccgaagcctttgccgagtgggtgaaagcctcgccgcatgatgatgataagccgattttgctaccgggcgagtgggaagtgaacacgcgtcgcgaacggcagaagcaggggattccactggatgcgggaagctggcaggccatttgtgatgcagcgcggcagattggtatgccggaagagacgttgcaggctttctgtcagcagttagccagctaa

SEQ ID NO: 75808 - protein, 361 aa, Escherichia coli
MESGHRFDAQTLHSFIQAVFRQMGSEEQEAKLVADHLIAANLAGHDSHGIGMIPSYVRSWSQGHLQINHHAKTVKEAGAAVTLDGDRAFGQVAAHEAMALGIEKAHQHGIAAVALHNSHHIGRIGYWAEQCAAAGFVSIHFVSVVGIPMVAPFHGRDSRFGTNPFCVVFPRKDNFPLLLDYATSAIAFGKTRVAWHKGVPVPPGCLIDVNGVPTTNPAVMQESPLGSLLTFAEHKGYALAAMCEILGGALSGGKTTHQETLQTSPDAILNCMTTIIINPELFGAPDCNAQTEAFAEWVKASPHDDDKPILLPGEWEVNTRRERQKQGIPLDAGSWQAICDAARQIGMPEETLQAFCQQLAS

SEQ ID NO: 75809 - DNA, 1152 bp, Mesorhizobium loti MAFF303099
  CDS (1)..(1152): transl_table=11
atgatccggaaaagtgagcatcggtgcttcgacggtcacgctcaagcggagagaggacaagcgaccatggttatcatcaaggttgaaaatctcatcgatttcatcgcagaagtcttcggtcacgccgactcctcgccggaagaggcacgtcgcatagcaacctatctgacgacagccaatctcaccggccatgacagtcatggcgtgatccgggtgccgggctatattcgctggaaaaaaataggttcggtggtgccaaaccagacggtcgaggtcttggtcgacacgccctcgctcgcagtgctcgacggcaagttcggctacggtcagacggtggcgccagttgcagtgaagctcggcatcgagaagtgcaagaaggcgggcttggcggcggtggcgctgcgcaatgccggccatattggccgcatcggcgactgggcggagatggcggcggccgatggcctcgtctccgtgcactttgtcaatgccaccgattcgcttttggtcgcacctttcggcggtgtcgagaggcgcatgtcgaccgcgccctattgcgtgggaatcccgcggcaaggccatgatccaatcgtgctcgatttcgcaacctctgttgtcgcggagggtaagtgcctggtcgcaagcctgggcggcaagaaattgcccaagggcgcgctgatcgattccgacggcacccttagcgacgatccgcggttgctctacggtccatacacctccgatagcacgcgcgatcatacccagggtataggagccatccgcgcctttggcgagcacaagggctctggccttgccctgatctgcgagctgatgggcggagcgctgacgggtacgggtgcgaccgccgctaatcaacggttcgccaacggcatgctggcgttctatatcgatccaaaggtggtcgatcccgccaattttttcgacggtgaagtcacccgctataccgatttcatccgcgccacgaagccggtccccggcatcgagcaggtgcagctcccgggcgatccagaacgcaggatccgcgccgaacgaaccaaggatggcatcccgttgctcgatgatacctgggccgcaatagtgaacaccgcgcgtgaaatgggcgtgagtgagacagatatccggcaggccacaagctag

SEQ ID NO: 75810 - protein, 383 aa, Mesorhizobium loti MAFF303099
MIRKSEHRCFDGHAQAERGQATMVIIKVENLIDFIAEVFGHADSSPEEARRIATYLTTANLTGHDSHGVIRVPGYIRWKKIGSVVPNQTVEVLVDTPSLAVLDGKFGYGQTVAPVAVKLGIEKCKKAGLAAVALRNAGHIGRIGDWAEMAAADGLVSVHFVNATDSLLVAPFGGVERRMSTAPYCVGIPRQGHDPIVLDFATSVVAEGKCLVASLGGKKLPKGALIDSDGTLSDDPRLLYGPYTSDSTRDHTQGIGAIRAFGEHKGSGLALICELMGGALTGTGATAANQRFANGMLAFYIDPKVVDPANFFDGEVTRYTDFIRATKPVPGIEQVQLPGDPERRIRAERTKDGIPLLDDTWAAIVNTAREMGVSETDIRQATS

SEQ ID NO: 75811 - DNA, 1086 bp, Escherichia coli O157:H7 EDL933
  CDS (1)..(1086): transl_table=11
  misc_feature (877)..(877): k is g or t
atggaaagtggtcatcgctttgatgctcagacgctgcacagctttattcaggctgtatttcgtcagatgggtagcgaggaacaagaagcgaaattagttgccgatcatttaatcgcggcaaacctggcagggcatgattcacatggtattggcatgatcccaagctatgtacgctcctggagtcaggggcacctgcaaattaaccatcatgccaaaatcgttaaagaggcgggggcggcggtcacgctcgatggcgatcgcgcatttggtcaggtcgcggcacatgaagcgatggcgctggggattgagaaagcgcatcagcacggtattgctgccgtggcgctacataactcgcatcatatcggccgtatcggttactgggcggagcagtgtgcagcggcggggtttgtctctatccactttgttagcgtggtcggtattccaatggtcgcaccgttccacggtcgcgacagccgctttggcacgaatccgttctgtgtggttttcccacgtaaagatgattttccgctgttgcttgattacgccaccagcgccattgcatttggcaaaacccgcgtcgcctggcataaaggcgtccccgtgccgccaggttgcctgattgacgttaacggcgtgccgacgaccaatccggcggtaatgcaggagtcgccgttgggttcgctgttgacctttgccgaacataaaggctacgccctggcggcaatgtgtgaaattcttggcggggcgctttctggcggtaaaactacgcatcaggaaacgttacaaaccagtcccgatgccattcttaactgcatgaccactatcatcatcaacccggaactgttcggcgcgccggattgtagcgcgcagaccgaakcctttgccgagtgggtgaaagcctcgccgcatgatgacgataagccgattttgctcccgggcgagtgggaagtgaacacgcgtcgcgaacggcaggagcaggggattccattggatgcgggaagctggcaggccatttgtgatgcggcgcggcagattggtatgccggaagagacgttgcaggctttctgtcagcagttagccagctaa

SEQ ID NO: 75812 - protein, 361 aa, Escherichia coli O157:H7 EDL933
  misc_feature (293)..(293): The Xaa at location 293 stands for Ala, or Ser.
MESGHRFDAQTLHSFIQAVFRQMGSEEQEAKLVADHLIAANLAGHDSHGIGMIPSYVRSWSQGHLQINHHAKIVKEAGAAVTLDGDRAFGQVAAHEAMALGIEKAHQHGIAAVALHNSHHIGRIGYWAEQCAAAGFVSIHFVSVVGIPMVAPFHGRDSRFGTNPFCVVFPRKDDFPLLLDYATSAIAFGKTRVAWHKGVPVPPGCLIDVNGVPTTNPAVMQESPLGSLLTFAEHKGYALAAMCEILGGALSGGKTTHQETLQTSPDAILNCMTTIIINPELFGAPDCSAQTEXFAEWVKASPHDDDKPILLPGEWEVNTRRERQEQGIPLDAGSWQAICDAARQIGMPEETLQAFCQQLAS

SEQ ID NO: 75813 - DNA, 1077 bp, Agrobacterium tumefaciens str. C58
  CDS (1)..(1077): transl_table=11
atggcgcacggtaacgaaaaggccactgttctggcgaggctggacgagttggagcggttctgccgcgccgtttttctggccgtcggcaccgatgaggaaacggccgatgcggcgacccgcgccatgatgcacggcacaaggctcggcgtggacagccatggcgtgcgcctgcttgcccattatgtcacggcccttgaaggcgggcgcctcaatcggcggccgcagatcagccgcgtgtccggtttcggtgccgtggaaacgatcgatgccgatcatgcccatggcgcccgcgccacctatgcggccatggagaatgccatggcgcttgcggaaaaattcggcattggcgcggtggcgatccgcaactcctcgcatttcggcccggccggcgcttatgcgctggaagcggcccggcagggttatatcggccttgccttctgcaattcggacagtttcgtgcgtctgcatgatggtgccatgcggtttcacggcaccaacccgattgccgtcggtgtgccggcagcggatgacatgccctggctgctggatatggccacaagcgccgtgccctataaccgtgttctgctataccgcagcctcggccagcaactgccgcaaggcgtcgcctcggatggcgacggcgtcgatacgcgcgaccccaatgccgtcgagatgcttgcccccgttggcggtgaattcggtttcaagggggcggcgctggcgggagtggtcgagattttcagcgcagttctcaccggcatgaggctcagtttcgatctcgcccccatgggcgggccggatttttcaacgccgcgtgggcttggagccttcgtgctggcgctgaagccggaggccttcctggagcgggacgtgttcgacgagagcatgaaacgttatctcgaagtgctgcgcggatcacccgcccgcgaagattgcaaggtcatggcgccgggcgaccgggaatgggcggttgcggcaaaacgggagagggaaggcgcgccggtcgatcccgtcacacgggcggccttttcggagcttgcggaaaaattctcggtcagcccacccacctatcattaa

SEQ ID NO: 75814 - protein, 358 aa, Agrobacterium tumefaciens str. C58
MAHGNEKATVLARLDELERFCRAVFLAVGTDEETADAATRAMMHGTRLGVDSHGVRLLAHYVTALEGGRLNRRPQISRVSGFGAVETIDADHAHGARATYAAMENAMALAEKFGIGAVAIRNSSHFGPAGAYALEAARQGYIGLAFCNSDSFVRLHDGAMRFHGTNPIAVGVPAADDMPWLLDMATSAVPYNRVLLYRSLGQQLPQGVASDGDGVDTRDPNAVEMLAPVGGEFGFKGAALAGVVEIFSAVLTGMRLSFDLAPMGGPDFSTPRGLGAFVLALKPEAFLERDVFDESMKRYLEVLRGSPAREDCKVMAPGDREWAVAAKREREGAPVDPVTRAAFSELAEKFSVSPPTYH

SEQ ID NO: 75815 - DNA, 1041 bp, Agrobacterium tumefaciens str. C58
  CDS (1)..(1041): transl_table=11
gtggggctcatacatcccatcgcatgcgagccaacaggaatcacgaaaatcatgaaattctcaatcgcagaggcggaggatctcgtatcctctatctttgagcgcaatggcgttctgccgcaaaatgcccgttctgtggcaaaggcgctggtcgcctccgaggcggctggccagggcggccatggttttcgccgtattcccgtttatgtccgtcaggcgcgggttggaaaggtggacggtcaggcgcgtcccgtggtgaggcgcgtgaagccgggcgtgctctcgatcgacgccaatcatggttatgcctatccggcgatcgactgcgctcttgaagaattgcctgaaatggcccgacagcagggcattgcgctggcagcgatccatcgctcccaccatgcaggcgtcatggctctgacggtcgagcgttttgcggaaatgggccttgtcgcgctcatgttcgccaatgcaccagcctccatggctccctggggcggccacacgccgctttatggcaccaaccccatcgcctttgcggcccccattggcggcgccgatccgctcgtcatcgatctggccctgtcaaaggtcgcgcgcggcaagatcatggcggcacgacagaagggtgaaaccattcccggcgactgggcgctcgatagaaacggccggccgacgaccgatccagaggaggccattgccggaaccatggtccccgcgggtgaagccaagggcgctgctctggcgctgatggtggagatcatggcagctgcggtgactggtggaaatttcgcattccaggcatcgtcccttctggatgataagggtgcgccgccctccctcggccatacgatcatcgccatcgacccggtatcctctggcggcgcagcctttaccgagcggctggccctcatcgcgggtgagatcgaaaagcaggaaaatgtgcggttgcccggtcgccgcagccagggcatccgcaagcaggcgctcgaaagcggcattgcgatcgaaagcgacattctggccgaaatccaatcgctttga

SEQ ID NO: 75816 - protein, 346 aa, Agrobacterium tumefaciens str. C58
MGLIHPIACEPTGITKIMKFSIAEAEDLVSSIFERNGVLPQNARSVAKALVASEAAGQGGHGFRRIPVYVRQARVGKVDGQARPVVRRVKPGVLSIDANHGYAYPAIDCALEELPEMARQQGIALAAIHRSHHAGVMALTVERFAEMGLVALMFANAPASMAPWGGHTPLYGTNPIAFAAPIGGADPLVIDLALSKVARGKIMAARQKGETIPGDWALDRNGRPTTDPEEAIAGTMVPAGEAKGAALALMVEIMAAAVTGGNFAFQASSLLDDKGAPPSLGHTIIAIDPVSSGGAAFTERLALIAGEIEKQENVRLPGRRSQGIRKQALESGIAIESDILAEIQSL

SEQ ID NO: 75817 - DNA, 1044 bp, Corynebacterium glutamicum ATCC 13032
  CDS (1)..(1044): transl_table=11
atgccagaagtcactgtcaacgcccaacaactcactgttctctgcacagacatcctcaccaaaactggagtacctgcagcagacgcccatcttgtcggtgatagtttggtgcaggctgatctttggggtcacccctcccacggtgtgcttcgactgccttggtatgtgcgcagactccacagtggcgcgatgactacacatgcacacgtggaggttctcaatgatttgggtgccgtgttggcgttggatggacacaatggaatcggccaagttttagctgatcatgctcgtaaagaagcagtgactagggcaatgatgttcggcatcggtgcggtgtcggtgcgcaactccaatcattttggaactgccatgtactacacccggaaagcggcagcgcaaggatgtgtttccattctcaccaccaatgcatctccggcgatggcgccctggggtggcagagaaaaacggatcggtaccaacccatggtctattgcggcaccttttggagaaacggctacggtagtcgatatagccaatactgcggttgcgcgcggaaagatctaccacgcacgacagacaaacatgcccattcctgagacttgggcgatcacgagtgagggcgcacccaccacggatcctgctgaggcaatcaacggtgtcgtccttcccatggctggtcacaaaggttatgcgattagcttcatgatggatgtgctttctggagttctcactggttcccagcacagcaccaaggtacatggtccgtatgatcccactcccccaggtggagctggccacttgttcatcgcgttggatgttgcagcgtttcgcgatccacaagatttcgatgacgcactcagcgatctggttggggaagttaaatccactccgaaagcacaaaacaccgaggagattttctaccccggtgaatcggaagaccgtgcgcatcggaaaaactctgcgcacggtatttcattgcctgaaaaaacgtggatggaactgcaagaactggcaatcgagaaccatgttgtaactcaccgttga

SEQ ID NO: 75818 - protein, 347 aa, Corynebacterium glutamicum ATCC 13032
MPEVTVNAQQLTVLCTDILTKTGVPAADAHLVGDSLVQADLWGHPSHGVLRLPWYVRRLHSGAMTTHAHVEVLNDLGAVLALDGHNGIGQVLADHARKEAVTRAMMFGIGAVSVRNSNHFGTAMYYTRKAAAQGCVSILTTNASPAMAPWGGREKRIGTNPWSIAAPFGETATVVDIANTAVARGKIYHARQTNMPIPETWAITSEGAPTTDPAEAINGVVLPMAGHKGYAISFMMDVLSGVLTGSQHSTKVHGPYDPTPPGGAGHLFIALDVAAFRDPQDFDDALSDLVGEVKSTPKAQNTEEIFYPGESEDRAHRKNSAHGISLPEKTWMELQELAIENHVVTHR

SEQ ID NO: 75819 - DNA, 1146 bp, Drosophila melanogaster
  CDS (1)..(1146)
atgggttgtttgcgagcgtctagggttttcagtatgggcttttccatcacgtaccgcaccatgtccgccgctgctccgaaactggtggccgttgccgagtcgcgtcgtttcatgatcgactgcttcaaggcggtgaaggtgccccaggcccatgccgaagcccaggcggatctcctggtggctgcggaccatcgggggcacttcagccatggcatgaaccgccttgagatgtacatcaacgatctggccatcaactccacggacggagcggctgtgcccaagatcctaaaggaaactccggccaccgcctgggtggatggcctgaatggacttggtgccgtcgtgggcaactactgcatggatctggccatcaagaaggccaagacggtgggagttggctgggtttgtgccaagggatcgaaccactatggcatggctggttggtatgccatcagggccatggatcagggtctggtgggcatgtccatgacgaatacctcgccgctgatggcacccacacgcgccaaggaggctgctctgggcaccaatcccttgtccctgggtgccaatgccaccaacggtgataagttcctgctggacatggccaccacagccgtggccgtgggaaagatcgagatccagcgcaggaagggagctcctctgcccgacggatgggctcaggatcccagtggtgaagtgaccaacgatgcagagctgggtttcagcactgggtgcctgatgccattaggaggatccgagctgacctccggctacaagggttacggccttggcgccatggtggacattctgtcgggtgtcatgtccggagccaactactcgacgcaggtgaggaagtggacacatgctggcgccgattccgcagctgatcttggccaggtcttcatcgccgtggatcccaactgctttgctcccaacttcgaggaacgcatggccgacttcaactcccgcctgcgaggcgctactccgaccgatcccagcaagcccgttttgctggctggagacaaggagaagaagggaatggctgacgtcgatgccgccggcggtatacagtatctggagaatcagttgaagacgtgcgccaacctggcggaaatactgaagattaagcccctgagctttgtttaa

SEQ ID NO: 75820 - protein, 381 aa, Drosophila melanogaster
MGCLRASRVFSMGFSITYRTMSAAAPKLVAVAESRRFMIDCFKAVKVPQAHAEAQADLLVAADHRGHFSHGMNRLEMYINDLAINSTDGAAVPKILKETPATAWVDGLNGLGAVVGNYCMDLAIKKAKTVGVGWVCAKGSNHYGMAGWYAIRAMDQGLVGMSMTNTSPLMAPTRAKEAALGTNPLSLGANATNGDKFLLDMATTAVAVGKIEIQRRKGAPLPDGWAQDPSGEVTNDAELGFSTGCLMPLGGSELTSGYKGYGLGAMVDILSGVMSGANYSTQVRKWTHAGADSAADLGQVFIAVDPNCFAPNFEERMADFNSRLRGATPTDPSKPVLLAGDKEKKGMADVDAAGGIQYLENQLKTCANLAEILKIKPLSFV

SEQ ID NO: 75821 - DNA, 1074 bp, Bradyrhizobium japonicum USDA 110
  CDS (1)..(1074): transl_table=11
atggctgactatcgcaccatcaaggccgaagtgctcaccagcgtcgtccgcgccatcgtcaaggccggcggctcctcggaccgcgaggccgagctcgtatccgccaacctcgtcgaggccaatcttaggggacatgactcgcacggcgtcggcatgatcccgcgctatgtccagagcgtcaccaacggcggcctcgccgtgaaccagcacgtcaagatcgtgctcgacactggcccgctcctcaccctcgacggcctcaccggctacggccaggtgatcggccacgaagcgatggagctggcagccgagcgtgccaagagcaacggcgtatgtctcgtcggtctttccaatgcgcaccacattggccgcatcggccactgggccgagcagtgcatcgaccacgggcttgtatcgattcacttcgtcaacgtgatctcgcgcccgatcgtggcgccctggggcggcagcgatgcccgccacggcaccaacccgttctgcgtcggcatcccgcgcaggggcaaagagccgatcgtgctcgacttcgccaccagcaggatcgcgcagggaaagacccgcgtcgcccacaacaagggcgtcgaactggagcccggcaccatcatcgacaatgaaggcaagcccacggtcaatccgcgctacaccgtgatcccgccgtacggcgctattctgccgttcggcgagcacaagggttcggggctcgcgctcgtgtgcgaaatcctcggcggcgcgctctccggcggacaggtggtcaagggcccgtccgacggcaagtacaacgtcctcaacggcatgctctcgatcatcatcgatccgggcaagctcggcaccggcgaaaacctcgcacgcgaagtcgaaagcttcgtcgcctggcacaccggctcaccgcctggccccggcgtcgacaaggtcaagatcgccggcgagcccgagcgcgagaccaagaaaaagcgcctcgccgaaggcattccggtcgatccgaccacctggcaggagattctggaggccgggcagaagttcgggctggatcaggccgcgatcgagaagatcgtggggtag

SEQ ID NO: 75822 - protein, 357 aa, Bradyrhizobium japonicum USDA 110
MADYRTIKAEVLTSVVRAIVKAGGSSDREAELVSANLVEANLRGHDSHGVGMIPRYVQSVTNGGLAVNQHVKIVLDTGPLLTLDGLTGYGQVIGHEAMELAAERAKSNGVCLVGLSNAHHIGRIGHWAEQCIDHGLVSIHFVNVISRPIVAPWGGSDARHGTNPFCVGIPRRGKEPIVLDFATSRIAQGKTRVAHNKGVELEPGTIIDNEGKPTVNPRYTVIPPYGAILPFGEHKGSGLALVCEILGGALSGGQVVKGPSDGKYNVLNGMLSIIIDPGKLGTGENLAREVESFVAWHTGSPPGPGVDKVKIAGEPERETKKKRLAEGIPVDPTTWQEILEAGQKFGLDQAAIEKIVG

SEQ ID NO: 75823 - DNA, 1056 bp, Bordetella pertussis Tohama I
  CDS (1)..(1056): transl_table=11
atgaaactctcgattgcccaagccatcgcgttcggccagcgcctgctggccgcccagggggtgccggacgacatcgcccgcgacgtcgccgagcacctggtcgagtcggaccgggtcggctacaccagccacggcctgtccatcctgcccaattaccgccgcgtgctggccgaaggcttcgtcaaggccgacggccgcgccaagctgctcaacgaccgcggcgccatgctggccttcgacggcgacaacggcttcggccagcacgtcggcaaagcggtcatgcagcaggccatcgagcgggcccgccagtacggccagtgcatcgtcacgttgcgccgcacgcaccacctggggcgcatgggctactacggcgaaatggccgccgaggccggactgatcctgctggcgttcaccaacgtcgtgaaccgcccgcccacggtggcgccctacggcggcgcgcaggcctgcctgaccaccaaccccctgtgcttcgccggtccgctgccgggcggctgcccgcccttcctggtcgacatggccaccagctcgatcgcggtcaacaaggcgcgcgtgctggcggccaggggcgagccggcccccgacggcgcgctgatcgatgcgcagggcaacccgaccaacgacccgaacgcgctgttcgccgacccgcccggcgcgctgctgccgttcggcggccacaagggctacgccatgggcctggtcgccgagctgctggcgggcgtgctgtcgggcggcggcaccatccagccggaacatccccgcaatggcgtggcgaccaacaacatgttcgccatcctgctggacccgcaagtggatttcaacgccgattggcgcacccaggaagtcggcgccttcatcgactacctgcatgcgtgtccgccgcaacccggcgtggaccgcgtgcagtatccgggcgaatacgaggcgatgaaccgcgcgcgccatgccgaggccatcgagttcgaaggcgccatctgggacagcctggccaagctggcgcaggacctgggcgcggccgacgccctgccgcgcgcctga

SEQ ID NO: 75824 - protein, 351 aa, Bordetella pertussis Tohama I
MKLSIAQAIAFGQRLLAAQGVPDDIARDVAEHLVESDRVGYTSHGLSILPNYRRVLAEGFVKADGRAKLLNDRGAMLAFDGDNGFGQHVGKAVMQQAIERARQYGQCIVTLRRTHHLGRMGYYGEMAAEAGLILLAFTNVVNRPPTVAPYGGAQACLTTNPLCFAGPLPGGCPPFLVDMATSSIAVNKARVLAARGEPAPDGALIDAQGNPTNDPNALFADPPGALLPFGGHKGYAMGLVAELLAGVLSGGGTIQPEHPRNGVATNNMFAILLDPQVDFNADWRTQEVGAFIDYLHACPPQPGVDRVQYPGEYEAMNRARHAEAIEFEGAIWDSLAKLAQDLGAADALPRA

SEQ ID NO: 75825 - DNA, 1086 bp, Rhodopseudomonas palustris CGA009
  CDS (1)..(1086): transl_table=11
atggtgacggtgcaggtcgatcgtttgatcgatttcgtcgcccaggtgtttgagcgtgcgggctcgtccaaggaagaggcgcggcggatcgcctcgtatctcaccaccgccaatctcacaggccacgacagccacggcgtgatccgcgtgccggtctacatccgctggcgcaacgccggcgcggtgcatccggaccagaccgtcgatgtcccggtcgatctgccgtcgctcgcagtggtcgacggcaagttcggctatggccagactgtgggcccgcaggcggtgcggatcggcatcgacaagtgcaaggcgcaggggctgtcggcggtggcgctgaagaacgccggtcacatcggccggatcggagactgggccgagatggccgccgctgaaggtttggtgtcgattcacttcgtcaccgcggcgggctcgatcctggtcgcgccgttcggcggcgttgaacgccgattgtccactgcgccttattgcgtcggcattccgcggccggacgcgcccccggtggtgctcgatcttgccacctcgattgtcgccgaaggcaaggtgctggtcgcggcgcgcggcggcaagaagctgccgcaaggcgcgctgatcaatgccgacggctctttgagcgaagatccggcgacgctgtacggtccgcacgagaaggacggcccgatcaaccacgccaacggccgaggggcgatccgcgccttcggcgaacacaagggctcggggctggcgctgatctgcgaactgctcggcggcgcgctcaccggcaacggcgccaccggcccggaccggccattcgccaacggcatgttctcgatctacgtcgatccgaagcgcatcgatccggcgcacgtcttcgatgccgaagtcacccgctacatcgacttcttcaaaagctccaagacggtcgccggcgtcgatcaggtgttgatccccggcgatcctgaaaccgccactcgcgccgagcggaccaggaacggcgttccgctgcccgacgacacctgggccgccatcgtcgccaccgcgcgcgaagtcggcgtcgacgaagccgcgatccaggcggcgacggcgtga

SEQ ID NO: 75826 - protein, 361 aa, Rhodopseudomonas palustris CGA009
MVTVQVDRLIDFVAQVFERAGSSKEEARRIASYLTTANLTGHDSHGVIRVPVYIRWRNAGAVHPDQTVDVPVDLPSLAVVDGKFGYGQTVGPQAVRIGIDKCKAQGLSAVALKNAGHIGRIGDWAEMAAAEGLVSIHFVTAAGSILVAPFGGVERRLSTAPYCVGIPRPDAPPVVLDLATSIVAEGKVLVAARGGKKLPQGALINADGSLSEDPATLYGPHEKDGPINHANGRGAIRAFGEHKGSGLALICELLGGALTGNGATGPDRPFANGMFSIYVDPKRIDPAHVFDAEVTRYIDFFKSSKTVAGVDQVLIPGDPETATRAERTRNGVPLPDDTWAAIVATAREVGVDEAAIQAATA

SEQ ID NO: 75827 - DNA, 1086 bp, Drosophila melanogaster
  CDS (1)..(1086)
atgtccgccgctgctccgaaactggtggccgttgccgagtcgcgtcgtttcatgatcgactgcttcaaggcggtgaaggtgccccaggcccatgccgaagcccaggcggatctcctggtggctgcggaccatcgggggcacttcagccatggcatgaaccgccttgagatgtacatcaacgatctggccatcaactccacggacggagcggctgtgcccaagatcctaaaggaaactccggccaccgcctgggtggatggcctgaatggacttggtgccgtcgtgggcaactactgcatggatctggccatcaagaaggccaagacggtgggagttggctgggtttgtgccaagggatcgaaccactatggcatggctggttggtatgccatcagggccatggatcagggtctggtgggcatgtccatgacgaatacctcgccgctgatggcacccacacgcgccaaggaggctgctctgggcaccaatcccttgtccctgggtgccaatgccaccaacggtgataagttcctgctggacatggccaccacagccgtggccgtgggaaagatcgagatccagcgcaggaagggagctcctctgcccgacggatgggctcaggatcccagtggtgaagtgaccaacgatgcagagctgggtttcagcactgggtgcctgatgccattaggaggatccgagctgacctccggctacaagggttacggccttggcgccatggtggacattctgtcgggtgtcatgtccggagccaactactcgacgcaggtgaggaagtggacacatgctggcgccgattccgcagctgatcttggccaggtcttcatcgccgtggatcccaactgctttgctcccaacttcgaggaacgcatggccgacttcaactcccgcctgcgaggcgctactccgaccgatcccagcaagcccgttttgctggctggagacaaggagaagaagggaatggctgacgtcgatgccgccggcggtatacagtatctggagaatcagttgaagacgtgcgccaacctggcggaaatactgaagattaagcccctgagctttgtttaa

SEQ ID NO: 75828 - protein, 361 aa, Drosophila melanogaster
MSAAAPKLVAVAESRRFMIDCFKAVKVPQAHAEAQADLLVAADHRGHFSHGMNRLEMYINDLAINSTDGAAVPKILKETPATAWVDGLNGLGAVVGNYCMDLAIKKAKTVGVGWVCAKGSNHYGMAGWYAIRAMDQGLVGMSMTNTSPLMAPTRAKEAALGTNPLSLGANATNGDKFLLDMATTAVAVGKIEIQRRKGAPLPDGWAQDPSGEVTNDAELGFSTGCLMPLGGSELTSGYKGYGLGAMVDILSGVMSGANYSTQVRKWTHAGADSAADLGQVFIAVDPNCFAPNFEERMADFNSRLRGATPTDPSKPVLLAGDKEKKGMADVDAAGGIQYLENQLKTCANLAEILKIKPLSFV

SEQ ID NO: 75829 - DNA, 1239 bp, Nasonia vitripennis
  CDS (1)..(1239)
atggcactcagatgcttatgggtaaacggtaggcgcagcgccacgattctacagagtcacgcgaacgcagctgtcgcttgtatttcgagcttccacaagttgcaggagtgcttgcagcagcagcaacaggcggcgaaaatggcgagcgctaacctggagtacaacaagatggttgtgccgaaggaagaggtcatcaggttcatcgcggactgcatgacaaaggccggctccagcagagaagatgccgtgaccgtcgcgcatcatctcatgactgctgattacaggggacacttcagccatggaatgaacaggatgcagatgtacgtcgacgatatccgtcacaagctcaccgacgccactgccaagccccaaatcgtcaacaattttcaggcgatcgctctggtggacggctgcaatggtctgggccagattgttggcaagtactgcatggagctggcgatcgacaaggctcggaagttcggcatcggcctggtcaccgctcgaggttccaaccactatggaatcagtggttactacagtctcatggctatcgagcaggacatgatcggcttcagctgcaccaacaccagtcccttgatggctccgacgcgcagttctcagagcgctctgggcaccaaccctctatctctgggtatgggcgccagcgacggtgaccagtttgtcctggacatggcaacgaccgccgtagctctgggcaagatcgaactcgctcaccggaaagagcagcctatcccttcaggttgggctatggatacagatggtaaagtaaccactgactccgaaaaagctctcaaggcttccacactgatgccactgggtggagaagaaaagaactcggggtacaaaggttacggtttggccacgatggtcgaggtgctctgtggcgttctcagtgggggcaactacggacctaacatccgcaactggaagaaagccgaccgggaggccaatcttggtcagtgcttcatagctatcaacccggaggtgttcgcgcctggatccaaggacagactggcgcatcttctgcagcagcttagagaactgcctactgttggagacaagcctgtactcgttgccggtgatcctgaacgtgctgccatggcgaaagtcgacaaggaaggcggtattcagtaccatgagaaccagattaagaattccgaggaatttgctaaggagttgggcatcgagcctatgaaactcgtcaagaagatcgactag

SEQ ID NO: 75830 - protein, 412 aa, Nasonia vitripennis
MALRCLWVNGRRSATILQSHANAAVACISSFHKLQECLQQQQQAAKMASANLEYNKMVVPKEEVIRFIADCMTKAGSSREDAVTVAHHLMTADYRGHFSHGMNRMQMYVDDIRHKLTDATAKPQIVNNFQAIALVDGCNGLGQIVGKYCMELAIDKARKFGIGLVTARGSNHYGISGYYSLMAIEQDMIGFSCTNTSPLMAPTRSSQSALGTNPLSLGMGASDGDQFVLDMATTAVALGKIELAHRKEQPIPSGWAMDTDGKVTTDSEKALKASTLMPLGGEEKNSGYKGYGLATMVEVLCGVLSGGNYGPNIRNWKKADREANLGQCFIAINPEVFAPGSKDRLAHLLQQLRELPTVGDKPVLVAGDPERAAMAKVDKEGGIQYHENQIKNSEEFAKELGIEPMKLVKKID

SEQ ID NO: 75831 - DNA, 1089 bp, Magnaporthe grisea 70-15
  CDS (1)..(1089)
atggcagccgaagcctcaactacagctaatgacttggtctatgtgactgcagaagcagcctctgacttcgtccaacagttactcgaaaagcacggggttccatccgcccatgcctcagtggttgcctcgggtctcatccaagcagatcttcgtggcgtcgagtcccacggcataaaccgcattccctcatacgtcgagcgcatccgaaaaggtgtcctcgatcccaaagccactcccgagctgaagcaggtgacaccagcagtcgcccaggtcgacgcccacaatgcattcggctttgtcgccgcgcacaaggccatggagagtgccatcaatatggcccgtatctacggcataggcatggtctcggtgaagcactcgaatcactttggcatgtcggcttggatcgtgcagcaggccgtagatgcaggcatgatgagcctcgtcttcaccaactcgagcccggccatgccggtatggggaggacgcgagcagctgttgggtgtcagtcccatcgcctgcggcgccccttcggagccgacacctttcatcctggatatggcgccatccgttgcggcgcgcggcaagatccacaaggccaagcgccgaggtgaaaagattcctaccgactgggcgctggatgcccaaggcaacaggacggacgacccggcggcggcgctcgacggcggtgtgatgctgcccatgggcggcccaaagggatcggggttggcgctgatgatggacgtcttctcaggcgtcttatccggctcggcatacgcggggcacgttgccggcccctacgacccgtcccgagcgggtgacgtaggtcacttcatcatggccataaagccggatctattcatgagcatggaagagttcaaggagaggatgaaatacttgtatgaaagggttgtgggctgtgagaagatggcaggggttgatcggatctactttcctggcgagattgagctactcagggcagaggaaagaaccaagagcggaatcccatatagtcgtggggagattgaggcgttgaacagggaagcggaactagtaggctcctcgaagatccaagagattgttgctaggtag

SEQ ID NO: 75832 - protein, 362 aa, Magnaporthe grisea 70-15
MAAEASTTANDLVYVTAEAASDFVQQLLEKHGVPSAHASVVASGLIQADLRGVESHGINRIPSYVERIRKGVLDPKATPELKQVTPAVAQVDAHNAFGFVAAHKAMESAINMARIYGIGMVSVKHSNHFGMSAWIVQQAVDAGMMSLVFTNSSPAMPVWGGREQLLGVSPIACGAPSEPTPFILDMAPSVAARGKIHKAKRRGEKIPTDWALDAQGNRTDDPAAALDGGVMLPMGGPKGSGLALMMDVFSGVLSGSAYAGHVAGPYDPSRAGDVGHFIMAIKPDLFMSMEEFKERMKYLYERVVGCEKMAGVDRIYFPGEIELLRAEERTKSGIPYSRGEIEALNREAELVGSSKIQEIVAR

SEQ ID NO: 75833 - DNA, 1074 bp, Gibberella zeae PH-1
  CDS (1)..(1074)
atggcagaccaagaaccatcgtcccaaaaattctccatcccagcctctgaagctcaacgcctcgtgcaagatatcctcaaaggaaacgggatcccttcagaaaatgcgtccatcatctcccgttgcctcatagcagccgacttgcgcggtgtagatacccacggcatgaaccgtataccctcatacatggaacgcatccgccaaggcgttctcagcgccacagcccagcccatcctaacccaagtaactcccgccgtcgctcaagtcgacggtcaaaacggcttcggttttgtagccgcccataaaggaatggctgctgctatcgagtctgcgcgcatctttggtatcggaatggcaagcatcaagcactctaatcactttggcatgagtgcttggatcgtccagcaggctcttgatgccgacatgatgagtcttgtctttacaaactcaagtccagctcttcctgctttcggtggcaaaagtaaactcatgggtgtttcgcctatcgcttgtggtgcgccgggtaaaggccccatggagaacttcatcctcgacatggcaccctctgtggcagcgcgaggaaagatttacaaagcaaaacgacgaggcgaaaagattcccttggactgggctctcgattcagatggacgaccaacagatgatcccgaagctgcccttggcggcgtcatgctacccatgggcggccccaagggttctgcactgtccataatgatggatgtcttttcaggagttctatccgggtctgcattcgcgggacatgtaactggaccgtatgatccatccaagccagcagacgttggtcattttctagttgccatcaagcctgatcttttcatgagcttagatgagtttcgcgagaggatgcagtacttgtacgagcgggtagttgggtctgagaaagctgctggtgttgaccggatttacttccctggtgagattgagcagttgaatcgcaaggagagggagaagacgggaattccgcttgtgcaggctgagattgatgctttgaatgctgaggcggaaaaggttggagcagagctgttgaagtattag

SEQ ID NO: 75834 - protein, 357 aa, Gibberella zeae PH-1
MADQEPSSQKFSIPASEAQRLVQDILKGNGIPSENASIISRCLIAADLRGVDTHGMNRIPSYMERIRQGVLSATAQPILTQVTPAVAQVDGQNGFGFVAAHKGMAAAIESARIFGIGMASIKHSNHFGMSAWIVQQALDADMMSLVFTNSSPALPAFGGKSKLMGVSPIACGAPGKGPMENFILDMAPSVAARGKIYKAKRRGEKIPLDWALDSDGRPTDDPEAALGGVMLPMGGPKGSALSIMMDVFSGVLSGSAFAGHVTGPYDPSKPADVGHFLVAIKPDLFMSLDEFRERMQYLYERVVGSEKAAGVDRIYFPGEIEQLNRKEREKTGIPLVQAEIDALNAEAEKVGAELLKY

SEQ ID NO: 75835 - DNA, 1086 bp, Aspergillus nidulans FGSC A4
  CDS (1)..(1086)
atgtccgagccaaccgccacacagaaaatccaccacatcaacccctcagatctagagagcttcgtccaccaaatcttaactgccaataatgtacccccagcacacgccaccatcgtcgccgcttgccttgtgcaagccgatcttcgcggcgtcgacacccacggctcaaaccgcattccctcatatatgcaacgcatccgccagaacgtcctcgacccagcggcatcacctgaaatcacccaaatcacacccattgcagccctggtcgatggtaaaaacacatttggctttgtgtcagcgcacatgggtatgaagcgcgctattgaaatggcgaacgagttcggactcggtcttgtctcggtcaaacactccaatcatttcggcatgtctgcttggcttgttcaacaggctattgatgcgggaatgatgtccctcgtcttcaccaactcttcgcccgctttacccgtctggggcggcaaggaaaagcttatgggcgtgtccccaattgcatgcggcgctccagcaggcaaagaacgccccttcatccttgacatggctccatccgttgcagcgcggggcaaaatctacaaggcgctccgcagaggcgagaatatcccaacagactgggctctggaccgtgatggaaatatcaccgacgatccggcgcgcgcactggaaggcgtaatgcttcccatgggcggtccgaaagggtctgcccttgcggtaatgatggacgtcttctcaggtgtgttttcgggctcagcattcgccggtcacgttaccggtccttacgacccgagtaaaccggcagatgtcggccactttcttttggctatcaagccggatctatttgtgagcctagaggatttcaaagaacgcatggactatctctatcagagggtggttgggtgcgaaaagatggggggcgtagaacggatatattaccctggggagattgagcagataacacgtgagaagagactggaggagggaattccatttaccgaaaacgagattgagggtcttaataaggaggcagaaatggtaggagtacccaagctgatgtatgattacagcttgacatga

SEQ ID NO: 75836 - protein, 361 aa, Aspergillus nidulans FGSC A4
MSEPTATQKIHHINPSDLESFVHQILTANNVPPAHATIVAACLVQADLRGVDTHGSNRIPSYMQRIRQNVLDPAASPEITQITPIAALVDGKNTFGFVSAHMGMKRAIEMANEFGLGLVSVKHSNHFGMSAWLVQQAIDAGMMSLVFTNSSPALPVWGGKEKLMGVSPIACGAPAGKERPFILDMAPSVAARGKIYKALRRGENIPTDWALDRDGNITDDPARALEGVMLPMGGPKGSALAVMMDVFSGVFSGSAFAGHVTGPYDPSKPADVGHFLLAIKPDLFVSLEDFKERMDYLYQRVVGCEKMGGVERIYYPGEIEQITREKRLEEGIPFTENEIEGLNKEAEMVGVPKLMYDYSLT

SEQ ID NO: 75837 - DNA, 1176 bp, Tribolium castaneum
  CDS (1)..(1176)
atgacgtccattgcgcgctccgtttctctgtttaagcgctttcaaatcgcgcgagacgtccaactgatcagcatcattcgtaaaatgtctacaaaaattctagacatcgacactccaatcgtgcctcttaccgacgctcaccgctttattagtgattgtatggtagctgtgggaacccccaaaaagtatgcggacattttagccgacaatctcaccgcggcggactatcggggacattatagtcatgggatgaatcgcttagacatgtacgtcagagacgtccaaggggggctttgtgactgcaaagccaccccttctgtaatcaaagaaacgcccgccacggcctgggtcaccgggaacaatggtctgggggcggtggtgggcgaattctgcatggaactggccatcaaaaaggcgaaaagtgtcggaattgggatggtagtggccaaagagtcgaatcattacggtattgctggtaagtatagcttgcaagcgatcgaccagggggtcctgggcatgagttttacgaatacttcgcctttaatggccccgactcgagccaagggctcggctttgggaacgaatccgctgtccctgggggcccccgctgccggcggggactctttcgtgctggacatggcaacaacggctgtcgcagttggaaagatcgagtttcaaaaacgcaagggccagccgatccccgaaggatgggcccaagacgcccacggcaaaatcacaaccgatccttcagtcgcctacgacgctaagcggttaatgccgctgggagggtccgaaattaattcgggatacaaggggtacggtttggcggcgctggtggaaatattctgtgggatgctcgggggtagcgcctatggtcccaatattcgcaaatggggcgattcgagcaagaaggccgacttggggcaatgcttcatcgcaatcgatcccgaatgtttcgctccagggtttcaaggccggttaggtgatttgttgtgcaccttgaggagcatgcagccggcggatcctgccaaacctgttctggtcgctggggacccggagaggctgcacatggaggacgcggatagggcgggaggggtgagatatgtggaggatcagctgaacacatgccgggagttggctaagaagttgcatgtcaagcctttggtgccagcttga

SEQ ID NO: 75838 - protein, 391 aa, Tribolium castaneum
MTSIARSVSLFKRFQIARDVQLISIIRKMSTKILDIDTPIVPLTDAHRFISDCMVAVGTPKKYADILADNLTAADYRGHYSHGMNRLDMYVRDVQGGLCDCKATPSVIKETPATAWVTGNNGLGAVVGEFCMELAIKKAKSVGIGMVVAKESNHYGIAGKYSLQAIDQGVLGMSFTNTSPLMAPTRAKGSALGTNPLSLGAPAAGGDSFVLDMATTAVAVGKIEFQKRKGQPIPEGWAQDAHGKITTDPSVAYDAKRLMPLGGSEINSGYKGYGLAALVEIFCGMLGGSAYGPNIRKWGDSSKKADLGQCFIAIDPECFAPGFQGRLGDLLCTLRSMQPADPAKPVLVAGDPERLHMEDADRAGGVRYVEDQLNTCRELAKKLHVKPLVPA

SEQ ID NO: 75839 - DNA, 1023 bp, Erwinia carotovora subsp. atroseptica SCRI1043
  CDS (1)..(1023): transl_table=11
atgcctgtttttactcatcattatttacgcgattatttacgcgatcggctgacagagaatgacgtggacgcgtcaattgcaggaattgtggcggataatcttgtcgaatctagcctgaaagggcatgactcgcacggtgtaagtatgctgccgcgctatatcgacgcgattcgagaaggtgggttatcgcctcatgcacaggcagaaaaaacgctggatttcggcccgttaatttcgttcgacggtcagcagggcttcgggcaactggtagcaaggcaggcgctggctgaaggcattgcgcgtgcacaaacgcatggtctggcggtggtgagtttagccaatgctcatcatctagggcgcatcggggcgtgggcggaacaggccgcagaggtcgggctggtgtcgctgcactttgccaacgtgtataccaagccagtggtgctgccatggcagggccagcaggcgcgtttcgggacgaacccgttctgtgccggtattccggttgaacacgacgaaccggtgattctggattttgctaccagcgtgattgccggtaacaaagcccgtattgcgtggaatgagggcaaatcggttgcacccggttgcatcgttgataacgaaggtcatccgacggtggatccgcgctggctgatggaacaccctttgggggcactgctgccgtttggcgaacataaaggatcggggctttcgctggtttgctctctgcttggcgccgcgctgactggcgggaaaaccgaacgcacggcgaaaggtgagggtaagcagattattaacagcatgctgtcaattttaatcgatccgcagaaattaggcggtgcggcaacctatcaacaggaaattccggctttattggaatgggtgcgccaatcccgcgatgacgatggattattactgccaggtgataaagaaaaacaaacctatcgtcagcgggtagataatggcatttttgtcgatgatgtgagttgggggcagttatcttatttaaataaaaacgtggcttga

SEQ ID NO: 75840 - protein, 340 aa, Erwinia carotovora subsp. atroseptica SCRI1043
MPVFTHHYLRDYLRDRLTENDVDASIAGIVADNLVESSLKGHDSHGVSMLPRYIDAIREGGLSPHAQAEKTLDFGPLISFDGQQGFGQLVARQALAEGIARAQTHGLAVVSLANAHHLGRIGAWAEQAAEVGLVSLHFANVYTKPVVLPWQGQQARFGTNPFCAGIPVEHDEPVILDFATSVIAGNKARIAWNEGKSVAPGCIVDNEGHPTVDPRWLMEHPLGALLPFGEHKGSGLSLVCSLLGAALTGGKTERTAKGEGKQIINSMLSILIDPQKLGGAATYQQEIPALLEWVRQSRDDDGLLLPGDKEKQTYRQRVDNGIFVDDVSWGQLSYLNKNVA

SEQ ID NO: 75841 - DNA, 1038 bp, Bacillus clausii KSM-K16
  CDS (1)..(1038): transl_table=11
atggccattcgtattcaaaccaaacagttgcaatatgcggttgccaatgcctttatcaacgcgaatgtgaacgaggaagacgcccacattgccgccgatgtgcttgtccatgcaaatttgcgcggtgttgattcacacggtgttatgcgtgtcgaacactatttaaagcgaattgccgctggcggcttaaagaccaacccacagccagcgatcaagcaaataaccccgtcaacagctgtttacgacgcggaccatgggctcgggcacccagcttctaaaaaggcgatggaccatgccatccagcttgcgaaaaacaacggcatcggcgctgtcgctgtacaaaacagcagccactgtggcgcattgtcctactttgtccaacaagccgcacacagcaatgtcattgggatcgcgatgtcgcaaaccgacaaagccgttgtcccttttggagggaaagcgcccttctttggcaccaacccgattgcttttggcttccctgctgaggctgaaaagccggttattttagattttgcgacaagcgaagccgcattcggcaaaattttaaatgcccaggcaagtggcaactcgattcccgcaaactggggtgttgacaaagaggggaaaacgacaaccaatccgaatgaagtcgcatatttattgccatttggcggcgccaaaggatatgggctcgccatggttgttgaaattttttctgcgttattgactgcctcagcgttcggtccacacgttacgaaaatgtatggcgattatgaccagtaccggcgtttaggccatttctttatcgcgattgacacagaagcttttgcccctgctgtttcttttcctacacaaatcgaccaaatggttcgcgaactccgccaagtgccgccagctgacgggttctcacaagtgcttgccccaggcgatccagaagcgaacacctatgaaactagacaaaaagaagggattcctttgcctaaagacgtttggacatttattgaaagtcagcaaagcggtgccaaaagccaagactcttaa

SEQ ID NO: 75842 - protein, 345 aa, Bacillus clausii KSM-K16
MAIRIQTKQLQYAVANAFINANVNEEDAHIAADVLVHANLRGVDSHGVMRVEHYLKRIAAGGLKTNPQPAIKQITPSTAVYDADHGLGHPASKKAMDHAIQLAKNNGIGAVAVQNSSHCGALSYFVQQAAHSNVIGIAMSQTDKAVVPFGGKAPFFGTNPIAFGFPAEAEKPVILDFATSEAAFGKILNAQASGNSIPANWGVDKEGKTTTNPNEVAYLLPFGGAKGYGLAMVVEIFSALLTASAFGPHVTKMYGDYDQYRRLGHFFIAIDTEAFAPAVSFPTQIDQMVRELRQVPPADGFSQVLAPGDPEANTYETRQKEGIPLPKDVWTFIESQQSGAKSQDS

SEQ ID NO: 75843 - DNA, 1095 bp, Ralstonia eutropha JMP134
  CDS (1)..(1095): transl_table=11
atgagtgatcaccgaattccgaccgccggactgcatcagtgggtggtcgacctctggctggccgccgggtccgatgaacgcgaagctgcgctgaccgctgatcacctggtcggcgccaacctgtcaggccacgattcgcacggtgtggggatgatccccaagtacgtgatgtcgtggcaggccgaccagctgcagctgaaccagcaggtcagcgtggtgcacgagtcgggcggcatcctgagcctcgacggcaaccgcggcatgggccaggccgtgaccgaacaggccatgcggctgggcatcgaacgggcgcaggatcatggcgtatgcgtgctggggctgcgccgttcgcaccatctgggccgcgtgggacactgggcggagcaggccactgcggccggcatgatctcgatccacttcgtgaacgtgctgtccaagccgatcgtcgcgccgcatggcggctacgatccgcgcttcggcaccaatccgttcacgatcggcgtgccggtgcccggccagccgccgctggtgctggactttgccaccagcgccattgcgctgggcaaggtgcgcgtggccaacaacaagggcgtgcctgtgccgccgggctgcctgatggacgcgaacggctatcccaccgccgatcccggcgtcatgttcccgcccccgggcacgccgcaaggcgcgctgcgcacgttcggcgagcacaagggctatgtgctcgccgtgatgtgcgaactgctgggcgcggccgtgactggcggccacacgatccggccggaaacgctcacgcatgagcacgcggtctggaacaacatgctggcgatcattttcgatccggcgcggcttggcagcagcaccacgttcggccatgaagtggaagcgttcgtcgagtggatgaaggcatcgcggctgcagccaggcaacgacgccatccggctgcctggcgaccccgagcgcgcatggcgccaggcccgtgccgaattcatccccgtggacagcggcacgctttcccagctcgacgatgccgccgcgcgcgtgttgcaggcacgcggcaagtcgcccggtccactttccgcgctcgcggccgaatga

SEQ ID NO: 75844 - protein, 364 aa, Ralstonia eutropha JMP134
MSDHRIPTAGLHQWVVDLWLAAGSDEREAALTADHLVGANLSGHDSHGVGMIPKYVMSWQADQLQLNQQVSVVHESGGILSLDGNRGMGQAVTEQAMRLGIERAQDHGVCVLGLRRSHHLGRVGHWAEQATAAGMISIHFVNVLSKPIVAPHGGYDPRFGTNPFTIGVPVPGQPPLVLDFATSAIALGKVRVANNKGVPVPPGCLMDANGYPTADPGVMFPPPGTPQGALRTFGEHKGYVLAVMCELLGAAVTGGHTIRPETLTHEHAVWNNMLAIIFDPARLGSSTTFGHEVEAFVEWMKASRLQPGNDAIRLPGDPERAWRQARAEFIPVDSGTLSQLDDAAARVLQARGKSPGPLSALAAE

SEQ ID NO: 75845 - DNA, 1110 bp, Burkholderia sp. 383
  CDS (1)..(1110): transl_table=11
atgaccgcactgccgacgcccgataccgaaccgctgcgcatgcgcgccgaaccgctgcatgcattcgtcgcggcactctgggaacgggccggcagcagcgagcgcgaggcaacgctcgtcgccgatcacctggtcggcgcgaatctcgcgggccacgattcgcacgggatcgggatgatcccgaactacgtcgcgtcgtggcgggaagggcagttgcagttgaacgggcacgcgtcgatcgtccgcgatggcggtgcggtgctgacgatcgacggcgggcgcggcttcggccaggtgatcgcgttcgaggcgatggtcgaagggatcgaccgagcgcggcgcatgggcatctgtgcgatcgggctgcgcgacgtgcatcatctcggccgtatcgggcactgggccgagcaatgcgcgcgctcggggctcgtgtcgttccatttcgtcaacgtgccgggcgacctgctggtcgcgccgctgcacggcaccgatccgcgcttcggcacgaacccgttctgcgccgcgtatccgcgtgcgggccagccgccgctgctgctcgatttcgcgacgagcgcaatcgcgtacggcaagacgcgcgtcgcgtacaaccagggcaagcgcgtgccggccgggtcgctgatcgaccatcgcggccagccgaccgacgatccggccgtgatgcacgagcagccgttcggtgcgctgctgccgttcgggctgcacaaggggtacgcgctggcggcgatgtgcgagattttcggcggcgcgctcgtcggcgggcatacgacctacggcgacacgctgcagaagacgagcgcgatcgtcaacgggatgctgtcggtgctgatcgatccgaacgcattcgaggcggccgacgcggagcgcgaagccgatgcgttcgtcgcatgggcgaaggcgtcgccgcaggccggcgacgcgccggtgcaggtgccgggcgagccggaagaggcgagccgcgtggcgcgcggtgccggcggcattccggtcgatcgcgcgacgtggcggcagattcgcgagagcgcggcggcggtcggcttcgacgaagccgagcttgacgcgtggacgcagcgctgcacggcatccgcatga

SEQ ID NO: 75846 - protein, 369 aa, Burkholderia sp. 383
MTALPTPDTEPLRMRAEPLHAFVAALWERAGSSEREATLVADHLVGANLAGHDSHGIGMIPNYVASWREGQLQLNGHASIVRDGGAVLTIDGGRGFGQVIAFEAMVEGIDRARRMGICAIGLRDVHHLGRIGHWAEQCARSGLVSFHFVNVPGDLLVAPLHGTDPRFGTNPFCAAYPRAGQPPLLLDFATSAIAYGKTRVAYNQGKRVPAGSLIDHRGQPTDDPAVMHEQPFGALLPFGLHKGYALAAMCEIFGGALVGGHTTYGDTLQKTSAIVNGMLSVLIDPNAFEAADAEREADAFVAWAKASPQAGDAPVQVPGEPEEASRVARGAGGIPVDRATWRQIRESAAAVGFDEAELDAWTQRCTASA

SEQ ID NO: 75847 - DNA, 1050 bp, Desulfitobacterium hafniense Y51
  CDS (1)..(1050): transl_table=11
ttgcaacacagcagcagatatgaagtcaataccctgagaaggtttatggagcaagcctttaccgcctgcggggtatcagaagccgatgggcaaattgtagtagataacctgctctacgcggaactgcggggaatcaagagccatggtgtaagccgttttcctgtgtatttgcgacgcatccaaatgggcgcggttaaccctcagcctcaaataagcatggagcagaggactccggtacttcttaaagtggatggggataacggcttgggttccgtggttatggtgcatgctctgaaccggggtatggagctggctgagcagttgggaatctgtgccgtcgggatcaaagggagcaaccattgcggagcttccggctactattgtgagcttgccgcggagcaaggcctggtctccatcgttctaacggacggtcctccggctactccgccttggggaggccggaaggcttatttcggaacgaatccaatggcctttggcctgccgcgggcacaaaaacctcatatcatagtggatttggctacttcattggcggcccgggggaaagtcatccgggcggcggctcagggagagaaaattcccgaagggtgggctcttgatagggaaggcctgcctacgacagatccccaggctgccttggccggggttttactgcctatggcaggtgccaaaggctatgccttgagcctggttgtggagcatttggccggcgttctggtgggagccggtttcggcaaagatgtggcatggcaatacagtgaggggaacaaacccgccaatgtaggccattttattattttagtcaaggctgatgcttttatggagatggcagactatcacaagcgcacggaacagtttgttgaagagattaaaaagattcccttagctcctggcacgaaagaaatcaaactgcctggggaacgttcctgggaacaacagcaaaatacagaggcccaagggattatccttgacgctgacttgcaggcagccctgcaaaccattgctcaggagttaactattaatttaggttag

SEQ ID NO: 75848 - protein, 349 aa, Desulfitobacterium hafniense Y51
MQHSSRYEVNTLRRFMEQAFTACGVSEADGQIVVDNLLYAELRGIKSHGVSRFPVYLRRIQMGAVNPQPQISMEQRTPVLLKVDGDNGLGSVVMVHALNRGMELAEQLGICAVGIKGSNHCGASGYYCELAAEQGLVSIVLTDGPPATPPWGGRKAYFGTNPMAFGLPRAQKPHIIVDLATSLAARGKVIRAAAQGEKIPEGWALDREGLPTTDPQAALAGVLLPMAGAKGYALSLVVEHLAGVLVGAGFGKDVAWQYSEGNKPANVGHFIILVKADAFMEMADYHKRTEQFVEEIKKIPLAPGTKEIKLPGERSWEQQQNTEAQGIILDADLQAALQTIAQELTINLG

SEQ ID NO: 75849 - DNA, 1095 bp, Ralstonia metallidurans CH34
  CDS (1)..(1095): transl_table=11
atgagtgaacaccgtattccgaccgccggcctgcatcagtgggtggtcgatctctggctggcggcaggctccgatgcccgcgaggcccggctgaccgccgatcacctcgtgggcgccaacctgtcgggccacgactctcacggcgtggggatgatcccgaagtatgtgatgtcgtggcaaggcgatcagctccagctcaaccagaaggtcagcgtggtgcacgaatcgggcggcatcctgagcctggacggcaatcgcggcatgggccaggcggtgaccgaacaggccatggggatgggcatcgaacgcgcccgcgagcatggtgtctgcgtgcttggcctgcgccgctcgcaccatctgggccgggtcggccactgggccgagcaggccacggcagccggcatgatctcgatccatttcgtcaacgtcctctccaagccgatcgtcgcgccacacggcggctacgacgcgcgcttcggcaccaatccgttcacgatcggcgtgccgctacccgcgcagccgcctctggtgctcgacttcgccaccagcgccatcgcgcttggcaaggtgcgcgtggcccacaacaagggcgtggcggtaccgccgggctccttgatggacccgaacggtcaccccaccgacgatccctcggtcatgttcccgggcgctggcggcccgcagggcgcgctgcgcacgttcggcgagcacaagggctacgtgctggccgtgatgtgcgaactgctcggcgcggcggtgaccggtggccatacgatccgtccggagacgctcacgcacgaacatgcggtgtggaacaacatgctggcgatcatcttcgatccggcacgactgggcagcagcaccaccttcggccacgaggtcgaggcgtttgtcgaatgggtcaaggcgtcacggctgcagccgggcaatgaccagatccgcctgcccggcgacacggaacgcgaatggcgccgcgcccgcgccgatttcatccccgtggacagcagcacgctggcccagctagacgatgccgccgctcgcgtgcttcaggcgcgtggcaagtcgccggggccggtctcggcgctggcgaccgattga

SEQ ID NO: 75850 - protein, 364 aa, Ralstonia metallidurans CH34
MSEHRIPTAGLHQWVVDLWLAAGSDAREARLTADHLVGANLSGHDSHGVGMIPKYVMSWQGDQLQLNQKVSVVHESGGILSLDGNRGMGQAVTEQAMGMGIERAREHGVCVLGLRRSHHLGRVGHWAEQATAAGMISIHFVNVLSKPIVAPHGGYDARFGTNPFTIGVPLPAQPPLVLDFATSAIALGKVRVAHNKGVAVPPGSLMDPNGHPTDDPSVMFPGAGGPQGALRTFGEHKGYVLAVMCELLGAAVTGGHTIRPETLTHEHAVWNNMLAIIFDPARLGSSTTFGHEVEAFVEWVKASRLQPGNDQIRLPGDTEREWRRARADFIPVDSSTLAQLDDAAARVLQARGKSPGPVSALATD

SEQ ID NO: 75851 - DNA, 1110 bp, Burkholderia vietnamiensis G4
  CDS (1)..(1110): transl_table=11
atgactgtgccgccgatacccgataccgatgcgttgtgcatgcgcgccgaaccgctgcacgacttcgtcgccgcgctgtgggaacgagccggcagcagcgcgcgcgaggcgcggctggttgccgagcacctggtcggcgcgaacctcgccggtcacgattcgcacggcatcgggatgatcccgaactacgtcgcatcctgccgcgaagggcagttgcagttgaaccggcatgcggcgatcgtgcgcgacggcggcgcggtgctgacgatcgacggcggccgcggcttcgggcaggtgatcgcgttcgaggcaatggtcgagggcatcgagcgcgcgcggcgcatgggcatctgcgcgatcggattgcgcgacgtgcatcatctcggccgcatcggccactgggccgagcaatgcgcgcgatcggggctcgcttcgttccatttcgtcaacgtgccgggcgatctgctggtcgcgccgcttcacggcgccgatccccggttcggcaccaatccgttctgcgccgcgtatccgcgcgccgggcgcgcgccgctgctgctcgatttcgcgaccagcgcggtcgcgtacggcaagacgcgcgtcgcgtaccaccagcgcaagcgcgtgccggcgggcgcgctgatcgaccatcgcgggcggccgaccgacgatccggccgtcatgcacgagcaaccgttcggcgcgctgctgccgttcgggctgcacaagggttatgcgctcgccgcgatgtgcgaggtgttcggcggcgcactcgtcggcgggcatacgacctacgacggcacgttgcagaagaccagcgcgatcgtcaacggcatgctgtcggtgttgatcgatccgaacgcgttcgatgcggccgatgcgcagcgcgaggccgatgcgttcgtcgcgtgggcgaaggcgtcgccgcgttccggcgacgcgccggtgcagatgcccggcgagccggaggaggcgagccgcgccgagcggctcgcgcacggcatcccggtcgatcggccgacgtggcgtcagatcggcgacagcgcggcggcgctcggcttcgacgccgccgaattcgacgcatggacgcaacgctgcgtcggcgccgcgtga

SEQ ID NO: 75852 - protein, 369 aa, Burkholderia vietnamiensis G4
MTVPPIPDTDALCMRAEPLHDFVAALWERAGSSAREARLVAEHLVGANLAGHDSHGIGMIPNYVASCREGQLQLNRHAAIVRDGGAVLTIDGGRGFGQVIAFEAMVEGIERARRMGICAIGLRDVHHLGRIGHWAEQCARSGLASFHFVNVPGDLLVAPLHGADPRFGTNPFCAAYPRAGRAPLLLDFATSAVAYGKTRVAYHQRKRVPAGALIDHRGRPTDDPAVMHEQPFGALLPFGLHKGYALAAMCEVFGGALVGGHTTYDGTLQKTSAIVNGMLSVLIDPNAFDAADAQREADAFVAWAKASPRSGDAPVQMPGEPEEASRAERLAHGIPVDRPTWRQIGDSAAALGFDAAEFDAWTQRCVGAA

SEQ ID NO: 75853 - DNA, 1071 bp, Sulfitobacter sp. EE-36
  CDS (1)..(1071): transl_table=11
atggcggttgatgcggggcggttgacggattttgcgacggctattttggcgcatgcagggaaggatgcagggcgggcggcgaaggttgcggcgcggttggtgggggctaatctggcggggcatgacagccacggggtggggatgatacccgcctatgtggacggtattcttgcagggcagttggacgctgcggccgatatcgagctggtgcaggacaaggggccgttcctcttggtcgatggcaaccgtggctttggccatatcgtggcagagcaggcgatgacgctggcgattgatcgtgcgcagacccaccatttcgcgatgctgtccttgcgcaacagcttccaccttgggcggttgggcgactggggcatcatggcggcggaggcggggtttatctgcatcctttacgcgaatgttcagtccgcgcgccccctggtggcaccgttcggcggcagtgatgcgcggtttgtcaccaatccttattgcacggcgataccggcgaccgaaaagcatccgatgtttgtactggatatggcgaccagtaccatcgccatgggcaaggcgcgtgtggctcagcttagcggcaagcctgcgcccgaaggggcgttgattgatgcgcagggcaatgccacgcgcgatccgtcggtggtatttgacggtgcgggcggggcgttgacggccttcgggcagcataaagggttcgggctcgccttgctgggggatatcttgggtggatcgttcagcgggggcggggcctatgcgcccgagcgcgaggtccccgaccggatcgtgaacaatatgatggccatcttgatcgatccgaatgtctttggtcttgcgcaaagctttggtgtggatgtggacagctatacagattgggtcaaggcatcccccgcagcgcccggaacggcgggggtgcaattccccggcgaccccgaaaggcgcagtacggcagagcgatcggccaagggtattccgctggatccaggcacattggcgcaactgtcggaggcggcgcgcaaggcgggtgttcccgcgtcagaacatctttgctctacctctgattga

SEQ ID NO: 75854 - protein, 356 aa, Sulfitobacter sp. EE-36
MAVDAGRLTDFATAILAHAGKDAGRAAKVAARLVGANLAGHDSHGVGMIPAYVDGILAGQLDAAADIELVQDKGPFLLVDGNRGFGHIVAEQAMTLAIDRAQTHHFAMLSLRNSFHLGRLGDWGIMAAEAGFICILYANVQSARPLVAPFGGSDARFVTNPYCTAIPATEKHPMFVLDMATSTIAMGKARVAQLSGKPAPEGALIDAQGNATRDPSVVFDGAGGALTAFGQHKGFGLALLGDILGGSFSGGGAYAPEREVPDRIVNNMMAILIDPNVFGLAQSFGVDVDSYTDWVKASPAAPGTAGVQFPGDPERRSTAERSAKGIPLDPGTLAQLSEAARKAGVPASEHLCSTSD

SEQ ID NO: 75855 - DNA, 1110 bp, Aspergillus oryzae
  CDS (1)..(1110)
atgaccgcggcagagtgtagccgcctaaaatccctacctatacaactactgcacaatggcctccccgctggaaagtttgcctcagagctacttgtgaaggcgggactttctccggaagatgccaagtcaatggccgattgtttggtgatggcggatgttcggggcgtggatactcatggattggctcggctacctcaatacttggatcgtgtcagcaatggccgcgtcaaggcaaatccagagttcaagctgaccgagaagacacccgttgtggctcaactagacggtgacaatggctttggcttcgtggtcgccaccagagcaatggaggaagctgtgaagcgtgctgaaatatatggcattggaatggttactgtcaatcactcgaaccattttggcatggccgccacctatgtgatccaggccctggagaagaacatgatctcacttgttttcaccaactccgccaagcagatgcctccttttggtggtaaggagactcttctgggcatctcacccttcgcggcaggtgctccttctaacaacgaggtgccttacatcctcgatatggcgccttcagttgtcgccaagggaaagattcgtcgcgccgcccgtcgtggtgaatccatcccacttggctgggccttggacgcggacggcaacccaaccaccgatgccaatatcgccttgaatggaagcatggcgccaattggtggccccaagggctctgggattgctatcctgatggatgtgatgtcaggtgtcttgacaggcgcagccttcggtggtgaagtcggagaccaatacaaggataccaagccgcaaaatgtcggtcattgcttcattgccatcaagcctgatatcttcatgaccacggatcaattcaaggctcgtatggacactttggtgcaacgtgtccatggtgttactcccgccccgggtttcaatgaagtgctcttccccggagagccggagcaccgtctcggcatgcagcgtcgtaaggaagggattccatatgcggatgctgaaaagcagatgttccttgaggctgctaaacagtacggtgtttctgagcttccactatccgaaagccctctttccttgtcctga

SEQ ID NO: 75856 - protein, 369 aa, Aspergillus oryzae
MTAAECSRLKSLPIQLLHNGLPAGKFASELLVKAGLSPEDAKSMADCLVMADVRGVDTHGLARLPQYLDRVSNGRVKANPEFKLTEKTPVVAQLDGDNGFGFVVATRAMEEAVKRAEIYGIGMVTVNHSNHFGMAATYVIQALEKNMISLVFTNSAKQMPPFGGKETLLGISPFAAGAPSNNEVPYILDMAPSVVAKGKIRRAARRGESIPLGWALDADGNPTTDANIALNGSMAPIGGPKGSGIAILMDVMSGVLTGAAFGGEVGDQYKDTKPQNVGHCFIAIKPDIFMTTDQFKARMDTLVQRVHGVTPAPGFNEVLFPGEPEHRLGMQRRKEGIPYADAEKQMFLEAAKQYGVSELPLSESPLSLS

SEQ ID NO: 75857 - DNA, 1341 bp, Drosophila melanogaster
  CDS (1)..(1341)
atgactgctttgacattgctacgacgatcagttacggcggtcagctacgacggttacgcccacgtttgcgttacgaattggcggtttctgccccagcttcaaaggtgccaattgcatttgcacgttagtgggcgacatgctgctgtacttttgtccagcaaaacaacagcaacaacagcaacatcagctgttgcagctgcgcaggcgccaaatgcgtatgctaatgttggcggcttttccatcacgtaccgcaccatgtccgccgctgctccgaaactggtggccgttgccgagtcgcgtcgtttcatgatcgactgcttcaaggcggtgaaggtgccccaggcccatgccgaagcccaggcggatctcctggtggctgcggaccatcgggggcacttcagccatggcatgaaccgccttgagatgtacatcaacgatctggccatcaactccacggacggagcggctgtgcccaagatcctaaaggaaactccggccaccgcctgggtggatggcctgaatggacttggtgccgtcgtgggcaactactgcatggatctggccatcaagaaggccaagacggtgggagttggctgggtttgtgccaagggatcgaaccactatggcatggctggttggtatgccatcagggccatggatcagggtctggtgggcatgtccatgacgaatacctcgccgctgatggcacccacacgcgccaaggaggctgctctgggcaccaatcccttgtccctgggtgccaatgccaccaacggtgataagttcctgctggacatggccaccacagccgtggccgtgggaaagatcgagatccagcgcaggaagggagctcctctgcccgacggatgggctcaggatcccagtggtgaagtgaccaacgatgcagagctgggtttcagcactgggtgcctgatgccattaggaggatccgagctgacctccggctacaagggttacggccttggcgccatggtggacattctgtcgggtgtcatgtccggagccaactactcgacgcaggtgaggaagttgacacatgctggcgccgattccgcagctgatcttggccaggtcttcatcgccgtggatcccaactgctttgctcccaacttcgaggaacgcatggccgacttcaactcccgcctgcgaggcgctactccgaccgatcccagcaagcccgttttgctggctggagacaaggagaagaagggaatggctgacgtcgatgccgccggcggtatacagtatctggagaatcagttgaagacgtgcgccaacctggcggaaatactgaagattaagcccctgagctttgtttaa

SEQ ID NO: 75858 - protein, 446 aa, Drosophila melanogaster
MTALTLLRRSVTAVSYDGYAHVCVTNWRFLPQLQRCQLHLHVSGRHAAVLLSSKTTATTATSAVAAAQAPNAYANVGGFSITYRTMSAAAPKLVAVAESRRFMIDCFKAVKVPQAHAEAQADLLVAADHRGHFSHGMNRLEMYINDLAINSTDGAAVPKILKETPATAWVDGLNGLGAVVGNYCMDLAIKKAKTVGVGWVCAKGSNHYGMAGWYAIRAMDQGLVGMSMTNTSPLMAPTRAKEAALGTNPLSLGANATNGDKFLLDMATTAVAVGKIEIQRRKGAPLPDGWAQDPSGEVTNDAELGFSTGCLMPLGGSELTSGYKGYGLGAMVDILSGVMSGANYSTQVRKLTHAGADSAADLGQVFIAVDPNCFAPNFEERMADFNSRLRGATPTDPSKPVLLAGDKEKKGMADVDAAGGIQYLENQLKTCANLAEILKIKPLSFV

SEQ ID NO: 75859 - DNA, 1014 bp, Amycolatopsis orientalis
  CDS (1)..(1014): transl_table=11
atgaacgttcaagccgccgagctggaggcgctggccacccggatcctcgtcgccgccgggtcgtccacagtggacgccgagacggtggcgcgttcgctggtgggttccgatctgctcggccacgactcgcacggggtccgcagggtcatcgactacgtcaagcggatccacactggactgatcgatccgcgggccgagccgaaggcggagaccacccggccgggaaccgttgtggtgcacgggcgtcgcgcgttcggtcagctcgccgtccggcgcgcggtgcgtgagctgctctccctcgtgccgcaccagggatcgggtgtggccgttgtgcgcgagtgcaaccacatcggcagactcggcgaatacgttgcgatgctggccgatcaggacctgatcgggctggccttcggcaacgccgacccgacggtcgcgccgtacggcggccgggaacgacgcctgggcaccaatcccctcgcctgggccgtccccagagggcccggccagcctccgatcgtgatggattgggccacgtccggtatcgccgaaggcaaactgcgcgtggccagggaccgaggcgagcaggtggccgaaggcctggtgctggacgcggccggacggccgagcaccacacccgcggacttctaccagggcggcgctttgctgccgttcggcggccacaagggctacgggctgagtgtgctcatcgagatcgtcggcggactgctgtcgggcatcggcatcggcagcatgcccggcttccgggagggctggggcacagtcctggtcgccttcgacatcgccgctttccttccggtaccggagtttcgtgcccaaacagagcggttctgccaggcgctcgccgagaccccgctcgccgaaggggccagcgaggtgctggttcccggcgagccggaggagcggatccggcttgagcgggccagggacggcattcccgtcacggcgaacacctggcgcgaactcaacgctctactgaggacagaggaggagtga

SEQ ID NO: 75860 - protein, 337 aa, Amycolatopsis orientalis
MNVQAAELEALATRILVAAGSSTVDAETVARSLVGSDLLGHDSHGVRRVIDYVKRIHTGLIDPRAEPKAETTRPGTVVVHGRRAFGQLAVRRAVRELLSLVPHQGSGVAVVRECNHIGRLGEYVAMLADQDLIGLAFGNADPTVAPYGGRERRLGTNPLAWAVPRGPGQPPIVMDWATSGIAEGKLRVARDRGEQVAEGLVLDAAGRPSTTPADFYQGGALLPFGGHKGYGLSVLIEIVGGLLSGIGIGSMPGFREGWGTVLVAFDIAAFLPVPEFRAQTERFCQALAETPLAEGASEVLVPGEPEERIRLERARDGIPVTANTWRELNALLRTEEE

SEQ ID NO: 75861 - DNA, 1035 bp, Methanococcus jannaschii
  CDS (1)..(1035): transl_table=11
atgattttaaaaccagaaaatgaaaaaaagttaataattgatgtcttaaaaaaatttggtgttccagaggaagatgccaaaataactgccgatgtttttgttgatgctgatttaaagggttttacttctcatggaattggaaggtttccacagtatataactgccttaaaattaggaaatataaatccaaagccagatataaagatagttaaagaaagcccagcaacggcagttatagatggagatttgggtttaggtcaagttgttggaaaaaaagccatggaattagctataaaaaaggcaaaaaatgttggagttggagttgttgctacaagaaatgctaatcactttggtatcgctggctattattcagagttagctatgaatcaagatatgattggaataacaataacaaacacagagccagctatggctccttttggtggtaaagagaaaattttaggaacaaatccaattgctatagcatttaaaggaaataagtataaattttccttagacatggctactgcttcaattgcaagaggaaagattttagaagctttaagaaaaaaaataaagattccagaaggttgtgcagtagataaagatggaaagccaacaacagaccctgctaaagcattggaaggatgtatattaccatttggaggacctaaggggtatggtttggcattagctatcgaaatgctgtcagctatcggtggggctgaggttgggactaaggttaaagggactgctaatccagaggagagatgcactaagggagatttatttatagctataaatccagaattttttatggggaaggaggagtttaaaagaaaagttgatgagttgttagatgaaattaaaaactcagagccagcagaaggttttgagatattaatccctggggaaatagaggagaggaataaaatgaaaagaaaggatggatttgaaattgataaaaacttatacaaccaattaaaagaaatttgtaatgagttgggattaaatattgaggactatattgaataa

SEQ ID NO: 75862 - protein, 344 aa, Methanococcus jannaschii
MILKPENEKKLIIDVLKKFGVPEEDAKITADVFVDADLKGFTSHGIGRFPQYITALKLGNINPKPDIKIVKESPATAVIDGDLGLGQVVGKKAMELAIKKAKNVGVGVVATRNANHFGIAGYYSELAMNQDMIGITITNTEPAMAPFGGKEKILGTNPIAIAFKGNKYKFSLDMATASIARGKILEALRKKIKIPEGCAVDKDGKPTTDPAKALEGCILPFGGPKGYGLALAIEMLSAIGGAEVGTKVKGTANPEERCTKGDLFIAINPEFFMGKEEFKRKVDELLDEIKNSEPAEGFEILIPGEIEERNKMKRKDGFEIDKNLYNQLKEICNELGLNIEDYIE

SEQ ID NO: 75863 - DNA, 1089 bp, Pyrococcus abyssi
  CDS (1)..(1089): transl_table=11
atgttcgaaaagggttacgtggatgagaactacgtgagaattccgaaggatgaactgttctcattcgtcgtcagggttctaactaagctcggaacaccagaggaagacgctaagatagtggccgataatctaataatggcagatttaaggggaatagagagtcacggagtccagaggttgaagaggtacgtggatggaattctaagcggaggaataaaccttcaccccaggataaagataattagagaaggcccctcctatgcactactcgatggagacgaaggatttggtcaagtagttggatacaaggcaatgaagctggcaatagaaaaagccagaaaaaccggaatagggattgttgcggttaggaacagcaatcactatggaatagctggttattacgccctcatggcagcggaagagggaatgatagggataagcatgacgaattctaggccgttagttgccccaactggaggagttgaaaggattctaggtactaacccaatagctttagctgctcccactaagggcaagcctttcctcctcgacatggcaacaagcgtcgttccgataggtaaactcgaggtttacaggaggaaaggtgaggaaatccccgagggctgggccataaattctaaaggagagataacgaggagcgttgaagaagtgttcaacgggggctcccttttaccgctgggtgggtttggagaactgcttggaggtcacaaaggttatgggttgagcttaatggttgacatactgtctggaatactcagcgggggaacctggagtaagcacgtgaagaataccaacgagaagaacagcaacgtttgccacttcttcatggccataaacatagagcactttacacccctagaagagttcaagggaaggatgagcgagatgattaacgagattaagaactcaaggaagcacccagactttgagaggatatggatccacggagagaagggattcttgacgatggagactaggttaaagctcgggattcctatttataagaaggttttagatgagttgaacgagatagctagaagggtgggagtcaagggactggaggtttaa

SEQ ID NO: 75864 - protein, 362 aa, Pyrococcus abyssi
MFEKGYVDENYVRIPKDELFSFVVRVLTKLGTPEEDAKIVADNLIMADLRGIESHGVQRLKRYVDGILSGGINLHPRIKIIREGPSYALLDGDEGFGQVVGYKAMKLAIEKARKTGIGIVAVRNSNHYGIAGYYALMAAEEGMIGISMTNSRPLVAPTGGVERILGTNPIALAAPTKGKPFLLDMATSVVPIGKLEVYRRKGEEIPEGWAINSKGEITRSVEEVFNGGSLLPLGGFGELLGGHKGYGLSLMVDILSGILSGGTWSKHVKNTNEKNSNVCHFFMAINIEHFTPLEEFKGRMSEMINEIKNSRKHPDFERIWIHGEKGFLTMETRLKLGIPIYKKVLDELNEIARRVGVKGLEV

SEQ ID NO: 75865 - DNA, 1083 bp, Pyrococcus horikoshii
  CDS (1)..(1083): transl_table=11
atgtttgaaaagggttatgtcgatgagaactacatcagagttcccaaggatagacttttctctttcatagtcagggtactaactaaactaggagttccagaggaggatgctaagatagttgcagataacttggtgatggcagatctgagaggggtggagagtcatggagttcagagattaaagaggtacgtggatgggataattagcggtggggtaaaccttcatcctaaaataagggttatccgagaaggcccttcctatgcccttatagatggggatgaaggccttggccaagtagttggatataggtctatgaaactcgcaattaagaaggctaaggatactgggattgggatcgtcattgctaggaacagtaaccactatgggatagctggatactacgccttgatggccgctgaagaggggatgatcggaattagcatgacgaactctaggccactagttgctccaacaggaggaattgaaaggatccttggcacgaatccaatagctttagcagcgcccacgaaggataagccctttttacttgacatggcaaccagcgtagttccgataggtaaactcgaagtctacagaagaaaaggaaaggatatccctgagggatgggccataaatagagaagggaatataactactaaggtcgaagaggtgttcaatggaggggcccttctaccccttggagggtttggagagctacttggaggacataaaggttatgggttaagtttaatggtcgatatactttccggaatactctctggtggaacatggagtaagtacgttaagaataccagtgagaagggaagtaatgtttgtcacttcttcatggtcatagacatagagcatttcatacctctagaagaatttaaggagaagataagtcagatgattgaggaaataaagagttcgagaaagcatcctgaatttgagaggatatggatccatggggagaagggatttttaaccatggagactaggcttaagctcggtattccgatctataggaaggttctcgaagagcttaacgagatagcaaaaagagttggagttgaaggtttatga

SEQ ID NO: 75866 - protein, 360 aa, Pyrococcus horikoshii
MFEKGYVDENYIRVPKDRLFSFIVRVLTKLGVPEEDAKIVADNLVMADLRGVESHGVQRLKRYVDGIISGGVNLHPKIRVIREGPSYALIDGDEGLGQVVGYRSMKLAIKKAKDTGIGIVIARNSNHYGIAGYYALMAAEEGMIGISMTNSRPLVAPTGGIERILGTNPIALAAPTKDKPFLLDMATSVVPIGKLEVYRRKGKDIPEGWAINREGNITTKVEEVFNGGALLPLGGFGELLGGHKGYGLSLMVDILSGILSGGTWSKYVKNTSEKGSNVCHFFMVIDIEHFIPLEEFKEKISQMIEEIKSSRKHPEFERIWIHGEKGFLTMETRLKLGIPIYRKVLEELNEIAKRVGVEGL

SEQ ID NO: 75867 - DNA, 21 bp, Artificial sequence
  primer
atggaaagtggtcatcgcttt

SEQ ID NO: 75868 - DNA, 23 bp, Artificial sequence
  primer
ttagctggctaactgctgacaga

SEQ ID NO: 75869 - protein, 339 aa, Artificial sequence
  consensus sequence
  Variant (2)..(4): Xaa in position 2 to 4 is any amino acid
  Variant (6)..(7): Xaa in position 6 to 7 is any amino acid
  Variant (9)..(10): Xaa in position 9 to 10 is any amino acid
  Variant (12)..(14): Xaa in position 12 to 14 is any amino acid
  Variant (16)..(17): Xaa in position 16 to 17 is any amino acid
  Variant (21)..(26): Xaa in position 21 to 26 is any amino acid
  Variant (28)..(54): Xaa in position 28 to 54 is any amino acid
  Variant (57)..(58): Xaa in position 57 to 58 is any amino acid
  Variant (60)..(60): Xaa in position 60 is any amino acid
  Variant (62)..(75): Xaa in position 62 to 75 is any amino acid
  Variant (77)..(79): Xaa in position 77 to 79 is any amino acid
  Variant (81)..(90): Xaa in position 81 to 90 is any amino acid
  Variant (92)..(92): Xaa in position 92 is any amino acid
  Variant (94)..(105): Xaa in position 94 to 105 is any amino acid
  Variant (107)..(113): Xaa in position 107 to 113 is any amino acid
  Variant (115)..(120): Xaa in position 115 to 120 is any amino acid
  Variant (121)..(123): Xaa in position 121 to 123 is any or no amino acid
  Variant (125)..(126): Xaa in position 125 to 126 is any amino acid
  Variant (128)..(132): Xaa in position 128 to 132 is any amino acid
  Variant (137)..(141): Xaa in position 137 to 141 is any amino acid
  Variant (143)..(149): Xaa in position 143 to 149 is any amino acid
  Variant (150)..(151): Xaa in position 150 to 151 is any or no amino acid
  Variant (154)..(154): Xaa in position 154 is any amino acid
  Variant (157)..(159): Xaa in position 157 to 159 is any amino acid
  Variant (161)..(161): Xaa in position 161 is any amino acid
  Variant (164)..(170): Xaa in position 164 to 170 is any amino acid
  Variant (172)..(174): Xaa in position 172 to 174 is any amino acid
  Variant (176)..(176): Xaa in position 176 is any amino acid
  Variant (178)..(180): Xaa in position 178 to 180 is any amino acid
  Variant (182)..(183): Xaa in position 182 to 183 is any amino acid
  Variant (185)..(186): Xaa in position 185 to 186 is any amino acid
  Variant (188)..(199): Xaa in position 188 to 199 is any amino acid
  Variant (200)..(215): Xaa in position 200 to 215 is any or no amino acid
  Variant (217)..(218): Xaa in position 217 to 218 is any amino acid
  Variant (219)..(225): Xaa in position 219 to 225 is any or no amino acid
  Variant (228)..(229): Xaa in position 228 to 229 is any amino acid
  Variant (231)..(241): Xaa in position 231 to 241 is any amino acid
  Variant (242)..(242): Xaa in position 242 is any or no amino acid
  Variant (244)..(263): Xaa in position 244 to 263 is any amino acid
  Variant (264)..(272): Xaa in position 264 to 272 is any or no amino acid
  Variant (274)..(301): Xaa in position 274 to 301 is any amino acid
  Variant (302)..(308): Xaa in position 302 to 308 is any or no amino acid
  Variant (310)..(311): Xaa in position 310 to 311 is any amino acid
  Variant (313)..(321): Xaa in position 313 to 321 is any amino acid
  Variant (322)..(322): Xaa in position 322 is any or no amino acid
  Variant (324)..(324): Xaa in position 324 is any amino acid
  Variant (326)..(335): Xaa in position 326 to 335 is any amino acid
  Variant (336)..(338): Xaa in position 336 to 338 is any or no amino acid
AXXXAXXLXXAXXXGXXSHGXXXXXXYXXXXXXXXXXXXXXXXXXXXXXXXXXXDGXXGXGXXXXXXXXXXXXXXAXXXGXXXXXXXXXXHXGXXXXXXXXXXXXGXXXXXXXNXXXXXXXXXPXXGXXXXXGTNPXXXXXPXXXXXXXXXLDXATXXXAXGKXXXXXXXGXXXPXGXXXDXXGXXTXXXXXXXXXXXXXXXXXXXXXXXXXXXXGXXXXXXXXXKGXXLXXXXXXXXXXXXGXXXXXXXXXXXXXXXXXXXXXXXXXXXXXPXXXXXXXXXXXXXXXXXXXXXXXXXXXXXXXXXXXGXXEXXXXXXXXXXGXIXXXXXXXXXXXXXA

SEQ ID NO: 75870 - protein, 39 aa, Artificial sequence
  protein pattern
  Variant (2)..(4): Xaa in position 2 to 4 is any or no amino acid
  Variant (6)..(6): Xaa in position 6 is Ile, Leu or Val
  Variant (7)..(7): Xaa in position 7 is Ala, Cys or Gly
  Variant (8)..(8): Xaa in position 8 is any amino acid
  Variant (9)..(9): Xaa in position 9 is Ile, Leu or Val
  Variant (10)..(13): Xaa in position 10 to 13 is any amino acid
  Variant (14)..(14): Xaa in position 14 is Ala, Ser or Val
  Variant (15)..(15): Xaa in position 15 is any amino acid
  Variant (17)..(17): Xaa in position 17 is any amino acid
  Variant (19)..(23): Xaa in position 19 to 23 is any amino acid
  Variant (24)..(24): Xaa in position 24 is Ala, Cys, Ser, Thr or Val
  Variant (25)..(26): Xaa in position 25 to 26 is any amino acid
  Variant (27)..(27): Xaa in position 27 is Ala or Cys
  Variant (28)..(30): Xaa in position 28 to 30 is any amino acid
  Variant (31)..(31): Xaa in position 31 is Asp, Gly or Asn
  Variant (32)..(33): Xaa in position 32 to 33 is any amino acid
  Variant (34)..(34): Xaa in position 34 is Gly or Ser
  Variant (35)..(35): Xaa in position 35 is Phe, Ile, Leu, Met or Val
  Variant (36)..(37): Xaa in position 36 to 37 is any amino acid
  Variant (38)..(38): Xaa in position 38 is Ala, Cys, Ser, Thr or Val
  Variant (39)..(39): Xaa in position 39 is Asp, Asn, Gln or Ser
AXXXGXXXXXXXXXXHXGXXXXXXXXXXXXXXXXXXXXX

SEQ ID NO: 75871 - protein, 27 aa, Artificial sequence
  protein pattern
  Variant (2)..(4): Xaa in position 2 to 4 is any amino acid
  Variant (6)..(7): Xaa in position 6 to 7 is any amino acid
  Variant (9)..(10): Xaa in position 9 to 10 is any amino acid
  Variant (11)..(11): Xaa in position 11 is Ala or Ser
  Variant (12)..(12): Xaa in position 12 is Asp, Glu, Asn or Ser
  Variant (13)..(14): Xaa in position 13 to 14 is any amino acid
  Variant (16)..(17): Xaa in position 16 to 17 is any amino acid
  Variant (18)..(18): Xaa in position 18 is Gly, Ser or Thr
  Variant (21)..(23): Xaa in position 21 to 23 is any amino acid
  Variant (24)..(24): Xaa in position 24 is Ile, Leu, Met or Val
  Variant (25)..(26): Xaa in position 25 to 26 is any amino acid
AXXXAXXLXXXXXXGXXXHGXXXXXXY

SEQ ID NO: 75872 - protein, 17 aa, Artificial sequence
  protein pattern
  Variant (2)..(3): Xaa in position 2 to 3 is any amino acid
  Variant (4)..(4): Xaa in position 4 is Ala or Gly
  Variant (5)..(9): Xaa in position 5 to 9 is any amino acid
  Variant (10)..(10): Xaa in position 10 is Gly, Ser, Thr or Val
  Variant (12)..(12): Xaa in position 12 is Ala or Asn
  Variant (14)..(14): Xaa in position 14 is any amino acid
  Variant (15)..(15): Xaa in position 15 is Ala, Cys, Ser or Thr
  Variant (16)..(16): Xaa in position 16 is any amino acid
  Variant (17)..(17): Xaa in position 17 is Ala, Gly or Val
PXXXXXXXXXTXPXXXX

SEQ ID NO: 75873 - DNA, 597 bp, Escherichia coli
  CDS (1)..(597): transl_table=11
atgctggaaaatttgaatctctctctattctctcttattaacgcgacgccagactcggctccgtggatgatctcgttggcgatttttattgctaaagatttgattaccgtggtgccgttgctggccgtggtactttggttgtgggggcttacagcacaacggcaactggtgataaaaatcgctatcgcgctggcggtcagcctgtttgtgtcctggacgatgggacatctttttccgcacgaccgaccctttgtcgaaaatatcggctataacttcctgcatcatgcggcggatgactcattcccaagcgatcacggtacggtgattttcacctttgcactggcatttttatgctggcatcgcctgtggtccggctcacttttaatggtgctggccgtcgtcattgcctggtcgcgcgtttatcttggcgtccactggccgctggatatgctcggtggattgctggcaggtatgattggctgccttagtgcccagattatctggcaagcgatggggcataaactctatcaacgtctgcaatcgtggtatcgcgtctgttttgcattaccgatccgcaaaggctgggtgcgtgactaa

SEQ ID NO: 75874 - protein, 198 aa, Escherichia coli
MLENLNLSLFSLINATPDSAPWMISLAIFIAKDLITVVPLLAVVLWLWGLTAQRQLVIKIAIALAVSLFVSWTMGHLFPHDRPFVENIGYNFLHHAADDSFPSDHGTVIFTFALAFLCWHRLWSGSLLMVLAVVIAWSRVYLGVHWPLDMLGGLLAGMIGCLSAQIIWQAMGHKLYQRLQSWYRVCFALPIRKGWVRD

SEQ ID NO: 75875 - DNA, 675 bp, Salmonella typhi
  CDS (1)..(675): transl_table=11
atgctcagtttgcacggggatgagctggctatcccttttgatttcattgctccgagcctggatgttatgctggaaaaccttaacaactcgctgttttattttattaacgccacgcctgattccgcgcagtggataatttcgctcgctatctttatcgccaaagatgtcatcaacatcgtcccgctcttagccgtggtactctggctgtgggggccccgcgatcgggtctgcgcccagcgccagctgatcgttaaaatcggcatcgcgctgattatcagtctggcggtctcctggacaatgggacaccttttcccgcacgaccgtccgtttgtcgatcatatcggctataacttcctgcatcatgccgccgatgactcgttccccagcgatcacggtacggtgatttttacctttgcgctggcgtttttgttctggcaccgcctctggtcaggcatcgtgatgatggcgatagccatgaccatcgcctggtcgcgcgtctatctcggcgtacactggccgttagatatgattggcgcgctgctggtagcgatgcttggctgcctgagcgcacagctgatctggcaatggtacggcgcgccgctctaccaggcgctgcaacgttgttaccgtttctgtttcgcattgcccattcgaaaaggctgggtacgtgactaa

SEQ ID NO: 75876 - protein, 224 aa, Salmonella typhi
MLSLHGDELAIPFDFIAPSLDVMLENLNNSLFYFINATPDSAQWIISLAIFIAKDVINIVPLLAVVLWLWGPRDRVCAQRQLIVKIGIALIISLAVSWTMGHLFPHDRPFVDHIGYNFLHHAADDSFPSDHGTVIFTFALAFLFWHRLWSGIVMMAIAMTIAWSRVYLGVHWPLDMIGALLVAMLGCLSAQLIWQWYGAPLYQALQRCYRFCFALPIRKGWVRD

SEQ ID NO: 75877 - DNA, 609 bp, Salmomella typhi
  CDS (1)..(609)
atgctggaaaaccttaacaactcgctgttttattttattaacgccacgcctgattccgcgcagtggataatttcgctcgctatctttatcgccaaagatgtcatcaacatcgtcccgctcttagccgtggtactctggctgtgggggccccgcgatcgggtctgcgcccagcgccagctgatcgttaaaatcggcatcgcgctgattatcagtctggcggtctcctggacaatgggacaccttttcccgcacgaccgtccgtttgtcgatcatatcggctataacttcctgcatcatgccgccgatgactcgttccccagcgatcacggtacggtgatttttacctttgcgctggcgtttttgttctggcaccgcctctggtcaggcatcgtgatgatggcgatagccatgaccatcgcctggtcgcgcgtctatctcggcgtacactggccgttagatatgattggcgcgctgctggtagcgatgcttggctgcctgagcgcacagctgatctggcaatggtacggcgcgccgctctaccaggcgctgcaacgttgttaccgtttctgtttcgcattgcccattcgaaaaggctgggtacgtgactaa

SEQ ID NO: 75878 - protein, 202 aa, Salmomella typhi
MLENLNNSLFYFINATPDSAQWIISLAIFIAKDVINIVPLLAVVLWLWGPRDRVCAQRQLIVKIGIALIISLAVSWTMGHLFPHDRPFVDHIGYNFLHHAADDSFPSDHGTVIFTFALAFLFWHRLWSGIVMMAIAMTIAWSRVYLGVHWPLDMIGALLVAMLGCLSAQLIWQWYGAPLYQALQRCYRFCFALPIRKGWVRD

SEQ ID NO: 75879 - DNA, 597 bp, Yersinia pestis CO92
  CDS (1)..(597): transl_table=11
atgaattattttttcttctccatgataaacgcaacgccagcatcatcaccatggatgatttcttttgcgactttcatcgcacgtgacctgattatgctcatccctattttactgatagggctgtggctatgggggccaaaagataccatggacatgcaacgtactgtggtgacgaaagcagctatcgctctcgctttttccatgctttctgctacctgtatcgggatgctcattcctcatgatcggccttttgtcgatggctttggttatgcctttatgagccatgcgccagacagctcttttcccagtgaccacggcaccgctattttcacttttgcactggcctttcttttttggcatcacctttggtccggtgtcagcctgatgtttatcgccattgcgattgcctggtcacgtatctatctgggtgttcattggccattcgacatgctgggtgcgtttctgttaggtattgtcggctgcttgttcgcgcaactggtttggaacttatttggggaaattattgccagtaccacaaagcgcttctatcacatgagttttgccctaccaatcagtaaagggtgggtcagaggttag

SEQ ID NO: 75880 - protein, 198 aa, Yersinia pestis CO92
MNYFFFSMINATPASSPWMISFATFIARDLIMLIPILLIGLWLWGPKDTMDMQRTVVTKAAIALAFSMLSATCIGMLIPHDRPFVDGFGYAFMSHAPDSSFPSDHGTAIFTFALAFLFWHHLWSGVSLMFIAIAIAWSRIYLGVHWPFDMLGAFLLGIVGCLFAQLVWNLFGEIIASTTKRFYHMSFALPISKGWVRG

SEQ ID NO: 75881 - DNA, 609 bp, Salmonella typhimurium LT2
  CDS (1)..(609): transl_table=11
atgctggaaaaccttaacaactcgctgttttattttattaacgccacgcctgattccgcgcagtggataatttcgctcgctatctttatcgccaaagatgtcatcaacatcgtcccgctcttagccgtggtactctggctgtgggggccccgcgatcgggtctgcgcccagcgccagctgatcgttaaaatcggcatcgcgctgattatcagtctggcggtctcctggacaatgggacaccttttcccgcacgaccgtccgtttgtcgatcatatcggctataacttcctgcatcatgccgccgatgactcgttccccagcgatcacggtacggtgatttttacctttgcgctggcgtttttgttctggcaccgcctctggtcaggcatcgtgatgatggcgatagccattaccatcgcctggtcgcgcgtctatctcggcgtacactggccgttagatatgattggcgcgctgctggtagcgatgcttggctgcctgagcgcacagctgatctggcagtggtacggcgcgccgctctaccaggcgctgcaacgttgttaccgtttctgtttcgcattgcccattcgaaaaggctgggtacgtgactaa

SEQ ID NO: 75882 - protein, 202 aa, Salmonella typhimurium LT2
MLENLNNSLFYFINATPDSAQWIISLAIFIAKDVINIVPLLAVVLWLWGPRDRVCAQRQLIVKIGIALIISLAVSWTMGHLFPHDRPFVDHIGYNFLHHAADDSFPSDHGTVIFTFALAFLFWHRLWSGIVMMAIAITIAWSRVYLGVHWPLDMIGALLVAMLGCLSAQLIWQWYGAPLYQALQRCYRFCFALPIRKGWVRD

SEQ ID NO: 75883 - DNA, 600 bp, Ralstonia solanacearum GMI1000
  CDS (1)..(600): transl_table=11
atggaagccctcaaccacgccctgttcctgtggatcaacgccccggccgagcccgctgccgcgacggtccggctggccatgttctttgccgaatacgccatctggctggcaccgctggcgctggtggccggctggctgtggggcgagccgtcgacgcgccggcatgcgctgcaggccgcggtcgcggccgtcctggcgctgctgatcaatgtgggcttcggcctggcgtgggaccacccccggccgttcgccatcggcctgggccgcaacctgctggcgcacgtggcggattcctcgtttccgagcgatcacctgacgctgctgtggtcggtggccttcagcctgctgtggcatccgcgcctgcgccgggcgggcgtggcgctggtgctgctgggcttgccgatggcgtgggcgcgtatctacctgggcgtgcactatccgttcgacatggcgggcgcggcggcggtggcggcgttcagcgcctggctgtgcagcgggcgggttgcccacacgctgtccgagccgctgcaccggctggcgctggcggtgcacgcggtggcgctggcgccgtgcgtgcggcgcggctgggttcgcagatag

SEQ ID NO: 75884 - protein, 199 aa, Ralstonia solanacearum GMI1000
MEALNHALFLWINAPAEPAAATVRLAMFFAEYAIWLAPLALVAGWLWGEPSTRRHALQAAVAAVLALLINVGFGLAWDHPRPFAIGLGRNLLAHVADSSFPSDHLTLLWSVAFSLLWHPRLRRAGVALVLLGLPMAWARIYLGVHYPFDMAGAAAVAAFSAWLCSGRVAHTLSEPLHRLALAVHAVALAPCVRRGWVRR

SEQ ID NO: 75885 - DNA, 603 bp, Chromobacterium violaceum ATCC 12472
  CDS (1)..(603): transl_table=11
atgtctcaagtcgaaatcctgaatcaatcgttgttcctgctgatcaacgccacgccggaaacctctccgtttaccatcaagctggccgttttcatcgcccaggacatcatgcggctgttgccgctgtggctggccgcgctgtggctgtggggccgtccggccctgcgcgacaccattttgaaatcggtggcgctgaccgccgtcgccttgatgggcaacgggttgatcggcctggcctggccgcatccgcgtcccttcgctgtgccgctgggccacaccttcctgctgcacgacgccacgccgtcctttcccagcaatcacggcaccatcttcgccatgatggctttgtgctggtgcttcagtccggcgcgaggctggggctggctgctggcgattgccggcgcggccgtcgcctggtcccgggtgtttctcggcgtgcatttcccgctggacatgctgggcgccttgctggtatccgtcttctggtacgctagcctgtcgccgctgtggtcccgcaagggaggggccctgacggcggcgctggagtcgctgtaccgccagttattggccaaaccgatcgcctccgggttgatcaggcgctga

SEQ ID NO: 75886 - protein, 200 aa, Chromobacterium violaceum ATCC 12472
MSQVEILNQSLFLLINATPETSPFTIKLAVFIAQDIMRLLPLWLAALWLWGRPALRDTILKSVALTAVALMGNGLIGLAWPHPRPFAVPLGHTFLLHDATPSFPSNHGTIFAMMALCWCFSPARGWGWLLAIAGAAVAWSRVFLGVHFPLDMLGALLVSVFWYASLSPLWSRKGGALTAALESLYRQLLAKPIASGLIRR

SEQ ID NO: 75887 - DNA, 609 bp, Photorhabdus luminescens subsp. laumondii TTO1
  CDS (1)..(609): transl_table=11
ttgttagaacaaataaatcatgatctgtttacctttttcaatgctacgcctgaatcatcaccagccatgattgcaatggcgacgttcattgcaaaatacctggttcttattttccctctaatattggctagtttctggttctggggttcagagcgtactcgcccttatcatcgggttatcgtcagtaaaaccaccattgccttctgttttgctatgctaacctcatactgtatcggtttactctgccctcacgaccgcccttttgcagaaggcttcggttataactttcttcctcacgcgccaacaacctcattcccaagtcatcatggaacaaccgtcttcactttcgctttatcctttttattctggcacaggatttggccgggcttatgtatgatggcaattgcactggcaattgcatgggccagagtctatttaggcgttcactggccgatggatatggtcggagcatttatcgtcagcctaatgggatgcacttttgcgcaaataatatggagcctgtttggtgaacgtttacaaaaaagattgaacagtctgtaccaacattgctgcgcttttcctatccgtaaaggctggataaaaagttag

SEQ ID NO: 75888 - protein, 202 aa, Photorhabdus luminescens subsp. laumondii TTO1
MLEQINHDLFTFFNATPESSPAMIAMATFIAKYLVLIFPLILASFWFWGSERTRPYHRVIVSKTTIAFCFAMLTSYCIGLLCPHDRPFAEGFGYNFLPHAPTTSFPSHHGTTVFTFALSFLFWHRIWPGLCMMAIALAIAWARVYLGVHWPMDMVGAFIVSLMGCTFAQIIWSLFGERLQKRLNSLYQHCCAFPIRKGWIKS

SEQ ID NO: 75889 - DNA, 645 bp, Acinetobacter sp. ADP1
  CDS (1)..(645): transl_table=11
ctgatttctttatcatgcttgcttcattttctgaacaatggagtgggaatgccgattgaaaccctcaatctagccttgtttagcgccttgaatgcatctaccgatgccaaacccgtcatgattcatctggccatttttgtcgccaatgatctgctatatatcttgctgggtttactggtttttttgtggtgctatggcgatttacaactcaaagaacgtgcatttaaagccgtcgctctcactgccgtttcattgttgctcggttatttaatttcaatgatttatcctcatccacgtccctttgtgatggaggtgggaagaaccttgattgagcatcagccaactgcatcttttccgagtaaccatatgctcatttttagcaccattgccttatcttactgctttgcaggacgtaaactggctggtggtattttactggggcttgcctttgcagtggcttggtcaaggatttatgtgggggtgcactttccgctagatatgctgggcgcctttatactggccttgtttgtcaatttgattggattttatctctggcagcattatcaccaagtctttatgcagattgcactgaatatttatcgatgggtgggtaagccattgttagatcggggcctgatcaaatag

SEQ ID NO: 75890 - protein, 214 aa, Acinetobacter sp. ADP1
MISLSCLLHFLNNGVGMPIETLNLALFSALNASTDAKPVMIHLAIFVANDLLYILLGLLVFLWCYGDLQLKERAFKAVALTAVSLLLGYLISMIYPHPRPFVMEVGRTLIEHQPTASFPSNHMLIFSTIALSYCFAGRKLAGGILLGLAFAVAWSRIYVGVHFPLDMLGAFILALFVNLIGFYLWQHYHQVFMQIALNIYRWVGKPLLDRGLIK

SEQ ID NO: 75891 - DNA, 606 bp, Yersinia pseudotuberculosis IP 32953
  CDS (1)..(606): transl_table=11
atggaacaaatgaattattttttcttctccatgataaacgcaacgccagcatcctcaccatggatgatttcttttgcgactttcatcgcacgtgacctgattatgctcatccctattttactgatagggctgtggctatgggggccaaaagataccatggacatgcaacgtactgtggtgacgaaagcagctatcgctctcgctttttccatgctttctgctacctgtatcgggatgctcattcctcatgatcggccttttgtcgatggctttggttatgcctttatgagccatgcgccagacagctcttttcccagtgaccacggcaccgctattttcacttttgcactggcctttcttttttggcatcacctttggtccggtgtcagcctgatgtttatcgccattgcgattgcctggtcacgtatctatctgggtgttcattggccattcgacatgctgggtgcgtttctgttaggtattgtcggctgcttgttcgcgcaactggtttggaacttatttggggaaattattgccagtaccacaaagcgcttctatcacatgagttttgccctaccaatcagtaaagggtgggtcagaggttag

SEQ ID NO: 75892 - protein, 201 aa, Yersinia pseudotuberculosis IP 32953
MEQMNYFFFSMINATPASSPWMISFATFIARDLIMLIPILLIGLWLWGPKDTMDMQRTVVTKAAIALAFSMLSATCIGMLIPHDRPFVDGFGYAFMSHAPDSSFPSDHGTAIFTFALAFLFWHHLWSGVSLMFIAIAIAWSRIYLGVHWPFDMLGAFLLGIVGCLFAQLVWNLFGEIIASTTKRFYHMSFALPISKGWVRG

SEQ ID NO: 75893 - DNA, 597 bp, Burkholderia mallei ATCC 23344
  CDS (1)..(597): transl_table=11
atgcaaaacttcaatctcgccgtcttctccgcgctcaatgcgggttccacgccgcctctcggcgccgttcgcttcggcgtgttcgccgccgactggctcgtctatgcggtgcccgcactgctgctgctgacctgggtgatgggcgcgcgcccgacgcgccgccaggcgatcgaagcgggcgtcggcgcgtgcgtcgcgctcgcgctcgcgcaggtgatcggccacttctggtattcgccgcgcccgttcgtgctcggcatcggcacgcaactgattccgcacgcgccggacggctcgttcccgagtgatcacacgacgttcgtctgcagcgtggcggcgggcctgctgatcgcgcgcgcgacgcgcacggcgggcgccgcgctcgccgtcatcgcggcggtgatcgggtgggggcgcgtgtatgtcggcgtgcattggccgctcgatatcgtgggcggcgcgctcgtcggcaccgccggcgcgctcgccgcgcatctgtacggccgcccggtgacggcgctgctcgaccgggtcggcgaatcggtgcacgcggtcgcgttcacgcgattgcacgagcggccgatccgcatcgactga

SEQ ID NO: 75894 - protein, 198 aa, Burkholderia mallei ATCC 23344
MQNFNLAVFSALNAGSTPPLGAVRFGVFAADWLVYAVPALLLLTWVMGARPTRRQAIEAGVGACVALALAQVIGHFWYSPRPFVLGIGTQLIPHAPDGSFPSDHTTFVCSVAAGLLIARATRTAGAALAVIAAVIGWGRVYVGVHWPLDIVGGALVGTAGALAAHLYGRPVTALLDRVGESVHAVAFTRLHERPIRID

SEQ ID NO: 75895 - DNA, 588 bp, Pseudomonas fluorescens Pf-5
  CDS (1)..(588): transl_table=11
atggaagaactcaatcacagcctgttcctggccatcaacgccagtgacggggcgtccatgccgatgcgtgcactggcggttttcctcgcgcaatgggtggtactcagcgtgccgctgctgctggtggtgttctgggttttcggcgagcgccgccagcgcatgatcgtgttgctcgccggcctgagcattgtcctggccctggtctgcaacctgctggtccgtgagctgtggttccatccgcggccgttcatgatcggcctggggcagaacttcctcgcccacgcgcccggggcgtctttccccagcgaccacgccagtggcatgttcgccatggctttcgcgctgatcctggccagcctgcgcaagaccgggctggtgatgctgggcctggcgctcctggtgagttgggcacgggtctacctgggcgtgcatttccctttcgacattctgggtggctgcctggtgggggggctcagcgcctggctggtgcgccaggggctggcctggcagcaactggaccagcggctgctggcaatcctcgaaggggcttatctgcggctgacggccagcgttcggcgcggcgcctga

SEQ ID NO: 75896 - protein, 195 aa, Pseudomonas fluorescens Pf-5
MEELNHSLFLAINASDGASMPMRALAVFLAQWVVLSVPLLLVVFWVFGERRQRMIVLLAGLSIVLALVCNLLVRELWFHPRPFMIGLGQNFLAHAPGASFPSDHASGMFAMAFALILASLRKTGLVMLGLALLVSWARVYLGVHFPFDILGGCLVGGLSAWLVRQGLAWQQLDQRLLAILEGAYLRLTASVRRGA

SEQ ID NO: 75897 - DNA, 597 bp, Dechloromonas aromatica RCB
  CDS (1)..(597): transl_table=11
atggaagacctcaatcacgcactatttctctggcttaatgcaccagagcacccaagcacactgctactggccatcgccacttttttcgctgaatacgccatttgggcgcttccggtcatcatcggattcggttggctacgcggaaacgaatatacccgcaaggttttgctcgaagcgaccgcgtccggtctggctggtttgctcatcaaccagatcatcggactggtttggcaacatccacgtcctttcatgattggtctggggcacaccctgattccccatgctgctgattcttcgttcccgagcgaccatctgacgctcctatgggccgtcgcttttagttttctgatgcaccgcagcccgcgcctggcgggaatggcgcttgcattgctgggattacctgttgcatgggcgcgcatttatcttggtgttcattttccgctagacatggttggcgcggccttggtcgccgggctgagtgcctggctggcgtttcgtgagatgcgcgtatatctgcctgcgacttgccgccttgccctctgcgttcatcgagtccttttcggaaaactcatccaaattggatgggttcacaaatga

SEQ ID NO: 75898 - protein, 198 aa, Dechloromonas aromatica RCB
MEDLNHALFLWLNAPEHPSTLLLAIATFFAEYAIWALPVIIGFGWLRGNEYTRKVLLEATASGLAGLLINQIIGLVWQHPRPFMIGLGHTLIPHAADSSFPSDHLTLLWAVAFSFLMHRSPRLAGMALALLGLPVAWARIYLGVHFPLDMVGAALVAGLSAWLAFREMRVYLPATCRLALCVHRVLFGKLIQIGWVHK

SEQ ID NO: 75899 - DNA, 597 bp, Geobacter metallireducens GS-15
  CDS (1)..(597): transl_table=11
atggaagcattgaaccatagactgttttttctgattaacgcccccgctcatcctgacgcgctcatggtgtcttttgcccgcgggctggctgatgagctcatctggctggtgccgctgcttctgatatatggctggctgtgggggaatgaacaacgacgcatcgcgatgctggaggcaacggtagccggcttggcgggcctgctggccaaccaggtcattgcccttgtctggccgcatccacgcccgttcatggtcaacatggggcatacctttttgaggcatgtggcggattcctcattcccaagcgaccacctgaccctgatctggtccgtttcattttgcctgataatgcggaagcacttccggccggcgggcattgccgtcgctttggcggggctgccggtggcctgggcgcggatctatctgggagtccatttcccgcttgatatggtcggagccgccctggtggccgtcatgagcgcctggctggtgctccgtggggaacggttgctgattgacgtctgctaccggccgatgttcgcggcataccacctgctcgcgaagccgttgattcgaggcggatggctcaacgaataa

SEQ ID NO: 75900 - protein, 198 aa, Geobacter metallireducens GS-15
MEALNHRLFFLINAPAHPDALMVSFARGLADELIWLVPLLLIYGWLWGNEQRRIAMLEATVAGLAGLLANQVIALVWPHPRPFMVNMGHTFLRHVADSSFPSDHLTLIWSVSFCLIMRKHFRPAGIAVALAGLPVAWARIYLGVHFPLDMVGAALVAVMSAWLVLRGERLLIDVCYRPMFAAYHLLAKPLIRGGWLNE

SEQ ID NO: 75901 - DNA, 603 bp, Burkholderia xenovorans LB400
  CDS (1)..(603): transl_table=11
atgaatacacttgaggctgccaaccgggcggtgtttctactgatcaacggcacaactgcgactcctgcatggctagtcggtattgctatgttgaccgccgcttacgtaatctggttgatcccgctacttatggcggctatgtggttaggaggcaatgaggagcagcggaatctggcgcttcgggcctgtctcgtggcgatgctcggcgttggcgcgaatcagttgatagccgtcgtgtggcagcatccgcggccgttcatgatcggtttcgggcacacgttcttgccgcatgcgccggactcgtccttcccgagcgaccatgcgaccgtctttgccggcatcgctctcacgctgttgtggggaggtgcacgctgtctgggcggactcactttgcttgccggggccctagttgcatgggcgcggatatttcttggtgtccatttcccgctggacatgctcggcgctgtcatcgtcgccgccatatcgttggaagtgatctcaccgctctggcatctcgcgggcgatgctgtcacgagacgggcgatcatgctttatcgcaaccttttctcacgtccgatcgcacttggctggttgcgccggtga

SEQ ID NO: 75902 - protein, 200 aa, Burkholderia xenovorans LB400
MNTLEAANRAVFLLINGTTATPAWLVGIAMLTAAYVIWLIPLLMAAMWLGGNEEQRNLALRACLVAMLGVGANQLIAVVWQHPRPFMIGFGHTFLPHAPDSSFPSDHATVFAGIALTLLWGGARCLGGLTLLAGALVAWARIFLGVHFPLDMLGAVIVAAISLEVISPLWHLAGDAVTRRAIMLYRNLFSRPIALGWLRR

SEQ ID NO: 75903 - DNA, 597 bp, Ralstonia metallidurans CH34
  CDS (1)..(597): transl_table=11
atggaatcactcaaccatacattttttctctggctcaacgcaccggagcatcccagtgctttggctctgacgttggccaccttctttgccgaacagctcatctgggcggttccactcctgatcggcatcggctggcttcgcggcggcgagcctacccgcaagacgatgctcgttgctagcgcatcgggattgctgggcctgctcatcaaccagatcatcggcctggcttggttgcatcctcgacctttcatgatcggcctgggtcacaccctcatccctcatgttgccgattcgtctttcccaagcgatcacctgacgctgtggtgggcggttgccttcagcctcgcgctgcaacgaggcccacgaattgcaggcgtgactttggctttgctgggcgttcccattgcctgggcgcgcatctaccttggagtgcacttcccattcgacatgctcggggccatcgccgttgctgcaatctgtgcctggctgacgttacgtgaagcacactggtatctattgccaagttatcaactttccaccggaatccatcggcggcttttcagcgggttgatcgcgcttggatgggtgcgcgagtga

SEQ ID NO: 75904 - protein, 198 aa, Ralstonia metallidurans CH34
MESLNHTFFLWLNAPEHPSALALTLATFFAEQLIWAVPLLIGIGWLRGGEPTRKTMLVASASGLLGLLINQIIGLAWLHPRPFMIGLGHTLIPHVADSSFPSDHLTLWWAVAFSLALQRGPRIAGVTLALLGVPIAWARIYLGVHFPFDMLGAIAVAAICAWLTLREAHWYLLPSYQLSTGIHRRLFSGLIALGWVRE

SEQ ID NO: 75905 - DNA, 609 bp, Salmonella typhimurium
  CDS (1)..(609): transl_table=11
atgctggaaaaccttaacaactcgctgttttattttattaacgccacgcctgattccgcgcagtggataatttcgctcgctatctttatcgccaaagatgtcatcaacatcgtcccgctcttagccgtggtactctggctgtggggaccccgcgatcgggtctgcgcccagcgccagctgatcgttaaaatcggcatcgcgctgattatcagtctggcggtctcctggacaatgggacaccttttcccgcacgaccgtccgtttgtcgatcatatcggctataacttcctgcatcatgccgccgatgactcgttccccagcgatcacggtacggtgatttttacctttgcgctggcgtttttgttctggcaccgcctctggtcaggcatcgtgatgatggcgatagccattaccatcgcctggtcgcgcgtctatctcggcgtacactggccgttagatatgattggcgcgctgctggtaacgatgcttggctgcctgagcgcacagctgatctggcagtggtacggcgcgccgctctaccaggcgctgcaacgttgttaccgtttctgtttcgcattgcccattcgaaaaggctgggtacgtgactaa

SEQ ID NO: 75906 - protein, 202 aa, Salmonella typhimurium
MLENLNNSLFYFINATPDSAQWIISLAIFIAKDVINIVPLLAVVLWLWGPRDRVCAQRQLIVKIGIALIISLAVSWTMGHLFPHDRPFVDHIGYNFLHHAADDSFPSDHGTVIFTFALAFLFWHRLWSGIVMMAIAITIAWSRVYLGVHWPLDMIGALLVTMLGCLSAQLIWQWYGAPLYQALQRCYRFCFALPIRKGWVRD

SEQ ID NO: 75907 - DNA, 600 bp, Klebsiella pneumoniae
  CDS (1)..(600): transl_table=11
atgatgaatgccctggagctcctgaaccggagctggtttctgtccctgaatgcggcccccggtacacctgcggcactgatggcctttgccaccttttgcgcgcagtacactctcgtgattatcccgctgactctgctgggtcactggtttctgggcgggaaaagcgggcaccggcgggcgctgttctcgcttgtcaccatcctggtagcgctggggctgggctttatctgtacaacgctctggtttcatccccgcccgtttatggtaccgctggggcatacctggatttaccacgctccggaaacctccttccccagcgaccatgccacgctgttcttcagcgccggtctgtcgttgttactgtctgacgcacgggtcagcggtggcctgattttgctcctctcgctttttgtcgcctggtcgcgggtcttcctcggcgtgcattttccgctggacatggcgggagcctccctcttagcggtgctggcctgcctgctggttcgtccactgtggcgtcatctgggggagccactgacatcgttctgcgaaagcatcagttcgcgactgttctcctggttacccgccagattcacgccctga

SEQ ID NO: 75908 - protein, 199 aa, Klebsiella pneumoniae
MMNALELLNRSWFLSLNAAPGTPAALMAFATFCAQYTLVIIPLTLLGHWFLGGKSGHRRALFSLVTILVALGLGFICTTLWFHPRPFMVPLGHTWIYHAPETSFPSDHATLFFSAGLSLLLSDARVSGGLILLLSLFVAWSRVFLGVHFPLDMAGASLLAVLACLLVRPLWRHLGEPLTSFCESISSRLFSWLPARFTP

SEQ ID NO: 75909 - DNA, 25 bp, Artificial sequence
  primer
atgctggaaaatttgaatctctctc

SEQ ID NO: 75910 - DNA, 23 bp, Artificial sequence
  primer
ttagtcacgcacccagcctttgc

SEQ ID NO: 75911 - protein, 199 aa, Artificial sequence
  consensus sequence
  Variant (2)..(3): Xaa in position 2 to 3 is any amino acid
  Variant (5)..(7): Xaa in position 5 to 7 is any amino acid
  Variant (9)..(11): Xaa in position 9 to 11 is any amino acid
  Variant (14)..(24): Xaa in position 14 to 24 is any amino acid
  Variant (26)..(26): Xaa in position 26 is any amino acid
  Variant (28)..(28): Xaa in position 28 is any amino acid
  Variant (30)..(36): Xaa in position 30 to 36 is any amino acid
  Variant (38)..(43): Xaa in position 38 to 43 is any amino acid
  Variant (45)..(46): Xaa in position 45 to 46 is any amino acid
  Variant (48)..(51): Xaa in position 48 to 51 is any amino acid
  Variant (52)..(55): Xaa in position 52 to 55 is any or no amino acid
  Variant (57)..(81): Xaa in position 57 to 81 is any amino acid
  Variant (83)..(83): Xaa in position 83 is any amino acid
  Variant (87)..(90): Xaa in position 87 to 90 is any amino acid
  Variant (92)..(96): Xaa in position 92 to 96 is any amino acid
  Variant (98)..(101): Xaa in position 98 to 101 is any amino acid
  Variant (108)..(108): Xaa in position 108 is any amino acid
  Variant (110)..(114): Xaa in position 110 to 114 is any amino acid
  Variant (116)..(126): Xaa in position 116 to 126 is any amino acid
  Variant (127)..(127): Xaa in position 127 is any or no amino acid
  Variant (129)..(138): Xaa in position 129 to 138 is any amino acid
  Variant (141)..(141): Xaa in position 141 is any amino acid
  Variant (143)..(143): Xaa in position 143 is any amino acid
  Variant (149)..(149): Xaa in position 149 is any amino acid
  Variant (151)..(151): Xaa in position 151 is any amino acid
  Variant (154)..(154): Xaa in position 154 is any amino acid
  Variant (157)..(196): Xaa in position 157 to 196 is any amino acid
  Variant (197)..(198): Xaa in position 197 to 198 is any or no amino acid
EXXNXXXFXXXNAXXXXXXXXXXXAXFXAXXXXXXXPXXXXXXWXXGXXXXXXXXRXXXXXXXXXXXXXXXXXXXXXXXXXHXRPFXXXXGXXXXXHXXXXSFPSDHXTXXXXXAXXXXXXXXXXXXGXXXXXXXXXXAWXRXYLGVHXPXDMXGAXXXXXXXXXXXXXXXXXXXXXXXXXXXXXXXXXXXXXXXXXXG

SEQ ID NO: 75912 - protein, 39 aa, Artificial sequence
  protein pattern
  Variant (2)..(3): Xaa in position 2 to 3 is any or no amino acid
  Variant (7)..(9): Xaa in position 7 to 9 is any amino acid
  Variant (10)..(10): Xaa in position 10 is Phe, Ile, Leu or Met
  Variant (12)..(12): Xaa in position 12 is any amino acid
  Variant (13)..(13): Xaa in position 13 is Ala, Asn, Gln or Thr
  Variant (14)..(14): Xaa in position 14 is any amino acid
  Variant (15)..(15): Xaa in position 15 is Ile, Leu or Met
  Variant (16)..(16): Xaa in position 16 is any amino acid
  Variant (18)..(18): Xaa in position 18 is Ala or Val
  Variant (19)..(19): Xaa in position 19 is Ala or Pro
  Variant (20)..(20): Xaa in position 20 is Asp, Glu or Gly
  Variant (21)..(21): Xaa in position 21 is Ala, Asp, Gly, Ser or Thr
  Variant (28)..(28): Xaa in position 28 is any amino acid
  Variant (29)..(29): Xaa in position 29 is Ser or Thr
  Variant (30)..(32): Xaa in position 30 to 32 is any amino acid
  Variant (33)..(33): Xaa in position 33 is Ala, Gly, Ser or Thr
  Variant (34)..(34): Xaa in position 34 is any amino acid
  Variant (35)..(35): Xaa in position 35 is Ala, Gly or Ser
  Variant (36)..(36): Xaa in position 36 is any amino acid
  Variant (37)..(37): Xaa in position 37 is Ala, Cys, Gly, Ser or Thr
  Variant (38)..(38): Xaa in position 38 is Phe or Leu
  Variant (39)..(39): Xaa in position 39 is Ala, Ile or Leu
PXXRPFXXXXGXXXXXHXXXXSFPSDHXXXXXXXXXXXX

SEQ ID NO: 75913 - protein, 24 aa, Artificial sequence
  protein pattern
  Variant (3)..(3): Xaa in position 3 is Ala or Ser
  Variant (5)..(5): Xaa in position 5 is Ile or Val
  Variant (6)..(6): Xaa in position 6 is Phe or Tyr
  Variant (11)..(11): Xaa in position 11 is Phe, Trp or Tyr
  Variant (13)..(13): Xaa in position 13 is Phe, Leu or Met
  Variant (16)..(16): Xaa in position 16 is Ala, Ile, Leu or Val
  Variant (18)..(18): Xaa in position 18 is Ala or Gly
  Variant (19)..(19): Xaa in position 19 is any amino acid
  Variant (20)..(20): Xaa in position 20 is Ala, Ile or Leu
  Variant (21)..(21): Xaa in position 21 is Ala, Leu or Val
  Variant (22)..(22): Xaa in position 22 is Ala, Gly, Ser or Thr
  Variant (23)..(23): Xaa in position 23 is any amino acid
  Variant (24)..(24): Xaa in position 24 is Phe, Ile, Leu, Met or Val
AWXRXXLGVHXPXDMXGXXXXXXX

SEQ ID NO: 75914 - protein, 20 aa, Artificial sequence
  protein pattern
  Variant (2)..(2): Xaa in position 2 is any amino acid
  Variant (3)..(3): Xaa in position 3 is Ile, Leu or Met
  Variant (5)..(7): Xaa in position 5 to 7 is any amino acid
  Variant (9)..(10): Xaa in position 9 to 10 is any amino acid
  Variant (11)..(11): Xaa in position 11 is Phe, Ile or Leu
  Variant (14)..(14): Xaa in position 14 is any amino acid
  Variant (15)..(19): Xaa in position 15 to 19 is any or no amino acid
EXXNXXXFXXXNAXXXXXXP

SEQ ID NO: 75915 - DNA, 183 bp, Escherichia coli
  CDS (1)..(183): transl_table=11
atggatcatcgtctgcttgaaatcattgcctgcccggtttgcaacggaaaactttggtataaccaggaaaaacaagagcttatttgcaaactggacaacctcgctttcccgctgcgtgatggcattccagtgttgctggaaacggaagcccgcgtgctgactgctgatgagagtaaatcataa

SEQ ID NO: 75916 - protein, 60 aa, Escherichia coli
MDHRLLEIIACPVCNGKLWYNQEKQELICKLDNLAFPLRDGIPVLLETEARVLTADESKS

SEQ ID NO: 75917 - DNA, 180 bp, Vibrio cholerae O1 biovar eltor str. N16961
  CDS (1)..(180): transl_table=11
atggatcaccgtctgcttgaaatcgtcgcttgcccagtatgtaaaggtaagctgacttacgataaagatcgccaagagctgatttgtaagctggatcgtctggcttatcccattaaagaaggcattccggtgcttttagagccggaagctcgcagcatgagcatggatgagggacgctaa

SEQ ID NO: 75918 - protein, 59 aa, Vibrio cholerae O1 biovar eltor str. N16961
MDHRLLEIVACPVCKGKLTYDKDRQELICKLDRLAYPIKEGIPVLLEPEARSMSMDEGR

SEQ ID NO: 75919 - DNA, 183 bp, Pasteurella multocida subsp. multocida str. Pm70
  CDS (1)..(183): transl_table=11
atggattcaacattattagagattgtcgcttgtcctatttgtcatgggcgtttagcgcttgatcaaaccagccagaaattagtctgtcattttgataaagttgcttatgacatcaatcaaggtatcccggtattgttagcggaacaagccatgcctttatccgcaagacaagaggagccgtaa

SEQ ID NO: 75920 - protein, 60 aa, Pasteurella multocida subsp. multocida str. Pm70
MDSTLLEIVACPICHGRLALDQTSQKLVCHFDKVAYDINQGIPVLLAEQAMPLSARQEEP

SEQ ID NO: 75921 - DNA, 183 bp, Neisseria meningitidis MC58
  CDS (1)..(183): transl_table=11
atggaaaaaaaattcttagacatcctcgtctgccccgttaccaaaggcaggctggaatatcatcaggacaaacaggaattgtggagccgtcaggcgaagcttgcctatccgattaaagacggcattccctatatgctggaaaacgaagcgcgagcgttgagcgaagaggaactcaaagcatga

SEQ ID NO: 75922 - protein, 60 aa, Neisseria meningitidis MC58
MEKKFLDILVCPVTKGRLEYHQDKQELWSRQAKLAYPIKDGIPYMLENEARALSEEELKA

SEQ ID NO: 75923 - DNA, 189 bp, Ralstonia solanacearum GMI1000
  CDS (1)..(189): transl_table=11
atggacaatcgcctgctggaaatcctggtctgcccgctgtgcaagggcacgctgcaacacgaccgcgcccataacgaactgatctgccacgtcgacaagctggcctatccgatccgcgatggcatccccgtgatgctggccgacgaggcgcgccagaccgtcgaaggcacgccggtcgatccggcctga

SEQ ID NO: 75924 - protein, 62 aa, Ralstonia solanacearum GMI1000
MDNRLLEILVCPLCKGTLQHDRAHNELICHVDKLAYPIRDGIPVMLADEARQTVEGTPVDPA

SEQ ID NO: 75925 - DNA, 189 bp, Agrobacterium tumefaciens str. C58
  CDS (1)..(189): transl_table=11
atggacgacaggatgagtaatgtcgatccgaagctgctggagcttttggtctgccctttgacgaagggcaggctttcctatgatcggacccacaacgagctcatctccgaaagcgcgaggctcgcctatccgatccgtgacggcgtgccgatcatgctgatttcagaagcgcgcaaaatagaagaatag

SEQ ID NO: 75926 - protein, 62 aa, Agrobacterium tumefaciens str. C58
MDDRMSNVDPKLLELLVCPLTKGRLSYDRTHNELISESARLAYPIRDGVPIMLISEARKIEE

SEQ ID NO: 75927 - DNA, 180 bp, Corynebacterium glutamicum ATCC 13032
  CDS (1)..(180): transl_table=11
atgagtcttgatccacagcttcttgaagtcctggcctgcccaaaggacaagggcccacttcgatatctggagagcgaacagctcttggtcaacgaacgcctcaacctggcctatcgcattgacgacggaattccggtgcttctcatcgacgaagccaccgagtggacccccaacaactag

SEQ ID NO: 75928 - protein, 59 aa, Corynebacterium glutamicum ATCC 13032
MSLDPQLLEVLACPKDKGPLRYLESEQLLVNERLNLAYRIDDGIPVLLIDEATEWTPNN

SEQ ID NO: 75929 - DNA, 171 bp, Streptomyces coelicolor A3(2)
  CDS (1)..(171): transl_table=11
atgccgctcgaagccggcctcctggagatcctcgcctgccccgcctgccacgcccccctcgaggagcgggacgcggagctgatctgcaccggccaggactgcggcctggcctacccggtgcgcgacggcatccccgtcctcctcgtcgacgaggcccgccgccccgagtaa

SEQ ID NO: 75930 - protein, 56 aa, Streptomyces coelicolor A3(2)
MPLEAGLLEILACPACHAPLEERDAELICTGQDCGLAYPVRDGIPVLLVDEARRPE

SEQ ID NO: 75931 - DNA, 180 bp, Shewanella oneidensis MR-1
  CDS (1)..(180): transl_table=11
atggcgtttgataagaaactgttagatatcgttgcttgcccagtgtgtaagggaaagttggaatatgataaggtggcgcagcaattgatttgtaaggcggataaattagcttaccccattaccgatggtattcctgtattattggaaaaccgtgccttaccattaactgaaagtgtttga

SEQ ID NO: 75932 - protein, 59 aa, Shewanella oneidensis MR-1
MAFDKKLLDIVACPVCKGKLEYDKVAQQLICKADKLAYPITDGIPVLLENRALPLTESV

SEQ ID NO: 75933 - DNA, 186 bp, Pseudomonas putida KT2440
  CDS (1)..(186): transl_table=11
atggacaccaaactgcttgatatcctggcctgcccgatcaccaagggcccgctcaagctgagcgccgacaagaccgagctgatcagcaaaggcgctggcctggcctacccgattcgcgacggtatcccggtcatgctggaaagcgaggcacgcaccctgaccgacgacgagcgtcttgacaaatga

SEQ ID NO: 75934 - protein, 61 aa, Pseudomonas putida KT2440
MDTKLLDILACPITKGPLKLSADKTELISKGAGLAYPIRDGIPVMLESEARTLTDDERLDK

SEQ ID NO: 75935 - DNA, 186 bp, Pseudomonas syringae pv. tomato str. DC3000
  CDS (1)..(186): transl_table=11
atggacaccaaattactcgacatcctcgcttgcccgatctgcaaggggcccttgaagcttagcgccgacaagaccgagctgatcagtaaaggcgcaggccttgcctatccggttcgcgacggcattccggtgatgctcgaaagcgaagcccgcaccctgaccaccgatgagcggctggacaaatga

SEQ ID NO: 75936 - protein, 61 aa, Pseudomonas syringae pv. tomato str. DC3000
MDTKLLDILACPICKGPLKLSADKTELISKGAGLAYPVRDGIPVMLESEARTLTTDERLDK

SEQ ID NO: 75937 - DNA, 171 bp, Wigglesworthia glossinidia endosymbiont of Glossina brevipalpis
  CDS (1)..(171): transl_table=11
atggataaaaaattgttaaatataattgcttgtccaatctgtaataaaaaattaaattttgatttgattagaaaagaacttatttgtgaatttgattcagtagcttttccaataaaagatggaattccaattttgcttagggattccagttatcctattaaaaaaaggtaa

SEQ ID NO: 75938 - protein, 56 aa, Wigglesworthia glossinidia endosymbiont of Glossina brevipalpis
MDKKLLNIIACPICNKKLNFDLIRKELICEFDSVAFPIKDGIPILLRDSSYPIKKR

SEQ ID NO: 75939 - DNA, 186 bp, Candidatus Blochmannia floridanus
  CDS (1)..(186): transl_table=11
atgcaaaaaaaattattagaaattatcgtttgtcctttttgttatacacggttatttatgaatgatacagaaacagaattaatttgtaatattgagaacattagttttcctctaaaacaaggaattccagttttattaaaaaatcaaattcgatatttgaattgcaaaattatagataaccaatga

SEQ ID NO: 75940 - protein, 61 aa, Candidatus Blochmannia floridanus
MQKKLLEIIVCPFCYTRLFMNDTETELICNIENISFPLKQGIPVLLKNQIRYLNCKIIDNQ

SEQ ID NO: 75941 - DNA, 189 bp, Bordetella bronchiseptica RB50
  CDS (1)..(189): transl_table=11
atggaatcccgtttgctcgacatcctcgtctgcccggtgtgcaagggccgcctcgaatttcagcgcgcgcaggccgaactggtctgcaacgccgaccgcctcgcctttccggtgcgcgacggcgtgcccatcatgctggaggccgaggcgcgctcgctcgacgccgaggcgcccgcccaaccctcctga

SEQ ID NO: 75942 - protein, 62 aa, Bordetella bronchiseptica RB50
MESRLLDILVCPVCKGRLEFQRAQAELVCNADRLAFPVRDGVPIMLEAEARSLDAEAPAQPS

SEQ ID NO: 75943 - DNA, 183 bp, Chromobacterium violaceum ATCC 12472
  CDS (1)..(183): transl_table=11
atggacgctaaatttctggaaatcctggtgtgcccgctgtgcaagggcccgctggtgttcgacaagagcaaggacgagctgatctgcaagggagaccgcctggcgttcccgatcaaggacggcatcccgatgatgctggagagcgaagcgcgcgagctggccccggaagaagaagtcaaatga

SEQ ID NO: 75944 - protein, 60 aa, Chromobacterium violaceum ATCC 12472
MDAKFLEILVCPLCKGPLVFDKSKDELICKGDRLAFPIKDGIPMMLESEARELAPEEEVK

SEQ ID NO: 75945 - DNA, 180 bp, Photorhabdus luminescens subsp. laumondii TTO1
  CDS (1)..(180): transl_table=11
atggatcaccgtttactcgaaattattgcctgtcctgtatgtaacggaaaactcagttacgataaagagaattttgaactcatttgtaagttggatcgacttgcgtttcctgtacgtgatggtattcccgtcctgttagagcacgaagcccgcgaattacctctggatgaggaaaaataa

SEQ ID NO: 75946 - protein, 59 aa, Photorhabdus luminescens subsp. laumondii TTO1
MDHRLLEIIACPVCNGKLSYDKENFELICKLDRLAFPVRDGIPVLLEHEARELPLDEEK

SEQ ID NO: 75947 - DNA, 180 bp, Vibrio vulnificus YJ016
  CDS (1)..(180): transl_table=11
atggatcatcgactgcttgagattgtcgcgtgcccagtgtgcaaaggtaaactgacttttgataaagaaaaccaagagctgatttgcaagctcgatcgcttggcttatccaattaaagaaggcattcctgttttgcttgagccggaagctcgcagcatgggaatggatgaggggcgctaa

SEQ ID NO: 75948 - protein, 59 aa, Vibrio vulnificus YJ016
MDHRLLEIVACPVCKGKLTFDKENQELICKLDRLAYPIKEGIPVLLEPEARSMGMDEGR

SEQ ID NO: 75949 - DNA, 234 bp, Yersinia pestis biovar Microtus str. 91001
  CDS (1)..(234): transl_table=11
atggtatcctcaaacactttcctgctggctaaactccattttggaggatgtatggaccaccgtttactcgaaattgttgcctgcccagtctgcaacggcaaattatactttaataaagaaaaccttgagttggtgtgtaaggtggataatctggcttacccggtacgcgacggtatccctgtcttgttggaaaacgaggcccgtccactgtcaattgatgagaagcacgcatga

SEQ ID NO: 75950 - protein, 77 aa, Yersinia pestis biovar Microtus str. 91001
MVSSNTFLLAKLHFGGCMDHRLLEIVACPVCNGKLYFNKENLELVCKVDNLAYPVRDGIPVLLENEARPLSIDEKHA

SEQ ID NO: 75951 - DNA, 183 bp, Erwinia carotovora subsp. atroseptica SCRI1043
  CDS (1)..(183): transl_table=11
atggatcaccgtttacttgagattgttgcctgtcctgtttgtaatggtcggctgtattttaataaagagaaactggagctgatatgcaaggccgatgggttggcctatccagttcgtgatggtatccctgtgctgctggagaatgaggcacgtaaacttggggctgacgagataacgcaatga

SEQ ID NO: 75952 - protein, 60 aa, Erwinia carotovora subsp. atroseptica SCRI1043
MDHRLLEIVACPVCNGRLYFNKEKLELICKADGLAYPVRDGIPVLLENEARKLGADEITQ

SEQ ID NO: 75953 - DNA, 183 bp, Yersinia pseudotuberculosis IP 32953
  CDS (1)..(183): transl_table=11
atggaccaccgtttactcgaaattgttgcctgcccagtctgcaacggcaaattatactttaataaagaaaaccttgagttggtgtgtaaggtggataatctggcttacccggtacgcgacggtatccctgtcttgttggaaaacgaggcccgtccactgtcaattgatgagaagcacgcatga

SEQ ID NO: 75954 - protein, 60 aa, Yersinia pseudotuberculosis IP 32953
MDHRLLEIVACPVCNGKLYFNKENLELVCKVDNLAYPVRDGIPVLLENEARPLSIDEKHA

SEQ ID NO: 75955 - DNA, 186 bp, Mannheimia succiniciproducens MBEL55E
  CDS (1)..(186): transl_table=11
atggacagtagattgcttgaaattatcgcctgtcccagatgtcaggggcggttgcaattagataaagaaaatgagcgtttgatttgccgttttgagcatattgcgtttccgatcgttcaaggcattcccgttttattagttgaagaagccgtttctttagcggaagatcctaaggatataacatga

SEQ ID NO: 75956 - protein, 61 aa, Mannheimia succiniciproducens MBEL55E
MDSRLLEIIACPRCQGRLQLDKENERLICRFEHIAFPIVQGIPVLLVEEAVSLAEDPKDIT

SEQ ID NO: 75957 - DNA, 180 bp, Legionella pneumophila subsp. pneumophila str. Philadelphia 1
  CDS (1)..(180): transl_table=11
gtggataaaaaattattggaaatattggtttgtcctttatgtaaaggaaaattgctgttcaaaaaacaggaactgatctgcaaatttgataggctggcatttcctgttcgtgatgatattcctgtaatgctggaacaagaagcgcgtttgattcctctggaagagaaagataaattatga

SEQ ID NO: 75958 - protein, 59 aa, Legionella pneumophila subsp. pneumophila str. Philadelphia 1
MDKKLLEILVCPLCKGKLLFKKQELICKFDRLAFPVRDDIPVMLEQEARLIPLEEKDKL

SEQ ID NO: 75959 - DNA, 213 bp, Methylococcus capsulatus str. Bath
  CDS (1)..(213): transl_table=11
atggacaaacgactgcttgaaatcctggtctgccctgtgtgcaagggcgggctgatctatctccgcgagcagcaggaactggtctgcctggcggacaagctggcctatcccatccgcgacgacattccggtgatgctggacagcgaggcgaggaggctcagcctcgaggagtacgacgcgcttcgtcaacggcgggctgccccggtggcctga

SEQ ID NO: 75960 - protein, 70 aa, Methylococcus capsulatus str. Bath
MDKRLLEILVCPVCKGGLIYLREQQELVCLADKLAYPIRDDIPVMLDSEARRLSLEEYDALRQRRAAPVA

SEQ ID NO: 75961 - DNA, 186 bp, Pseudomonas fluorescens Pf-5
  CDS (1)..(186): transl_table=11
atggacaccaaactgctcgacatcctcgcctgcccgatctgcaaaggccccctcaaactcagcgccgacaagaccgagctgatcagcaagggcgcgggccttgcctatccgattcgcgatggcatcccggtgatgctggaaagcgaagcgcgcaccctgaccaccgaagagcgcctggacaaatga

SEQ ID NO: 75962 - protein, 61 aa, Pseudomonas fluorescens Pf-5
MDTKLLDILACPICKGPLKLSADKTELISKGAGLAYPIRDGIPVMLESEARTLTTEERLDK

SEQ ID NO: 75963 - DNA, 198 bp, Colwellia psychrerythraea 34H
  CDS (1)..(198): transl_table=11
atggcttttgatacaaaattaatggaaatccttgcctgcccagtatgtaaaggtaagttagattatgataaagcagcgcaagagcttatttgccactttgaccgtttagcttatagcatagaaaaagacattcccgtattactagaaaatgaagcgcgtgaaattaatgctaaccagtctactgagcaggatggttaa

SEQ ID NO: 75964 - protein, 65 aa, Colwellia psychrerythraea 34H
MAFDTKLMEILACPVCKGKLDYDKAAQELICHFDRLAYSIEKDIPVLLENEAREINANQSTEQDG

SEQ ID NO: 75965 - DNA, 207 bp, Pseudomonas syringae pv. phaseolicola 1448A
  CDS (1)..(207): transl_table=11
atgattgcttcaggatctcctatggacaccaaactactcgatatcctcgcttgccctgtgtgcaagggaccattgaagctcagcgccgacaagaccgagctgatcagcaaaggggcaggccttgcctacccggtacgcgacggcatcccggtgatgctcgaaagcgaagcgcgcaccttgagcaccgatgagcggctggaaaaatga

SEQ ID NO: 75966 - protein, 68 aa, Pseudomonas syringae pv. phaseolicola 1448A
MIASGSPMDTKLLDILACPVCKGPLKLSADKTELISKGAGLAYPVRDGIPVMLESEARTLSTDERLEK

SEQ ID NO: 75967 - DNA, 177 bp, Dechloromonas aromatica RCB
  CDS (1)..(177): transl_table=11
gtggacgccaggttgcttgatattctcgtctgcccgatttgcaagggcaatctcgaacaccgcaaggctgagaaggagctggtctgcaagccttgcaagctggctttcccgatccgtgacgatattcccatcatgctcgaggatgaagcgcgccagctgacggcggacgggcagtaa

SEQ ID NO: 75968 - protein, 58 aa, Dechloromonas aromatica RCB
MDARLLDILVCPICKGNLEHRKAEKELVCKPCKLAFPIRDDIPIMLEDEARQLTADGQ

SEQ ID NO: 75969 - DNA, 204 bp, Ralstonia eutropha JMP134
  CDS (1)..(204): transl_table=11
atggacaaccggctgcttgaaatcctggtctgcccgctttgcaagggcaagctggaatacgaccgcgccgcgcaggaactgatctgccacgcggacaagctcgcctacccgatccgcgacggcattcccgtcatgctggccgacgaggcccggcaatcggtgccagggcgcgtgatcgacccggccgcgccgcggacggagtga

SEQ ID NO: 75970 - protein, 67 aa, Ralstonia eutropha JMP134
MDNRLLEILVCPLCKGKLEYDRAAQELICHADKLAYPIRDGIPVMLADEARQSVPGRVIDPAAPRTE

SEQ ID NO: 75971 - DNA, 189 bp, Thiobacillus denitrificans ATCC 25259
  CDS (1)..(189): transl_table=11
atgaaccccaaattacttgaaatcctcgtctgccccgtctgcaaaggccagctcgagtggaaaaaatcggcgcacgagctcgtctgcccggcgtgccgcctcgcctatcccgtgcgtgacgacattccggtgatgctgcctgaggaggcgcgcgccgtcggccccgacgaagttcacggtcaggcctaa

SEQ ID NO: 75972 - protein, 62 aa, Thiobacillus denitrificans ATCC 25259
MNPKLLEILVCPVCKGQLEWKKSAHELVCPACRLAYPVRDDIPVMLPEEARAVGPDEVHGQA

SEQ ID NO: 75973 - DNA, 186 bp, Pseudomonas fluorescens PfO-1
  CDS (1)..(186): transl_table=11
atggacaccaaattgctcgatatcctcgcctgcccggtctgcaaaggcccgctcaaactcagcgccgacaagaccgaactgatcagcaagggcgccggtctggcgtacccgatccgcgacggcatcccggtcatgctggaaagcgaagcccgtaccctgaccaccgacgagcgtctggataaatga

SEQ ID NO: 75974 - protein, 61 aa, Pseudomonas fluorescens PfO-1
MDTKLLDILACPVCKGPLKLSADKTELISKGAGLAYPIRDGIPVMLESEARTLTTDERLDK

SEQ ID NO: 75975 - DNA, 180 bp, Rhodobacter sphaeroides 2.4.1
  CDS (1)..(180): transl_table=11
atgaccgggaccactctgttcgaccgccggatgctcgaggcgcttgtctgccccgtgacgcaggcgggactggcctacgatgccgaccggcaggagctgatctcgaaacaggcgcggctcgccttcccgatccgcgacgggatcccgatcatgctggtgtcggaagcgcgcgagctctga

SEQ ID NO: 75976 - protein, 59 aa, Rhodobacter sphaeroides 2.4.1
MTGTTLFDRRMLEALVCPVTQAGLAYDADRQELISKQARLAFPIRDGIPIMLVSEAREL

SEQ ID NO: 75977 - DNA, 195 bp, Burkholderia sp. 383
  CDS (1)..(195): transl_table=11
gtggacgctcgcctgcttgaaatccttgtgtgccctatctgcaaaggcccgctccactatgaccgtgccgcgcaggagctgatctgcaacgcggacaagctcgcctacccgatccgcgacggcatccccgtgatgctggtcgacgaggcgcgccagaccgtcgaaggcacgccggtcgacccggccggccgctaa

SEQ ID NO: 75978 - protein, 64 aa, Burkholderia sp. 383
MDARLLEILVCPICKGPLHYDRAAQELICNADKLAYPIRDGIPVMLVDEARQTVEGTPVDPAGR

SEQ ID NO: 75979 - DNA, 216 bp, Anaplasma phagocytophilum HZ
  CDS (1)..(216): transl_table=11
gtgttagataaaaaggtcttggaaattttagtttgccccctcactgggggtaaactttcgtatgatacagaacgtgctgaacttattagccatgaagcagggcttgcatatcctgtacgtgatggcattcctatcatgcttgttgatgaagcaagaaagttacaaccagaagagccgaaagaaggctctgagctccaatcatcggacaatcaataa

SEQ ID NO: 75980 - protein, 71 aa, Anaplasma phagocytophilum HZ
MLDKKVLEILVCPLTGGKLSYDTERAELISHEAGLAYPVRDGIPIMLVDEARKLQPEEPKEGSELQSSDNQ

SEQ ID NO: 75981 - DNA, 180 bp, Ehrlichia chaffeensis str. Arkansas
  CDS (1)..(180): transl_table=11
ttgtcaaatatgtttgaccatagaatacttgaaatactcgtttgtccattaacaaaagacaagttacaatataataaagacactaacgagttaattagtgaaaaagccaaattagcatttccaatacgtgatggcattccaattatgctgatcgatgaagccagaaaactagaagagtga

SEQ ID NO: 75982 - protein, 59 aa, Ehrlichia chaffeensis str. Arkansas
MSNMFDHRILEILVCPLTKDKLQYNKDTNELISEKAKLAFPIRDGIPIMLIDEARKLEE

SEQ ID NO: 75983 - DNA, 249 bp, Francisella tularensis subsp. holarctica
  CDS (1)..(249): transl_table=11
atgcttgtcaaagtagatcatctaggagataagtattcaatttataacagaggtgaaataatggatcattcagttttaaatgtgttggtttgcccaatttgtaaggcaaatttatattatgataaagaaaatcaagttttagtatgtaaagcagataaattggcttatccaattcgtgaaaatataccagtaatgttggttgaagaagctaaaaaaatgactcttgaagaggtgaaaaaatatggctaa

SEQ ID NO: 75984 - protein, 82 aa, Francisella tularensis subsp. holarctica
MLVKVDHLGDKYSIYNRGEIMDHSVLNVLVCPICKANLYYDKENQVLVCKADKLAYPIRENIPVMLVEEAKKMTLEEVKKYG

SEQ ID NO: 75985 - DNA, 192 bp, Saccharophagus degradans 2-40
  CDS (1)..(192): transl_table=11
atgttagatcaaaaattactcagcttgttggtgtgcccagtcactaaagcaccgctaatatacgacgagccaaaacaagagttggtatgtgttgctagcggtcttgcttatcctattcgtgacggtattccggtgatgttggaaggcgaggcgcgcgtactctctcaggaagaaaaagaaagctataaatag

SEQ ID NO: 75986 - protein, 63 aa, Saccharophagus degradans 2-40
MLDQKLLSLLVCPVTKAPLIYDEPKQELVCVASGLAYPIRDGIPVMLEGEARVLSQEEKESYK

SEQ ID NO: 75987 - DNA, 183 bp, Methylobacillus flagellatus KT
  CDS (1)..(183): transl_table=11
atggatgcgaaactgcttgaaatcctggtatgcccgatttgcaaagggcctctacattacaaaaaaaacgaacaggagctgatctgcaagccttgccgattggcctatccaattcaagacggtattcctgtcatgctggaggatgaagcgcgcaagcttccagcggaagaagaggtggagtag

SEQ ID NO: 75988 - protein, 60 aa, Methylobacillus flagellatus KT
MDAKLLEILVCPICKGPLHYKKNEQELICKPCRLAYPIQDGIPVMLEDEARKLPAEEEVE

SEQ ID NO: 75989 - DNA, 210 bp, Ralstonia metallidurans CH34
  CDS (1)..(210): transl_table=11
atggacaaccggctgcttgaaatcctcgtttgcccgctgtgcaagggcaaactggaatacgatcgcgccgcccaggaactgatctgccacgccgacaagctggcctacccgatccgtgatggcattccggtcatgctggcggacgaagcgcgccagaccgtgccgggccgtgtggtaccggtggaaccctcggcgccggccggcaattga

SEQ ID NO: 75990 - protein, 69 aa, Ralstonia metallidurans CH34
MDNRLLEILVCPLCKGKLEYDRAAQELICHADKLAYPIRDGIPVMLADEARQTVPGRVVPVEPSAPAGN

SEQ ID NO: 75991 - DNA, 216 bp, Mesorhizobium sp. BNC1
  CDS (1)..(216): transl_table=11
atgacggatggcaggcgaatcgagaggacgtcgatcgacccgaagcttctggaacttctggcgtgcccggtcaccaagggtccgctgaagtgggaccctgcgaaaaacgaactcatctccgccaaggccgggcttgcatatccggttcgcgacggcgttcccgtgatgctaccaggggaagcccggccgcttgaaccggataagccccggcggtga

SEQ ID NO: 75992 - protein, 71 aa, Mesorhizobium sp. BNC1
MTDGRRIERTSIDPKLLELLACPVTKGPLKWDPAKNELISAKAGLAYPVRDGVPVMLPGEARPLEPDKPRR

SEQ ID NO: 75993 - DNA, 198 bp, Haemophilus somnus 129PT
  CDS (1)..(198): transl_table=11
atgaacggaagattattagaaattgtcgcatgcccaatttgccaagggcgattgaaatacgacagtgaaaatgagcaacttatttgtcactttgatcatattgcttaccctattaaacaaggtattccaattttactttccgatcaggccataagtttgtctacatctttaaccaatcctgagcaacaaaatcagtaa

SEQ ID NO: 75994 - protein, 65 aa, Haemophilus somnus 129PT
MNGRLLEIVACPICQGRLKYDSENEQLICHFDHIAYPIKQGIPILLSDQAISLSTSLTNPEQQNQ

SEQ ID NO: 75995 - DNA, 180 bp, Shewanella sp. MR-4
  CDS (1)..(180): transl_table=11
atggcgtttgataaaaaactgttagacatagtcgcttgcccagtgtgtaagggaaaattggaatacgataagacaacgcaacaattgatttgtaaggcagacaaattagcctatccaatcacggatgggatccctgtgttactcgaaaatcgtgcagtccccttaaacgaagcggtttaa

SEQ ID NO: 75996 - protein, 59 aa, Shewanella sp. MR-4
MAFDKKLLDIVACPVCKGKLEYDKTTQQLICKADKLAYPITDGIPVLLENRAVPLNEAV

SEQ ID NO: 75997 - DNA, 186 bp, Pseudomonas aeruginosa UCBPP-PA14
  CDS (1)..(186): transl_table=11
atggacccgaaactcctcgatattcttgcctgcccgttgaccaagggcccgctggtgctcagcgaagacaagaccgaactgatcagcaagcaggctggcctggcctatccgatccgcgacggcatcccggtgatgctggagagcgaggctcgctccctgaacgtggacgagcggctggacaagtaa

SEQ ID NO: 75998 - protein, 61 aa, Pseudomonas aeruginosa UCBPP-PA14
MDPKLLDILACPLTKGPLVLSEDKTELISKQAGLAYPIRDGIPVMLESEARSLNVDERLDK

SEQ ID NO: 75999 - DNA, 180 bp, Magnetococcus sp. MC-1
  CDS (1)..(180): transl_table=11
atgttggataagcagcttttggatattctggtctgcccggtctgcaaaggaacattaagtgtggataaagggcacaccgagctggtgtgtgataaggataaattggcctttcctgtgcgggacgacatcccggttatgctgatggaagaggctcgaaaattagaggcggatgatgcttga

SEQ ID NO: 76000 - protein, 59 aa, Magnetococcus sp. MC-1
MLDKQLLDILVCPVCKGTLSVDKGHTELVCDKDKLAFPVRDDIPVMLMEEARKLEADDA

SEQ ID NO: 76001 - DNA, 189 bp, Azoarcus sp. BH72
  CDS (1)..(189): transl_table=11
atggacgcccgcctgcttgaaatcctcgtctgcccgctgtgcaagggtccgctcgattacctcaaggacaagcaggagctggtctgcaaggccgaccgcctcgcgttcccgatccgcgacggcatcccggtgatgctggaagaggaagcgcgcgcgttggccgccgaggacgtggacgcgctgcgttga

SEQ ID NO: 76002 - protein, 62 aa, Azoarcus sp. BH72
MDARLLEILVCPLCKGPLDYLKDKQELVCKADRLAFPIRDGIPVMLEEEARALAAEDVDALR

SEQ ID NO: 76003 - DNA, 195 bp, Roseovarius nubinhibens ISM
  CDS (1)..(195): transl_table=11
atgaccgatgacaccacccccgacagtttcgaccgccgcatgctcgaggcgctgatctgcccgcgcagccatgccgtccttgaatatgacgccgaggcgcaggaactgatcagccgtcaatccggccttgcctacccgatccgcaacggcatcccggtgctcttggtggacgaggcgcgggttctcgacgcctga

SEQ ID NO: 76004 - protein, 64 aa, Roseovarius nubinhibens ISM
MTDDTTPDSFDRRMLEALICPRSHAVLEYDAEAQELISRQSGLAYPIRNGIPVLLVDEARVLDA

SEQ ID NO: 76005 - DNA, 201 bp, Oceanicola batsensis HTCC2597
  CDS (1)..(201): transl_table=11
atgacggaagacgacaccgccgcagacacgctcttcgaccgacgcatgctcgaggcgctgatctgtccgctgacccagaccacgctcgcctacgatgcggagagacaagaactgatcagcaagcgcgccaacctcgcctttccgatccgcaacgggattcccatcatgctcgaggacgaggcgcgcagcctggacacctga

SEQ ID NO: 76006 - protein, 66 aa, Oceanicola batsensis HTCC2597
MTEDDTAADTLFDRRMLEALICPLTQTTLAYDAERQELISKRANLAFPIRNGIPIMLEDEARSLDT

SEQ ID NO: 76007 - DNA, 198 bp, Pseudoalteromonas tunicata D2
  CDS (1)..(198): transl_table=11
atggcctttgatattaaacttcttgaaataattgcttgcccagtaacaaaaggcaaattgcgctacgataaagcaaatgctgagcttatcagtacacaagcaaaattagcatacccaattcgtgaagatattccggtgctactagaaaatgaagcaagagagcttggccatgatgaggtagaaaagtggaattcgtag

SEQ ID NO: 76008 - protein, 65 aa, Pseudoalteromonas tunicata D2
MAFDIKLLEIIACPVTKGKLRYDKANAELISTQAKLAYPIREDIPVLLENEARELGHDEVEKWNS

SEQ ID NO: 76009 - DNA, 180 bp, Photobacterium sp. SKA34
  CDS (1)..(180): transl_table=11
atggatcatcgtctgcttgaaatcgttgcttgtcctgtatgtaaaggcaagttgagttacgataaaaaaaataatgagctggtatgtaaatttgatcgtttagcttatcctattaaagatggcattccagttttacttgagccagaagcacgtacgttaagctctgacgaggttaaataa

SEQ ID NO: 76010 - protein, 59 aa, Photobacterium sp. SKA34
MDHRLLEIVACPVCKGKLSYDKKNNELVCKFDRLAYPIKDGIPVLLEPEARTLSSDEVK

SEQ ID NO: 76011 - DNA, 186 bp, Oceanospirillum sp. MED92
  CDS (1)..(186): transl_table=11
atggataagaagttacttgatattctggtatgccctgtgaccaaaacaccactggaatttaatgaagaaaccaatgagctgtttgctaaagcaagtggccttgcttacccaattcgcgatgatattcctgtattgcttgaatcagaggctcgtgaactgactcttgaagaacgtgaagctaaataa

SEQ ID NO: 76012 - protein, 61 aa, Oceanospirillum sp. MED92
MDKKLLDILVCPVTKTPLEFNEETNELFAKASGLAYPIRDDIPVLLESEARELTLEEREAK

SEQ ID NO: 76013 - DNA, 210 bp, marine gamma proteobacterium HTCC2207
  CDS (1)..(210): transl_table=11
atggacgattttatcgtggacaaaaagcttctcagtatattggtttgccctgtcagcaaggcgccacttgaatatgataaagccaagcaggagttggtttgccgtgccagtggtttggcctatcccataagcgaaggcatcccggtaatgttggaatctgaagcacgtaaactgactgccgatgaaaagcttcatgactcgggcaaataa

SEQ ID NO: 76014 - protein, 69 aa, marine gamma proteobacterium HTCC2207
MDDFIVDKKLLSILVCPVSKAPLEYDKAKQELVCRASGLAYPISEGIPVMLESEARKLTADEKLHDSGK

SEQ ID NO: 76015 - DNA, 192 bp, Rickettsiella grylli
  CDS (1)..(192): transl_table=11
atggataaatatttgcttagtatacttgtttgcccattatgtaaagcaagtcttgtttatgaaaaatcagcacaagagcttatttgtcgttttgatcgtttagcttaccctattcgagatgaaattcctgtgatgttagcgcacgaagcaagaaagatatcattagaagaatatgaccgattaagtgaataa

SEQ ID NO: 76016 - protein, 63 aa, Rickettsiella grylli
MDKYLLSILVCPLCKASLVYEKSAQELICRFDRLAYPIRDEIPVMLAHEARKISLEEYDRLSE

SEQ ID NO: 76017 - DNA, 189 bp, Oceanobacter sp. RED65
  CDS (1)..(189): transl_table=11
atggataaaaaactcattagtcttatggtgtgtccaatgtgtaagggcgcgttaaagtatgataaagacgctcaagaacttatttgtaaattcgatggtgtagcttatcaaataaaagatggcattcccgtcatgctggcagaagaagctagacccctgacggttgatgaaaagctcgcaaaaagctag

SEQ ID NO: 76018 - protein, 62 aa, Oceanobacter sp. RED65
MDKKLISLMVCPMCKGALKYDKDAQELICKFDGVAYQIKDGIPVMLAEEARPLTVDEKLAKS

SEQ ID NO: 76019 - DNA, 180 bp, Vibrio sp. Ex25
  CDS (1)..(180): transl_table=11
atggatcaccgtctgcttgagattgtagcttgccctgtttgcaaaggtaagctgacgtacgataaagagaatcaagagttgatctgcaaattggatcgcctcgcttacccgatcaaagagggtattcccgttctactcgagcctgaggctcgtactatgagtatggatgagggacgctaa

SEQ ID NO: 76020 - protein, 59 aa, Vibrio sp. Ex25
MDHRLLEIVACPVCKGKLTYDKENQELICKLDRLAYPIKEGIPVLLEPEARTMSMDEGR

SEQ ID NO: 76021 - DNA, 198 bp, Alteromonadales bacterium TW-7
  CDS (1)..(198): transl_table=11
atggcctttgatactaaattactcgacataattgcatgccctgtatgtaaaggaaaattacgttttgataaagacaacagtgaactaattagtactgctgcaaaactcgcataccctgttaaagatgatattccggtattacttgaaaatgaagcaagagagttatcgttagaagaggttgaaaagtggaattcgtag

SEQ ID NO: 76022 - protein, 65 aa, Alteromonadales bacterium TW-7
MAFDTKLLDIIACPVCKGKLRFDKDNSELISTAAKLAYPVKDDIPVLLENEARELSLEEVEKWNS

SEQ ID NO: 76023 - DNA, 186 bp, marine gamma proteobacterium HTCC2143
  CDS (1)..(186): transl_table=11
atgatagataaaaagctgttgagtcttttggtatgtcccgtcagcaaggcgccactcgactacgacgaagaaaagcaggaattgatttgccgagccagcgggttggcataccctatccgcgacgatattccagtcatgttggaatcagaagctcgtcagttaaccacagaagaaaagctggtttaa

SEQ ID NO: 76024 - protein, 61 aa, marine gamma proteobacterium HTCC2143
MIDKKLLSLLVCPVSKAPLDYDEEKQELICRASGLAYPIRDDIPVMLESEARQLTTEEKLV

SEQ ID NO: 76025 - DNA, 186 bp, marine gamma proteobacterium HTCC2080
  CDS (1)..(186): transl_table=11
gtgctcgatcccaaactacttgagattttggtctgccccgtctctaaggcgcccctggagtaccagcctgagcaacaggagctcgtctgccgtgctagtgggctcgcctaccccatccgcgatgacattcccgttatgctcgaaagtgaagcgcgtagcttaagtctcgaagagcgtgaacggtga

SEQ ID NO: 76026 - protein, 61 aa, marine gamma proteobacterium HTCC2080
MLDPKLLEILVCPVSKAPLEYQPEQQELVCRASGLAYPIRDDIPVMLESEARSLSLEERER

SEQ ID NO: 76027 - DNA, 24 bp, Artificial sequence
  primer
atggatcatcgtctgcttgaaatc

SEQ ID NO: 76028 - DNA, 27 bp, Artificial sequence
  primer
ttatgatttactctcatcagcagtcag

SEQ ID NO: 76029 - protein, 50 aa, Artificial sequence
  consensus sequence
  Variant (2)..(3): Xaa in position 2 to 3 is any amino acid
  Variant (6)..(6): Xaa in position 6 is any amino acid
  Variant (8)..(9): Xaa in position 8 to 9 is any amino acid
  Variant (12)..(16): Xaa in position 12 to 16 is any amino acid
  Variant (18)..(22): Xaa in position 18 to 22 is any amino acid
  Variant (23)..(24): Xaa in position 23 to 24 is any or no amino acid
  Variant (27)..(32): Xaa in position 27 to 32 is any amino acid
  Variant (35)..(35): Xaa in position 35 is any amino acid
  Variant (37)..(40): Xaa in position 37 to 40 is any amino acid
  Variant (44)..(44): Xaa in position 44 is any amino acid
  Variant (46)..(47): Xaa in position 46 to 47 is any amino acid
DXXLLXIXXCPXXXXXLXXXXXXXELXXXXXXLAXPXXXXIPVXLXXEAR

SEQ ID NO: 76030 - protein, 18 aa, Artificial sequence
  protein pattern
  Variant (3)..(3): Xaa in position 3 is Phe or Tyr
  Variant (5)..(5): Xaa in position 5 is Ile, Leu or Val
  Variant (6)..(6): Xaa in position 6 is any amino acid
  Variant (7)..(7): Xaa in position 7 is Asp, Glu or Asn
  Variant (8)..(8): Xaa in position 8 is Asp, Glu, Gly or Asn
  Variant (11)..(11): Xaa in position 11 is any amino acid
  Variant (12)..(12): Xaa in position 12 is Leu or Met
  Variant (14)..(15): Xaa in position 14 to 15 is any or no amino acid
  Variant (17)..(17): Xaa in position 17 is Ala, Asn or Ser
  Variant (18)..(18): Xaa in position 18 is Glu, Lys or Arg
LAXPXXXXIPXXLXXEXX

SEQ ID NO: 76031 - protein, 17 aa, Artificial sequence
  protein pattern
  Variant (2)..(2): Xaa in position 2 is any amino acid
  Variant (3)..(3): Xaa in position 3 is Lys or Arg
  Variant (4)..(4): Xaa in position 4 is Phe, Ile, Leu, Met or Val
  Variant (5)..(5): Xaa in position 5 is Ile, Leu or Met
  Variant (6)..(6): Xaa in position 6 is Asp, Glu, Asn or Ser
  Variant (7)..(7): Xaa in position 7 is Ala, Ile or Leu
  Variant (8)..(8): Xaa in position 8 is Ile, Leu, Met or Val
  Variant (9)..(9): Xaa in position 9 is Ala, Ile or Val
  Variant (12)..(12): Xaa in position 12 is any amino acid
  Variant (13)..(13): Xaa in position 13 is Cys, Ser or Thr
  Variant (14)..(16): Xaa in position 14 to 16 is any amino acid
DXXXXXXXXCPXXXXXL

SEQ ID NO: 76032 - DNA, 1239 bp, Escherichia coli
  CDS (1)..(1239): transl_table=11
atgctcatcttttatttcccgggaggggaaatgtcccgcgtgtcgcaggcgaggaacctgggtaaatatttcctgctcatcgataatatgctggtcgtgctggggttctttgttgtcttcccgctgatctctatccgcttcgttgatcaaatgggctgggccgccgtcatggtcggtattgctctcggtctacgccaatttattcagcaaggtctgggtattttcggcggtgcaattgccgaccgctttggtgccaaaccgatgattgttaccggtatgctgatgcgcgccgccggattcgccacaatgggtatcgcccacgaaccgtggctattgtggttttcatgcctgctctcgggactcggtggcacgttgtttgatccgccgcgttcggcgctggtggtgaaattaatccgtccacagcagcgtggtcgttttttctcgctgttgatgatgcaggacagtgccggtgcggtcattggcgcattgttggggagctggctgttgcaatacgactttcgcctggtctgcgccacaggggcagttctatttgtgctatgtgcggcgttcaatgcgtggttgttaccagcatggaaactctccaccgtacgcacgcccgttcgcgaaggcatgacccgcgtgatgcgtgacaagcgttttgtcacctatgttctgacgctggcgggttactacatgctggctgtacaagtgatgctgatgctgccaattatggtcaacgacgtggctggcgcgccctctgccgttaaatggatgtatgccattgaagcgtgtctgtcgttaacgttgctctaccctatcgcccgctggagtgaaaagcattttcgtctggaacaccggttgatggctgggctgttgataatgtcattaagcatgatgccggtgggcatggtcagcggcctgcaacaacttttcaccctgatttgtctgttttatatcgggtcgatcattgccgagcctgcgcgtgaaaccttaagtgcttcgctggcggacgcaagagctcgcggcagctatatggggtttagccgtctgggtctggcgattggcggcgctattggttatatcggtggcggctggctgtttgacctgggcaaatcggcgcaccagccagagcttccgtggatgatgctgggcattattggcatcttcactttccttgcgctgggttggcagtttagccagaaacgcgccgcgcgtcgtttgcttgaacgcgacgcctaa

SEQ ID NO: 76033 - protein, 412 aa, Escherichia coli
MLIFYFPGGEMSRVSQARNLGKYFLLIDNMLVVLGFFVVFPLISIRFVDQMGWAAVMVGIALGLRQFIQQGLGIFGGAIADRFGAKPMIVTGMLMRAAGFATMGIAHEPWLLWFSCLLSGLGGTLFDPPRSALVVKLIRPQQRGRFFSLLMMQDSAGAVIGALLGSWLLQYDFRLVCATGAVLFVLCAAFNAWLLPAWKLSTVRTPVREGMTRVMRDKRFVTYVLTLAGYYMLAVQVMLMLPIMVNDVAGAPSAVKWMYAIEACLSLTLLYPIARWSEKHFRLEHRLMAGLLIMSLSMMPVGMVSGLQQLFTLICLFYIGSIIAEPARETLSASLADARARGSYMGFSRLGLAIGGAIGYIGGGWLFDLGKSAHQPELPWMMLGIIGIFTFLALGWQFSQKRAARRLLERDA

SEQ ID NO: 76034 - DNA, 1377 bp, Deinococcus radiodurans R1
  CDS (1)..(1377): transl_table=11
atgccccgatgctgcggcctgggtgggggcgaagtgttggcgttttccttgagtggcctggaccacttttctcacctttcgtcagacgggccgctccaccacgcacagcgccgcaggtgtaccctcgcctgcgtgactgccgcgcccgtgactccgccgaccgctccgaccccgtttcgcctctccgccgcgcaatttggcctgattgccgtgaccacgctgatgtggggcgggtttttcctggtcattccgctggtcacggtgcatttcgtggacaacctgggctgggcggcggcgagcgtggggctggtgctggggctgcggcaactcacgcagcaggggctgaccgtgttcgggggcgcctgggccgaccgcatcggccccaagccgctgattctggcgggctgcctcattcgcacgctcggcttcgggtggatgggcttcgcgtcctcactgcccgagctgctcggggcgtcgctgctggcgggcatcggcggcgggctgttcgacgcgcccaaaagttcggccatcaccgccgtgacgccgcccgagcaccggccccgcatgttcagtctggtcagcattgccgggaacctcggcatggtcaccggcccgctgctgggggcgtggctgattgcgctgggctttcagcgggcgtcgctcatcgcggcgagtgcgtacatcgtggccttcgtgctgctcgccgtgaccctgccgcgcctgaaacccgagcggacgcccgccgataccttttcgggcctcaaggtggcgctgcatgaccgggcctttcgcaatttcacgctggtgctcggcggttactttctgctcagcacgcagctcaacgtggcggtcacgctcaaggcggtcgaactcgccgggcagggcgcgacggccccgctctacggcctctcggcggggctctcagtggtgttgcagtatccgctgctgcggcttgccgaacgctacctacgcgtgcgggtggtccttgtcggcgcggtggtgctggtcgccgtcgccctggggctgatgggcctggcgcagacgttcccgcaactgctcgcctgcgtggtgctttacagcttaggcaccatgctggtctttcccatgcagcagacgctgacggcgcgcctcgcccccgaggggctggtcggcagctatttcggcttctcggccatcagcctgggcctcggcggggcggtgggcaactttgtgggcggcgccctcgtggacgctgggcaccgcctgcacttcgacctcttgccctggctcacgctgctgctcgtcgggctggcgacggcggcgggcctgcgggtcgtgctgcgcgacgtacccacccgtgaagaaatggaagcccggcaacgtcaggcgggggcctga

SEQ ID NO: 76035 - protein, 458 aa, Deinococcus radiodurans R1
MPRCCGLGGGEVLAFSLSGLDHFSHLSSDGPLHHAQRRRCTLACVTAAPVTPPTAPTPFRLSAAQFGLIAVTTLMWGGFFLVIPLVTVHFVDNLGWAAASVGLVLGLRQLTQQGLTVFGGAWADRIGPKPLILAGCLIRTLGFGWMGFASSLPELLGASLLAGIGGGLFDAPKSSAITAVTPPEHRPRMFSLVSIAGNLGMVTGPLLGAWLIALGFQRASLIAASAYIVAFVLLAVTLPRLKPERTPADTFSGLKVALHDRAFRNFTLVLGGYFLLSTQLNVAVTLKAVELAGQGATAPLYGLSAGLSVVLQYPLLRLAERYLRVRVVLVGAVVLVAVALGLMGLAQTFPQLLACVVLYSLGTMLVFPMQQTLTARLAPEGLVGSYFGFSAISLGLGGAVGNFVGGALVDAGHRLHFDLLPWLTLLLVGLATAAGLRVVLRDVPTREEMEARQRQAGA

SEQ ID NO: 76036 - DNA, 1311 bp, Streptomyces coelicolor A3(2)
  CDS (1)..(1311): transl_table=11
atgacctccacacccgcccccgccggcgggcgggccggccaggtgcccggccgtcgtaccgccccgttcgccacgctctccccgctgctccggctgctcatcctcacccagctcgccttcaacatcggcttcttcgccgtgctgcccttcctcgccgagcatctggggcagtccgtcggcatggcggggtggctggtcgggttcgtgctcgggctgcggaccttcagccagcaggggctgttcgtggtcggcggggcgctcgccgaccggtacggcatccggcccgtcgtgctcgccgggtgcgtgctgcggatcgccgggttcgcgtggctcggtttcgccgagcggacctgggccgtcgtgagtgccgtactgctgatcgggttcgccgccgcgctcttctcaccggccgtcgagtccgaggtcgcccggcaggccgtcgggtgggaggaggaagggggcggggaccggacgcgggtgctggcgctgttcaccgtcgccgggcaggccggtgccttcgtcgggccgctgcttggagcgctgctgctcgccgtcgacttccgtacggcctgcctcgccggggccggggtcttcgtgctggtcctcgccgggcacgcgtggctgctgccgcagcgcgttcccgggcgggcccaggtccggatgaagggcggcgcccggctcgtgctgcgcaaccggcgcttcctcgcgctgtgctgcgcctacggcgcctacctcctcgcctacaaccagctctaccttgccctgcccgccgaggtggaacgggccgccggttcgcaggcgccgctggcctggctgttcgcgctgtcgtcgctgctggtggtgatcgcgcagttgccggtgacccggtgggcgggggagcggctggcgcggcgccggtcgatggtgacggggctggtgctgatcgccgtcgggttcgccgtcgtcggcctcgcgcggcccgcggggtggacggggacgggtgggctgctgcccgccgccgggttcgtcgtcctgctcaccctcgggcagatgctcgtcgcgcccgtcgcccgcgcctgggtgccggacctcgccgaggacgggcggctcgggctgtacaccggggcgctgtcctcggtctccgggctgatcgtgctggccggcagctccgcgaccggcctcctgctggacaccggcctgccggtcgccgtgccgtggctggtgctggccgccgtaccactggtggcggcggcgacgctgccccggtggccgcaccggggcgccggagccaccgcaccaaccccctccacggccgggtcgggccggtcctga

SEQ ID NO: 76037 - protein, 436 aa, Streptomyces coelicolor A3(2)
MTSTPAPAGGRAGQVPGRRTAPFATLSPLLRLLILTQLAFNIGFFAVLPFLAEHLGQSVGMAGWLVGFVLGLRTFSQQGLFVVGGALADRYGIRPVVLAGCVLRIAGFAWLGFAERTWAVVSAVLLIGFAAALFSPAVESEVARQAVGWEEEGGGDRTRVLALFTVAGQAGAFVGPLLGALLLAVDFRTACLAGAGVFVLVLAGHAWLLPQRVPGRAQVRMKGGARLVLRNRRFLALCCAYGAYLLAYNQLYLALPAEVERAAGSQAPLAWLFALSSLLVVIAQLPVTRWAGERLARRRSMVTGLVLIAVGFAVVGLARPAGWTGTGGLLPAAGFVVLLTLGQMLVAPVARAWVPDLAEDGRLGLYTGALSSVSGLIVLAGSSATGLLLDTGLPVAVPWLVLAAVPLVAAATLPRWPHRGAGATAPTPSTAGSGRS

SEQ ID NO: 76038 - DNA, 1248 bp, Corynebacterium diphtheriae NCTC 13129
  CDS (1)..(1248): transl_table=11
atgacccgtgccaaactacccgtccacatcacgttcctgctggtcacccaaatgctatttagcattgggttttacctcgtcgtgccattcctagccgtgcaattatccgaaaacctaggtgcctcgggcaccatagtgggactagtgctaggaattcgcacctttagccaacagggactgttcttcttcggtggtgggttagcagacaaatttggtgcaggccccatcctgctgatcggcgtagccatccgcgtgatcgggtttcttaccgtcggcatggccgaaaccgtcacactgatgaccctcggcgtggttctcatcggttttgccgcagcactgttctcaccggccgtggaatccatctttgccgccgaaggccaccgcctagaaaaactcggtgtgataacccgcgcacgcctttttgccctcgacgcagcctactcccgcataggaacactgaccggtcccgtgatcggcgcagtgcttatccccctaggatttgccaccgtttctatcgcaggcgcagccatctttggcagcatctttgtcatacatctcgcgctgcgccgcacatggacggcctcagcgcaaccacaacgcacacacgcccccagcatgatggcggtatggggtgaggtgatccgcaacaagaagttcgtcgtcttcgcactgctgtattccacctatttgctggcctacaaccagcaatacctctcacttccggtggaactgcgaagggcgactggttccgacgaggcactgggatggttctttgccgtctcggcagtgttcgtgatcgccttgcaatctcgggtgacgcgctgggcggaacgccaagcagccgccgcagcgcttgggggtgggttcggccttatggctttgagctttgcggtggtcgcggtggcgtcgataagcctcgagctggaggggtggatcgcctatgtgccggcagccgccatgatgattttgctgcatacaggcatcatgatcgccgtgccgatcgcacgcgacctcgtcggcgacctcgcaggaaacaacaatcttgggtcctattacggattcctcaacagcttcggcgggctggcggtgctactcggatcactcaccgtaggagcaacactcgaccacgccgaaaccacacaaccgatggccgccatcccgtggctcatcatggttgcagtactcgccgtctccgcagtgggactggcacaactgaaagaaaaacagaaagtagacatcacacaatga

SEQ ID NO: 76039 - protein, 415 aa, Corynebacterium diphtheriae NCTC 13129
MTRAKLPVHITFLLVTQMLFSIGFYLVVPFLAVQLSENLGASGTIVGLVLGIRTFSQQGLFFFGGGLADKFGAGPILLIGVAIRVIGFLTVGMAETVTLMTLGVVLIGFAAALFSPAVESIFAAEGHRLEKLGVITRARLFALDAAYSRIGTLTGPVIGAVLIPLGFATVSIAGAAIFGSIFVIHLALRRTWTASAQPQRTHAPSMMAVWGEVIRNKKFVVFALLYSTYLLAYNQQYLSLPVELRRATGSDEALGWFFAVSAVFVIALQSRVTRWAERQAAAAALGGGFGLMALSFAVVAVASISLELEGWIAYVPAAAMMILLHTGIMIAVPIARDLVGDLAGNNNLGSYYGFLNSFGGLAVLLGSLTVGATLDHAETTQPMAAIPWLIMVAVLAVSAVGLAQLKEKQKVDITQ

SEQ ID NO: 76040 - DNA, 1248 bp, Erwinia carotovora subsp. atroseptica SCRI1043
  CDS (1)..(1248): transl_table=11
atgtcagaccttaccgccaaccgcgccccacggccttatcccccgttgcttctgggtagccagcttgttttcaacattggtttttatgccgtcgtgccgtttctggctattttcctgcgcgacgacatgctgctttccggctgggctattgggctggtaattggctttcgcaccttctctcaacagggcatgtttttagtcggcggcgcgctggccgatcgcttcggtgcacgcgtaactatcctgtgcggctgtgtcgtgcgtatcagcggctatctcctgttggcgttgggcgactcgctatggccgataatcctcggtgcctgcctgaccggtgtcggcggtgccctgttctccccagccattgaagcgctgatggcacaggccggtacgcagagtgaaaaagagggaaaacgcagccgctccgagtggttcgccctgtttgcgatttgcggcgagctgggtgcggtgctggggccattgctcggttcggtgctggccggatacggattccagcgcgtggcgctggcgggtgcaggcgtttttgttatcgcactcatcgtgctgtttttcagcctgccgccaacacagcgaaatcaagctgaattgcacatcgctccgtggtgggaaacctttcgccagcggcgttttgtcgccttcatcattgcctacagcgcttacctgttcagctataaccagctctatctggcgctaccggttgaactgcatcgctccggcagtagcgaaaaagatctcggcccgctgtttgtgctggcctctctgctggtgatcggattacagctcccactggcgcgttttgctcgtcgggttggtgcggcacgcatgctgccattaggtttcgcgctgctgtccgcgtccttctttagcgtcgcgctgtttgcctccaccacgccgccggaaggctggcagcgcctgctccccgcgatctcattaattactctgctgacgctgggacagatgcttatcgtccccgtcgggatggacctcatcccacgctttgccaacaacaagaacctgggtgcgcactatggcgcactggcgtcaatgggcggcatcgccgtgctggtcggcaactttgtgctcggcagccagctcgatcgcgcgctaacgccatcgccgcaggctgcgattccatgggtgttgctcgctgccgtaccgttgtgtagctcactggcgatgatggttatctgccgcccgtttaaatccacttcaaccgtgaatgaataa

SEQ ID NO: 76041 - protein, 415 aa, Erwinia carotovora subsp. atroseptica SCRI1043
MSDLTANRAPRPYPPLLLGSQLVFNIGFYAVVPFLAIFLRDDMLLSGWAIGLVIGFRTFSQQGMFLVGGALADRFGARVTILCGCVVRISGYLLLALGDSLWPIILGACLTGVGGALFSPAIEALMAQAGTQSEKEGKRSRSEWFALFAICGELGAVLGPLLGSVLAGYGFQRVALAGAGVFVIALIVLFFSLPPTQRNQAELHIAPWWETFRQRRFVAFIIAYSAYLFSYNQLYLALPVELHRSGSSEKDLGPLFVLASLLVIGLQLPLARFARRVGAARMLPLGFALLSASFFSVALFASTTPPEGWQRLLPAISLITLLTLGQMLIVPVGMDLIPRFANNKNLGAHYGALASMGGIAVLVGNFVLGSQLDRALTPSPQAAIPWVLLAAVPLCSSLAMMVICRPFKSTSTVNE

SEQ ID NO: 76042 - DNA, 1323 bp, Escherichia coli
  CDS (1)..(1323): transl_table=11
atgggacgttttccgggtgaaaaccaaaatcgagatctccccttaccacggcaaaaagcacattcatttcatcgtttaggttgggcggatatgcctcttttctccctgcgccctgcggcaaccctctggcctccggtgttactgggaagccagttcgtttttaatattggcttttacgcggtcgtacctttcctcgccctcttcctgcgcgacgacatgctgctctcaggcggacttatcggcctgatcctcgggctgcgtaccttctcccaacaggggatgtttatcctcggcgggacgctggccgaccgctatggcgctaaggcgatcattctcgccggctgcgtcgttcgcgtcgccggttttctcctgctggcgtgcggggcgtcgctgtgggccattatccttggcgcctgcctgaccggcgtcggcggcgccctgttctccccgtcgatagaggccctgctggcgcgggccggtacccacagccaggccaacgggaaacgcagccgcgccgagtggtttgcgctgtttgcggtatgcggtgaactgggagcggtgatcggcccggtggccggaggcgtgctgagcgggatcggctttcgacatatcgccctcgccggcgcgggaatatttcttctggcgctggcggtgctctttttcggtctgcccgccgacgggcacacgacaacaacgcgcagacgagtcccatggtggacgcctttgcgccagccgcgctttgtcgcgtttattctcgcctacagctcatggctgttgagctacaaccaactctacctcgctctgccggtggagatccaacgttccggcggccgcgagcaggatctggcgccgctctttatgctggcctcgctgttgattatcaccctccagctccctctcgcccgcttcgcccggcgaatgggcgccgtgcgcatcctgccggtgggctttctgctgctgtcggcttcctttgccagcgtggcgttattcgccgccgccccacccgccgaaagttggctgcggttaatgccggcggctggttttgtcacgctgctcaccctcggccagatgctgttagtgcccgcagccaaggatctgatcccgctgttcgccgaggagtcgacgctgggcgcccactacggagcgctcgccaccgcaggagggtgcgcggtgttagccgggaatttactgctcggtcatttacttgaccaggcgctcattccgtcgccgcaggcggtttatccctggcttctgctggcgctgtttccgctgtgcagcgccgtcgccctgcgggcgatctgtcgcccgctggcggcaacatga

SEQ ID NO: 76043 - protein, 440 aa, Escherichia coli
MGRFPGENQNRDLPLPRQKAHSFHRLGWADMPLFSLRPAATLWPPVLLGSQFVFNIGFYAVVPFLALFLRDDMLLSGGLIGLILGLRTFSQQGMFILGGTLADRYGAKAIILAGCVVRVAGFLLLACGASLWAIILGACLTGVGGALFSPSIEALLARAGTHSQANGKRSRAEWFALFAVCGELGAVIGPVAGGVLSGIGFRHIALAGAGIFLLALAVLFFGLPADGHTTTTRRRVPWWTPLRQPRFVAFILAYSSWLLSYNQLYLALPVEIQRSGGREQDLAPLFMLASLLIITLQLPLARFARRMGAVRILPVGFLLLSASFASVALFAAAPPAESWLRLMPAAGFVTLLTLGQMLLVPAAKDLIPLFAEESTLGAHYGALATAGGCAVLAGNLLLGHLLDQALIPSPQAVYPWLLLALFPLCSAVALRAICRPLAAT

SEQ ID NO: 76044 - DNA, 1260 bp, Mycobacterium sp. MCS
  CDS (1)..(1260): transl_table=11
atgacactgctgtcgggcttcacaagcttcggctggccaagtcgcctactgatgatcaaccagttcggcatcaacctcggtttctacatgctgatgccttacctcgcgggttacctggccggcccactgggtctggcggcctgggccatcggactggtattgggggtgcggaacttctcccagcagggcatgttcatcatcggtggcacgctcgccgaccggtggggatataagccgctcatcgtcagcggctgtgtgctgcgcaccgcagggttcggtctgctagccttcgccgacaccttgcctgcagtgctgatcgcctcggcggcaacaggtttcgccggtgcgctgttcaatccggccgtgcgcgcctacctcgccgctgatgccggaccgcggcgactcgaagcgttcgcgctgttcaacgtgttctaccaggcggggattctggctggtccgctcgtcggtttagcgctgatgctgctcgacttccgcacgaccgcggccgccgcggcggtggtcttcgcgggactgactgttgcgcaactgttcgcactgccgcagcgagtgggtgactcaccgcgagagaagacctcggtgtggcaggactggcgccgcgttgcagccaaccggtccttcctgttgttcgccgcagccatgattggatcgtatgtgctgtcgttccaggtgtacctcgctctgccgctgcaggcccgggatctgttcccacagcacgatgctgtcgtcaccgccatgatcttcgtggtgtctggactggtcgcggtgatcggtcagctgcgcatcacgcgatggttcgcacgccgttgggggtcagggcgatcgctggtcatcggcatgctgattctcgcggtttcgttcctgcctttagtggcgttgcccgacgacacgcgcgcgggccgtgtggcggcagccaccgcactgctcatcgccacagccgtgctggcggtgggctcggccgcggtcttcccgttcgagatggacacggtggtatcgctagctgacaacaagctcgtcggtacgcactacggcttctacaacaccatcgtcggcatcggaattcttggcggcaatctcgccaccggctccgtcatgcagatcacccgcgagctcggataccccgaactcgtctgggtcctgctggccagtatcgggctgctgtcggccgccgcgctgtaccgcctcgatcgacgcggccgcctgcaaccgcaacagcccacagttgacgtcgcaacgtcataa

SEQ ID NO: 76045 - protein, 419 aa, Mycobacterium sp. MCS
MTLLSGFTSFGWPSRLLMINQFGINLGFYMLMPYLAGYLAGPLGLAAWAIGLVLGVRNFSQQGMFIIGGTLADRWGYKPLIVSGCVLRTAGFGLLAFADTLPAVLIASAATGFAGALFNPAVRAYLAADAGPRRLEAFALFNVFYQAGILAGPLVGLALMLLDFRTTAAAAAVVFAGLTVAQLFALPQRVGDSPREKTSVWQDWRRVAANRSFLLFAAAMIGSYVLSFQVYLALPLQARDLFPQHDAVVTAMIFVVSGLVAVIGQLRITRWFARRWGSGRSLVIGMLILAVSFLPLVALPDDTRAGRVAAATALLIATAVLAVGSAAVFPFEMDTVVSLADNKLVGTHYGFYNTIVGIGILGGNLATGSVMQITRELGYPELVWVLLASIGLLSAAALYRLDRRGRLQPQQPTVDVATS

SEQ ID NO: 76046 - DNA, 1239 bp, Escherichia coli O157:H7 EDL933
  CDS (1)..(1239): transl_table=11
  misc_feature (497)..(497): r is g or a
  misc_feature (1018)..(1018): r is g or a
gtgctcatcttttatttcccgggaggggaaatgtcccgcgtgtcgcaggcgaggaacctgggtaaatatttcctgctcatcgataatatgctggtcgtgctggggttctttgttgtcttcccgctgatctctatccgcttcgttgatcaaatgggctgggccgccgtcatggtcggtattgccctcggcctacgccagtttattcagcaaggtctgggtattttcggcggcgcaattgccgaccgctttggtgccaaaccgatgattgttaccggtatgctgatgcgtgccgccggattcgccacaatgggtatcgcccacgaaccgtggctattgtggttttcatgcctgctctcgggactcggtggcacgttgtttgatccgccgcgttcggcgctggtggtgaaactaatccgtccacaacagcgtggtcgttttttctcgctgttgatgatgcaggacagtgccggtgcggtcattggcgcattgttggggarctggctgttgcaatacgactttcgcctggtctgcgccacaggggccgttttgtttgtgctgtgtgcagcgttcaatgcgtggttgttaccggcatggaaactctccaccgtacgcacgcccgttcgcgaaggcatgacccgcgtgatgcgcgacaagcgttttgtcacctatgtcctgacgctggcgggttactacatgctggctgtacaagtgatgctgatgctgccaattatggtcaacgatgtggctggcgcgccctctgccgttaaatggatgtatgccattgaagcgtgtctgtcgttaacgttgctctaccctatcgcccgctggagtgaaaagcattttcgtctggaacaccggttgatggctgggctgttgataatgtcattaagcatgatgccggtgggcatggtcagcggcctgcaacaacttttcaccctgatttgtctgttttatatcgggtcgatcattgccgagcctgcgcgtgaaaccttaagtgcttcgctggcggacgcaagarctcgcggcagctatatggggtttagccgtctgggtctggcgattggcggcgctattggttatatcggtggcggctggctgtttgacctgggcaaatcggtgcaccagccagagcttccgtggatgatgctgggcattattggcatcttcactttccttgcgctgggttggcagtttagccagaaacgcgccgcgcgtcgtttgcttgaacgcgacgcctga

SEQ ID NO: 76047 - protein, 412 aa, Escherichia coli O157:H7 EDL933
  misc_feature (166)..(166): The Xaa at location 166 stands for Asn, or Ser.
  misc_feature (340)..(340): The Xaa at location 340 stands for Ala, or Thr.
MLIFYFPGGEMSRVSQARNLGKYFLLIDNMLVVLGFFVVFPLISIRFVDQMGWAAVMVGIALGLRQFIQQGLGIFGGAIADRFGAKPMIVTGMLMRAAGFATMGIAHEPWLLWFSCLLSGLGGTLFDPPRSALVVKLIRPQQRGRFFSLLMMQDSAGAVIGALLGXWLLQYDFRLVCATGAVLFVLCAAFNAWLLPAWKLSTVRTPVREGMTRVMRDKRFVTYVLTLAGYYMLAVQVMLMLPIMVNDVAGAPSAVKWMYAIEACLSLTLLYPIARWSEKHFRLEHRLMAGLLIMSLSMMPVGMVSGLQQLFTLICLFYIGSIIAEPARETLSASLADARXRGSYMGFSRLGLAIGGAIGYIGGGWLFDLGKSVHQPELPWMMLGIIGIFTFLALGWQFSQKRAARRLLERDA

SEQ ID NO: 76048 - DNA, 1206 bp, Blochmannia floridanus
  CDS (1)..(1206): transl_table=11
atgaattcaatatctaaagtcagaaaattaggtaaatactttttaataatagacaatatgtttgtagttattggtttctatgctgtttttcctcttatatcaatacattttgttgaacaactaggatggacagcttttttagtaggatttgctttgggtttacgccaatttattcaacaaggattaggtattattggaggagcatttgccgataaattaggagctaaacctatgattgtttctggattatttatgagaactataggctttattattatgagtttagcgcacacacctacactgctatgtgcagcatgcatattatcagcattaggaggtacattatttgatccccctagaacggcattagttattaaattaattcgaccatggaaattaggccgattttattctattttaatgttggaagatagtatatgtgctatcataggcatcacattaggttcatggttattacaacaatataattttcaattagtatgtcttactggagctatattattctttatagctggtatgtttaatgcttggagattaccagcatataaaatttctagttctcatttatcattattagatggaatcaaacaagtattacataaccaaaaatttattatttatactttaactttatctggatattacattttatcagcacaagtaatgctaatgttaccgattcgtatgcatgaaatatctggacaattatcatatataaaatatatttatattacagaagcaattttatctttattactcattattcctataacatattggatggaaaaatatttcaagttagaaacacgcttaatgttaggactagtaatcatgataattagtttatcacctattggttcagtcaataacctatatgagctattaattttaatcagcttattttatattggatctattgttgctgaaccagcacgagaaacattaagcgccttattaactaattacaaagcacgtagtagttatataggatttaataaactcagcttagctttaggaggaactttaggttatagcggaggtggttggttatatgatcttggtaaagaattaaacttttatcaattaccctggattgctctaagtataataggtactatcacagtattaattttatattatcaatttcgatattgttctatacaaccttcattatataccgattaa

SEQ ID NO: 76049 - protein, 401 aa, Blochmannia floridanus
MNSISKVRKLGKYFLIIDNMFVVIGFYAVFPLISIHFVEQLGWTAFLVGFALGLRQFIQQGLGIIGGAFADKLGAKPMIVSGLFMRTIGFIIMSLAHTPTLLCAACILSALGGTLFDPPRTALVIKLIRPWKLGRFYSILMLEDSICAIIGITLGSWLLQQYNFQLVCLTGAILFFIAGMFNAWRLPAYKISSSHLSLLDGIKQVLHNQKFIIYTLTLSGYYILSAQVMLMLPIRMHEISGQLSYIKYIYITEAILSLLLIIPITYWMEKYFKLETRLMLGLVIMIISLSPIGSVNNLYELLILISLFYIGSIVAEPARETLSALLTNYKARSSYIGFNKLSLALGGTLGYSGGGWLYDLGKELNFYQLPWIALSIIGTITVLILYYQFRYCSIQPSLYTD

SEQ ID NO: 76050 - DNA, 1209 bp, Escherichia coli O6
  CDS (1)..(1209): transl_table=11
atgtcccgcgtgtcgcaggcgaggaacctgggtaaatatttcctgctcatcgataatatgctggtcgtgctggggttctttgttgtcttcccgctgatctctatccgcttcgttgatcaaatgggctgggccgccgtcatggtcggtattgccctcggtctacgccagtttattcagcaaggtctgggtattttcggcggcgcaattgccgaccgctttggtgccaaaccgatgattgtcaccggtatgctgatgcgtgccgccggattcgccacaatgggtatcgcccacgaaccgtggctactgtggttttcatgcctgctttcgggactcggcggcacgttgtttgatcctccgcgttcggcgctggtggtgaaattaatccgtccacagcagcgtggtcgttttttctcgctgttgatgatgcaggacagtgccggtgcggtcattggcgcattgttggggagctggctgttgcaatacgactttcgcctggtctgcgccacaggggcagttttgtttgtgctgtgtgcagcgttcaatgcgtggttgttaccggcatggaaactctccaccgtacgcacgcccgttcgcgaaggcatgacccgcgtgatgcgtgacaagcgttttgtcacctatgtcctgacgctggcgggttactacatgctggctgtacaagtgatgctgatgctgccaattatggtcaacgacgtggcgggcgcgccctctgccgttaaatggatgtatgccattgaagcgtgtctgtcgttaacgttgctctaccctatcgcccgctggagtgaaaagcattttcgtcttgaacaccggttaatggctgggctgttgataatgtcattaagcatgatgccagtaggcatggtcagcggcctgcaacaacttttcaccctgatttgtctgttttatatcgggtcgatcattgccgagcctgcgcgtgaaaccttaagtgcttcgctggcagacgcaagagctcgcggcagctatatggggtttagccgtctgggtctggcgattggcggcgctattggttatatcggtggcggctggctgtttgacctgggcaaatcggcgcaccagccagagcttccgtggatgatgctgggcattattggcatcttcactttccttgcgctgggttggcagtttagccagaaacgcgccgcgcgtcgtttgcttgaacgcgacgcctga

SEQ ID NO: 76051 - protein, 402 aa, Escherichia coli O6
MSRVSQARNLGKYFLLIDNMLVVLGFFVVFPLISIRFVDQMGWAAVMVGIALGLRQFIQQGLGIFGGAIADRFGAKPMIVTGMLMRAAGFATMGIAHEPWLLWFSCLLSGLGGTLFDPPRSALVVKLIRPQQRGRFFSLLMMQDSAGAVIGALLGSWLLQYDFRLVCATGAVLFVLCAAFNAWLLPAWKLSTVRTPVREGMTRVMRDKRFVTYVLTLAGYYMLAVQVMLMLPIMVNDVAGAPSAVKWMYAIEACLSLTLLYPIARWSEKHFRLEHRLMAGLLIMSLSMMPVGMVSGLQQLFTLICLFYIGSIIAEPARETLSASLADARARGSYMGFSRLGLAIGGAIGYIGGGWLFDLGKSAHQPELPWMMLGIIGIFTFLALGWQFSQKRAARRLLERDA

SEQ ID NO: 76052 - DNA, 1209 bp, Salmonella paratyphi
  CDS (1)..(1209): transl_table=11
atgtcgcgcgtctcgcaggcgaggaacctgggtaaatattttcttctcatcgataacatgttagtggtgctgggttttttcgtcgtcttcccgctcatctctattcgctttgtcgatcaaatggggtgggctgccgtaatggtagggatcgcgctcggcctgcgccagtttattcaacaaggtctgggcatttttggcggcgccatcgccgatcgctttggcgcgaaaccgatgattgtcaccggtatgctgatgcgcgccgcaggctttgccaccatgggtatcgcgcatgagccctggctcttgtggttttcctgctttctttccggtctcggcggtacgcttttcgacccgccgcgttcagcgctggtggtcaaattaattcgtccggagcaacggggccgcttcttctctctgttgatgatgcaggacagcgcgggcgcggtgattggcgcgctgctgggaagctggttgctacaatacgattttcgcctggtctgcgcgacaggtgctattttgttcatattatgcgcccttttcaatgcatggctgcttccggcctggaagctatcaacggtcagaacgccggtgcgtgaaggaatgcgccgcgtcatgagcgataaaaggtttgtcacctacgtgctgacgctggcgggctactatatgctggcggtacaggtcatgttaatgctgccgattatggtaaacgatatcgccggttcgcctgctgccgtgaaatggatgtacgctattgaggcgtgtctctcgctgacgttgctctacccgattgcccgctggagcgaaaagcgttttcggctggagcatcggctgatggccggtttgctcgtcatgtcgctgagcatgctccccatcgggatggtgggcaatttacagcagctttttacgcttatttgcgctttctacatcggctcggttatcgccgaaccggcgcgcgaaacgctcagcgcgtcgctcgcggacgcgagggcgcggggaagctatatgggctttagccgtctgggattagccattggcggcgcgattggttatatcggcggcggctggttgtttgatatggggaaagcgcttgcgcagcctgaactaccgtggatgatgctcggtattatcggctttatcacctttttggctttaggctggcaatttagtcataagcgcacgccgcgccggatgctggaacccggcgcctga

SEQ ID NO: 76053 - protein, 402 aa, Salmonella paratyphi
MSRVSQARNLGKYFLLIDNMLVVLGFFVVFPLISIRFVDQMGWAAVMVGIALGLRQFIQQGLGIFGGAIADRFGAKPMIVTGMLMRAAGFATMGIAHEPWLLWFSCFLSGLGGTLFDPPRSALVVKLIRPEQRGRFFSLLMMQDSAGAVIGALLGSWLLQYDFRLVCATGAILFILCALFNAWLLPAWKLSTVRTPVREGMRRVMSDKRFVTYVLTLAGYYMLAVQVMLMLPIMVNDIAGSPAAVKWMYAIEACLSLTLLYPIARWSEKRFRLEHRLMAGLLVMSLSMLPIGMVGNLQQLFTLICAFYIGSVIAEPARETLSASLADARARGSYMGFSRLGLAIGGAIGYIGGGWLFDMGKALAQPELPWMMLGIIGFITFLALGWQFSHKRTPRRMLEPGA

SEQ ID NO: 76054 - DNA, 1209 bp, Salmonella typhimurium
  CDS (1)..(1209): transl_table=11
atgtcgcgcgtctcgcaggcgaggaacctgggtaaatattttcttctcatcgataacatgttggtggtgctgggttttttcgtcgtcttcccgctcatctctattcgctttgtcgatcaaatggggtgggctgccgtaatggtagggatcgcgctcggcctgcgccagtttattcaacaaggtctgggcatttttggcggcgccatcgccgatcgctttggcgcgaaaccgatgattgtcaccggtatgctgatgcgcgccgcaggctttgccaccatgggtatcgcgcatgagccctggctcttgtggttttcctgctttctttccggtctcggcggtacgcttttcgacccgccgcgttcagcgctggtggtcaaattaattcgtccggagcaacgggaccgcttcttctctctgttgatgatgcaggacagcgcgggtgcggtgattggcgcgctgctgggaagctggttgctacaatacgattttcgcctggtctgcgcgacgggcgctattttgttcatattatgcgcccttttcaacgcatggctgcttccggcctggaagctatcaacggtcagaacgccggtgcgtgaaggaatgcgccgcgtcatgagcgataaaaggtttgtaacctacgtgctgacgctggcgggctactatatgctggcggtacaggtcatgttaatgctgccgattatggtaaacgatatcgccggttcgcctgctgccgtgaaatggatgtacgctattgaggcgtgtctctcgctgacgttgctctacccgattgcccgctggagcgaaaagcgttttcggctggagcatcggctgatggccggtttgctcgtcatgtcgctgagcatgctccccatcgggatggtgggcaatttacagcagctttttacgcttatttgcgctttctacatcggctcggttatcgccgaaccggcgcgcgaaacgctcagcgcgtcgctcgcagacgcgagggcgcggggaagctatatgggctttagccgtctgggattagccattggcggcgcgattggttatatcggcggcggctggttgtttgatatggggaaagcgcttgcgcagcctgaactaccgtggatgatgctcggtattatcggctttatcacctttttggctttaggctggcaatttagtcataaacgcacgccgcgccggatgctggaacccggcgcctga

SEQ ID NO: 76055 - protein, 402 aa, Salmonella typhimurium
MSRVSQARNLGKYFLLIDNMLVVLGFFVVFPLISIRFVDQMGWAAVMVGIALGLRQFIQQGLGIFGGAIADRFGAKPMIVTGMLMRAAGFATMGIAHEPWLLWFSCFLSGLGGTLFDPPRSALVVKLIRPEQRDRFFSLLMMQDSAGAVIGALLGSWLLQYDFRLVCATGAILFILCALFNAWLLPAWKLSTVRTPVREGMRRVMSDKRFVTYVLTLAGYYMLAVQVMLMLPIMVNDIAGSPAAVKWMYAIEACLSLTLLYPIARWSEKRFRLEHRLMAGLLVMSLSMLPIGMVGNLQQLFTLICAFYIGSVIAEPARETLSASLADARARGSYMGFSRLGLAIGGAIGYIGGGWLFDMGKALAQPELPWMMLGIIGFITFLALGWQFSHKRTPRRMLEPGA

SEQ ID NO: 76056 - DNA, 1209 bp, Shigella flexneri
  CDS (1)..(1209): transl_table=11
atgtcccgcgtatcgcaggcgaggaacctgggtaaatatttcctgctcatcgataatatgctggtcgtgctggggttctttgttgtcttcccgctgatctctatccgcttcgttgatcaaatgggctgggccgccgtcatggtcggtattgctctcggtctacgccagtttattcagcaaggtctgggtattttcggcggcgcaattgccgaccgctttggtgccaaaccgatgattgttaccggtatgctgatgcgcgccgccggattcgccacaatgggtatcgcccacgaaccgtggctattgtggttttcatgcctgctctcgggactcggcggcacgttgtttgatccgccgcgttcggcgctggtggtgaaactaatccgtccacaacaacgtggtcgttttttctcgctgttgatgatgcaggacagtgccagtgcggtcattggcgcattgttggggagctggctgttgcaatacgactttcgcctggtctgcgccacaggggccgttttgtttgtgctatgtgcggcgttcaatgcgtggttgttaccggcatggaaactctccaccgtacgcacgcccgttcgcgaaggcatgacccgcgtgatgcgtgacaagcgttttgtcacctatgtcctgacgctggcgggttactacatgctggctgtacaagtgatgctgatgctgccaattatggtcaacgacgtggctggcgcgccctctgccgttaaatggatgtatgccattgaagcgtgtctgtcgttaacgttgctctaccctatcgcccgctggagtgaaaagcattttcgtctggaacaccggttgatggctgggctgttgataatgtcattaagcatgatgccggtgggcatggtcagcggcctacaacaacttttcaccctgatttgtctgttttatatcgggtcgatcattgccgagcctgcgcgtgaaaccttaagtgcttcgctggcggacgcaagagctcgcggcagctatatggggtttagccgtctgggtctggcgattggcggcgctattggttatatcggtggtggctggctgtttgacctgggcaaatcggcgcaccagccagagcttccgtggatgatgctgggaattattggcatcttcactttccttgcgctgggttggcagtttagtcagaaacgcgccgcgcgtcgtttgctggaacgcgacgcctga

SEQ ID NO: 76057 - protein, 402 aa, Shigella flexneri
MSRVSQARNLGKYFLLIDNMLVVLGFFVVFPLISIRFVDQMGWAAVMVGIALGLRQFIQQGLGIFGGAIADRFGAKPMIVTGMLMRAAGFATMGIAHEPWLLWFSCLLSGLGGTLFDPPRSALVVKLIRPQQRGRFFSLLMMQDSASAVIGALLGSWLLQYDFRLVCATGAVLFVLCAAFNAWLLPAWKLSTVRTPVREGMTRVMRDKRFVTYVLTLAGYYMLAVQVMLMLPIMVNDVAGAPSAVKWMYAIEACLSLTLLYPIARWSEKHFRLEHRLMAGLLIMSLSMMPVGMVSGLQQLFTLICLFYIGSIIAEPARETLSASLADARARGSYMGFSRLGLAIGGAIGYIGGGWLFDLGKSAHQPELPWMMLGIIGIFTFLALGWQFSQKRAARRLLERDA

SEQ ID NO: 76058 - DNA, 1206 bp, Yersinia pestis
  CDS (1)..(1206): transl_table=11
atggctttggtatcgcaagctcgaagcttgggtaagtattttttattgtttgataatttattagttgtgttgggattttttgtcgtattcccgctcatttctatccgatttgtcgatcaattaggttgggctgcgttggtcgtgggccttgctttaggcctaaggcaattggttcaacagggattggggatctttggcggggccattgccgaccggttcggtgccaaaccgatgattgtcaccgggatgctaatgcgagccgcgggttttgccttgatggccatggcggatgaaccttggatactttggctggcctgtgcgctgtcagggctgggcggcaccctgtttgatccaccacgcacagcgttggtcatcaagttgacccgcccccatgaacgaggccgtttttattcgctgctaatgatgcaggatagcgccggagcggtaattggtgcgttgattggcagttggctgctgcaatatgacttccacttcgtctgttggaccggtgcggctatttttgtgctggcagccggttggaacgcctggttactccccgcttaccgtatctcgaccgttcgcgccccgatgaaagagggcctgatgcgagtgttgcgtgatcgccgttttgtgacctatgtgctgacgcttactggctattatatgctcgccgtacaggtcatgctgatgctgccgatcgtggtgaatgaacttgctggctcaccggccgcagtaaaatggatgtatgccattgaagccgcactttctctgacgctgctttatccgctggcccgttggagtgaaaagcgttttagccttgagcaacgcttaatggccggcttactgatcatgacgctcagtttgttccccatcgggatgatcactcatctacaaacactgttcatgtttatctgtttcttctatatgggatcaatcctcgctgaacccgcccgtgaaacactgggagcatcgctggctgactcccgcgcccgtggtagctatatgggctttagtcgccttggattagcgctggggggggcattaggttataccggcggtggctggatgtacgataccggcaaaacccttgatatgcctgagctaccctggttcttgctgggtattattggactcattacattggcagggctttactggcaattcaatcgacggcggattgaatctgccatgttgagcagcagctaa

SEQ ID NO: 76059 - protein, 401 aa, Yersinia pestis
MALVSQARSLGKYFLLFDNLLVVLGFFVVFPLISIRFVDQLGWAALVVGLALGLRQLVQQGLGIFGGAIADRFGAKPMIVTGMLMRAAGFALMAMADEPWILWLACALSGLGGTLFDPPRTALVIKLTRPHERGRFYSLLMMQDSAGAVIGALIGSWLLQYDFHFVCWTGAAIFVLAAGWNAWLLPAYRISTVRAPMKEGLMRVLRDRRFVTYVLTLTGYYMLAVQVMLMLPIVVNELAGSPAAVKWMYAIEAALSLTLLYPLARWSEKRFSLEQRLMAGLLIMTLSLFPIGMITHLQTLFMFICFFYMGSILAEPARETLGASLADSRARGSYMGFSRLGLALGGALGYTGGGWMYDTGKTLDMPELPWFLLGIIGLITLAGLYWQFNRRRIESAMLSSS

SEQ ID NO: 76060 - DNA, 25 bp, Artificial sequence
  primer
atgctcatcttttatttcccgggag

SEQ ID NO: 76061 - DNA, 24 bp, Artificial sequence
  primer
ttaggcgtcgcgttcaagcaaacg

SEQ ID NO: 76062 - protein, 395 aa, Artificial sequence
  consensus sequence
  Variant (2)..(10): Xaa in position 2 to 10 is any amino acid
  Variant (13)..(14): Xaa in position 13 to 14 is any amino acid
  Variant (16)..(16): Xaa in position 16 is any amino acid
  Variant (18)..(27): Xaa in position 18 to 27 is any amino acid
  Variant (29)..(34): Xaa in position 29 to 34 is any amino acid
  Variant (36)..(37): Xaa in position 36 to 37 is any amino acid
  Variant (40)..(40): Xaa in position 40 is any amino acid
  Variant (42)..(42): Xaa in position 42 is any amino acid
  Variant (44)..(44): Xaa in position 44 is any amino acid
  Variant (48)..(51): Xaa in position 48 to 51 is any amino acid
  Variant (54)..(55): Xaa in position 54 to 55 is any amino acid
  Variant (59)..(59): Xaa in position 59 is any amino acid
  Variant (61)..(62): Xaa in position 61 to 62 is any amino acid
  Variant (64)..(64): Xaa in position 64 is any amino acid
  Variant (66)..(67): Xaa in position 66 to 67 is any amino acid
  Variant (69)..(71): Xaa in position 69 to 71 is any amino acid
  Variant (73)..(74): Xaa in position 73 to 74 is any amino acid
  Variant (77)..(81): Xaa in position 77 to 81 is any amino acid
  Variant (83)..(93): Xaa in position 83 to 93 is any amino acid
  Variant (95)..(95): Xaa in position 95 is any amino acid
  Variant (97)..(98): Xaa in position 97 to 98 is any amino acid
  Variant (100)..(100): Xaa in position 100 is any amino acid
  Variant (103)..(103): Xaa in position 103 is any amino acid
  Variant (105)..(117): Xaa in position 105 to 117 is any amino acid
  Variant (118)..(124): Xaa in position 118 to 124 is any or no amino acid
  Variant (126)..(130): Xaa in position 126 to 130 is any amino acid
  Variant (132)..(138): Xaa in position 132 to 138 is any amino acid
  Variant (140)..(142): Xaa in position 140 to 142 is any amino acid
  Variant (144)..(146): Xaa in position 144 to 146 is any amino acid
  Variant (148)..(149): Xaa in position 148 to 149 is any amino acid
  Variant (151)..(154): Xaa in position 151 to 154 is any amino acid
  Variant (155)..(155): Xaa in position 155 is any or no amino acid
  Variant (157)..(162): Xaa in position 157 to 162 is any amino acid
  Variant (165)..(166): Xaa in position 165 to 166 is any amino acid
  Variant (168)..(177): Xaa in position 168 to 177 is any amino acid
  Variant (178)..(183): Xaa in position 178 to 183 is any or no amino acid
  Variant (186)..(207): Xaa in position 186 to 207 is any amino acid
  Variant (208)..(208): Xaa in position 208 is any or no amino acid
  Variant (210)..(218): Xaa in position 210 to 218 is any amino acid
  Variant (220)..(224): Xaa in position 220 to 224 is any amino acid
  Variant (226)..(227): Xaa in position 226 to 227 is any amino acid
  Variant (229)..(229): Xaa in position 229 is any amino acid
  Variant (232)..(238): Xaa in position 232 to 238 is any amino acid
  Variant (240)..(252): Xaa in position 240 to 252 is any amino acid
  Variant (253)..(255): Xaa in position 253 to 255 is any or no amino acid
  Variant (257)..(259): Xaa in position 257 to 259 is any amino acid
  Variant (261)..(262): Xaa in position 261 to 262 is any amino acid
  Variant (264)..(265): Xaa in position 264 to 265 is any amino acid
  Variant (267)..(276): Xaa in position 267 to 276 is any amino acid
  Variant (277)..(277): Xaa in position 277 is any or no amino acid
  Variant (279)..(280): Xaa in position 279 to 280 is any amino acid
  Variant (282)..(287): Xaa in position 282 to 287 is any amino acid
  Variant (289)..(310): Xaa in position 289 to 310 is any amino acid
  Variant (311)..(319): Xaa in position 311 to 319 is any or no amino acid
  Variant (321)..(325): Xaa in position 321 to 325 is any amino acid
  Variant (327)..(330): Xaa in position 327 to 330 is any amino acid
  Variant (332)..(334): Xaa in position 332 to 334 is any amino acid
  Variant (337)..(341): Xaa in position 337 to 341 is any amino acid
  Variant (343)..(345): Xaa in position 343 to 345 is any amino acid
  Variant (347)..(358): Xaa in position 347 to 358 is any amino acid
  Variant (360)..(363): Xaa in position 360 to 363 is any amino acid
  Variant (365)..(367): Xaa in position 365 to 367 is any amino acid
  Variant (369)..(375): Xaa in position 369 to 375 is any amino acid
  Variant (376)..(379): Xaa in position 376 to 379 is any or no amino acid
  Variant (382)..(383): Xaa in position 382 to 383 is any amino acid
  Variant (385)..(394): Xaa in position 385 to 394 is any amino acid
LXXXXXXXXXGFXXVXPXXXXXXXXXXGXXXXXXGXXLGXRXFXQQGXXXXGGXXADRXGXXPXIXXGXXXRXXGFXXXXXAXXXXXXXXXXXLXGXXGXLFXPXXXXXXXXXXXXXXXXXXXXRXXXXXLXXXXXXXGXXXGXXXGXXLXXXXXFXXXXXXGAXXFXXXXXXXXXXXXXXXXLPXXXXXXXXXXXXXXXXXXXXXXXFXXXXXXXXXYXXXXXQXXLXLPXXXXXXXGXXXXXXXXXXXXXXXXLXXXLXXPXXRXXXXXXXXXXXLXXGXXXXXXSXXXXXXXXXXXXXXXXXXXXXXXXXXXXXXXGXXXXXPXXXXLXXXLAXXXXXGXXXGXXXXXXXXXXXXGXXXXGXXXDXXXXXXXXXXXPWXXLXXXXXXXXXXL

SEQ ID NO: 76063 - protein, 41 aa, Artificial sequence
  protein pattern
  Variant (2)..(2): Xaa in position 2 is any amino acid
  Variant (4)..(4): Xaa in position 4 is Asn, Gln or Thr
  Variant (6)..(6): Xaa in position 6 is any amino acid
  Variant (10)..(10): Xaa in position 10 is Leu or Met
  Variant (11)..(11): Xaa in position 11 is any amino acid
  Variant (12)..(13): Xaa in position 12 to 13 is Phe, Ile, Leu or Val
  Variant (16)..(16): Xaa in position 16 is Ala, Gly or Thr
  Variant (17)..(17): Xaa in position 17 is Phe, Ile or Leu
  Variant (20)..(20): Xaa in position 20 is Lys or Arg
  Variant (21)..(21): Xaa in position 21 is any amino acid
  Variant (23)..(24): Xaa in position 23 to 24 is any amino acid
  Variant (25)..(25): Xaa in position 25 is Ala, Pro or Val
  Variant (26)..(26): Xaa in position 26 is any amino acid
  Variant (27)..(27): Xaa in position 27 is Ile, Leu or Val
  Variant (28)..(28): Xaa in position 28 is Leu or Val
  Variant (29)..(29): Xaa in position 29 is any amino acid
  Variant (31)..(32): Xaa in position 31 to 32 is any amino acid
  Variant (33)..(33): Xaa in position 33 is Ile, Leu, Met or Val
  Variant (35)..(36): Xaa in position 35 to 36 is any amino acid
  Variant (38)..(38): Xaa in position 38 is Phe or Tyr
  Variant (39)..(39): Xaa in position 39 is Ala, Gly, Ile or Leu
  Variant (40)..(40): Xaa in position 40 is any amino acid
  Variant (41)..(41): Xaa in position 41 is Leu, Met or Val
GXRXFXQQGXXXXGGXXADXXGXXXXXXXGXXXRXXGXXXX

SEQ ID NO: 76064 - protein, 28 aa, Artificial sequence
  protein pattern
  Variant (2)..(2): Xaa in position 2 is Leu or Val
  Variant (3)..(9): Xaa in position 3 to 9 is any amino acid
  Variant (10)..(10): Xaa in position 10 is Ala, Gly, Ser or Thr
  Variant (11)..(12): Xaa in position 11 to 12 is any amino acid
  Variant (13)..(13): Xaa in position 13 is Phe, Leu, Met or Val
  Variant (14)..(16): Xaa in position 14 to 16 is any amino acid
  Variant (18)..(19): Xaa in position 18 to 19 is any amino acid
  Variant (21)..(21): Xaa in position 21 is any amino acid
  Variant (24)..(24): Xaa in position 24 is Ala, Ile, Leu or Val
  Variant (25)..(25): Xaa in position 25 is any amino acid
  Variant (26)..(26): Xaa in position 26 is Ala, Ile, Leu or Val
  Variant (27)..(27): Xaa in position 27 is any amino acid
  Variant (28)..(28): Xaa in position 28 is Asp, Glu or Arg
FXXXXXXXXXXXXXXXQXXLXLPXXXXX

SEQ ID NO: 76065 - protein, 24 aa, Artificial sequence
  protein pattern
  Variant (2)..(3): Xaa in position 2 to 3 is any amino acid
  Variant (4)..(8): Xaa in position 4 to 8 is any or no amino acid
  Variant (11)..(11): Xaa in position 11 is Phe or Tyr
  Variant (12)..(12): Xaa in position 12 is Ala, Leu or Val
  Variant (14)..(14): Xaa in position 14 is Phe, Ile or Val
  Variant (16)..(16): Xaa in position 16 is Phe or Leu
  Variant (17)..(17): Xaa in position 17 is Ile, Leu or Val
  Variant (18)..(18): Xaa in position 18 is Ala, Ser or Thr
  Variant (19)..(19): Xaa in position 19 is Ile, Leu or Val
  Variant (20)..(20): Xaa in position 20 is any amino acid
  Variant (21)..(21): Xaa in position 21 is Phe or Leu
  Variant (22)..(22): Xaa in position 22 is any amino acid
  Variant (23)..(23): Xaa in position 23 is Asp or Glu
  Variant (24)..(24): Xaa in position 24 is Asp, Asn or Gln
VXXXXXXXGFXXVXPXXXXXXXXX

SEQ ID NO: 76066 - protein, 12 aa, Artificial sequence
  protein pattern
  Variant (2)..(3): Xaa in position 2 to 3 is any amino acid
  Variant (4)..(4): Xaa in position 4 is Ala, Ile or Val
  Variant (5)..(5): Xaa in position 5 is Ala, Cys or Ser
  Variant (6)..(6): Xaa in position 6 is any amino acid
  Variant (7)..(7): Xaa in position 7 is Ala or Thr
  Variant (10)..(10): Xaa in position 10 is Ala, Gly, Ile or Val
  Variant (11)..(11): Xaa in position 11 is Ile, Leu or Val
FXXXXXXGAXXF

SEQ ID NO: 76067 - protein, 22 aa, Artificial sequence
  protein pattern
  Variant (2)..(2): Xaa in position 2 is any amino acid
  Variant (3)..(3): Xaa in position 3 is Ala or Gly
  Variant (4)..(4): Xaa in position 4 is Phe, Ile, Leu or Val
  Variant (5)..(6): Xaa in position 5 to 6 is Ala or Gly
  Variant (7)..(7): Xaa in position 7 is Ala, Gly or Thr
  Variant (10)..(10): Xaa in position 10 is any amino acid
  Variant (11)..(11): Xaa in position 11 is any or no amino acid
  Variant (13)..(15): Xaa in position 13 to 15 is any amino acid
  Variant (16)..(18): Xaa in position 16 to 18 is any or no amino acid
  Variant (20)..(21): Xaa in position 20 to 21 is any amino acid
  Variant (22)..(22): Xaa in position 22 is Ala, Gly, Ile or Val
LXXXXXXLFXXPXXXXXXAXXX

SEQ ID NO: 76068 - DNA, 414 bp, Escherichia coli
  CDS (1)..(414): transl_table=11
atgaaaatatactgttgcttaaataccgttggtttttttatggatggctgtggcgtcattccgccagattctaaagaaataacggcagaacactggcagtcattattaaaatctcaagctgaaggaggcgtgatcgatttttctgtttttcctccttctattaaagaggttatccgtactcatgatgatgaagtcgcagatgcgaactttcaaaagcagatgcttatctctgatgcaactgattttatcaatagcagacagtggcagggtaaggctgcattgggaagacttaaagaagatgagctgaaacaatataatttgtggctggattatctggaagcactggaactggttgatacatccagtgcgccagatattgaatggcctacgcctccggcagttcaggccagataa

SEQ ID NO: 76069 - protein, 137 aa, Escherichia coli
MKIYCCLNTVGFFMDGCGVIPPDSKEITAEHWQSLLKSQAEGGVIDFSVFPPSIKEVIRTHDDEVADANFQKQMLISDATDFINSRQWQGKAALGRLKEDELKQYNLWLDYLEALELVDTSSAPDIEWPTPPAVQAR

SEQ ID NO: 76070 - DNA, 453 bp, Escherichia coli O157:H7 EDL933
  CDS (1)..(453): transl_table=11
gtgatttatatggacgaatatgtttatagcgcaaggcataatgcttttttccctgtggatatgattgataaatataaatcagagggatgggatttatcagacgctaaggaagtaaatcaaaatattatcagtgagtttatggctgaaccgccacaaggaaaaatccgtattgccggagatgatgggctgcctgcgtgggcagatattcctccacccacgcatgaagagcttattgaaattactgaatcagaaagacagctactaattaaccaggccaacgaatacatgaacagtaagcaatggcccggtaaagcggctattggtcgtctgaaaggtgacgaactgacgcaatataatttgtggctggattatctggacgcactggagctggtcgatacttccggtgcgccagatattgaatggcctacgcctccggcagttcaggccagatga

SEQ ID NO: 76071 - protein, 150 aa, Escherichia coli O157:H7 EDL933
MIYMDEYVYSARHNAFFPVDMIDKYKSEGWDLSDAKEVNQNIISEFMAEPPQGKIRIAGDDGLPAWADIPPPTHEELIEITESERQLLINQANEYMNSKQWPGKAAIGRLKGDELTQYNLWLDYLDALELVDTSGAPDIEWPTPPAVQAR

SEQ ID NO: 76072 - DNA, 477 bp, Escherichia coli CFT073
  CDS (1)..(477): transl_table=11
atgaaaagttatgatgattatcaacatgattcttcttatggttttatatgggataaggtaaatgccagatttatggcgtatatattaaaaaatgaatatgaaagaaatagaatgtggcctaaggaaggggtggatatttcaaatgagactgcttgtgaattcatgaaacaacctccggaaggaaaaattcttggggcagatgataatggtatgcctgcatggattgatatgccaccactcacatatacagagttagtggctaaagcaaaaactgaaaaacaagcacgtataatagaagctgtaaattatataaataacaaacaatggcaggggaaagcattgcttgggagactgaatgatactgaactgaaaatgtataatatatggcttgattatattgaagcattagaggccattgatccatcaaaagcctctgatacagcctttccgactaagccatttaacgattcagtctga

SEQ ID NO: 76073 - protein, 158 aa, Escherichia coli CFT073
MKSYDDYQHDSSYGFIWDKVNARFMAYILKNEYERNRMWPKEGVDISNETACEFMKQPPEGKILGADDNGMPAWIDMPPLTYTELVAKAKTEKQARIIEAVNYINNKQWQGKALLGRLNDTELKMYNIWLDYIEALEAIDPSKASDTAFPTKPFNDSV

SEQ ID NO: 76074 - DNA, 441 bp, Salmonella enterica subsp. enterica serovar Typhi Ty2
  CDS (1)..(441): transl_table=11
atgcagaaatatattttcagcgccgataaaaatgcgtttttccctgtggagcttaaaatcgcttatcaggaatccggcgaatggcccgatgatggaatcgaaattgacgacactgttgccgccgaatttatgaaggaagcaccagaaggaaaatacagaggtgtcatcgacggaatgcctgcatggattgatattccaccgccaactcatgaggaacaaattgccgcagccgaactggaaaagcagcaattgattaatcaggtcaacgaatacataaacagtaagcaatggcctggtaaagcggcgattggtcgcctgaaaggtgaggaactggcgcaatataatttgtggctggattatctggacgcactggaactggtcgatacttccggtgcgccagatattgaatggcctacgcctccggcagttcaggccagatga

SEQ ID NO: 76075 - protein, 146 aa, Salmonella enterica subsp. enterica serovar Typhi Ty2
MQKYIFSADKNAFFPVELKIAYQESGEWPDDGIEIDDTVAAEFMKEAPEGKYRGVIDGMPAWIDIPPPTHEEQIAAAELEKQQLINQVNEYINSKQWPGKAAIGRLKGEELAQYNLWLDYLDALELVDTSGAPDIEWPTPPAVQAR

SEQ ID NO: 76076 - DNA, 429 bp, Klebsiella pneumoniae
  CDS (1)..(429): transl_table=11
atggaaataatctttagccctgggcaaaacaagtttttccccgtcccactgaaaacggattatgagaacgcgggctcatggccaactgacggcattgatgtgggttatgatgtttatcttgagttcactgctaatcccccggaaggaaaggtacgcggggtggtagataatatgcctgcatgggtcgacaaatcctcgccaactcaagagcaattagttactcaagcagcagtaaagcaaaagcggttgattactgaggctaatgagtacattggtttgaaacagtgggcaggtaaagcctctctggggcgcttatccgatgatgagagggcgcaatataacgcctggcttgactatcttgatgagctggaagccgtgaagccagaggatgcgcccgatattatatggcctacacctccggtgatgtag

SEQ ID NO: 76077 - protein, 142 aa, Klebsiella pneumoniae
MEIIFSPGQNKFFPVPLKTDYENAGSWPTDGIDVGYDVYLEFTANPPEGKVRGVVDNMPAWVDKSSPTQEQLVTQAAVKQKRLITEANEYIGLKQWAGKASLGRLSDDERAQYNAWLDYLDELEAVKPEDAPDIIWPTPPVM

SEQ ID NO: 76078 - DNA, 438 bp, Escherichia coli
  CDS (1)..(438): transl_table=11
atgttttatagtccatcattaaacatttttgtgaatcctgcgcttaaggatgattacattaatgcaaattcatggccagatgatgctctggctgtcagtgatgatgtttataatgaatttgcaatcaatacgcccccatatgacaaaattcgtgttgcaggaaaaaatggattacccacatgggcactaatacctccaccatcgcatgaagaacttattcaacaggcagaatcagaaaggcaattattgcttaatcaggccaacgaatacatgaacagtaaacaatggcccggtaaagccgctattggtcgtctgaaagacgaggaactggcactatataatttgtggctggattacctggacgcactggaactggtggatacctccagtgctccagatattgaatggcctacacctccggtaactcaggccagctaa

SEQ ID NO: 76079 - protein, 145 aa, Escherichia coli
MFYSPSLNIFVNPALKDDYINANSWPDDALAVSDDVYNEFAINTPPYDKIRVAGKNGLPTWALIPPPSHEELIQQAESERQLLLNQANEYMNSKQWPGKAAIGRLKDEELALYNLWLDYLDALELVDTSSAPDIEWPTPPVTQAS

SEQ ID NO: 76080 - DNA, 441 bp, Escherichia coli
  CDS (1)..(441): transl_table=11
atgaattacatatattccgcgactacaaactctttctatcccttggagatgaaagaggattacacgcaagctggctcatggccagatgatgctgttgaagttgatgagcaagtgtatattgagttttccggattaccgccgaaaggaaaaatccgtatcgctggagaaaatggttttcctgcatggtctgaaattccaccaccaacacatgaggaacagattgctgcagccgaactgaaaaagcagcaattgattaatcaggccaacgattatatgaacagtaaacaatgggctggtaaagcggctattggtcgtctgaaaggtgaggaactggcgcaatataatttgtggctggattatctggacgcactggagctggtcgatacttccagtgcgccagatattgaatggcctactcctccggcagttcaggccagatga

SEQ ID NO: 76081 - protein, 146 aa, Escherichia coli
MNYIYSATTNSFYPLEMKEDYTQAGSWPDDAVEVDEQVYIEFSGLPPKGKIRIAGENGFPAWSEIPPPTHEEQIAAAELKKQQLINQANDYMNSKQWAGKAAIGRLKGEELAQYNLWLDYLDALELVDTSSAPDIEWPTPPAVQAR

SEQ ID NO: 76082 - DNA, 27 bp, Artificial sequence
  primer
atgaaaatatactgttgcttaaatacc

SEQ ID NO: 76083 - DNA, 23 bp, Artificial sequence
  primer
ttatctggcctgaactgccggag

SEQ ID NO: 76084 - protein, 131 aa, Artificial sequence
  consensus sequence
  Variant (2)..(2): Xaa in position 2 is any amino acid
  Variant (3)..(9): Xaa in position 3 to 9 is any or no amino acid
  Variant (11)..(16): Xaa in position 11 to 16 is any amino acid
  Variant (18)..(18): Xaa in position 18 is any amino acid
  Variant (20)..(29): Xaa in position 20 to 29 is any amino acid
  Variant (32)..(35): Xaa in position 32 to 35 is any amino acid
  Variant (36)..(36): Xaa in position 36 is any or no amino acid
  Variant (38)..(38): Xaa in position 38 is any amino acid
  Variant (41)..(47): Xaa in position 41 to 47 is any amino acid
  Variant (48)..(49): Xaa in position 48 to 49 is any or no amino acid
  Variant (51)..(51): Xaa in position 51 is any amino acid
  Variant (53)..(57): Xaa in position 53 to 57 is any amino acid
  Variant (58)..(58): Xaa in position 58 is any or no amino acid
  Variant (60)..(66): Xaa in position 60 to 66 is any amino acid
  Variant (68)..(71): Xaa in position 68 to 71 is any amino acid
  Variant (73)..(73): Xaa in position 73 is any amino acid
  Variant (76)..(77): Xaa in position 76 to 77 is any amino acid
  Variant (79)..(80): Xaa in position 79 to 80 is any amino acid
  Variant (82)..(82): Xaa in position 82 is any amino acid
  Variant (84)..(84): Xaa in position 84 is any amino acid
  Variant (88)..(88): Xaa in position 88 is any amino acid
  Variant (92)..(93): Xaa in position 92 to 93 is any amino acid
  Variant (97)..(99): Xaa in position 97 to 99 is any amino acid
  Variant (102)..(103): Xaa in position 102 to 103 is any amino acid
  Variant (106)..(106): Xaa in position 106 is any amino acid
  Variant (112)..(112): Xaa in position 112 is any amino acid
  Variant (116)..(116): Xaa in position 116 is any amino acid
  Variant (119)..(119): Xaa in position 119 is any amino acid
  Variant (121)..(121): Xaa in position 121 is any amino acid
  Variant (126)..(126): Xaa in position 126 is any amino acid
FXXXXXXXXYXXXXXXPXDXXXXXXXXXXEFXXXXXPXGKXXXXXXXXXPXWXXXXXXTXXXXXXXAXXXXQXLIXXAXXYXNXKQWXGKAXXGRLXXXELXXYNXWLDYLXALEXVDXSXAPDIXWPTPP

SEQ ID NO: 76085 - protein, 62 aa, Artificial sequence
  protein pattern
  Variant (2)..(3): Xaa in position 2 to 3 is any amino acid
  Variant (4)..(4): Xaa in position 4 is Ile or Leu
  Variant (5)..(5): Xaa in position 5 is any amino acid
  Variant (6)..(6): Xaa in position 6 is Asp, Glu or Gln
  Variant (7)..(7): Xaa in position 7 is Ala or Val
  Variant (8)..(8): Xaa in position 8 is Asn, Thr or Val
  Variant (9)..(9): Xaa in position 9 is Asp, Glu or Asn
  Variant (10)..(10): Xaa in position 10 is Phe or Tyr
  Variant (11)..(11): Xaa in position 11 is Ile or Met
  Variant (13)..(13): Xaa in position 13 is Asn or Ser
  Variant (14)..(14): Xaa in position 14 is Lys or Arg
  Variant (17)..(17): Xaa in position 17 is any amino acid
  Variant (21)..(21): Xaa in position 21 is Ala or Leu
  Variant (22)..(22): Xaa in position 22 is Ile or Leu
  Variant (26)..(26): Xaa in position 26 is any amino acid
  Variant (27)..(27): Xaa in position 27 is Asp, Glu or Gly
  Variant (28)..(28): Xaa in position 28 is Asp, Glu or Thr
  Variant (31)..(32): Xaa in position 31 to 32 is any amino acid
  Variant (35)..(36): Xaa in position 35 to 36 is any or no amino acid
  Variant (38)..(39): Xaa in position 38 to 39 is any or no amino acid
  Variant (42)..(42): Xaa in position 42 is Ile or Leu
  Variant (43)..(43): Xaa in position 43 is Asp or Glu
  Variant (47)..(47): Xaa in position 47 is Ala or Leu
  Variant (48)..(48): Xaa in position 48 is Ile or Val
  Variant (50)..(50): Xaa in position 50 is Pro or Thr
  Variant (52)..(52): Xaa in position 52 is any amino acid
  Variant (54)..(54): Xaa in position 54 is Pro or Ser
  Variant (56)..(56): Xaa in position 56 is any amino acid
  Variant (57)..(57): Xaa in position 57 is Ala or Glu
  Variant (58)..(58): Xaa in position 58 is Phe or Trp
  Variant (61)..(61): Xaa in position 61 is any amino acid
QXXXXXXXXXXNXXQWXGKAXXGRLXXXELXXYNXXLXXDYXXALEXXDXSXAXDXXXPTXP

SEQ ID NO: 76086 - protein, 17 aa, Artificial sequence
  protein pattern
  Variant (2)..(2): Xaa in position 2 is Phe, Leu, Met or Val
  Variant (3)..(3): Xaa in position 3 is Ile or Pro
  Variant (4)..(4): Xaa in position 4 is Ala, Asp or Thr
  Variant (5)..(5): Xaa in position 5 is Phe or Trp
  Variant (6)..(7): Xaa in position 6 to 7 is any amino acid
  Variant (8)..(8): Xaa in position 8 is Phe, Ile or Met
  Variant (11)..(13): Xaa in position 11 to 13 is any amino acid
  Variant (14)..(14): Xaa in position 14 is any or no amino acid
  Variant (16)..(16): Xaa in position 16 is any amino acid
  Variant (17)..(17): Xaa in position 17 is Ile, Leu or Val
GXXXXXXXPPXXXXEXX

SEQ ID NO: 76087 - DNA, 327 bp, Escherichia coli
  CDS (1)..(327): transl_table=11
atgccaaaacctggcatcttaaagagtaaaagtatgttttgtgtgatttatcgaagcagcaagcgtgaccagacctatttatatgtcgaaaaaaaagacgatttttcgcgtgttcctgaggaactgatgaaaggttttggtcagcctcagttagcgatgattctgccgctggatgggcggaagaaactggtcaatgccgatattgaaaaggttaaacaggcattaaccgagcaaggttactatttgcagttaccgccaccacccgaagatttgctgaagcaacatctttccgtcatggggcagaaaacagacgacactaacaaataa

SEQ ID NO: 76088 - protein, 108 aa, Escherichia coli
MPKPGILKSKSMFCVIYRSSKRDQTYLYVEKKDDFSRVPEELMKGFGQPQLAMILPLDGRKKLVNADIEKVKQALTEQGYYLQLPPPPEDLLKQHLSVMGQKTDDTNK

SEQ ID NO: 76089 - DNA, 252 bp, Pasteurella multocida subsp. multocida str. Pm70
  CDS (1)..(252): transl_table=11
atgttatgtgcgatttataaaagtacaagaaaaatggggacatatctttatgtggcaaaacgtgatcaatttgatgtggttcctgaggtattaagaaatgcttttggtccccctgtttttgtgatgatgtttaatctcgctggcgagaaagcattagttaatgcggagaaagccgaagtccgtaaacaaattgaaacacaaggtttttatttacaaatgccaaaagaggatgactggctatttaagttgtag

SEQ ID NO: 76090 - protein, 83 aa, Pasteurella multocida subsp. multocida str. Pm70
MLCAIYKSTRKMGTYLYVAKRDQFDVVPEVLRNAFGPPVFVMMFNLAGEKALVNAEKAEVRKQIETQGFYLQMPKEDDWLFKL

SEQ ID NO: 76091 - DNA, 294 bp, Pseudomonas putida KT2440
  CDS (1)..(294): transl_table=11
atgaaacgcatttgctcgatctacaagagcccacgcaagaacgaaatgtacctgtacgtactcaaggctgacggcctggaacgcgtgcctgaaggcctgctgccgttcttcggcacccccgtgcacgctttcgacctggtgctcacccctgagcgcaaactggcccgcgaggacatcaccaaggtgctggagaacctcgaaagccaaggctaccacctgcagatgccgccgctggaagatgagtacatcgagcacctgcccgaagagctgctgcgccgcaacgaccccgtctga

SEQ ID NO: 76092 - protein, 97 aa, Pseudomonas putida KT2440
MKRICSIYKSPRKNEMYLYVLKADGLERVPEGLLPFFGTPVHAFDLVLTPERKLAREDITKVLENLESQGYHLQMPPLEDEYIEHLPEELLRRNDPV

SEQ ID NO: 76093 - DNA, 285 bp, Vibrio parahaemolyticus RIMD 2210633
  CDS (1)..(285): transl_table=11
atgctttgttctatttataaaagctcgaaaaaagaaggtacttatctctatatcccgaaaaaggatgatttttcacaggttcctgacaccttaatgcagatgttcggtaagcctattcctgtcatgacgattaaacttgatggtcgtaaattggcacaagtagatatcgaaaaagtgaaggcttcattacaaaatgatggcttctttctgcaggttcctccaccgccggaaaacctattagaaaagtacaaagaacaaaaagctcagcaaaagaacgaacagtaa

SEQ ID NO: 76094 - protein, 94 aa, Vibrio parahaemolyticus RIMD 2210633
MLCSIYKSSKKEGTYLYIPKKDDFSQVPDTLMQMFGKPIPVMTIKLDGRKLAQVDIEKVKASLQNDGFFLQVPPPPENLLEKYKEQKAQQKNEQ

SEQ ID NO: 76095 - DNA, 333 bp, Salmonella enterica subsp. enterica serovar Typhi Ty2
  CDS (1)..(333): transl_table=11
ttgaggcaagtcaccatcccgttaattcagagtaaaagtatgttttgtgtgatctatagaagtagcaagcgcgatcaaacctatttgtatgtcgaaaaaaaagacgatttttcgcgggtgcctgacgcgttgatgaaaggattcggtcagccgcagttagcgatgatgctgccgcttgatggacgtaaaaaattagtcaatgccgagctcgaaaaagtaaaacaggcgttaagcgagcagggctattatttacaattgccgccgccgccggaagatttgctgaaacaacatctttcttcggtgggacaaaatacgtcgcacgctgaccgttaa

SEQ ID NO: 76096 - protein, 110 aa, Salmonella enterica subsp. enterica serovar Typhi Ty2
MRQVTIPLIQSKSMFCVIYRSSKRDQTYLYVEKKDDFSRVPDALMKGFGQPQLAMMLPLDGRKKLVNAELEKVKQALSEQGYYLQLPPPPEDLLKQHLSSVGQNTSHADR

SEQ ID NO: 76097 - DNA, 327 bp, Shigella flexneri 2a str. 2457T
  CDS (1)..(327): transl_table=11
atgccaaaacctggcatcttaaagagtaaaagtatgttttgtgcgatttatcgaagcagcaagcgtgaccagacctatttatatgtcgaaaaaaaagacgatttttcgcgtgttcctgaggaactgatgaaaggttttggtcagcctcagttagcgatgattctgccgttggatgggcggaagaaactggtcaatgctgatattgaaaaggttaaactggcattaaccgagcaaggttactatttgcagttaccgccaccacccgaagatttgctgaagcaacatctttccgtcatggggcagaaaacagacgacactaacaaataa

SEQ ID NO: 76098 - protein, 108 aa, Shigella flexneri 2a str. 2457T
MPKPGILKSKSMFCAIYRSSKRDQTYLYVEKKDDFSRVPEELMKGFGQPQLAMILPLDGRKKLVNADIEKVKLALTEQGYYLQLPPPPEDLLKQHLSVMGQKTDDTNK

SEQ ID NO: 76099 - DNA, 300 bp, Haemophilus ducreyi 35000HP
  CDS (1)..(300): transl_table=11
atgtatatagtgatgaattctaatttttgtgctatttataaaagtatgagtaaagaaggtatgttcctttatatcgctcaacgtgataaatttaatgctgttcctgagcagttattacaaatgtttggtaaaccacaattcgtgatgttatttaatttagcgggagaaaaaccgcttaaacaagtaaataatcaggatgttttgttggcaattaaaacacaaggcttttttttacaaatatcaccacctgcggaaaatttgcttaagcaattccttattcaaaagggagaaaagaaataa

SEQ ID NO: 76100 - protein, 99 aa, Haemophilus ducreyi 35000HP
MYIVMNSNFCAIYKSMSKEGMFLYIAQRDKFNAVPEQLLQMFGKPQFVMLFNLAGEKPLKQVNNQDVLLAIKTQGFFLQISPPAENLLKQFLIQKGEKK

SEQ ID NO: 76101 - DNA, 297 bp, Photorhabdus luminescens subsp. laumondii TTO1
  CDS (1)..(297): transl_table=11
ctgaatttaaaagagtttattataatgatttgtgcgatctacagcagtccgaaaagggagcaaacatatctttatgttgaaaaaagagataatttctctcgtgttcccgaagagttactgaaaagttttggacagccccaatatacaatgatgatctctctggcagacagaaaaaagctagcaggcgctgacatcgaaaaggtaaaaatatcgttaattgaacagggtttttacctgcaaatcccccctccggttgaaaacttaatgaatgcacatctgagccagatggaaaaataa

SEQ ID NO: 76102 - protein, 98 aa, Photorhabdus luminescens subsp. laumondii TTO1
MNLKEFIIMICAIYSSPKREQTYLYVEKRDNFSRVPEELLKSFGQPQYTMMISLADRKKLAGADIEKVKISLIEQGFYLQIPPPVENLMNAHLSQMEK

SEQ ID NO: 76103 - DNA, 282 bp, Vibrio vulnificus YJ016
  CDS (1)..(282): transl_table=11
atgctttgttctatctataaaagttctaagaaagaaggcacatatctttacatcccaaaaaaagatgatttttcacaggttcctgacacattaatgcagatgttcggtaagccttctcatgtgatgacggtgaatcttgaagggcgtagtttggcattagtgaacattgaaaaagtaaaagaatcgctcagcaacgagggctttttcttgcaactgccacctccgccagaaaatctattacaacaacataaagagcgtaaagcgcagcagaaaaacgactaa

SEQ ID NO: 76104 - protein, 93 aa, Vibrio vulnificus YJ016
MLCSIYKSSKKEGTYLYIPKKDDFSQVPDTLMQMFGKPSHVMTVNLEGRSLALVNIEKVKESLSNEGFFLQLPPPPENLLQQHKERKAQQKND

SEQ ID NO: 76105 - DNA, 288 bp, Erwinia carotovora subsp. atroseptica SCRI1043
  CDS (1)..(288): transl_table=11
atggcattcccatcaaatagagtaaaaaaaatgttttgtgtgatctatcgaagtgtgaaacgcgatcagacctatctttatgttgaaaaaaaagacgatttctcacgcgtgcctgaagaattaatgaaaagtttcggcgcgccgcagttagccatggttttaccgttgaatgggcgtaaaaaactggcgaatgccgatatagaaaaagtgaaactggcgcttcaggaacaggggttttatctgcaagttccacctccggttgagagcttattaaccacgccggtgtaa

SEQ ID NO: 76106 - protein, 95 aa, Erwinia carotovora subsp. atroseptica SCRI1043
MAFPSNRVKKMFCVIYRSVKRDQTYLYVEKKDDFSRVPEELMKSFGAPQLAMVLPLNGRKKLANADIEKVKLALQEQGFYLQVPPPVESLLTTPV

SEQ ID NO: 76107 - DNA, 273 bp, Yersinia pseudotuberculosis IP 32953
  CDS (1)..(273): transl_table=11
atgctttgtgcgatttacagaagccctaaacgagatcaaacctacctttatattgagaagaaagatgatttttcacgggttcccgctgaattattagccagttttggcaagccacagtttgcgatgcttcttgcgttaaatgaacgcaagaccttggcgaccgctgatgtggagaaggtgaaaaatgcgcttattgagcaaggtttttacctgcaagttcctccaccgccggaaagtttactgaaaatgcacttgggtgaaaccaaagcataa

SEQ ID NO: 76108 - protein, 90 aa, Yersinia pseudotuberculosis IP 32953
MLCAIYRSPKRDQTYLYIEKKDDFSRVPAELLASFGKPQFAMLLALNERKTLATADVEKVKNALIEQGFYLQVPPPPESLLKMHLGETKA

SEQ ID NO: 76109 - DNA, 366 bp, Mannheimia succiniciproducens MBEL55E
  CDS (1)..(366): transl_table=11
atgcattccgttttatttagctatcatataaattcaaaatatcacaagggaaacattatgctatgcgccatttataaaagtaaaaagaaagaaggaatgtacttatatgtagccaaacgtgattattttgatgaagtgccggaaactttaaaaatggcgttcggtacgccgaattttgttatgctgtttaatttattgggcgaaaaaaaattggtgcgggcggaaaatcaagaagtgctaaaacatattcaagagcaaggtttttacttgcaaatgccacctaaacaagaaagtttatttgaacaatttaaggcggaacaaaaggcaaaacaaacaaaaaataaaacggcattaaaagtgcggtag

SEQ ID NO: 76110 - protein, 121 aa, Mannheimia succiniciproducens MBEL55E
MHSVLFSYHINSKYHKGNIMLCAIYKSKKKEGMYLYVAKRDYFDEVPETLKMAFGTPNFVMLFNLLGEKKLVRAENQEVLKHIQEQGFYLQMPPKQESLFEQFKAEQKAKQTKNKTALKVR

SEQ ID NO: 76111 - DNA, 294 bp, Pseudomonas syringae pv. syringae B728a
  CDS (1)..(294): transl_table=11
ttgaagcgcatctgttcgatttatcgcagcccgaaaagaaacgagatgtacctttacgtcctgaaaagcgacgttctcaagcgtgtgccgccagaactgatggtggccttcggcaagcctgttcatgcgttcgatctggtgctgagccccgagcgggcgctgtcgcgcgaagatatcaatgtggtgctggagaacctcgacagccagggctatcacttgcagatgccgccggctgaagacgattacatcgagcacttgcccgaagagctgctgcgccgcaacgatcccatgtaa

SEQ ID NO: 76112 - protein, 97 aa, Pseudomonas syringae pv. syringae B728a
MKRICSIYRSPKRNEMYLYVLKSDVLKRVPPELMVAFGKPVHAFDLVLSPERALSREDINVVLENLDSQGYHLQMPPAEDDYIEHLPEELLRRNDPM

SEQ ID NO: 76113 - DNA, 294 bp, Colwellia psychrerythraea 34H
  CDS (1)..(294): transl_table=11
atgctatgtgcaatttataaaagtgctagaaaagcccaaacttatctttttgttaataaacgtgatgacttttcgtcagtgcctgaaggtttgatgaaaacgtttggtacaccaaatttagtcacattaattaatttagctaccaaagataaattagcaatggctgacttagaaaaagtgaaaaaaaacttaatagaaaaagggttctatttacagttaccaccaccacaagaagacttattgaaagaacataaagcggctatggcagctgaaaaagagcaaggagagctttaa

SEQ ID NO: 76114 - protein, 97 aa, Colwellia psychrerythraea 34H
MLCAIYKSARKAQTYLFVNKRDDFSSVPEGLMKTFGTPNLVTLINLATKDKLAMADLEKVKKNLIEKGFYLQLPPPQEDLLKEHKAAMAAEKEQGEL

SEQ ID NO: 76115 - DNA, 294 bp, Pseudomonas fluorescens PfO-1
  CDS (1)..(294): transl_table=11
ttgaaacgtatttgttccatttatcaaagttcgaagaaaagcggcatgtacctgtacgtgctcaagagcgatgcgctggagcgcgtgccggaaggcctgatggcggcgttcggcaaggcgaagcattccttcgatctggtactgacccccgagcgcaagctggccagcgaagacatcgccgtggtcctggaaaacctcgaaaagcagggctatcacctgcaaatgccaccggccgaggaagagtacatcgagcacttgcccgaagagttgctgcgacgcaacgaccccgtctga

SEQ ID NO: 76116 - protein, 97 aa, Pseudomonas fluorescens PfO-1
MKRICSIYQSSKKSGMYLYVLKSDALERVPEGLMAAFGKAKHSFDLVLTPERKLASEDIAVVLENLEKQGYHLQMPPAEEEYIEHLPEELLRRNDPV

SEQ ID NO: 76117 - DNA, 276 bp, Saccharophagus degradans 2-40
  CDS (1)..(276): transl_table=11
ttgatagttgatatttaccgcagcgctaaaaaagaaggcatgtatttgtatgtgcctagaaataaagcgctagatgagttgcccgagccgctaatgaagcaatttggccgcgccgatcattctatggtgctggtgttaacgccagagaaaaagcttgcgcgtgcaagtgtagaaaaagttatcgagtctatagaaaaccaagggttctatttgcaaatgcctccgccgccagagagctatatgaacgaaatccccaacgataaaatgccgcgctaa

SEQ ID NO: 76118 - protein, 91 aa, Saccharophagus degradans 2-40
MIVDIYRSAKKEGMYLYVPRNKALDELPEPLMKQFGRADHSMVLVLTPEKKLARASVEKVIESIENQGFYLQMPPPPESYMNEIPNDKMPR

SEQ ID NO: 76119 - DNA, 279 bp, Haemophilus somnus 129PT
  CDS (1)..(279): transl_table=11
atgctttgtgctatttacaagactaaaagaaaagaagggatgtatctttatattgaaaaacgggggcattttgattccgttccatcttccttacttgagtcattcggcaagccaatttttgtgatgttatttaatttagcaggacaaaaatcattgattaatgctaacaatgaagatgtgcaacaacaaattaaacaaaatggattttatttgcagatgccaaaacagcaagaaaatttacttgaacaagaaagacagtatcttaagcacaataaatga

SEQ ID NO: 76120 - protein, 92 aa, Haemophilus somnus 129PT
MLCAIYKTKRKEGMYLYIEKRGHFDSVPSSLLESFGKPIFVMLFNLAGQKSLINANNEDVQQQIKQNGFYLQMPKQQENLLEQERQYLKHNK

SEQ ID NO: 76121 - DNA, 279 bp, Shewanella sp. ANA-3
  CDS (1)..(279): transl_table=11
atgctatgtgcggtttataaaagtagtcgaaaggctgacacttacttatttgtgaacaaaagggactgttttgatgatgttccccaagcgttgttggagatgtttggtgtgcctcagttagtgatggtgttccccatcgctaagcgtgaatccctcggtatcgccgatattcaaaaggtcagagcagcgctcgaggaaaagggtttttatttacaaattccgccaccgcaggttaatttattggccgaacacagagaaagccttgggattaaagactag

SEQ ID NO: 76122 - protein, 92 aa, Shewanella sp. ANA-3
MLCAVYKSSRKADTYLFVNKRDCFDDVPQALLEMFGVPQLVMVFPIAKRESLGIADIQKVRAALEEKGFYLQIPPPQVNLLAEHRESLGIKD

SEQ ID NO: 76123 - DNA, 282 bp, Pseudoalteromonas tunicata D2
  CDS (1)..(282): transl_table=11
atgttagctgctgtatataaaagtagtaaaaaagccgacacttatctatatgtagaacgtcgcgacgatttttcaagtattccagagcctttaatggcaacttttggcaaacctcagtttgtaatgttaattaacatgcgcgatagaaaagtactaggtggtgccgatattgaaaaagtgcgcaatcaacttgcacagcaaggtttttatttgcaaattccaccaccaaatgagaacttattagaacagttacgaaatcaaaacggagcaaatagtttgtga

SEQ ID NO: 76124 - protein, 93 aa, Pseudoalteromonas tunicata D2
MLAAVYKSSKKADTYLYVERRDDFSSIPEPLMATFGKPQFVMLINMRDRKVLGGADIEKVRNQLAQQGFYLQIPPPNENLLEQLRNQNGANSL

SEQ ID NO: 76125 - DNA, 279 bp, Photobacterium sp. SKA34
  CDS (1)..(279): transl_table=11
atgttgtgtgcaatctataaaagcttaaaaaaagataacacatatttatatgtaaataagaaagatgatttctccgatgtgcctgaagtattaatgaatacatttggtaaaccgcaatttgttatggtgataaagttagaagatagaaaattagccttggccgatgttgaaaaagtaaaagaagcattaaatactgttggcttctatcttcaggttccaccgccagtaacaaatttattggatcaatataaagccgaaaaagccggcagagctaattaa

SEQ ID NO: 76126 - protein, 92 aa, Photobacterium sp. SKA34
MLCAIYKSLKKDNTYLYVNKKDDFSDVPEVLMNTFGKPQFVMVIKLEDRKLALADVEKVKEALNTVGFYLQVPPPVTNLLDQYKAEKAGRAN

SEQ ID NO: 76127 - DNA, 288 bp, Oceanospirillum sp. MED92
  CDS (1)..(288): transl_table=11
atgaaaatctgctcggtttttttgagcttacgtaaagatgaaatgtatctttatgttgataaacgagatcatctgaagcgtgttccagaagcgctgatggagatgtttggcacaccaaaacatgtcatggatattcctttgactaaagatcgtgagctggcaagggtcgatgctgaaaaggtgctggcagagattgatgagaagggtttctatctgcagatgccacctcctaaggatgactatatgcttgatctacatcgtgatcgtccagagagtggtgtacgttaa

SEQ ID NO: 76128 - protein, 95 aa, Oceanospirillum sp. MED92
MKICSVFLSLRKDEMYLYVDKRDHLKRVPEALMEMFGTPKHVMDIPLTKDRELARVDAEKVLAEIDEKGFYLQMPPPKDDYMLDLHRDRPESGVR

SEQ ID NO: 76129 - DNA, 273 bp, marine gamma proteobacterium HTCC2207
  CDS (1)..(273): transl_table=11
atgaaaattgccggtaaagttctctgtgatatttataagaccgtgaagaaagaagagatgtatctttatgtcgcgcgggaagatggcaccaagcgggttcccgaggcgctgttaaatcaatttggcacaccagtgctggtaaccactatgctattggcagagacgaagaaactcgcgcgcgcggatgtagtgaaagtgatggatgatattggtcggcaggggttctatctgcagatgccaccgccgcctattccattgaaagagcagctctaa

SEQ ID NO: 76130 - protein, 90 aa, marine gamma proteobacterium HTCC2207
MKIAGKVLCDIYKTVKKEEMYLYVAREDGTKRVPEALLNQFGTPVLVTTMLLAETKKLARADVVKVMDDIGRQGFYLQMPPPPIPLKEQL

SEQ ID NO: 76131 - DNA, 282 bp, Alteromonadales bacterium TW-7
  CDS (1)..(282): transl_table=11
atgttaactgcggtatataaaagtaagaaaaagacggataccttcttatttgttgaaaaaagagatgattttagcaaagttccagaacctctaatggctatgtttggcaaacctcaatatgtgatgcttatcaacttagctaaacgtgagcacctaggtggtgcggatttggaaaccgttaagggtgcattaaccgatcaaggatactatttacaacttccaccaccggaagataatttgcttactgaactaagaaaacaaaatggagccgatcgtgattaa

SEQ ID NO: 76132 - protein, 93 aa, Alteromonadales bacterium TW-7
MLTAVYKSKKKTDTFLFVEKRDDFSKVPEPLMAMFGKPQYVMLINLAKREHLGGADLETVKGALTDQGYYLQLPPPEDNLLTELRKQNGADRD

SEQ ID NO: 76133 - DNA, 24 bp, Artificial sequence
  primer
atgccaaaacctggcatcttaaag

SEQ ID NO: 76134 - DNA, 25 bp, Artificial sequence
  primer
ttatttgttagtgtcgtctgttttc

SEQ ID NO: 76135 - protein, 73 aa, Artificial sequence
  consensus sequence
  Variant (2)..(2): Xaa in position 2 is any amino acid
  Variant (5)..(5): Xaa in position 5 is any amino acid
  Variant (7)..(12): Xaa in position 7 to 12 is any amino acid
  Variant (16)..(17): Xaa in position 16 to 17 is any amino acid
  Variant (19)..(19): Xaa in position 19 is any amino acid
  Variant (21)..(24): Xaa in position 21 to 24 is any amino acid
  Variant (27)..(28): Xaa in position 27 to 28 is any amino acid
  Variant (30)..(32): Xaa in position 30 to 32 is any amino acid
  Variant (35)..(35): Xaa in position 35 is any amino acid
  Variant (37)..(43): Xaa in position 37 to 43 is any amino acid
  Variant (45)..(48): Xaa in position 45 to 48 is any amino acid
  Variant (49)..(49): Xaa in position 49 is any or no amino acid
  Variant (51)..(57): Xaa in position 51 to 57 is any amino acid
  Variant (59)..(65): Xaa in position 59 to 65 is any amino acid
  Variant (67)..(68): Xaa in position 67 to 68 is any amino acid
  Variant (71)..(71): Xaa in position 71 is any amino acid
CXIYXSXXXXXXYLYXXKXDXXXXVPXXLXXXFGXPXXXXXXXLXXXXXLXXXXXXXVXXXXXXXGXXLQXPP

SEQ ID NO: 76136 - protein, 43 aa, Artificial sequence
  protein pattern
  Variant (2)..(2): Xaa in position 2 is any amino acid
  Variant (3)..(3): Xaa in position 3 is any or no amino acid
  Variant (5)..(7): Xaa in position 5 to 7 is any amino acid
  Variant (8)..(8): Xaa in position 8 is any or no amino acid
  Variant (11)..(11): Xaa in position 11 is Phe or Tyr
  Variant (12)..(12): Xaa in position 12 is Ile or Val
  Variant (13)..(13): Xaa in position 13 is any amino acid
  Variant (14)..(14): Xaa in position 14 is Lys or Arg
  Variant (15)..(15): Xaa in position 15 is any amino acid
  Variant (16)..(16): Xaa in position 16 is Asp or Lys
  Variant (17)..(17): Xaa in position 17 is any amino acid
  Variant (18)..(18): Xaa in position 18 is Phe or Leu
  Variant (19)..(20): Xaa in position 19 to 20 is any amino acid
  Variant (21)..(21): Xaa in position 21 is Ile, Leu or Val
  Variant (23)..(24): Xaa in position 23 to 24 is any amino acid
  Variant (26)..(28): Xaa in position 26 to 28 is any amino acid
  Variant (31)..(31): Xaa in position 31 is any amino acid
  Variant (32)..(32): Xaa in position 32 is Ala or Pro
  Variant (33)..(34): Xaa in position 33 to 34 is any amino acid
  Variant (35)..(35): Xaa in position 35 is Ala, Ser, Thr or Val
  Variant (36)..(37): Xaa in position 36 to 37 is any amino acid
  Variant (38)..(38): Xaa in position 38 is Phe, Ile, Leu or Val
  Variant (39)..(39): Xaa in position 39 is any amino acid
  Variant (40)..(40): Xaa in position 40 is Ile, Leu or Met
  Variant (41)..(42): Xaa in position 41 to 42 is any amino acid
  Variant (43)..(43): Xaa in position 43 is Asp, Glu, Lys or Arg
SXXKXXXXYLXXXXXXXXXXXPXXLXXXFGXXXXXXXXXXXXX

SEQ ID NO: 76137 - protein, 30 aa, Artificial sequence
  protein pattern
  Variant (2)..(3): Xaa in position 2 to 3 is any or no amino acid
  Variant (5)..(8): Xaa in position 5 to 8 is any amino acid
  Variant (9)..(10): Xaa in position 9 to 10 is any or no amino acid
  Variant (12)..(14): Xaa in position 12 to 14 is any amino acid
  Variant (15)..(15): Xaa in position 15 is Ile or Leu
  Variant (16)..(18): Xaa in position 16 to 18 is any amino acid
  Variant (20)..(20): Xaa in position 20 is Phe or Tyr
  Variant (21)..(21): Xaa in position 21 is Phe, His or Tyr
  Variant (24)..(24): Xaa in position 24 is Ile, Leu, Met or Val
  Variant (27)..(29): Xaa in position 27 to 29 is any amino acid
  Variant (30)..(30): Xaa in position 30 is Asp, Glu, Asn, Pro or Ser
LXXAXXXXXXVXXXXXXXGXXLQXPPXXXX

SEQ ID NO: 76138 - DNA, 279 bp, Escherichia coli
  CDS (1)..(279): transl_table=11
atgaaacgcaaaaacgcttcgttactcggtaacgtgctcatggggttgggtctggtggtaatggtggtcggcgtggggtattcaatcctcaaccagttaccacagtttaatatgccccagtatttcgcacatggtgcagtgctaagtattttcgtcggtgccattctctggctggcgggtgcccgtgttggcgggcatgaacaggtgtgcgaccgttactggtgggttcgccactatgacaaacgttgccgccgtagcgataatcgccgtcatagctaa

SEQ ID NO: 76139 - protein, 92 aa, Escherichia coli
MKRKNASLLGNVLMGLGLVVMVVGVGYSILNQLPQFNMPQYFAHGAVLSIFVGAILWLAGARVGGHEQVCDRYWWVRHYDKRCRRSDNRRHS

SEQ ID NO: 76140 - DNA, 276 bp, Photorhabdus luminescens subsp. laumondii TTO1
  CDS (1)..(276): transl_table=11
atgaaacgtcaaagtgccttcatagtcggtaatgtattgatgggtgtcggtatgttcaccatagtgagtagcctggtttatacattactgcctcacatcttcggttttggctggcctgagtttttatctgaagcagcgctattgggcgtttttattggtgcgcttgtttggttggctggtgccggtgtgggaggccgggaaggtgtggcagatcgttattggtggctaagaaactatgatgagcgttatcgtcgtggtagtcatcggtatccataa

SEQ ID NO: 76141 - protein, 91 aa, Photorhabdus luminescens subsp. laumondii TTO1
MKRQSAFIVGNVLMGVGMFTIVSSLVYTLLPHIFGFGWPEFLSEAALLGVFIGALVWLAGAGVGGREGVADRYWWLRNYDERYRRGSHRYP

SEQ ID NO: 76142 - DNA, 270 bp, Erwinia carotovora subsp. atroseptica SCRI1043
  CDS (1)..(270): transl_table=11
atgaaacgcaagaatgtggcagcattgggtaatgtgttgatggggcttggtatgattctgatgattggtggtattggcttctccatcgctagtcagtttcctaagctgaatgtccctgaatatatgacttacattgacttggttggtatcttttctggcgcaatattttggttggtgggggcgcgtattagcgggcgtgaagaagtcgcagaccgttattggtgggttaaacactttgataagcgttgccgccgccagcgtcacccataa

SEQ ID NO: 76143 - protein, 89 aa, Erwinia carotovora subsp. atroseptica SCRI1043
MKRKNVAALGNVLMGLGMILMIGGIGFSIASQFPKLNVPEYMTYIDLVGIFSGAIFWLVGARISGREEVADRYWWVKHFDKRCRRQRHP

SEQ ID NO: 76144 - DNA, 273 bp, Yersinia pseudotuberculosis IP 32953
  CDS (1)..(273): transl_table=11
atgaaacgtaagagcgcaacagtactgggtaatatgctgatggggttgggtttagccacaatggttgttggagtaggttattcaatattaaccgaaatctccgaacttggtttacctcaattttttgcccacggtgccatcatgagtatctttgtcggtgcattgctgtggttagccggtgcgcgtatcggtggtcgagaagccgttgctgatcgctattggtgggttaagcactttgataagcgttgtaccaagaatcaacgtcactcatag

SEQ ID NO: 76145 - protein, 90 aa, Yersinia pseudotuberculosis IP 32953
MKRKSATVLGNMLMGLGLATMVVGVGYSILTEISELGLPQFFAHGAIMSIFVGALLWLAGARIGGREAVADRYWWVKHFDKRCTKNQRHS

SEQ ID NO: 76146 - DNA, 25 bp, Artificial sequence
  primer
atgaaacgcaaaaacgcttcgttac

SEQ ID NO: 76147 - DNA, 22 bp, Artificial sequence
  primer
ttagctatgacggcgattatcg

SEQ ID NO: 76148 - protein, 90 aa, Artificial sequence
  consensus sequence
  Variant (4)..(9): Xaa in position 4 to 9 is any amino acid
  Variant (12)..(12): Xaa in position 12 is any amino acid
  Variant (16)..(16): Xaa in position 16 is any amino acid
  Variant (18)..(38): Xaa in position 18 to 38 is any amino acid
  Variant (40)..(50): Xaa in position 40 to 50 is any amino acid
  Variant (52)..(52): Xaa in position 52 is any amino acid
  Variant (55)..(56): Xaa in position 55 to 56 is any amino acid
  Variant (59)..(59): Xaa in position 59 is any amino acid
  Variant (62)..(64): Xaa in position 62 to 64 is any amino acid
  Variant (66)..(66): Xaa in position 66 is any amino acid
  Variant (68)..(68): Xaa in position 68 is any amino acid
  Variant (70)..(70): Xaa in position 70 is any amino acid
  Variant (76)..(79): Xaa in position 76 to 79 is any amino acid
  Variant (81)..(81): Xaa in position 81 is any amino acid
  Variant (83)..(86): Xaa in position 83 to 86 is any amino acid
  Variant (87)..(89): Xaa in position 87 to 89 is any or no amino acid
MKRXXXXXXGNXLMGXGXXXXXXXXXXXXXXXXXXXXXPXXXXXXXXXXXFXGAXXWLXGAXXXGXEXVXDRYWWXXXXDXRXXXXXXXR

SEQ ID NO: 76149 - protein, 56 aa, Artificial sequence
  protein pattern
  Variant (2)..(3): Xaa in position 2 to 3 is any amino acid
  Variant (4)..(9): Xaa in position 4 to 9 is any or no amino acid
  Variant (11)..(11): Xaa in position 11 is Glu or Gln
  Variant (12)..(12): Xaa in position 12 is Phe or Tyr
  Variant (13)..(13): Xaa in position 13 is Phe, Leu or Met
  Variant (14)..(14): Xaa in position 14 is Ala, Ser or Thr
  Variant (15)..(15): Xaa in position 15 is any amino acid
  Variant (16)..(16): Xaa in position 16 is Ala, Gly or Ile
  Variant (17)..(17): Xaa in position 17 is Ala or Asp
  Variant (18)..(18): Xaa in position 18 is Ile, Leu or Val
  Variant (19)..(19): Xaa in position 19 is Leu, Met or Val
  Variant (20)..(20): Xaa in position 20 is Gly or Ser
  Variant (21)..(21): Xaa in position 21 is Ile or Val
  Variant (23)..(23): Xaa in position 23 is any amino acid
  Variant (26)..(26): Xaa in position 26 is Ile or Leu
  Variant (27)..(27): Xaa in position 27 is Phe, Leu or Val
  Variant (30)..(30): Xaa in position 30 is Ala or Val
  Variant (33)..(33): Xaa in position 33 is any amino acid
  Variant (34)..(34): Xaa in position 34 is Ile or Val
  Variant (35)..(35): Xaa in position 35 is Gly or Ser
  Variant (37)..(37): Xaa in position 37 is His or Arg
  Variant (39)..(39): Xaa in position 39 is Ala, Glu, Gly or Gln
  Variant (41)..(41): Xaa in position 41 is Ala or Cys
  Variant (47)..(47): Xaa in position 47 is Leu or Val
  Variant (48)..(48): Xaa in position 48 is Lys or Arg
  Variant (49)..(49): Xaa in position 49 is any amino acid
  Variant (50)..(50): Xaa in position 50 is Phe or Tyr
  Variant (52)..(52): Xaa in position 52 is Glu or Lys
  Variant (54)..(55): Xaa in position 54 to 55 is any amino acid
  Variant (56)..(56): Xaa in position 56 is Lys or Arg
LXXXXXXXXPXXXXXXXXXXXFXGAXXWLXGAXXXGXEXVXDRYWWXXXXDXRXXX

SEQ ID NO: 76150 - protein, 21 aa, Artificial sequence
  protein pattern
  Variant (4)..(4): Xaa in position 4 is any amino acid
  Variant (5)..(5): Xaa in position 5 is Asn or Ser
  Variant (6)..(6): Xaa in position 6 is Ala or Val
  Variant (7)..(7): Xaa in position 7 is any amino acid
  Variant (8)..(8): Xaa in position 8 is Ala, Ile, Leu or Val
  Variant (9)..(9): Xaa in position 9 is Leu or Val
  Variant (12)..(12): Xaa in position 12 is Met or Val
  Variant (16)..(16): Xaa in position 16 is Leu or Val
  Variant (18)..(20): Xaa in position 18 to 20 is any or no amino acid
MKRXXXXXXGNXLMGXGXXXM

SEQ ID NO: 76151 - DNA, 102 bp, Escherichia coli
  CDS (1)..(102): transl_table=11
atgcggggaaggatgagaagcttcgaccaaggttcgactcgagcgccagcgagagagcgttgccgcaggcaacgacccgaagggcgaagcgcgcagcgctaa

SEQ ID NO: 76152 - protein, 33 aa, Escherichia coli
MRGRMRSFDQGSTRAPARERCRRQRPEGRSAQR

SEQ ID NO: 76153 - DNA, 90 bp, Escherichia coli
  CDS (1)..(90): transl_table=11
atgagaagcttcgaccaaggttcgactcgagcgccagcgagagagcgttgccgcaggcaacgacccgaagggcgaagcgcgcagcgctga

SEQ ID NO: 76154 - protein, 29 aa, Escherichia coli
MRSFDQGSTRAPARERCRRQRPEGRSAQR

SEQ ID NO: 76155 - DNA, 20 bp, Artificial sequence
  primer
atgcggggaaggatgagaag

SEQ ID NO: 76156 - DNA, 21 bp, Artificial sequence
  primer
ttagcgctgcgcgcttcgccc

SEQ ID NO: 76157 - DNA, 1362 bp, Escherichia coli
  CDS (1)..(1362): transl_table=11
atgatgcaaaccgttttagcgaaaatcgtcgcagacaaggcgatttgggtagaagcccgcaaacagcagcaaccgctggccagttttcagaatgaggttcagccgagcacgcgacatttttatgatgcgctacagggtgcgcgcacggcgtttattctggagtgcaagaaagcgtcgccgtcaaaaggcgtgatccgtgatgatttcgatccagcacgcattgccgccatttataaacattacgcttcggcaatttcggtgctgactgatgagaaatattttcaggggagctttaatttcctccccatcgtcagccaaatcgccccgcagccgattttatgtaaagacttcattatcgacccttaccagatctatctggcgcgctattaccaggccgatgcctgcttattaatgctttcagtactggatgacgaccaatatcgccagcttgccgccgtcgctcacagtctggagatgggggtgctgaccgaagtcagtaatgaagaggaacaggagcgcgccattgcattgggagcaaaggtcgttggcatcaacaaccgcgatctgcgtgatttgtcgattgatctcaaccgtacccgcgagcttgcgccgaaactggggcacaacgtgacggtaatcagcgaatccggcatcaatacttacgctcaggtgcgcgagttaagccacttcgctaacggttttctgattggttcggcgttgatggcccatgacgatttgcacgccgccgtgcgccgggtgttgctgggtgagaataaagtatgtggcctgacgcgtgggcaagatgctaaagcagcttatgacgcgggcgcgatttacggtgggttgatttttgttgcgacatcaccgcgttgcgtcaacgttgaacaggcgcaggaagtgatggctgcggcaccgttgcagtatgttggcgtgttccgcaatcacgatattgccgatgtggtggacaaagctaaggtgttatcgctggcggcagtgcaactgcatggtaatgaagaacagctgtatatcgatacgctgcgtgaagctctgccagcacatgttgccatctggaaagcattaagcgtcggtgaaaccctgcccgcccgcgagtttcagcacgttgataaatatgttttagacaacggccagggtggaagcgggcaacgttttgactggtcactattaaatggtcaatcgcttggcaacgttctgctggcggggggcttaggcgcagataactgcgtggaagcggcacaaaccggctgcgccggacttgattttaattctgctgtagagtcgcaaccgggcatcaaagacgcacgtcttttggcctcggttttccagacgctgcgcgcatattaa

SEQ ID NO: 76158 - protein, 453 aa, Escherichia coli
MMQTVLAKIVADKAIWVEARKQQQPLASFQNEVQPSTRHFYDALQGARTAFILECKKASPSKGVIRDDFDPARIAAIYKHYASAISVLTDEKYFQGSFNFLPIVSQIAPQPILCKDFIIDPYQIYLARYYQADACLLMLSVLDDDQYRQLAAVAHSLEMGVLTEVSNEEEQERAIALGAKVVGINNRDLRDLSIDLNRTRELAPKLGHNVTVISESGINTYAQVRELSHFANGFLIGSALMAHDDLHAAVRRVLLGENKVCGLTRGQDAKAAYDAGAIYGGLIFVATSPRCVNVEQAQEVMAAAPLQYVGVFRNHDIADVVDKAKVLSLAAVQLHGNEEQLYIDTLREALPAHVAIWKALSVGETLPAREFQHVDKYVLDNGQGGSGQRFDWSLLNGQSLGNVLLAGGLGADNCVEAAQTGCAGLDFNSAVESQPGIKDARLLASVFQTLRAY

SEQ ID NO: 76159 - DNA, 1434 bp, Haemophilus influenzae
  CDS (1)..(1434): transl_table=11
atgatgatcactcaagattttaccaaacccattgattccgctacggtgctacaaaaaatcgtgcttgataaagcacaatgggttaaagcaaaagaaaaggaatttcccctttcacaatttaaacaaaacattcaaaactctgaccgctctttttatgatgcgttagcaaaaggtacgcatcaaaagcccgcttacattttggaatgtaaaaaagcctccccttctaagggattaattcgtgctgaatttaatttggaagaaatcgccaatgtctataaacattatgcgtccgctgtatctgttctgacagatgaaaaatactttcaagggaattttgaattcttgcctttagttcgcgatatcgtaagccaacctgtgctttgcaaagattttatgattagcgaatatcaagtttaccttgctcgctactatcaagtggatgcaattttattaatgctttctgtggtaaatgatgagacttatcgtgtgctggcagatcttgctcattctcttggtatgggcgtattgacagaaaccagtaatgaagaagaatttgaacgtgcccttgcacttggtgcgaaaattattggtgtcaataatcgtaacttgcacgatttaacagtagatttaaatcgtgttgttgaactcactaaaaaatacgccgactgtattcctgctgatgtacgtattattagcgaatcaggcatttacaatcacaagcaaattcatcaattacaaaaggtggcgcatggtttcttaattgggagtagcttaatgggcaaccaagatttgaataatgcggttcgctcagtgatttttggagaaaataaagtatgcggtttaacgcgcgcgcaagatgtcaaaatcgtttacgaaaacggggcactttacggcggattaatcttcgcagaacattcaaaacgcagtgtgagtttacgccaagcgcaagaattagtaaccgctgcgccacttcgatttgttggtgtttttcagaatcaagaaattgactttatcgtcaaaatagccagccagttgcagctttatgcggtgcaattacatggtgcagaaactgaagcatttattactgcacttcgccagcaactaccaaaaaacacgcaaatctggaaagcgatttcggtcaatactgaagcccaaagtgcggtcgattttacagatgatttgaatgtggatcgttatatttttgatagccaaacagcgaaccaacaaggtggcacgggtaaaacctttgattggtcattaattcctgaaaatcttaaacacaagattattttagctggaggtatctcaccaaataatgtggaacaagccattgcgcaaggttgcttaggtttagatcttaattctggggtggaaagttctgcgggcgtcaaagatcaagaaaaagtgcggttagtttttaataatatttattaa

SEQ ID NO: 76160 - protein, 477 aa, Haemophilus influenzae
MMITQDFTKPIDSATVLQKIVLDKAQWVKAKEKEFPLSQFKQNIQNSDRSFYDALAKGTHQKPAYILECKKASPSKGLIRAEFNLEEIANVYKHYASAVSVLTDEKYFQGNFEFLPLVRDIVSQPVLCKDFMISEYQVYLARYYQVDAILLMLSVVNDETYRVLADLAHSLGMGVLTETSNEEEFERALALGAKIIGVNNRNLHDLTVDLNRVVELTKKYADCIPADVRIISESGIYNHKQIHQLQKVAHGFLIGSSLMGNQDLNNAVRSVIFGENKVCGLTRAQDVKIVYENGALYGGLIFAEHSKRSVSLRQAQELVTAAPLRFVGVFQNQEIDFIVKIASQLQLYAVQLHGAETEAFITALRQQLPKNTQIWKAISVNTEAQSAVDFTDDLNVDRYIFDSQTANQQGGTGKTFDWSLIPENLKHKIILAGGISPNNVEQAIAQGCLGLDLNSGVESSAGVKDQEKVRLVFNNIY

SEQ ID NO: 76161 - DNA, 1362 bp, Escherichia coli O157:H7 EDL933
  CDS (1)..(1362): transl_table=11
atgatgcaaaccgttttagcgaaaatcgtcgcagacaaggcgatttgggtagaagcccgcaaacagcagcaaccgctggccagttttcagaatgaggttcagccgagcacgcgacatttttatgatgcgctacagggtgcgcgcacggcgtttattctggagtgcaagaaagcgtcgccgtcaaaaggcgtgatctgtgatgatttcgatccagcacgcattgccgccatttataaacattacgcttcggcaatttcggtgctgactgatgagaaatattttcaggggagctttgatttcctccccatcgtcagccaaatcgccccgcagccgattttatgtaaagacttcattatcgacccttaccagatctatctggcgcgctattaccaggccgatgcctgcttattaatgctttcagtactggatgacgaacaatatcgccagcttgccgccgtcgcccacagtctgaagatgggtgtgctgaccgaagtcagtaatgaagaggaactggagcgcgccattgcattgggggcaaaggtcgttggcatcaacaaccgcgatctgcgtgatttgtcgattgatctcaaccgtacccgcgagcttgcgccgaaactggggcacaacgtgacggtaatcagcgaatcaggcatcaatacttacgctcaggtgcgcgagttaagccacttcgctgacggttttctaattggttcggcgttgatggcccatgacgatttgcacgccgccgtgcgtcgggtgttgctgggtgagaataaagtatgtggcctgacgcgtgggcaagatgctaaagcagcgtacgacgcgggcgcgatttacggtgggttgatttttgttgcgacatcaccgcgttgcgtcaacgttgaacaggcgcaggaagtgatggctgcggcaccgttgcagtatgttggcgtgttccgcaatcacgatattgccgatgtgctggacaaagctaaggtgttatcactggtggcagtgcaactgcatggtaatgaagatcagctgtatatcgatacgctgcgtgaagctctgccagcacacgttgccatctggaaagcattaagcgtcggtgaaaccctgcccgcccgcgagcttcagcacgttgataaatatgttttagacaacggccagggtggaagcgggcaacgtttcgactggtcactattaaatggtcaatcgcttggcaacgttctgctggcggggggcttaggcgcagataactgcgtggaagcggcacaaaccggctgcgccggacttgattttaattctgctgtagagtcgcaaccgggcatcaaagacgcacgtcttttggcctcggttttccagacgctgcgcgcatattaa

SEQ ID NO: 76162 - protein, 453 aa, Escherichia coli O157:H7 EDL933
MMQTVLAKIVADKAIWVEARKQQQPLASFQNEVQPSTRHFYDALQGARTAFILECKKASPSKGVICDDFDPARIAAIYKHYASAISVLTDEKYFQGSFDFLPIVSQIAPQPILCKDFIIDPYQIYLARYYQADACLLMLSVLDDEQYRQLAAVAHSLKMGVLTEVSNEEELERAIALGAKVVGINNRDLRDLSIDLNRTRELAPKLGHNVTVISESGINTYAQVRELSHFADGFLIGSALMAHDDLHAAVRRVLLGENKVCGLTRGQDAKAAYDAGAIYGGLIFVATSPRCVNVEQAQEVMAAAPLQYVGVFRNHDIADVLDKAKVLSLVAVQLHGNEDQLYIDTLREALPAHVAIWKALSVGETLPARELQHVDKYVLDNGQGGSGQRFDWSLLNGQSLGNVLLAGGLGADNCVEAAQTGCAGLDFNSAVESQPGIKDARLLASVFQTLRAY

SEQ ID NO: 76163 - DNA, 1362 bp, Shigella flexneri 2a str. 301
  CDS (1)..(1362): transl_table=11
atgatgcaaaccgttttagcgaaaatcgtcgcagacaaggcgatttgggtagaaacccgcaaacagcagcaaccgctggccagttttcagaatgaggttcagccgagcacacgacatttttatgatgcgctacagggtgcacgcacggcgtttattctggagtgtaaaaaagcgtcgccgtcaaaaggcgtgatccgtgatgatttcgatccggcacgcattgccgccatttataaacattacgcttcggcaatttcggtgctgactgatgagaaatattttcaggggagctttgatttcctcctcatcgtcagccaaatcgccccgcagccgattttatgtaaagacttcattatcgacccttaccagatctatctggcgcgctattaccaggccgatgcctgcttattaatgctttcagtactggatgacgaccaatatcgccagcttgcagccgtcgctcacagtctggagatgggggtgctgaccgaagtcagtaatgaagaggaactggagcgcgccattgcattaggggcaaaggtcgttggcatcaacaaccgcgatctgcgtgatttgtcgattgatctcaaccgtacccgcgagcttgcgccgaaactggggcacaacgtaacggtaatcagcgaatccggcatcaatacttacgctcaggtgcgcgagttaagccacttcgctaacggttttctgattggttcggcgttgatggcccatgacgatttgcacgccgccgtgcgccgggtgttgctgggtgagaataaagtatgtggcctgacgcgtgggcaagatgctaaagcagcttatgacgcgggcgcgatttacggtgggttgatttttgttgcgacatcaccgcgttgcgtcaacgttgaacaggcgcaggaagtgatggctgcggcaccgttgcagtatgttggcgtgttccgcaatcacgatattgccgatgtggtggacaaagctaaggtgttatcgctggcggcagtgcaactgcatggcaatgaagatcagctgtatatcgatacgctgcgtgaagctctgccagcacatgttgccatctggaaagcattaagcgtcggtgaaaccctgcccgcccgcgagtttcagcacgttgataaatatgttttagacaacggccagggtggaagcgggcaacgttttgactggtcactattaaatggtcaatcgcttggcaacgttctgctggcggggggcttaggcgcagataactgcgtggaagcggcacaaaccggctgcgccggacttgattttaattctgctgtagagtcgcaaccgggcatcaaagacgcacgtcttttggcctcggttttccagacgctgcgcgcatattaa

SEQ ID NO: 76164 - protein, 453 aa, Shigella flexneri 2a str. 301
MMQTVLAKIVADKAIWVETRKQQQPLASFQNEVQPSTRHFYDALQGARTAFILECKKASPSKGVIRDDFDPARIAAIYKHYASAISVLTDEKYFQGSFDFLLIVSQIAPQPILCKDFIIDPYQIYLARYYQADACLLMLSVLDDDQYRQLAAVAHSLEMGVLTEVSNEEELERAIALGAKVVGINNRDLRDLSIDLNRTRELAPKLGHNVTVISESGINTYAQVRELSHFANGFLIGSALMAHDDLHAAVRRVLLGENKVCGLTRGQDAKAAYDAGAIYGGLIFVATSPRCVNVEQAQEVMAAAPLQYVGVFRNHDIADVVDKAKVLSLAAVQLHGNEDQLYIDTLREALPAHVAIWKALSVGETLPAREFQHVDKYVLDNGQGGSGQRFDWSLLNGQSLGNVLLAGGLGADNCVEAAQTGCAGLDFNSAVESQPGIKDARLLASVFQTLRAY

SEQ ID NO: 76165 - DNA, 1410 bp, Shewanella oneidensis MR-1
  CDS (1)..(1410): transl_table=11
atgcaaaccagtaccacccaggcgaatgtcttaacccgtattgtcgacactaaagccgcccatattgcagcccttaaactgcgttttcctgaggcaagcttagtccccaaagtctctgaccgaagcctatttgccgccctcaaagcgccgaaggcgggttatattttagaatgcaaaaaagccagcccctccaaagggttaatccgtaaagactttgatgtcgaagccatcgcatcgatttatacaaaatatgccgcggggatctcggtattaaccgatgagcaatttttccaaggtgatatggactatatccctaaagtgcgagcaaaagtgagccaaccgattctgtgtaaagacttttttgttgatgagtaccaagtcaaattggctgcccatcaaggcgccgatgcgattctgttaatgctctctgtgctcgatgatgagcgataccagcaacttgccagcgaagcggccaagtatcaactcgatgtactgacagagatcagcaatgaagaagaacttaagcgcgccatcgccttgaatgcaccgattattggcattaataaccgtaacttacgagatttaagtaccgatcttgccaccactgaggccttagcgccccatattggcagtgatcgcgtggttatcagcgaatcgggtatttacactaacgatcaagtgcgtcgcttaagcccactggtcgatggcttcttggtaggtagctcaattatggccgaagaagatattgatttagcctgtcgtaaattgatcttcggtcacaataaagtctgcggcctcactcgccttgaggatattgaagcggcggccaatgcgggcgccgtttatgcaggactcatttttgctgaaaaatcaccacgcgcactcacaaaagatgccgccaaacagttagtcgagcaataccgcgcagccaaattgcccgccattgaatttgttggggtatttgttaacaacacgcctaagctaatcgcaagtattgccaaagcatgtgatttggccgcagtgcaactgcacggcagtgaaaccgagttagaaattactgagctgagccaattgttacaacaagcaggacttaagactcacatttggaaagcggtcagtgttgacgccaccagcggcgaactcggtgccatgccaaaaggagtacagcgttatctgtttgatagtaaaaataatgcagggtttggtggcacggggcagccctttaattggcacttacctcttgcccataaagcaaaagccttactggcgggcggtcttaatgcagctaatgccgccaacgcgaatgcccaaggattttacggtttagattttaattccggcctcgaaaccgcccccggcattaaatctgcagaacagatccaaacagcctttgcccaattaaggctctga

SEQ ID NO: 76166 - protein, 469 aa, Shewanella oneidensis MR-1
MQTSTTQANVLTRIVDTKAAHIAALKLRFPEASLVPKVSDRSLFAALKAPKAGYILECKKASPSKGLIRKDFDVEAIASIYTKYAAGISVLTDEQFFQGDMDYIPKVRAKVSQPILCKDFFVDEYQVKLAAHQGADAILLMLSVLDDERYQQLASEAAKYQLDVLTEISNEEELKRAIALNAPIIGINNRNLRDLSTDLATTEALAPHIGSDRVVISESGIYTNDQVRRLSPLVDGFLVGSSIMAEEDIDLACRKLIFGHNKVCGLTRLEDIEAAANAGAVYAGLIFAEKSPRALTKDAAKQLVEQYRAAKLPAIEFVGVFVNNTPKLIASIAKACDLAAVQLHGSETELEITELSQLLQQAGLKTHIWKAVSVDATSGELGAMPKGVQRYLFDSKNNAGFGGTGQPFNWHLPLAHKAKALLAGGLNAANAANANAQGFYGLDFNSGLETAPGIKSAEQIQTAFAQLRL

SEQ ID NO: 76167 - DNA, 1470 bp, Corynebacterium efficiens YS-314
  CDS (1)..(1470): transl_table=11
atgacggcaccgtcgccgactggctcaagactcacgaggagattgattaccgtggctaacatgcccaccgttctggagagcatcgtcgagggtcgtcgtggacacctcgaggagatccgcgcccgcatcgcccatgtggatgtggaggcgctgcccgcatcgacccgttcactgtatgactccctgaaccagggtaggggaggggcccgcttcatcatggagtgcaagtccgcgtccccctcgctcggcatgatccgtgagcactaccagccgggtgacatcgcgcggatctactcccgcttcgccagcggcatctccgtgctgtgcgaaccggaccgtttcggcggcgactatgaccacctggcgaccgtttccgcgtcgacgcacctgccggtgctgtgcaaggatttcgtgatcgacaaggtgcaggtgcacgccgcgcgctactacggagcggacgcgatcctgttgatgctgtccgtgcttgacgacgccgcctacaccgaactcgccaccgaggccgagcgcttcggcctggatgtgctcaccgaggtgatcgacgaggaggaggtggagcgtgccatcaaactgggtgcgaagatcttcggcgtcaaccaccgaaacctccacgacctctccatcgatctcgaccgctcggggcgtctggccaagctcatcccggccgacgcggtgctcatctccgagtccggtgtgcgcgacaatgagaccgtgcgccagctcggtggccactcccatggcttcctcgtgggctcccagctgaccggtcagcccgatgtggaactggccgcgcgggaactggtctacggcaccaataaggtgtgcgggctgacctcaccgaccgccgcccagacggcccgggcagccggtgcgacccacggcgggctcatcttcgaggaagcctcaccccgcaatgtttcacgtgaaacatccgccaagatcatcgccgcggaacccggtctgcgttatgtggcggtcagccgccggacctccgggtacggcgaactgatccaggacggcatcgccgccgtccagatccacgcgccactgcaggattccgtcgacgcggaactcgctctcgtggacgccgtccgcgccgaggtcggccccgaggttgaggtttggcgtgcggtgtcgatgacctccgaactcggcccggagatcgccgtggctctgaccgacaaggtcaaccgtctcgtgctcgatgcgcaccagggtggcagcggcgagtccttcgactggtccaccatcccgcccgaggtccgttcctccgctctgctggccggcggcatctccccgggcaatgcggccgatgccctctccgtgggctgcggcggtctggacatcaactccggtgtggagtacccggccggggcaggggagtgggcgggcgccaaggacgccggcgcgatcctcaagatcttctccaccatccgcaccttccattactag

SEQ ID NO: 76168 - protein, 489 aa, Corynebacterium efficiens YS-314
MTAPSPTGSRLTRRLITVANMPTVLESIVEGRRGHLEEIRARIAHVDVEALPASTRSLYDSLNQGRGGARFIMECKSASPSLGMIREHYQPGDIARIYSRFASGISVLCEPDRFGGDYDHLATVSASTHLPVLCKDFVIDKVQVHAARYYGADAILLMLSVLDDAAYTELATEAERFGLDVLTEVIDEEEVERAIKLGAKIFGVNHRNLHDLSIDLDRSGRLAKLIPADAVLISESGVRDNETVRQLGGHSHGFLVGSQLTGQPDVELAARELVYGTNKVCGLTSPTAAQTARAAGATHGGLIFEEASPRNVSRETSAKIIAAEPGLRYVAVSRRTSGYGELIQDGIAAVQIHAPLQDSVDAELALVDAVRAEVGPEVEVWRAVSMTSELGPEIAVALTDKVNRLVLDAHQGGSGESFDWSTIPPEVRSSALLAGGISPGNAADALSVGCGGLDINSGVEYPAGAGEWAGAKDAGAILKIFSTIRTFHY

SEQ ID NO: 76169 - DNA, 1377 bp, Candidatus Blochmannia floridanus
  CDS (1)..(1377): transl_table=11
atgtcatatactatacttgatcaaattgttttctataaaaaaaactggatattaaataaacaaaaaaaaatatctataaatactttgaaatctaatatccaaattagtgaacgtaatttttacaaatctatatataataataaaaatagaccattttttatatttgaatacaaacctgcttccccttccaaggggattattcatcataatcctaatcctattaacattgctcatatttataaaaattatgctaccatcatttctgtagtaacagatgaaaaatattttcatggacattttaatattcttactcaaatacgtaatgttgtaactcaacctatattatgcaaggatttttttatttcagaatggcaagtctattttgcacgatttcacaaagcagatgcaatcttattaatgttatccataatagataataatatgtatcgtagactgactcatattgcgcattccttgaacatgggtgttttaacagaaatcacaaatgaacaggagttaaatcgagccatattattaaatgctaaagtaattggaatcaataatcgtaatttacatgatttatctattgatttacatcgaactattcatttaagtaaaaatattccaaattcaattatcaaaattagcgaatctggtattaataaatatcataccattaaacaacttcaacaatatgtaaacggattcttaattggaacaattttaatgtcatcccaacaattattatatatgacaattaataaattaatattaggagaaaataaaatttgtggacttacaagaatcgaagatgctaatatttcttacaaatcaggagcgatatatggaggactaatttttgttaaaaattctccacgctatataaatatgctaactgcaactaatattacatctactgttcacaatctatattatgttggtgtattttgtaatgaaaaaatttacaatatcattaatatagtaaaaacattaaatttatctgttgtgcaactacatggatcagaagatcaatcttatattaatcagctacgtacatatttaccaaatacttgtaaaatatggaaaagtataaatatgaatatcaaaccatcatctatgattaatttattaaatgtagatcgttatttattagataataaaattggaggatctggaaaaacttttaactggaataatataattaatatcaacataaataaatcaattttatcaggaggtttaacaataaacaattgtttaaaagcatctaaattaggttgctcaggattagattttaattctggaatagaaattcaaccaggaattaaagatcatcaagcaatcaaaaaaatatttcaaatattacgcaatcattaa

SEQ ID NO: 76170 - protein, 458 aa, Candidatus Blochmannia floridanus
MSYTILDQIVFYKKNWILNKQKKISINTLKSNIQISERNFYKSIYNNKNRPFFIFEYKPASPSKGIIHHNPNPINIAHIYKNYATIISVVTDEKYFHGHFNILTQIRNVVTQPILCKDFFISEWQVYFARFHKADAILLMLSIIDNNMYRRLTHIAHSLNMGVLTEITNEQELNRAILLNAKVIGINNRNLHDLSIDLHRTIHLSKNIPNSIIKISESGINKYHTIKQLQQYVNGFLIGTILMSSQQLLYMTINKLILGENKICGLTRIEDANISYKSGAIYGGLIFVKNSPRYINMLTATNITSTVHNLYYVGVFCNEKIYNIINIVKTLNLSVVQLHGSEDQSYINQLRTYLPNTCKIWKSINMNIKPSSMINLLNVDRYLLDNKIGGSGKTFNWNNIINININKSILSGGLTINNCLKASKLGCSGLDFNSGIEIQPGIKDHQAIKKIFQILRNH

SEQ ID NO: 76171 - DNA, 1365 bp, Photorhabdus luminescens subsp. laumondii TTO1
  CDS (1)..(1365): transl_table=11
atgcaagctaccattttacagaaaattgttaatgataaagccgaatatcttattcatcgtaaacagcaacaaccattggaaagttttattaatgctgttgttgccagcaaccgtcatttttatcaggcactaaacagtgaacagaccgtttttattctggaatgtaaaaaggcatctccttctaaaggcgttattcgccaagattttgatccaattcaaatagcgaaaatttatcagccctatgcaaccgccatctctgtattaaccgatgaaaaatattttcaaggcaactatgaatttcttcgtttagtcagtgatgccgttcaccagccggtattgtgcaaagattttattatcgatccttatcaggtttatcttgcccgctattatcaagccgatgcgattttgctgatgctttctgttcttgatgatcagcaatatattacgctgtctgaacttgcgcatagcctgaatatgggcgtcctgactgaaatcagctcagaagaagagcgagccagagcggttgcactaaaagctaaagtaataggtatcaataaccgtgatctgagagatctttctatcgatttaaaccgtaccaaacaacttgcgccacagttaccggaagaaactattgttattagcgaatcgggtatccaccagcatcaacaaattcgtgagcttagccattatgctaatggctttctcattggcagtgctttgatggctcaacccaatctggatttagcattacgtcaactgattctgggtgaaaataaagtctgtggattaactcggccacaagatgcgaaagtggcattacaggcaggtgctgtttatggtggtttgatatttgctgaacattcaccgcgtaaaattaatatccaacaggcccaacaaattatcaatgcagcaaatctcaaatatgtcggggtatttcaaaatcaatcatctgcattcatcagtcataccgcccgtatcctttctctggctgcggtgcaattacatggtgccgaaggcgaagtttatattgaggaattgcgaaaaatattgcctgaaaattgtcaaatctggaaagcaattgatatgtcgaaagatgaatttcacaccaaagccggaaatgttgaccgttatttacttgataacggcaaaggtggaaccggccaaagtttcgattggcaattacttgaaaaacaatcactcgccaacatcatgctcgccggtggattaaatgaagaaaattgccaacaagccgcaaaatatggctgttgcggacttgattttaactctggcgtcgaaaacgcacctggcattaaaagcagtcataaactaaataaggtgtttcaactgttacgctgttaccaataa

SEQ ID NO: 76172 - protein, 454 aa, Photorhabdus luminescens subsp. laumondii TTO1
MQATILQKIVNDKAEYLIHRKQQQPLESFINAVVASNRHFYQALNSEQTVFILECKKASPSKGVIRQDFDPIQIAKIYQPYATAISVLTDEKYFQGNYEFLRLVSDAVHQPVLCKDFIIDPYQVYLARYYQADAILLMLSVLDDQQYITLSELAHSLNMGVLTEISSEEERARAVALKAKVIGINNRDLRDLSIDLNRTKQLAPQLPEETIVISESGIHQHQQIRELSHYANGFLIGSALMAQPNLDLALRQLILGENKVCGLTRPQDAKVALQAGAVYGGLIFAEHSPRKINIQQAQQIINAANLKYVGVFQNQSSAFISHTARILSLAAVQLHGAEGEVYIEELRKILPENCQIWKAIDMSKDEFHTKAGNVDRYLLDNGKGGTGQSFDWQLLEKQSLANIMLAGGLNEENCQQAAKYGCCGLDFNSGVENAPGIKSSHKLNKVFQLLRCYQ

SEQ ID NO: 76173 - DNA, 1431 bp, Vibrio vulnificus YJ016
  CDS (1)..(1431): transl_table=11
atgatgacaaacagcaacgaaaaactgtcagaacacgtttctctgcaggaagcacaaatggcggaagtcctagccaagatagtgcgcgataaataccagtgggtagccgagcgtaaacacgcgcaaccattggccagttttcaagccacattgacaccatcggatcgcagcttttaccaagccttgcagggccaacgcacggtattcattaccgaatgtaagaaagcctccccatcgaagggattgatccgtgaagatttcgacttggattacatcgcgtcggtgtacaaccaccacgcagatgcgatttcggtactcaccgatgagaaatacttccaaggcagcttcgactttctgccccgagtgcgtcagcaagtgcgccagcctgtgttgtgtaaagattttatggtcgatagctatcaagtttatctcgctcgtcactatcaagccgacgccattttattgatgttgtcagtcctcaatgacgagcaatatcaaacactggcggatgttgcccaccagttgcaaatgggtgtgctgacagaaatcagtaatgacgaagagcttgagcgtgctgtgaagctgggggcgaaagtgatcggtattaacaaccgcaacttacgagacctcaccaccgatttgaatcgcaccaaagtactcgcaccaactttgcgtcgcttagcaccagaagcgattgtgatctcggaatcgggcatttacacccaccagcaagtgcgcgatctcgcccaatacgctgatggctttttgatcggtagctcgttgatggcagaaaaaaacctcgagctcgcggtacgtaaagtgacactgggtgaaaacaaagtctgtggtctcactcatccggaggaagccgccaaagcctatcaagctggcgctgtctttggtggtttgatttttgtagagcactccaaacgtgctgtaaatatagagcaggcaagactgacgatgagtggcgctccactcaattatgttggcgtattccaaaatcaccccgttaccttggtggccgaaaccgcaaaccagctgcaactgcatgcggtgcaattacatggcaacgaagaagccgattacatcgcacaactgcgcaagcaactcaacgaatcgattgagatttggaaagcctatggcgtgaccgaccaagcaccgactctacttactcaagatgttgatcgtcaccttttcgatgcgcaagtcggccaacaaagcggtggaacagggaccacgtttgattgggctctattggatgatccaagccatatcatgttggcaggcggtctcaatccagacaacgcgcaaaaggcagcaagccttggatgtttagggctggatttaaactctggtgttgaagaaagcccagggaaaaaagatctaacgaagctgcagcaagcgtttgcagccatacgaaattattga

SEQ ID NO: 76174 - protein, 476 aa, Vibrio vulnificus YJ016
MMTNSNEKLSEHVSLQEAQMAEVLAKIVRDKYQWVAERKHAQPLASFQATLTPSDRSFYQALQGQRTVFITECKKASPSKGLIREDFDLDYIASVYNHHADAISVLTDEKYFQGSFDFLPRVRQQVRQPVLCKDFMVDSYQVYLARHYQADAILLMLSVLNDEQYQTLADVAHQLQMGVLTEISNDEELERAVKLGAKVIGINNRNLRDLTTDLNRTKVLAPTLRRLAPEAIVISESGIYTHQQVRDLAQYADGFLIGSSLMAEKNLELAVRKVTLGENKVCGLTHPEEAAKAYQAGAVFGGLIFVEHSKRAVNIEQARLTMSGAPLNYVGVFQNHPVTLVAETANQLQLHAVQLHGNEEADYIAQLRKQLNESIEIWKAYGVTDQAPTLLTQDVDRHLFDAQVGQQSGGTGTTFDWALLDDPSHIMLAGGLNPDNAQKAASLGCLGLDLNSGVEESPGKKDLTKLQQAFAAIRNY

SEQ ID NO: 76175 - DNA, 2487 bp, Ustilago maydis 521
  CDS (1)..(2487)
atgtcggctcctaccgaagggctcgtctcagtagcttccaatgtgcaaccccaggccattagcatcggatcgcgcgccgcgaaaggcaagactgtcttgatagacaactacgacagtttcacctacaatgtcgtccaattcctcgcggaagctggcgctgaccttgtcgtttttcgcaacgacaagatcaccctggaagagatcgaggcactcaatcctgccaatattgtcatcagccctggccccggtcaccctctccatgactcaggtatttccattccgtgtatcaagcactttgccggcaagattcccattctcggcgtctgcatgggcctccagtcaatttactcggcctacactggtgtcgttgaattcgctggcgagatcgtccatggcaagacatccgagatcgctcatgacggaaagggtctttacgcgggccttcccgcccaaggcgtgattggcacgcgctaccacagtctcgctgctcagcttcctagcctgcccaaggagctcgtagtcacttccaaaaccgccagcggtgtcgtcatgggcatccgtcacactcgttacactgttgaagccgtacagtaccatcccgagagtatcctcagcgttggaggccgcgaaatgatggtcaactttctcagctggaccggcggtacctgggacgccaatccacaggccaaggtcgatgccgctgctatcgagcgcgccgaaagcaccaccgagcctgtccttgctatggcctctactgaagctgccaacggtcagcccacaccagctgctgcgggcagtgtcggcaccattctcgagagaattcatgtgcagcgactcaaagacattgctgccaccaaggccattccaggcttctctcagcgtgatcttgatatagctctctcgctgcacctcgcacctcctctgatcaacttcccagagcgtctccagcgacacgcctctcgtggcttgcccggagtcatggccgagatgaagcgtgccagtcccagtaagggcgacatcgatcccaccgcccacgctggcgcccaagcgcttgcatacgctcgcggaggtgccagcgttatcagtgttctcactgagcccaagtggttcaagggtacgatgcatgacctatcgctcgcaagacgagcggtcgataacctaccggatcgccccgccattctgagaaaggacttcatcgtcgacacttaccaaattgccgaagccaggcttgctggtgccgacacggtgctgctcatcgttgccatgctcacggacgagcacctcaaggagctctacgactacagtcttagcctgggcatggagccgctcgtggaagtcaacaatcccgaagaaatgacgcgcgccattcgactcggtgcaaaggttgtcggcgtcaacaatcgcaacctccatgactttaatgtcgacatggagaccacttcgcgacttgccgacgctgccaacaagggcggtgtcatcctttgtgctcttagcggtatcagcggtcgcagcgatgtagccaagtatctcaaggagggcgttggcgccgtcctggtaggcgaagcgctgatgcgtgccaaggacaagcgcgctttcattcacgatctgctaggtctcccttccaccagcacggccgtggaaagtctgcctggatccgttgtgggtcacgcctcgcttgttaagatctgtggtctgtcgacggtggaggcggcggtcactgctgccgaagctggagctgatatgctgggcatgattctcgctcccggcactaagcgcactgtctcgctcgagcaggcagctgagatcatcaaggctgtccgttcgcttcctgcctttgaaagcgccgccccggtcaccctcgatgctgatgcggttgctggctccatcgagcagggcgtgactccggaagactggttctcgctgacagtcaagaagctgcgctcccgagcgggtcgcagacccctgctcgtcggtgtcttccgcgaccagccacttgccgaagtagcaagcacggccgaacgtcttggcctcgatgtagtccagctgcacggccgtagcgaaggtacggaatgggcaaagttcctccctggtcggctagtcattcgcgtcttttcggtcaagcctggagctggattgggcaaagacttgctccgggaagtgagccgaccggggtaccaccacattgcggcattggacaccgcagctgctggtggagatggtggcacgggtgtgtcgtttgactggtccatcgcgaatcagatcaggaacgctgatcctttgcccggtgtagtgggcggttcggcgttgaggtccatgccagtgttgcttgctggcgggctcacagctgagaacgtcgcacaggcgatcaaggtggcccaaccgttcgcagttgataccagctccggcgtcgagaccgacggcaacaaggacctcgctaagatcaaggcgtttgtcctcgctgctcgcactgcttcctccctagcttga

SEQ ID NO: 76176 - protein, 828 aa, Ustilago maydis 521
MSAPTEGLVSVASNVQPQAISIGSRAAKGKTVLIDNYDSFTYNVVQFLAEAGADLVVFRNDKITLEEIEALNPANIVISPGPGHPLHDSGISIPCIKHFAGKIPILGVCMGLQSIYSAYTGVVEFAGEIVHGKTSEIAHDGKGLYAGLPAQGVIGTRYHSLAAQLPSLPKELVVTSKTASGVVMGIRHTRYTVEAVQYHPESILSVGGREMMVNFLSWTGGTWDANPQAKVDAAAIERAESTTEPVLAMASTEAANGQPTPAAAGSVGTILERIHVQRLKDIAATKAIPGFSQRDLDIALSLHLAPPLINFPERLQRHASRGLPGVMAEMKRASPSKGDIDPTAHAGAQALAYARGGASVISVLTEPKWFKGTMHDLSLARRAVDNLPDRPAILRKDFIVDTYQIAEARLAGADTVLLIVAMLTDEHLKELYDYSLSLGMEPLVEVNNPEEMTRAIRLGAKVVGVNNRNLHDFNVDMETTSRLADAANKGGVILCALSGISGRSDVAKYLKEGVGAVLVGEALMRAKDKRAFIHDLLGLPSTSTAVESLPGSVVGHASLVKICGLSTVEAAVTAAEAGADMLGMILAPGTKRTVSLEQAAEIIKAVRSLPAFESAAPVTLDADAVAGSIEQGVTPEDWFSLTVKKLRSRAGRRPLLVGVFRDQPLAEVASTAERLGLDVVQLHGRSEGTEWAKFLPGRLVIRVFSVKPGAGLGKDLLREVSRPGYHHIAALDTAAAGGDGGTGVSFDWSIANQIRNADPLPGVVGGSALRSMPVLLAGGLTAENVAQAIKVAQPFAVDTSSGVETDGNKDLAKIKAFVLAARTASSLA

SEQ ID NO: 76177 - DNA, 2259 bp, Cryptococcus neoformans var. neoformans B-3501A
  CDS (1)..(2259)
atgggctttactctccttatcgacaactatgactctttcacttggaacatttacgccgatctcgcttctgtcggcggtaacccctatgtcgtccgtaatgataagattacccttaaggagatcgaggggatgttttctgatggcgagcttgagcggatcgtcatatctcccggtcctgggcatcctaggacagactctggtgtctctagggacgtgatcgcttggggaatgggcaagttgcctattttgggtgtgtgcatgggtctggagtgtattgttgatctgctcggtggagagatcgcttatgccggtgaaattaagcatggtaaaacctcgcttgtccagcatgactctatcggggtcttccacaacctcccccagtttctctcttctactcgataccattccctttccgcccaaattcagtcgcttccttcagtcttgcaagtcacttcgactaccaaagaatctggtgtgatcatgggtgtacgacacaggacctacaccgttgaagccgtgcagtatcatcctgagagttgcatgagtgaaggcggtcgaggcttaatggccaatttcatccaaatgaagggcggcaaatggggtggcgaaaatgcttggtgtggcgttcccgcggagggcgaggaggagcagcccaaggcgaagaccaatggcgctccaagcttgcctactattttgaataggattcacgcgcagaggttattggacgttgagcaagccgaaaaggttcctgctacaagccctgccaacgtctctacctctctttccctctacgcttctccacctctgatcaactttagggaccgtatggtctctactccccacactgccgtcatggctgagattaagcgtgcttctccctccaagggcgatatcgctcctaccgcttccgctcctgagcaagcactcaagtatgctcttgccggggcttccgtcatctcggttctcacagagcctacgtggttcaagggcagcttgcttgacatgctcgctgtgcgcaacgctgttgatagtcttcccaaccgtcctgccatcttgcgaaaggattttgttttgtccaaatacatgattgatgaggctagattatatggcgccgacactgtgcttctcattgtcgccatgctcgagcctcagcaacttaaggaattgtacgattactctgtctctcttggcatggaacccctcgtcgaggtcaacaaccctaccgagctctcactcgcccttgaaattggttccaaggtcattggtgttaacaatcgtaatctacatgactttaatgttgacatgtccaccacttctcgagtcaacgccgctctcaacggacgggacgttgttctttgcgctttgagcggtatttcgagtcacgaggatgttgagaagtatgtcaaagaaggtgtcaagggtgtgcttgttggtgaggctttgatgcgagcaagcgacactaaggctttcctccggtcgcttattggcttaccgcctttagaagtcgttcctaagtccaggccgctcgtcaagatttgcggtatccgttctacagatgacgctaagcttgcaattagtgccggtgccgatctccttggtgtaatccttgtccccggtacgaaacgttgcatatccacttctaccgcccgcgaaatttctgctcttgtgcaatccgcccgatctcaatcctcttccaagccattagaaccttctctttcctccccttggtttaccacccaatccgacctcctctcatcccggcgcaaacccctactagtcggtgtcttccaaaatcagtctctctccgacatcctctcagccgtggaggagattggcctcaaccttgttcaactacacggtgatgaaccccaagcctgggccaagttcatccccgtgcctgtggtcaaggtgttccgagtttcgcctgaaggaatagttagaggtggtgagatcaggcggccaggtttgaaccaagcaatcttgctcgatgctggtggtgtgtctggcggtggtggggaaggaaaagccttcccttgggaacatgccaagcggctcatccaatctggcgaggtggggtctgaaggtcatatgcctctccctgtcatcctcgctggtgggttgacgcctgagaatgtgggccaggcaattgaacaagctggtgaaggcgtttggtgtgtggacgtcagcagtggggtcgaaggagaaggaggaaaggtcaaggagaaggttgaggcgtttgtgaaggccgtaaggggttga

SEQ ID NO: 76178 - protein, 752 aa, Cryptococcus neoformans var. neoformans B-3501A
MGFTLLIDNYDSFTWNIYADLASVGGNPYVVRNDKITLKEIEGMFSDGELERIVISPGPGHPRTDSGVSRDVIAWGMGKLPILGVCMGLECIVDLLGGEIAYAGEIKHGKTSLVQHDSIGVFHNLPQFLSSTRYHSLSAQIQSLPSVLQVTSTTKESGVIMGVRHRTYTVEAVQYHPESCMSEGGRGLMANFIQMKGGKWGGENAWCGVPAEGEEEQPKAKTNGAPSLPTILNRIHAQRLLDVEQAEKVPATSPANVSTSLSLYASPPLINFRDRMVSTPHTAVMAEIKRASPSKGDIAPTASAPEQALKYALAGASVISVLTEPTWFKGSLLDMLAVRNAVDSLPNRPAILRKDFVLSKYMIDEARLYGADTVLLIVAMLEPQQLKELYDYSVSLGMEPLVEVNNPTELSLALEIGSKVIGVNNRNLHDFNVDMSTTSRVNAALNGRDVVLCALSGISSHEDVEKYVKEGVKGVLVGEALMRASDTKAFLRSLIGLPPLEVVPKSRPLVKICGIRSTDDAKLAISAGADLLGVILVPGTKRCISTSTAREISALVQSARSQSSSKPLEPSLSSPWFTTQSDLLSSRRKPLLVGVFQNQSLSDILSAVEEIGLNLVQLHGDEPQAWAKFIPVPVVKVFRVSPEGIVRGGEIRRPGLNQAILLDAGGVSGGGGEGKAFPWEHAKRLIQSGEVGSEGHMPLPVILAGGLTPENVGQAIEQAGEGVWCVDVSSGVEGEGGKVKEKVEAFVKAVRG

SEQ ID NO: 76179 - DNA, 1368 bp, Erwinia carotovora subsp. atroseptica SCRI1043
  CDS (1)..(1368): transl_table=11
atgcaggaaaccgtattacataaaattgtgcgtgataaagcgctctgggttgcggaacgagaaaaagcacagccgctggcctcttttcagcatgagatcgttcccagccagcgcgacttttatcaggcgctgaaacaagataagcccgcctttattcttgaatgcaaaaaggcgtcaccgtcgaagggattgattcgcgatgatttcgacccggtagcgatagctcaggtctataaagattacgcgtctgctatttccgttttgactgacgaaaagtattttcagggcgattttgccttcctgccgcaggttagcgcggcagtccatcagccggtgttgtgcaaagactttattatttcgccctaccagatctatctggcacgctactatcaggccgatgccattctgctgatgctatccgtgctggacgacgagcaatatcagcaactggccgaagtggcgcacagcctgaagctgggcgtgttgacagaagttagtaatgaagaagagctgctgcgggccattcagctcgaagcacgcgtcgttgggatcaacaaccgcgacctgcgcgatctctccattgacctcaaccgtacccggacgctcgcaccgcgtctgcctgctggcgtcaccgtgatcagcgaatccggtatcaactgccaggcacagattcgtgaactcagcgcttttgctcagggcttcctgatcggcagttcactgatgtctgaaccggatctgaacggcgcggtacgccgcgttattctgggtgaaaacaaggtctgcggcctgacgcgcgcagctgatgcacaggccgcctatcatgcgggtgcgctctacggcggtttaatcttcgtcgccagttctccacgctatatcgacgccaaacaagcggccgatgtcattgagggtgcgccactgcgttatgtcggcgttttccgcaatgcgcccgtcgctcatatcgttgctatcacgacgcagttggggttagcggctgttcaactacatggcgatgaggatcaacagacgatcgaccagctacgccagcaattacctgcaacgtgccagatttggaaagcactgagcatcacggatgtgctgccagagcgtaatctcactcacgtcgatcgctacgtgtttgacaacggtcagggcggcagcggtaaaaccttcaactggtcgctgctggacaatcagtcactggataacgtgctgttagccggtggactgaatagcgataactgcgcactggcggcacggcaaggttgcgcaggactggatttcaattccggggtggaaagcgaaccggggaaaaaagattcacataaaattgctgccgtttttgcgacgttacgtcagcagcaacactaa

SEQ ID NO: 76180 - protein, 455 aa, Erwinia carotovora subsp. atroseptica SCRI1043
MQETVLHKIVRDKALWVAEREKAQPLASFQHEIVPSQRDFYQALKQDKPAFILECKKASPSKGLIRDDFDPVAIAQVYKDYASAISVLTDEKYFQGDFAFLPQVSAAVHQPVLCKDFIISPYQIYLARYYQADAILLMLSVLDDEQYQQLAEVAHSLKLGVLTEVSNEEELLRAIQLEARVVGINNRDLRDLSIDLNRTRTLAPRLPAGVTVISESGINCQAQIRELSAFAQGFLIGSSLMSEPDLNGAVRRVILGENKVCGLTRAADAQAAYHAGALYGGLIFVASSPRYIDAKQAADVIEGAPLRYVGVFRNAPVAHIVAITTQLGLAAVQLHGDEDQQTIDQLRQQLPATCQIWKALSITDVLPERNLTHVDRYVFDNGQGGSGKTFNWSLLDNQSLDNVLLAGGLNSDNCALAARQGCAGLDFNSGVESEPGKKDSHKIAAVFATLRQQQH

SEQ ID NO: 76181 - DNA, 1428 bp, Yersinia pseudotuberculosis IP 32953
  CDS (1)..(1428): transl_table=11
atgcaggaaactgggggttacaaaaccgagggttataacgttggcagtgacaaagttgacagtgataaaaccaaaaccgtgctccaccaaatcgtacacgataaagaaatttgggttgccgcgcggaaactgcaacagcctctaacccgcttccaaaacgaaatcacccagagtcagcgcgatttttatcacgcgctacaaggcgataaaacggtctttattttggaatgcaaaaaagcctcaccttctaaaggggttatccgtgacaactttaacccggcggagattgccggtgtttataagcactatgcgtcggctatctcagtattaacggatgagaaatatttccagggcagttttgatttcttgccacaagtcagtgccgccgtcactcagccggtattgtgtaaagattttattattgatgcttatcagattcagctagcgcggttttaccacgctgacgccattttactgatgctgtcggtcttggacgatgaggcttaccgccaattggccgccgtcgcacacagcctgaacatgggggtgttgaccgaagccagtaacgccgaagaattggagcgtgctattaccttgggtgccaaagttgttggcatcaataaccgcgacctgcgtgacctgtctatcgatctgaatcgcacccgtgaattggcaccacgcctaccagaaggtgtcacaataatcagtgaatctggcattagtcattatcgtcaggtccgtgaattgagccaatttgccaacggtttcctgattggcagtgccctgatgtccgaacccgatctcaacgcggccgtccgccgggtgttactgggcgaaaataaagtttgcggcctgacacgcgcacaagatgccgccacggcttaccacgcaggtgcggtgtacggcgggttgatttttgtcaacagttcaccgcggtatgtggatatcgccagcgcccgtacggttatcagtggtgcgccgctaaagtatgtcggtgtttttcgtcatgctgaaatagaaactgtacggcaaacggctgaacaactctcactggcagcagtgcaattgcatgggcatgaagatcaacagtatatcaatcaactgcgcaaagtattacctgcgggttgccagatttggaaggcactgagtgtcggtgacacgatgccggaacgcaacttacagcaagttgaacgctacgtactggatcacggtacgggtggcacagggcaacgtttcgactggtccttattggcagatcaggcactggataatgtcttgctggcgggcggtttggggccagagaactgtgatgtggcggcccaactaggctgtgcgggtctggatgtcaattccggcgtagaaagcgcccctggcatcaaagacccccaacggatcgccgctgtattccaggcattacgcgtgtactga

SEQ ID NO: 76182 - protein, 475 aa, Yersinia pseudotuberculosis IP 32953
MQETGGYKTEGYNVGSDKVDSDKTKTVLHQIVHDKEIWVAARKLQQPLTRFQNEITQSQRDFYHALQGDKTVFILECKKASPSKGVIRDNFNPAEIAGVYKHYASAISVLTDEKYFQGSFDFLPQVSAAVTQPVLCKDFIIDAYQIQLARFYHADAILLMLSVLDDEAYRQLAAVAHSLNMGVLTEASNAEELERAITLGAKVVGINNRDLRDLSIDLNRTRELAPRLPEGVTIISESGISHYRQVRELSQFANGFLIGSALMSEPDLNAAVRRVLLGENKVCGLTRAQDAATAYHAGAVYGGLIFVNSSPRYVDIASARTVISGAPLKYVGVFRHAEIETVRQTAEQLSLAAVQLHGHEDQQYINQLRKVLPAGCQIWKALSVGDTMPERNLQQVERYVLDHGTGGTGQRFDWSLLADQALDNVLLAGGLGPENCDVAAQLGCAGLDVNSGVESAPGIKDPQRIAAVFQALRVY

SEQ ID NO: 76183 - DNA, 1407 bp, Mannheimia succiniciproducens MBEL55E
  CDS (1)..(1407): transl_table=11
atgaacttaaacgataaacccactattctacaaaaaatcgtggcggataaaatccaatggataaaagcgaaagaacaggttttcccattggcttcattcaaagaaaaaatcacaaaatccgaccgcagtttttatcagtcgctcggcaaaggtactcatcagaatccggtttttattttggaatgtaaaaaagcctcgccgtcaaaaggcttgattcgtaacgaatttaaccctgctgacattgcgcaggtttacaaaaattacgcctctgcggtatcggtattgaccgatgaaaaatatttccaaggtgatttttcctatatcaagcaagttcgtgacattgtcacctgcccggtactttgcaaagattttatgataagcgaatatcaggtttatctggcacgttattatcaggcggatgccattttgcttatgctttccgtgcttgacgatgaaacctataaaaagcttgccgcacttgctcacgaacttggcatgggcgtattgaccgaaacatctaatcagcaagaactggaacggggcattgccctaggtgcaaaagtgatgggcattaataaccgcaatctccatgacttaacggtagatttagcgcgtacgccgccgcttgcccaacaaattccggcggatcgtattatcgtgagcgaatcgggaatttattctcatcagcaggtacaacaattaaaaccttatgtaaatgcgtttctcatcggtagcagcttaatgggcagtgatgatttaaacaatgcggttcgttcggttattttcggtgaaaataaagtatgcggtttaacccgtccgcaggatgtgcaggaagtctatcggcaaggtgcgctttacggcggattaatttttgcggaaaattcaaaacgttgcgtttctcttcgccaggcacaggaattagtaacggtcgcaccgctacgttttgtgggtgtatttcagaatcaacaaattgattttattgtaaaaattgcgacccaattaaacctttatgcggtgcaattgcatggtgcggaaaatgaagagtttatcgccgcacttcgaattcagctacctcatcaaattcaaatctggcaagccgtttctattgatgtggcacagcaaagtgcggtcaaaatcgaccgaatttctgccgtagaccgatatgttctggacagtaaaaccgctaaccgacaaggcggtaccggcgttgcctttgattggtcaaaaatccccgccgaaataaaaaataaaagcctgcttgcaggcgggataaccccggaaaacattgagcttgcgctggctcagcattgcctcggcatagatttaaattccggcgttgaaagtgcggccggaataaaaaatcccgaaaaacttaccgcagtttttaataaaatccatcggttttaa

SEQ ID NO: 76184 - protein, 468 aa, Mannheimia succiniciproducens MBEL55E
MNLNDKPTILQKIVADKIQWIKAKEQVFPLASFKEKITKSDRSFYQSLGKGTHQNPVFILECKKASPSKGLIRNEFNPADIAQVYKNYASAVSVLTDEKYFQGDFSYIKQVRDIVTCPVLCKDFMISEYQVYLARYYQADAILLMLSVLDDETYKKLAALAHELGMGVLTETSNQQELERGIALGAKVMGINNRNLHDLTVDLARTPPLAQQIPADRIIVSESGIYSHQQVQQLKPYVNAFLIGSSLMGSDDLNNAVRSVIFGENKVCGLTRPQDVQEVYRQGALYGGLIFAENSKRCVSLRQAQELVTVAPLRFVGVFQNQQIDFIVKIATQLNLYAVQLHGAENEEFIAALRIQLPHQIQIWQAVSIDVAQQSAVKIDRISAVDRYVLDSKTANRQGGTGVAFDWSKIPAEIKNKSLLAGGITPENIELALAQHCLGIDLNSGVESAAGIKNPEKLTAVFNKIHRF

SEQ ID NO: 76185 - DNA, 1443 bp, Colwellia psychrerythraea 34H
  CDS (1)..(1443): transl_table=11
atgaataccgacacaaatacttcagctgaaaagaatattttagaacaaatagttgacgataaacgtattgaaattgcggctttaaaaattaagaaaccattatcaagctttattgatgaactagtgccaacaactaaagatatgtatgcggcattaacaagaactaaagataaaccttatgctggttttatccttgaatgcaaaaaagcatcaccttctaaagggcttatccgcccagatttcgatgttaaagccatttgccaaatttatgataaatatgcagccgctatttcagtattaacggatgaaaaatatttccaaggtaattttgattacctcaaaatagtaacccaatcggtaaagtgcccggtacttaataaagatttctttgttgatagctatcaagtgtacttagcaagatactacggtgctgacgcagttttattgatgcttagtgtattatcagatgaagagtaccttgagttatcggcagttgccgaacaatataacttagcagtactaacagaaatatccaccgaagctgagcgcgatagagcaataaagctcaatgcaaaaatgatcggtattaataatcgcaacctacgtgatctaagtactgatatttcacgtacattcgactttgcaccaactattccggacgatagaatcattatttctgaatcaggcatttattctcactctcaagtgagagaattagcccctgctgttgatgggtttttagtagggagctcattaatggatcccaaaaacaacgcttatcaagatattgatttagcgtgtcgcaagctcatttatggaaataataaagtctgcggattaacagatataaaatatgctaccgcagccgctgataaaggagcacgttttggcggacttatttttgcagagaagtcgcctcgatatgttaccaaggagcaagctcaggtaattatcaaagcagagcccaaattagagtatgtcggcgtttttgttaatgaagatcgtgatcagattattgaattagttcaagcgctacatttaagtgcagtgcaacttcatgggagtgaagatattcagtatatagaggctttaattgccgaacttgccctgaaaaattgcgatttttgtcaaatatggcaagcgagtcccgtagcacaaagtgtgcctttgcttaatccaaatgtcagccatcatgtacttgatggtcaaagccctggcagtggtaaaaccttcgattggcaagtgttagccttgagtgagcaaaatttatcaaaaagctttttagctggaggtttaaataatgacaatattggtcaagccctcgagcagttaacccatgtagatttatttggcctagacctcaactcaggtgtagaagatagcccaggtattaaatcaagtgacaaactagcgcaagtattttcgaaaattaggaattattaa

SEQ ID NO: 76186 - protein, 480 aa, Colwellia psychrerythraea 34H
MNTDTNTSAEKNILEQIVDDKRIEIAALKIKKPLSSFIDELVPTTKDMYAALTRTKDKPYAGFILECKKASPSKGLIRPDFDVKAICQIYDKYAAAISVLTDEKYFQGNFDYLKIVTQSVKCPVLNKDFFVDSYQVYLARYYGADAVLLMLSVLSDEEYLELSAVAEQYNLAVLTEISTEAERDRAIKLNAKMIGINNRNLRDLSTDISRTFDFAPTIPDDRIIISESGIYSHSQVRELAPAVDGFLVGSSLMDPKNNAYQDIDLACRKLIYGNNKVCGLTDIKYATAAADKGARFGGLIFAEKSPRYVTKEQAQVIIKAEPKLEYVGVFVNEDRDQIIELVQALHLSAVQLHGSEDIQYIEALIAELALKNCDFCQIWQASPVAQSVPLLNPNVSHHVLDGQSPGSGKTFDWQVLALSEQNLSKSFLAGGLNNDNIGQALEQLTHVDLFGLDLNSGVEDSPGIKSSDKLAQVFSKIRNY

SEQ ID NO: 76187 - DNA, 1362 bp, Francisella tularensis subsp. holarctica
  CDS (1)..(1362): transl_table=11
atggaaactattttagaaaaaatcgttgaagcaaaaagaaagtggctttttgcaaaaaaaagactatttccactagatgtatttaaaaaagaagttgtcaaaacagatagagatttctatcaagctttggaatctgataaagctgtatttattttagaatgtaaaaaaggctctccttctaaaggaattattcgtaaaaagtttgatctaaatgaaattgcagctgtatacaaaaattatgcaaatgtgatatctgtacttacagatgaagaattttttatgggtagctttgcaaatctagagattgttagaaagcaagtaacacaacctatgctttgtaaagattttataatagatgaatatcaaatattcttagctaggcattatcaagctgatgctgtgttacttatgctttcagtacttgatgatagtgagtataaaaaattagcaaaagttgctaatcgtctaggtatgggtatattaaccgaagttagtaacgaagaagagcttgtaagagctataagcttaaaagcaaaagttataggtattaataatcgtaatctaagagatctttctatagatttaaatactacgcgtcttttagctccgaaaatacctaaaagaacaattattatttcagaatcagggatctataaaaatcaagaaatacgtgatctaagaaattatgtaaatggctttttgataggaagttctattatgggtgaacgtaaccttgaacttgcagttagaaagcttgtttatggttttaataaggtttgcggccttacttctgttgaggatgctcaaaaagcatatgatgcaggagcagtctatggtggtttgatttttgttgagaaatctcctcgttatgtagattttgccatggcaaaacagatagtaaaaaaagttaggctaaattatgtaggtgtttttgctgacgctaaaatagaagatgttgtagatacctgctatgcattaaaattaagtgctgtgcagttgcatggtgatgaaaatcaagagtatatagatactctaaaatcaaagctacatagaaactgtcaaatatggaaagcatatccagtagataagactcttccaagtttttttgctaacgtagattatcatttattagatgcccaagtagatggtaaatcaggtggtacaggaaaaacatttgattggagtcttatcaaagacagaaaaaatataattcttgctggcggtctgaatgctaaaaatatagcaaaagcaatagaattgaagtgttcagcttatgatattaattctggtgtagaatctgaaccaggacaaaaagatcaaatcaaactaaatgaagtatttgaaataattagaagttattaa

SEQ ID NO: 76188 - protein, 453 aa, Francisella tularensis subsp. holarctica
METILEKIVEAKRKWLFAKKRLFPLDVFKKEVVKTDRDFYQALESDKAVFILECKKGSPSKGIIRKKFDLNEIAAVYKNYANVISVLTDEEFFMGSFANLEIVRKQVTQPMLCKDFIIDEYQIFLARHYQADAVLLMLSVLDDSEYKKLAKVANRLGMGILTEVSNEEELVRAISLKAKVIGINNRNLRDLSIDLNTTRLLAPKIPKRTIIISESGIYKNQEIRDLRNYVNGFLIGSSIMGERNLELAVRKLVYGFNKVCGLTSVEDAQKAYDAGAVYGGLIFVEKSPRYVDFAMAKQIVKKVRLNYVGVFADAKIEDVVDTCYALKLSAVQLHGDENQEYIDTLKSKLHRNCQIWKAYPVDKTLPSFFANVDYHLLDAQVDGKSGGTGKTFDWSLIKDRKNIILAGGLNAKNIAKAIELKCSAYDINSGVESEPGQKDQIKLNEVFEIIRSY

SEQ ID NO: 76189 - DNA, 1482 bp, Shewanella sp. MR-7
  CDS (1)..(1482): transl_table=11
atggcacaggttcaacaacccgacgcgcatcgctcggaagataatcaagcatcgcaggatgtaaggggtagcatgcaaaccagcaccgcaaaagccaacgttttaacccgtatcgtcgataccaaggccgcccatatcgccgcccttaagttgcgttttcctgaagacagcttaacccccaagatttcggaccgtagtttatttgccgccttaaaagccccgaaggcgggttatattctagagtgcaagaaagccagtccatccaaaggcttaatccgtaaagactttgatgttgaagccatcgcctcgatttatacccaatatgccgcggggatttcggtattaaccgatgagcaatttttccaaggagacatggactatatcccgaaagtacgggccaaagtgagccaaccgattctgtgtaaagacttttttgtagatgagtatcaaatcaaattagcggctcatcagggcgccgatgcgattctgctgatgctttctgtgctcgatgatgagcgatatcagcaacttgccaacgaggcggccaagtatcaactcgatgtgttgaccgaagtcagcaatgaagaagaactgaaacgcgccatcgtcttaaatgcacctattattggcattaataaccgcaacttacgagatttaagtaccgatttagccaccacagaagcccttgcgccgcacatcggcagcgatcgcgtggtgatcagcgaatcgggcatttacactaacgagcaagtgcgccgcttaagcccgttggtcgatggcttcttggtcggtagctcgattatggccgaagatgacattgatttagcctgccgtaaattgatcttcggtcacaataaagtctgtggtctcacccgccatgaagatattcaagcggcggccactgctggtgccgtgtatgctgggctgatttttgctgaaaaatcgccacgcgcgctcaccaaagatgccgccaaacaattagtacagcaatacctcgccgctaatttgcccgccattgagtttgttggcgtatgtgtgaatagcacgcctgagttcatggtgagtatcgcccaagaatgtggcttagccgcgctgcaactgcacggcagcgaaactgagctggaaattgccgagctaagccaattactgcaacaggccggactgaagacccaaatttggaaggcggtcagtgtcgatgctcaaagcagcgaacttgatgctatgccaagaggggtgcagcgttatctttttgatagcaagaatgacgcaggttttggtggcacagggcaagcctttgattggcaactccccattgcccataaagccgaggccatgcttgcgggtggcctcaatgctgacaatgccgcccgtgccaatgcccaaggattttacggtttagattttaactctggcctcgaaaccgcacccggcattaagtcggcagagaaaatccaagcggcatttagtcaattacgactctag

SEQ ID NO: 76190 - protein, 493 aa, Shewanella sp. MR-7
MAQVQQPDAHRSEDNQASQDVRGSMQTSTAKANVLTRIVDTKAAHIAALKLRFPEDSLTPKISDRSLFAALKAPKAGYILECKKASPSKGLIRKDFDVEAIASIYTQYAAGISVLTDEQFFQGDMDYIPKVRAKVSQPILCKDFFVDEYQIKLAAHQGADAILLMLSVLDDERYQQLANEAAKYQLDVLTEVSNEEELKRAIVLNAPIIGINNRNLRDLSTDLATTEALAPHIGSDRVVISESGIYTNEQVRRLSPLVDGFLVGSSIMAEDDIDLACRKLIFGHNKVCGLTRHEDIQAAATAGAVYAGLIFAEKSPRALTKDAAKQLVQQYLAANLPAIEFVGVCVNSTPEFMVSIAQECGLAALQLHGSETELEIAELSQLLQQAGLKTQIWKAVSVDAQSSELDAMPRGVQRYLFDSKNDAGFGGTGQAFDWQLPIAHKAEAMLAGGLNADNAARANAQGFYGLDFNSGLETAPGIKSAEKIQAAFSQLRL

SEQ ID NO: 76191 - DNA, 1419 bp, Haemophilus somnus 2336
  CDS (1)..(1419): transl_table=11
atgcaacccaatatcccctctattttgcaaaaaattgtacaagataaaaaacgatggatcgcagaaaaacaagctgcatttcctcttgctcattttcagcaagaaattaaaaattccgaccgctctttttatcaagtgttaagccaaggctcacatcaacgccccgctttcattttagagtgcaaaaaagcatcaccttcgaaaggtttaattcgttctgattttaatatagtagaaattgcaaatgtctataaaaattatgcttcggtcatttctgttttaacagatgaaaaatatttccaaggagattttaactacttgcccttagtacgtaagaaggctactcaacctgttctttgtaaggattttatactgagtaaatatcaagtgtatttagcacgttattatcaagctgatggaattttattgatgttgtcgatacttgatgatgaaacttaccgcactttatctgatcttgcacataaccttggaatgggcgttttaactgagacatccaaccaaaaggaattagatcgagccataaaactgggtgcaaaagtaattggaattaataatcgaaatttacacgatctctccgtagatcttaaccgcacgcctcctttggcaagacaaattccggcagatcgcattgtgatcagcgagtcaggtatttcttctcatcaacaagtacaacaattaaaaccctatgtacatggctttttaatcggtagcagtttaactagtggtaaagatcttaacaatgccgtacgttcggtacttttgggggagcacaaagtttgtggtttaacacgaggacaagatgtcaaagcaagctatgctcaaggtgctttatacggcggattgatttttgctgaaggttctcctcgtaaactctccctatgtcaagcacagaaattggttaagcaagcacctttgctttttgttggcgttttccaaaatcagtctattgcgtttatccataacatcgctacacaattacaattgttcgccgtgcagttacatggtgatgaaaatgctgaatttattaccgcacttcgccaagttctacctacacaatgtcaaatttggaaagctgttacgattgacgttaccgagcaatatgaacaagggaaaagtgcggtagattttgaagaaattccttatgtagatcgttatgtttttgatagtaaggcagataatcgacaaggtggcacaggacaaacttttaactggaattatattcctccctccattaaatacaaagtcatgcttgccggtggaataaatattcaaaatattgaacaagcattgcaacaacattgtctagggattgatttaaattcaggtgttgaatgtgccaacggcataaaagatcaaataaaattacaaacagtttttgacaaaatcaaaaatcaataa

SEQ ID NO: 76192 - protein, 472 aa, Haemophilus somnus 2336
MQPNIPSILQKIVQDKKRWIAEKQAAFPLAHFQQEIKNSDRSFYQVLSQGSHQRPAFILECKKASPSKGLIRSDFNIVEIANVYKNYASVISVLTDEKYFQGDFNYLPLVRKKATQPVLCKDFILSKYQVYLARYYQADGILLMLSILDDETYRTLSDLAHNLGMGVLTETSNQKELDRAIKLGAKVIGINNRNLHDLSVDLNRTPPLARQIPADRIVISESGISSHQQVQQLKPYVHGFLIGSSLTSGKDLNNAVRSVLLGEHKVCGLTRGQDVKASYAQGALYGGLIFAEGSPRKLSLCQAQKLVKQAPLLFVGVFQNQSIAFIHNIATQLQLFAVQLHGDENAEFITALRQVLPTQCQIWKAVTIDVTEQYEQGKSAVDFEEIPYVDRYVFDSKADNRQGGTGQTFNWNYIPPSIKYKVMLAGGINIQNIEQALQQHCLGIDLNSGVECANGIKDQIKLQTVFDKIKNQ

SEQ ID NO: 76193 - DNA, 1434 bp, Haemophilus influenzae R2866
  CDS (1)..(1434): transl_table=11
atgatgattactcaagattttactaaacccattgattccgctacggtgctacaaaaaatcatcttagacaaagcgcaatgggttaaagcaaaagaaaaggaatttcccctttcacaatttaaacaaaacattcaaaactctgaccgctctttttatgatgcgttagcaaaaggtacgcatcaaaagcccacttacattttggaatgtaaaaaagcctccccttctaagggattaattcgtgctgaatttaatttggaagaaatcgccaatgtctataaacattatgcgtccgctgtatctgttctgacagatgaaaaatactttcaagggaattttgaattcttgcctttagttcgcgatatcgtaagccaacctgtgctttgcaaagattttatgattagcgaatatcaagtttaccttgctcgctactatcaagcggatgcaattttattaatgctttctgtggtaaatgatgaaacttatcgtgtgctggcagagcttgcacattctcttggtatgggtgtattgacagaaaccagcaatgaagaagaatttgaacgcgcccttgcactgggtgcaaaaattattggtgtcaataatcgtaacttgcacgatttaactgtggatttaaatcgtgttgttgaactcactgaaaaatacgccgactgtattcctgctgatgtacgtattattagcgaatcaggcatttacaatcacaagcaaattcatcaattacaaaaagtggcacatggtttcttaattgggagcagcttaatgagcaaccaagatttgaataatgcggttcgctcggtaatttttggagaaaataaagtatgcggtttaacgcgcgcgcaagatgtcaaaatcgtttacgaaaacggggcactttacggcggattaatcttcgtagaacattcaaaacgttgtgtgagtttacgccaagcgcaagaattagtaaccgctgctccacttcgatttgttggtgtttttcagaatcaagaaattgactttatcgtcaaaatagccaaccaattacagctttatgcggtgcaattacatggtgcagaaactgaggcatttattaccgcacttcgccaacaactaccaaaaaacacgcaaatctggaaagcaatttcggtcaatactgaagcccaaagtgcggttgattttacagatgatttgaatgtggatcgttatatttttgatagccaaacagcgaaccaacaaggtggcacgggtaaaacctttgattggtcattaattcctgaaaatcttaaacacaagattattttagctggcggcatttcaccaaataatgtggaacaagccattcaacaaaattgcttaggcttggatattaattctggggtggaaagttctgctggcgtaaaagatcaagaaaaagtgcggttagtttttaataatatttattaa

SEQ ID NO: 76194 - protein, 477 aa, Haemophilus influenzae R2866
MMITQDFTKPIDSATVLQKIILDKAQWVKAKEKEFPLSQFKQNIQNSDRSFYDALAKGTHQKPTYILECKKASPSKGLIRAEFNLEEIANVYKHYASAVSVLTDEKYFQGNFEFLPLVRDIVSQPVLCKDFMISEYQVYLARYYQADAILLMLSVVNDETYRVLAELAHSLGMGVLTETSNEEEFERALALGAKIIGVNNRNLHDLTVDLNRVVELTEKYADCIPADVRIISESGIYNHKQIHQLQKVAHGFLIGSSLMSNQDLNNAVRSVIFGENKVCGLTRAQDVKIVYENGALYGGLIFVEHSKRCVSLRQAQELVTAAPLRFVGVFQNQEIDFIVKIANQLQLYAVQLHGAETEAFITALRQQLPKNTQIWKAISVNTEAQSAVDFTDDLNVDRYIFDSQTANQQGGTGKTFDWSLIPENLKHKIILAGGISPNNVEQAIQQNCLGLDINSGVESSAGVKDQEKVRLVFNNIY

SEQ ID NO: 76195 - DNA, 1362 bp, Pseudoalteromonas tunicata D2
  CDS (1)..(1362): transl_table=11
atggctaatgtattagaaaaaattgttgccgataaacatcttgaaattgccgagcgtaaaataaaacagccgctttcaagttttattgatgaggtaaaaccaagtcagcgtaatttctaccaagcacttgtggctcctggcactcactatattttagaatgtaaaaaagcctcgccatcaaaaggcttgatcagagaagtattcgacttaaacgaaattactggcgcatataaacactacgccacctgcatcagcgtattaactgatgaaaaatactttaaaggcagtttcgcttacttaaaaaaagtgagccaattggtcgagcaacctttaattggtaaagatttttatgttgatgaatatcaagtttattttgcgcgcttacatggcgctgatgctattttattaatgctttcggtgcttgatgacagccaatatcaacacttagcggcagtggcaaaatcgctcaacatgagcattttgaccgaagtgagtaacgaagaagaagtccatcgtgcacttgccctagatgctgacattattggtataaacaaccgtaacctgcgagacttaagtaccgatttagcaactaccgaaacacttcgtgcgcttatccctggtaataaagtagtgatttcagaatctggcatttatacccatgatgatgtgaaacgcttacgtggtctatgcaatggctttttagtgggcagttcattaatggccgaagccaacatcgaccttgcatgccgtcgcttaatctatggtgacaataaagtctgtggcttaacccgggttgatgacgcgcacgcggcctttgagcgcggtgcggtatatggtggattaattttttataaaaaatcccctcgttatgtcgattacgactgcgcgcaagccatagtgcaaagtaccagcttaaaatttgttggggtgtttgtgaatgctgatttactcgatgttgccgaacacgccgaacgattgcaacttgcagctgttcaattacacggccaagaagacatcgcttatatcacaactctgcgcgagcgtttacccgcaagctgccaaatatggaaagctatcagcgtgagtgatcacattcctgaattgatctcaggcgttgatcggtatttatttgatacccacagcgacaaccaagccggtggtacaggcaaaaaatttgattggtcactgctcgctgggcaaagcaactttatgctcgcaggtgggatcaacgcacacaatattaatgaagcgcgcatagtaggcgctttagggctcgatctaaactcaggggtagaacttagccctggtaaaaaatgtaaagataaaatcgcaacgctgtttgcaaatttaaagaatgaatga

SEQ ID NO: 76196 - protein, 453 aa, Pseudoalteromonas tunicata D2
MANVLEKIVADKHLEIAERKIKQPLSSFIDEVKPSQRNFYQALVAPGTHYILECKKASPSKGLIREVFDLNEITGAYKHYATCISVLTDEKYFKGSFAYLKKVSQLVEQPLIGKDFYVDEYQVYFARLHGADAILLMLSVLDDSQYQHLAAVAKSLNMSILTEVSNEEEVHRALALDADIIGINNRNLRDLSTDLATTETLRALIPGNKVVISESGIYTHDDVKRLRGLCNGFLVGSSLMAEANIDLACRRLIYGDNKVCGLTRVDDAHAAFERGAVYGGLIFYKKSPRYVDYDCAQAIVQSTSLKFVGVFVNADLLDVAEHAERLQLAAVQLHGQEDIAYITTLRERLPASCQIWKAISVSDHIPELISGVDRYLFDTHSDNQAGGTGKKFDWSLLAGQSNFMLAGGINAHNINEARIVGALGLDLNSGVELSPGKKCKDKIATLFANLKNE

SEQ ID NO: 76197 - DNA, 1401 bp, Photobacterium sp. SKA34
  CDS (1)..(1401): transl_table=11
atggaaacagtattagcaaaaattgttgctgacaaaaaaatttgggtagaagcacgcaaaaaatcacagccacttgatacatttattcatgacctcatcccaagtgatcgcgacttctaccaagcgttatcatccaatactgataacggtgtagagcgccctgcattcattcttgaatgtaaaaaagcctcgccatcaaaaggcttgatccgagatgattttaatcttgattacattgctagtgtgtacaacaactacgccagtgcgatttcagtactcaccgataaaaaatacttccaaggtaactttgagtttctccctcaaatccgtggtcaagtacgccagcccgtactctgtaaagacttcatggttgatacctatcaagtctatttagctcgtcattatcaagctgatgcgattttgctgatgttgtcagtcctcaatgacgaggaataccaaactcttgctgatgttgccaatcaattaaatcttggcattttaacggaagtgagtaacgaagaagaacttgaacgtgcaattaacttaaaagcgaaagttgtcggtattaataaccgtaatttacgagatttaagtattgatttagaccgcacaaagcagcttgcaccgaaattatcacaagacacaattgtaatttcagagtctggcatttatagcaatcaagaaattcgtcagttatctcaatatgccaatggctttttaattggtagctcgttaatggcagaagataacctcgatcttgcggtacgccgtgtgttacttggtgataacaaggtctgcggattaacccaagcaaaagacgccactatcgcttaccaaaatggtgccgtttacgggggcttaatttttgcccctgcatcccctcgcagtgttgatatcgagcaagcacgccatgtgatgacaggagccccactcgattatgttggtgtattccaaaatgcagagcttgaaacaattgtcgatacggcaaaacaacttgtactaagtgttgtgcagttacatggcacagaaacacagcaatacattaatgagctaaaagcacaacttccagctcaatgtaaaatttggaaagcgcacggggtatcagatactttacctgatttatcaacataccaagttgataaacaccttgttgatagtaaagtaggtaatcaaagtggtggtacagggataaccttcgactggtcgttgatccaaagcggtgatcgcaagggtatattactggctggtggcttaaatgcagacaacgtacaacaagcggcagcattaggatttgatggccttgatttaaattctggtgtggaaagtgcgccaggtaaaaaagacccgaataaattgagtgcggcattcgcggcaatcaaaaatattaaggacgataaataa

SEQ ID NO: 76198 - protein, 466 aa, Photobacterium sp. SKA34
METVLAKIVADKKIWVEARKKSQPLDTFIHDLIPSDRDFYQALSSNTDNGVERPAFILECKKASPSKGLIRDDFNLDYIASVYNNYASAISVLTDKKYFQGNFEFLPQIRGQVRQPVLCKDFMVDTYQVYLARHYQADAILLMLSVLNDEEYQTLADVANQLNLGILTEVSNEEELERAINLKAKVVGINNRNLRDLSIDLDRTKQLAPKLSQDTIVISESGIYSNQEIRQLSQYANGFLIGSSLMAEDNLDLAVRRVLLGDNKVCGLTQAKDATIAYQNGAVYGGLIFAPASPRSVDIEQARHVMTGAPLDYVGVFQNAELETIVDTAKQLVLSVVQLHGTETQQYINELKAQLPAQCKIWKAHGVSDTLPDLSTYQVDKHLVDSKVGNQSGGTGITFDWSLIQSGDRKGILLAGGLNADNVQQAAALGFDGLDLNSGVESAPGKKDPNKLSAAFAAIKNIKDDK

SEQ ID NO: 76199 - DNA, 1440 bp, Vibrio sp. Ex25
  CDS (1)..(1440): transl_table=11
atgactgacttcaacactcagcaagctggcaatctgtctgaacacgtttctaagaaagaagcagaaatggcagaagtactggcgaaaattgtccgcgacaaatatcaatgggtagcagaccgtaaggtatctcaaccgctaagcacatttcagtctgatttactgccatcggatcgcagcttctacgatgcactgagtggcgaaaagacagcattcatcaccgaatgtaagaaggcatctccttctaaaggtttgattcgtgatcactttaacttggattacattgcatcggtttacaacaaccatgctgatgcaatttcagtcctaactgacgagaagtacttccaaggtaactttgactttcttcctcaagtgcgtggtcaagtcaaacaaccagttttgtgcaaagacttcatggtagacacctaccaagtttacctagcacgtcattacagtgctgatgccgtacttctgatgctttctgtcctgaatgacgaagagtacaaagcgctagaagaagcagctcacagcctgaatatgggcattctgaccgaagtcagcaacgaagacgagcttcatcgtgccgttaatctaggagcacgcgttatcggcatcaataaccgtaacttgcgcgacctaagtaccgatttgaatcgtactaaagaattggcaccgaccattcgcgaactggcaccaaacgcgacggtaatttcagagtctggcatttatacgcatcaacaagttcgtgatttagcggaatacgcagacggcttcttgattggtagttcgctgatggcggaagacaaccttgaacttgcagtacgtaaagtgacgttaggcgaaaacaaagtgtgtggcttaacgcatccggatgatgcagcaaaagcatatcaagctggcgcggtatttggtggcctgatttttgtcgagaagtcgaagcgtgcggtcgaccttgaaggtgctcgcttaaccatgagcggtgctccactgaattacgttggcgttttccaaaatcacgatatcgattttgttgcttcagtcgcaacctctttgggtttaaaagcagttcagctgcacggtcaagaagaccaagcttacgtaaaccaactcaaagccgaactgccaacaacagtagaaatttggaaagcttatggcgtgactgatgccaagccagaactgcttgcagaccacattgaccgccatctattagatgcgcaagttggcactcaaactggcggaactggtcaagtgttcgactggtcactgatcggcgacccaagtcaaattatgctagcgggcggactgtcgccagaaaatgctcaacaagcagcgacactaggttgcttgggattagatttaaactctggtgtagaaagcgcgccaggcaaaaaagattcacagaagttgcttgcggcattcaccgccattcgcaactactaa

SEQ ID NO: 76200 - protein, 479 aa, Vibrio sp. Ex25
MTDFNTQQAGNLSEHVSKKEAEMAEVLAKIVRDKYQWVADRKVSQPLSTFQSDLLPSDRSFYDALSGEKTAFITECKKASPSKGLIRDHFNLDYIASVYNNHADAISVLTDEKYFQGNFDFLPQVRGQVKQPVLCKDFMVDTYQVYLARHYSADAVLLMLSVLNDEEYKALEEAAHSLNMGILTEVSNEDELHRAVNLGARVIGINNRNLRDLSTDLNRTKELAPTIRELAPNATVISESGIYTHQQVRDLAEYADGFLIGSSLMAEDNLELAVRKVTLGENKVCGLTHPDDAAKAYQAGAVFGGLIFVEKSKRAVDLEGARLTMSGAPLNYVGVFQNHDIDFVASVATSLGLKAVQLHGQEDQAYVNQLKAELPTTVEIWKAYGVTDAKPELLADHIDRHLLDAQVGTQTGGTGQVFDWSLIGDPSQIMLAGGLSPENAQQAATLGCLGLDLNSGVESAPGKKDSQKLLAAFTAIRNY

SEQ ID NO: 76201 - DNA, 1365 bp, Alteromonadales bacterium TW-7
  CDS (1)..(1365): transl_table=11
atggctaatgtattagacaaaattgttgctgataaaaagctagaattaattgaacgaaaagccgctcgtccgcttgaaagttttaaagatcaagcggtaccaaccagccgtgatttttataaagcattggcggcacccggtacgcaatttattttagaatgtaaaaaagcgtccccttctaaggggttaataagagaaccttttgatttaactgaaatcactgcagcttacaaaaaatatgcaagctgcatgagcgtactcaccgatactaaatactttcaaggtagctttgactacctagagtttgtacgtagccaagttgatcagccacttatttgtaaagactttttcatagatgagtatcaggtttatatggctcgtatttatggtggcgatgctatcttacttatgctttcggtacttaatgatgaagaatacacagcactgcataaggtcgctgattcactcaatatggcggtgctaaccgaggtaagtaacgaagaagaagttcaccgagcacttaacctaaatgctaaaattattggtattaataaccgtgatttacgtgacttgagtaccgatttagctactactgaaaaactacgtaaattaatccctgaagataaagtcgttatttctgagtcaggtatctatacccatcaagacgttaaacgcttagcaccgctgtgcgatggctttttaattggtagctcactgatggccgaagctgatttagaacaagcatgtcgccgggttatttttggggaaaataaagtatgtggacttactcgcagccaagatgcgcaagctgcgtataatgcgggtgctgtatatggcggtttaatttttcatcctaagtctccacgttgtgttgatttagattgcgcccaagccataacgcaatcagcccccctcaagtttgtgggtgtttttgttgatgagccatcagagaaagttgctcacgccgcaagtgtgttaaaattagcggcagttcaattacatggccaagaaagtgacgattacattaaagcgttgcgtacacagttacctagcaattgtgaaatttggaaagcacaagcaattaaagatgagctacctactcctgtaaatggagttgaccgccacttgtacgacactcacagtgataaacaagctggtggaacaggaaaagtatttgattggtcgcttcttcgcgatgcaacaacaccgtttatgctagctggtggcttaaatccagacaatattaaagatgcgctttatcaaggtgccttaggccttgacttaaattctggggttgaagacgctccgggcaaaaagtgccaaaacaaattacatcatgcttttacaagtatcagaaattattga

SEQ ID NO: 76202 - protein, 454 aa, Alteromonadales bacterium TW-7
MANVLDKIVADKKLELIERKAARPLESFKDQAVPTSRDFYKALAAPGTQFILECKKASPSKGLIREPFDLTEITAAYKKYASCMSVLTDTKYFQGSFDYLEFVRSQVDQPLICKDFFIDEYQVYMARIYGGDAILLMLSVLNDEEYTALHKVADSLNMAVLTEVSNEEEVHRALNLNAKIIGINNRDLRDLSTDLATTEKLRKLIPEDKVVISESGIYTHQDVKRLAPLCDGFLIGSSLMAEADLEQACRRVIFGENKVCGLTRSQDAQAAYNAGAVYGGLIFHPKSPRCVDLDCAQAITQSAPLKFVGVFVDEPSEKVAHAASVLKLAAVQLHGQESDDYIKALRTQLPSNCEIWKAQAIKDELPTPVNGVDRHLYDTHSDKQAGGTGKVFDWSLLRDATTPFMLAGGLNPDNIKDALYQGALGLDLNSGVEDAPGKKCQNKLHHAFTSIRNY

SEQ ID NO: 76203 - DNA, 2325 bp, Aspergillus oryzae
  CDS (1)..(2325)
atggcgggctccgatctcgttgaccattccccccaccatcccactaaagccgcacggcttgacagcgcatccaatgtcattttgatcgacaactatgattctttcacctggaatgtctatcagtatctggtcctcgagggcgccactgtccaggtgtttcgcaatgatgaattatccttggacgaattgatcgccaagaagccgactcaattggtcgtcagccctggtccgggccacccgacaaccgacgctggaatcagtaatgctgcaattcaatacttcagcggtaaagtacctgtttttggtgtgtgtatgggtcagcaatgcatcatctcttccttcggtggcaaagtcgatgtcacaggcgagatcttgcatggtaagacatcggtgataaaacatgacggtaagggtgcatatgaagggctgccgacctccctcgccgtgactaggtatcattcccttgctggaacacactcaacgatccctgattgcctggaggtaacgtcttacgcccagctgggtgaggacagtagtaagaccgttatcatgggtgtgagacacaaggagcttgcagtggaaggtgtccagtttcatcctgaaagtattctcacagagtacggccgagggatgtttaggaacttcctcaaacttacagcgggtacatgggagggtaacggcaaacaatccagtgcacagagtggcacttccgttgcaactgggttagctgcctcgaatagcaccccaaaggtagacaagaagacttccatcttagagaagatatatgatcaccgcagggctgccgttgccatccagaagactattccttcacaacggcccgcggatcttcaggctgcttacgacctcaacattgctcctccacaagtctcattccctgcccgtctgagacaatcaccttatccgctgtctcttatggctgaaataaagcgcgcttccccttccaagggaatgattgcggagaacgcatgtgcccctgcccaggctagagagtacgctaaggccggcgccagcgttatttctgtcctcactgagccagaatggttcaaaggtagcatcgacgatttgcgtgccgttcgtcagagcttagaaggagttacaaacagacctgcaatcttaagaaaggagtttgtttttgacgaatatcagattcttgaagcccgtcttgctggggctgatactatcctgctcatcgtgaagatgctaagcgtcgagcttcttacaagattgtatcactattctcgcagcttgggaatggagcctctcgtagaggttaatactccggaggaaatgaagatcgcggtgcagcttggagccgaggtgattggcgtgaacaacagagacttgacgagcttcgaggttgacctcggtaccacgagtcgtctcatggaccaggttaacgagaatactatcgtttgcgctcttagtggaatttccggacccaaggatgtcgaggcttacaagaaggaaggtgtcaaagcaattctcgtgggagaggcacttatgcgggcatctaacacatctgcttttgttgcagagctgctcggggggtcttacgagaaatctactcaaacttcacgagcctcgccgttagtcaagatctgcggtacacgatcagaagatggggctcgggcggcaattgaggccggtgctgatttggttggtattattcaggtacagggacgaaagcgtactgtttcagatgatgttgctcttcgcatttctcaagttgtgaagtccacgaagcgacctgtcactcataccgcttcgacgactcaaggaacatcaaatgcaacctcggttgattactttgatcattccactaatgtcctacgccatcccaaccgagctctgctcgtgggtgtgttccagaatcagccattgtcgtacatcctagagcagcagcaaaagctggaactcgatgtggtccaattacacggttctgagccattggagtgggctaagttaataccggtgcctgtaatccgcaaattcggtcttgacgagactggaattgcacgaagagcctaccatactttgcccttacttgattctggagctggcggctcgggtgaattgcttgatcagtccggtgttcaaaccgttctggacagcgatgctggcctgcgtgttatcctggctggaggattggatcccacaaacgttgctgacacaatcaagaagctagggagctctggtcacaaggttgttggggtagatgtcagttctggtgtggagtcggatggcgttcaggatccgagtaaaatacatgcctttgtgcaggcagtgagaggacttcaacagtaa

SEQ ID NO: 76204 - protein, 774 aa, Aspergillus oryzae
MAGSDLVDHSPHHPTKAARLDSASNVILIDNYDSFTWNVYQYLVLEGATVQVFRNDELSLDELIAKKPTQLVVSPGPGHPTTDAGISNAAIQYFSGKVPVFGVCMGQQCIISSFGGKVDVTGEILHGKTSVIKHDGKGAYEGLPTSLAVTRYHSLAGTHSTIPDCLEVTSYAQLGEDSSKTVIMGVRHKELAVEGVQFHPESILTEYGRGMFRNFLKLTAGTWEGNGKQSSAQSGTSVATGLAASNSTPKVDKKTSILEKIYDHRRAAVAIQKTIPSQRPADLQAAYDLNIAPPQVSFPARLRQSPYPLSLMAEIKRASPSKGMIAENACAPAQAREYAKAGASVISVLTEPEWFKGSIDDLRAVRQSLEGVTNRPAILRKEFVFDEYQILEARLAGADTILLIVKMLSVELLTRLYHYSRSLGMEPLVEVNTPEEMKIAVQLGAEVIGVNNRDLTSFEVDLGTTSRLMDQVNENTIVCALSGISGPKDVEAYKKEGVKAILVGEALMRASNTSAFVAELLGGSYEKSTQTSRASPLVKICGTRSEDGARAAIEAGADLVGIIQVQGRKRTVSDDVALRISQVVKSTKRPVTHTASTTQGTSNATSVDYFDHSTNVLRHPNRALLVGVFQNQPLSYILEQQQKLELDVVQLHGSEPLEWAKLIPVPVIRKFGLDETGIARRAYHTLPLLDSGAGGSGELLDQSGVQTVLDSDAGLRVILAGGLDPTNVADTIKKLGSSGHKVVGVDVSSGVESDGVQDPSKIHAFVQAVRGLQQ

SEQ ID NO: 76205 - DNA, 1359 bp, Escherichia coli
  CDS (1)..(1359): transl_table=11
atgcaaaccgttttagcgaaaatcgtcgcagacaaggcgatttgggtagaagcccgcaaacagcagcaaccgctggccagttttcagaatgaggttcagccgagcacgcgacatttttatgatgcgctacagggtgcgcgcacggcgtttattctggagtgcaagaaagcgtcgccgtcaaaaggcgtgatccgtgatgatttcgatccagcacgcattgccgccatttataaacattacgcttcggcaatttcggtgctgactgatgagaaatattttcaggggagctttaatttcctccccatcgtcagccaaatcgccccgcagccgattttatgtaaagacttcattatcgacccttaccagatctatctggcgcgctattaccaggccgatgcctgcttattaatgctttcagtactggatgacgaccaatatcgccagcttgccgccgtcgctcacagtctggagatgggggtgctgaccgaagtcagtaatgaagaggaacaggagcgcgccattgcattgggagcaaaggtcgttggcatcaacaaccgcgatctgcgtgatttgtcgattgatctcaaccgtacccgcgagcttgcgccgaaactggggcacaacgtgacggtaatcagcgaatccggcatcaatacttacgctcaggtgcgcgagttaagccacttcgctaacggttttctgattggttcggcgttgatggcccatgacgatttgcacgccgccgtgcgccgggtgttgctgggtgagaataaagtatgtggcctgacgcgtgggcaagatgctaaagcagcttatgacgcgggcgcgatttacggtgggttgatttttgttgcgacatcaccgcgttgcgtcaacgttgaacaggcgcaggaagtgatggctgcggcaccgttgcagtatgttggcgtgttccgcaatcacgatattgccgatgtggtggacaaagctaaggtgttatcgctggcggcagtgcaactgcatggtaatgaagaacagctgtatatcgatacgctgcgtgaagctctgccagcacatgttgccatctggaaagcattaagcgtcggtgaaaccctgcccgcccgcgagtttcagcacgttgataaatatgttttagacaacggccagggtggaagcgggcaacgttttgactggtcactattaaatggtcaatcgcttggcaacgttctgctggcggggggcttaggcgcagataactgcgtggaagcggcacaaaccggctgcgccggacttgattttaattctgctgtagagtcgcaaccgggcatcaaagacgcacgtcttttggcctcggttttccagacgctgcgcgcatattaa

SEQ ID NO: 76206 - protein, 452 aa, Escherichia coli
MQTVLAKIVADKAIWVEARKQQQPLASFQNEVQPSTRHFYDALQGARTAFILECKKASPSKGVIRDDFDPARIAAIYKHYASAISVLTDEKYFQGSFNFLPIVSQIAPQPILCKDFIIDPYQIYLARYYQADACLLMLSVLDDDQYRQLAAVAHSLEMGVLTEVSNEEEQERAIALGAKVVGINNRDLRDLSIDLNRTRELAPKLGHNVTVISESGINTYAQVRELSHFANGFLIGSALMAHDDLHAAVRRVLLGENKVCGLTRGQDAKAAYDAGAIYGGLIFVATSPRCVNVEQAQEVMAAAPLQYVGVFRNHDIADVVDKAKVLSLAAVQLHGNEEQLYIDTLREALPAHVAIWKALSVGETLPAREFQHVDKYVLDNGQGGSGQRFDWSLLNGQSLGNVLLAGGLGADNCVEAAQTGCAGLDFNSAVESQPGIKDARLLASVFQTLRAY

SEQ ID NO: 76207 - DNA, 1359 bp, Helicobacter pylori
  CDS (1)..(1359): transl_table=11
atgcctagcgtgttagaaaacatccttaaagacaagctcctagaagtctctgatcttaaaaaaaaccacgctttaccgataaacataaacccaagcgatagggattttaaaaaggcgttactagaaaaaaagaccagctttattttagaatgcaaaaaagcatcgccctctaaaggtttaatcagaaaagattttgatctgttaaaaataaccaagacttatgaaaaattcgcctcttgtatttcggttttagccgattctaaatattttttaggctcttatgaaaacattaagatcgtttcgcagcattccaccaagcccattttgtgtaaagattttatcattgacgcttttcagatcaaactcgctagaatgatgggggcgaatgcggtgcttttaatgttaagcgtgttagatgataaaaattatttagagcttttcaacctcgccaaatccttaaacatgagcgtgctgactgaagtttccaaccagcaagaaattgagcacttgctcaaactccaatacgacattataggcatcaataacagggatttacacaccttaaaaaccgatattaaccacacgctcaaattacgccccctgttgcctaaagatgcgctcattatcagtgagtccggtatttattcgcatgcacaaatcaaagccctagccccttatgtgaatggctttttagtgggtagctctttgatgaaagaaaaggatttgaaaaaagcgtgtattaaattgattttaggcgaaaataaagtgtgcgggcttacaaggattaaagacgctaaagccgtttataaaaaccattttatttatgggggtttgatttttgaaaaatcttcgccccgatacatcaagcctaaagaagccctaaaaatcacaaaagcggttaaaaaactggattttgtgggcgtgtttgtgaaagatagcattaaaaaaattcaaaaaatcgttaaaaaacttgatttaaaagcggtgcagctttatggctattcgcaaaaagaaatcgctcaattgaaaaaagcactccctaaaacttgcgcgatctggcaagtaataagcgtgatgagtgctaaagatttagtgcctaaaactaaagaggcctctctaatcttatacgacactaaaggggataaaatgggaggcaatggcgtgagttttgattgggaaattttagaaaatgtcaaaacgcctttcatgctagctggggggcttaatttggataatattcaaaaagccttgaaagttgaagcgttgggtttggatttcaattccggtttagaaataagccctgggattaaaaataaggataaaatcaagcgattagcccgaattttaagagagtattaa

SEQ ID NO: 76208 - protein, 452 aa, Helicobacter pylori
MPSVLENILKDKLLEVSDLKKNHALPININPSDRDFKKALLEKKTSFILECKKASPSKGLIRKDFDLLKITKTYEKFASCISVLADSKYFLGSYENIKIVSQHSTKPILCKDFIIDAFQIKLARMMGANAVLLMLSVLDDKNYLELFNLAKSLNMSVLTEVSNQQEIEHLLKLQYDIIGINNRDLHTLKTDINHTLKLRPLLPKDALIISESGIYSHAQIKALAPYVNGFLVGSSLMKEKDLKKACIKLILGENKVCGLTRIKDAKAVYKNHFIYGGLIFEKSSPRYIKPKEALKITKAVKKLDFVGVFVKDSIKKIQKIVKKLDLKAVQLYGYSQKEIAQLKKALPKTCAIWQVISVMSAKDLVPKTKEASLILYDTKGDKMGGNGVSFDWEILENVKTPFMLAGGLNLDNIQKALKVEALGLDFNSGLEISPGIKNKDKIKRLARILREY

SEQ ID NO: 76209 - DNA, 1410 bp, Pasteurella multocida
  CDS (1)..(1410): transl_table=11
atgacacaagcgtttccctctattctgcaaaaaatcattcaagataaaaccacttggattgcagaaaaacaagcacaattgcctttagcaagctttcaagatcagctagaacgtagtgatcgtgacttttatcaagcgatgcaacaaggctcaaaacaacgcccttcatatatcttagaatgtaaaaaagcctctccctcaaaaggcttaattcgtgcagcattcgatttaaccgagattgccgaggtttatcaacactatgctacggtcatttccgtcttaaccgatgaaaaatattttcaagggcattttgctgatattgctcaagtacgccaacgcgtgacacaaccgattttatgtaaagattttatcttatctgaataccaagtatatttggcacgatacgcacaagccgatgctattttattgatgctttccgttctcaatgatgaacgctatacacaattagccacattagcacaccaattagggatgggcgttttaactgaaaccagtaatgaggcagaatttgcgcgcgcattagcgttaaaagcgaaagtgattggtgtcaataatcggaatttacatgatctcagtgtagacatacaacgtgttgcccagatcactcaacactatgccgatcagattcctcctgaaaccaaaattatcagtgaatctggtatctatcaacaccaacaaattcgagacttacgccatgttgccgacggttttttaattggcagtagtttaatgcaacacacagatttaaatcatgcggtacgctcacttctttttggggaacataaagtttgtgggctcacccgtccacaagatgtaagagcggtttaccagcaaggtgcactttacggtggactgatttttgtgacacactcaaaacgttgcattagcttacgtcaagcccaagaattagtcacacaagccccattgcgctttgttggggtatttcaagatcaatccatagcgtttatctgtcaccttgcaactcaattaagactccacgccgtccaattacatggcaacgaaagccacgaatttattcgccaattacgcgatgaattgccagtgaattgtgaaatttggcgcgccatttgcattgagagtagtggcaccagtccgtgtcaaatcgtggaaaataaaaatattgatcgttatatttttgacagtaaaacgcatcaacaacgtggcggaacggggaaaacatttgattggcaattgatccctcatcacttaaaaccaaaaagtatgttagctggtggtattacaccagaaaatatccctctggcgctcgctcaaggctgtttaggactggatttaaattcagggcttgaaacttatcctggtgtaaaatcacaccaaaaagtcgttgcagcttttgctcaactccgctaa

SEQ ID NO: 76210 - protein, 469 aa, Pasteurella multocida
MTQAFPSILQKIIQDKTTWIAEKQAQLPLASFQDQLERSDRDFYQAMQQGSKQRPSYILECKKASPSKGLIRAAFDLTEIAEVYQHYATVISVLTDEKYFQGHFADIAQVRQRVTQPILCKDFILSEYQVYLARYAQADAILLMLSVLNDERYTQLATLAHQLGMGVLTETSNEAEFARALALKAKVIGVNNRNLHDLSVDIQRVAQITQHYADQIPPETKIISESGIYQHQQIRDLRHVADGFLIGSSLMQHTDLNHAVRSLLFGEHKVCGLTRPQDVRAVYQQGALYGGLIFVTHSKRCISLRQAQELVTQAPLRFVGVFQDQSIAFICHLATQLRLHAVQLHGNESHEFIRQLRDELPVNCEIWRAICIESSGTSPCQIVENKNIDRYIFDSKTHQQRGGTGKTFDWQLIPHHLKPKSMLAGGITPENIPLALAQGCLGLDLNSGLETYPGVKSHQKVVAAFAQLR

SEQ ID NO: 76211 - DNA, 1359 bp, Salmonella typhimurium
  CDS (1)..(1359): transl_table=11
atgcaaaccgttttagcgaaaatcgtcgcagacaaggcgatttgggtagaagcccgcaaacagcaacagccgctggccagttttcaaaatgagatccagccaagtacacgccatttttatgatgcgctccagggcgcgcgtaccgcctttattctggagtgtaagaaagcatcgccatcaaaaggcgtgattcgcgacgatttcgatccggcgcgtattgccagtatttatcaacattacgcctcggcgatctcggtgctcaccgacgaaaaatattttcaggggagcttcgattttctgccggtcgttagccaaagcgcgccgcagccgattctgtgtaaggattttattatcgatccctatcagatctaccttgcccgttactatcaggccgatgcctgtttactgatgctctcggttctggatgacgaacagtatcgccaactctccgccgtcgcgcacagtctgaaaatgggcgtgctcacggaggtcagtaatgacgaagaacgggagcgcgcgatagcgttaggcgcaaaagtggtaggtatcaacaatcgcgatctgcgcgatctgtcgattgatttgaatcgcacccgccagctggcgccaaaactgggccacggcgtgactgtcatcagcgagtccgggattaacacctatggtcaggtacgcgaactgagccacttcgccaacggttttttaattggctccgcgttaatggcgcatgacgatcttaacgccgccgtccgtcgcgtgctgcttggcgaaaataaagtctgcggcctgacccgcgcccaggacgctaaagcggcctgtgacgctggcgcaatatatggcgggttgatttttgtgccctcatctccgcgcgcggttagcgttgagcaggcgcgagaagtgataagcggcgcgccattgcagtatgtcggcgttttcaagaacgctgatatcgccgatgtttgccagaaagccgccgtcctgtcgctttctgccgtacagctacatggcagcgaagaccaggcgtatgtcaacgcgctgcgcgaggcgttgccgaaacaggtgcaaatctggaaggcgctgagcgttagcgatgcccttcccgcacgcgattatcaccatgtcgataaatacattttcgacaatgggcaaggcggcagcgggcagcgcttcgactggtcactgctacaggggcaaccgctggataatgtgttactggcgggcgggctggcggccgataactgcgtccaggcggcgcaagtcggctgtgccggtctcgattttaattcaggtgtggagtcacagccgggcatcaaagatgctcgtcttctggcctcagtttttcagacactgcgcgcatattaa

SEQ ID NO: 76212 - protein, 452 aa, Salmonella typhimurium
MQTVLAKIVADKAIWVEARKQQQPLASFQNEIQPSTRHFYDALQGARTAFILECKKASPSKGVIRDDFDPARIASIYQHYASAISVLTDEKYFQGSFDFLPVVSQSAPQPILCKDFIIDPYQIYLARYYQADACLLMLSVLDDEQYRQLSAVAHSLKMGVLTEVSNDEERERAIALGAKVVGINNRDLRDLSIDLNRTRQLAPKLGHGVTVISESGINTYGQVRELSHFANGFLIGSALMAHDDLNAAVRRVLLGENKVCGLTRAQDAKAACDAGAIYGGLIFVPSSPRAVSVEQAREVISGAPLQYVGVFKNADIADVCQKAAVLSLSAVQLHGSEDQAYVNALREALPKQVQIWKALSVSDALPARDYHHVDKYIFDNGQGGSGQRFDWSLLQGQPLDNVLLAGGLAADNCVQAAQVGCAGLDFNSGVESQPGIKDARLLASVFQTLRAY

SEQ ID NO: 76213 - DNA, 1410 bp, Vibrio cholerae
  CDS (1)..(1410): transl_table=11
atgtccgagcagttgtctgagcatatttccgtacaaaccgcgcaaatggcgcaagtgctggtcaaaatcgtcaacgataaataccaatggattgaagagcgcaaagccaagcaacctcttgctagctttcatccattactgactcgctcagagcgcgatttctatcaagccttgagcggcgataacaccgtattcattctcgaatgcaaaaaagcctcaccttcaaaaggattgatccgcgaagagtttgatctcgattacatcgcctctgtgtatggcgagtacgccagtgccatttcggtactgactgacgagaaatatttccaaggtcgttttgagtttttgccgcaagtgcgcgctcaagtggctcagcctgtcttgtgcaaagattttatggtcgacccgtatcaggtttatctggcgcgtcattatcaagcggatgcgattttgctgatgctgtctgtgctcaatgatgatcaatatcgtgaactggctgctgtggcgcacgaccttggtatgggcgtactcaccgaagtcagcaacgaacaagaattgaaacgtgcagttgatctgcaagcgaaagtcatcggcatcaataaccgcaatctgcgtgatttgaccaccgacctaaatcgcaccaagcagttggcgccgctcattccacaaggcaccatcattatttccgaatccggtatttatacccatcagcaggtgcgtgatttggctgaatttgccaatggtttcttgattggtagctcgctgatggcgcaaagcaatcttgaactggcggtgcgaaaaattgtgctaggtgaacataaggtgtgcggtttgactcatcctgatgatgcggtgaaagcctaccaagccggttccgtttttggtggattgatttttgttgagaagtccaaacgctttgtcgatgtagaacaagctcgcctgaccatgagcggcgcgccgctacagtatgtcggcgtgtttcaaaatcacccagcagcacaagtcgccgatattgcaaccaaacttggcttatttgcggtgcaactgcacggtgaggaagactctgcgtatgtaagcgaactgcgcgcttcccttccagaatccattgaaatttggaaagcgtatggcgtgagtgatgctttacctgagctactaccagagcacatcgataggcatctgctcgatgccaaagtcggcgaacagagtggcggcacaggacgcagttttgattggcgcttgctgccaaaacatagcgacctgatgctcgccggcggcttgagcgccgagaatgtcgcccaagcggcgcaacttggctgccgcggactcgatttcaactctggcgtggaaagcgctccgggtaaaaaagacgccaaccagttacaacaggttttccaacagttacggaattattag

SEQ ID NO: 76214 - protein, 469 aa, Vibrio cholerae
MSEQLSEHISVQTAQMAQVLVKIVNDKYQWIEERKAKQPLASFHPLLTRSERDFYQALSGDNTVFILECKKASPSKGLIREEFDLDYIASVYGEYASAISVLTDEKYFQGRFEFLPQVRAQVAQPVLCKDFMVDPYQVYLARHYQADAILLMLSVLNDDQYRELAAVAHDLGMGVLTEVSNEQELKRAVDLQAKVIGINNRNLRDLTTDLNRTKQLAPLIPQGTIIISESGIYTHQQVRDLAEFANGFLIGSSLMAQSNLELAVRKIVLGEHKVCGLTHPDDAVKAYQAGSVFGGLIFVEKSKRFVDVEQARLTMSGAPLQYVGVFQNHPAAQVADIATKLGLFAVQLHGEEDSAYVSELRASLPESIEIWKAYGVSDALPELLPEHIDRHLLDAKVGEQSGGTGRSFDWRLLPKHSDLMLAGGLSAENVAQAAQLGCRGLDFNSGVESAPGKKDANQLQQVFQQLRNY

SEQ ID NO: 76215 - DNA, 1428 bp, Yersinia pestis
  CDS (1)..(1428): transl_table=11
atgcaggaaactgggggttacaaaaccgagggttataacgttggcagtgacaaagttgacagtgataaaaccaaaaccgtgctccaccaaatcgtacacgataaagaaatttgggttgccgcgcggaaactgcaacagcctctaacccgcttccaaaacgaaatcacccagagtcagcgcgatttttatcacgcgctacaaggcgataaaacggtctttattttggaatgcaaaaaagcctcaccttctaaaggggttatccgtgacaactttaacccggcggagattgccggtgtttataagcactatgcgtcggctatctcagtattaacggatgagaaatatttccagggcagttttgatttcttgccacaagtcagtgccgccgtcactcagccggtattgtgtaaagattttattattgatgcttatcagattcagctagcgcggttttaccacgctgacgccattttactgatgctgtcggtcttggacgatgaggcttaccgccaattggccgccgtcgcacacagcctgaacatgggggtgttgaccgaagccagtaacgccgaagaattggagcgtgctattaccttgggtgccaaagttgttggcatcaataaccgcgacctgcgtgacctgtctatcgatctgaatcgcacccgtgaattggcaccacgcctaccagaaggtgtcacaataatcagtgaatctggcattagtcattatcgtcaggtccgtgaattgagccaatttgccaacggtttcctgattggcagtgccctgatgtccgaacccgatctcaacgcggccgtccgccgggtgttactgggcgaaaataaagtttgcggcctgacacgcgcacaagatgccgccacggcttaccacgcaggtgcggtgtacggcgggttgatttttgtcgacagttcaccccggtatgtggatatcgccagcgcccgtacggttatcagtggtgcgccgctaaagtatgtcggtgtttttcgtcatgctgaaatagaaactgtacggcaaacggctgaacaactctcactggcagcagtgcaattgcatgggcatgaagatcaacagtatatcaatcaactgcgcaaagtattacctgcggattgccagatttggaaggcactgagtgtcggtgacacgatgccggaacgcaacttacagcaagttgaacgctacgtattggatcacggtacgggtggcacagggcaacgtttcgactggtcattattggcagatcaagcactagataatgtcttgctggcaggcggcttggggccagataactgtgatgtggcagcccaactaggctgtgccgggctggatgtcaattccggcgtagaaagcgcccctggcatcaaagacccccaacggatcgccgctgtattccaggcattacgcgtgtactga

SEQ ID NO: 76216 - protein, 475 aa, Yersinia pestis
MQETGGYKTEGYNVGSDKVDSDKTKTVLHQIVHDKEIWVAARKLQQPLTRFQNEITQSQRDFYHALQGDKTVFILECKKASPSKGVIRDNFNPAEIAGVYKHYASAISVLTDEKYFQGSFDFLPQVSAAVTQPVLCKDFIIDAYQIQLARFYHADAILLMLSVLDDEAYRQLAAVAHSLNMGVLTEASNAEELERAITLGAKVVGINNRDLRDLSIDLNRTRELAPRLPEGVTIISESGISHYRQVRELSQFANGFLIGSALMSEPDLNAAVRRVLLGENKVCGLTRAQDAATAYHAGAVYGGLIFVDSSPRYVDIASARTVISGAPLKYVGVFRHAEIETVRQTAEQLSLAAVQLHGHEDQQYINQLRKVLPADCQIWKALSVGDTMPERNLQQVERYVLDHGTGGTGQRFDWSLLADQALDNVLLAGGLGPDNCDVAAQLGCAGLDVNSGVESAPGIKDPQRIAAVFQALRVY

SEQ ID NO: 76217 - DNA, 2307 bp, Aspergillus awamori
  CDS (1)..(2307)
atggcggactccggactcgtcgatcattccccccaccatcccaccaaggccgcccagttgaacacggcatcgaatgttatcttgattgataactacgactcgtttacctggaacgtttacctagtccttgagggtgctacagtcaatgtatttcgtaatgaccagatcactttggaggaactgatcgccaaaaaacccacccagctggttatcagtccgggccccggtcaccccgagactgacgctggtatcagcagtgcagccatccaatacttcagtggcaagattcccatcttcggtgtgtgcatgggccagcaatgtattattacttgctttggtggaaaggttgatgtcaccggcgaaattcttcacggcaagacgtccgcgcttaaacatgacggcaagggcgcctatgaaggactacctgactcgctcgccctcactcgttaccactcgctagctggtacacatgcgacaattcccgactgtctggaggtgtcctcttccgtccagttaacggacgatagcaacaaggatgtcatcatgggtgtgaggcacaagaaattggctgtggagggagtccagttccaccccgagagtatcctcactgagtacggccgtaccatgttccgcaacttcctcaaacttactgcaggtacctgggaaggaaacgggaagcattttgatgaacagagcaacacgaccaaggccaccgtttcctcaaacactgccccgaaaactgacaagaagttgtccatcctcgaaaggatttacgaccatcggagagccgctgttgccgtgcaaaagaccattccctcccagcggccagcagacctccaggctgcctatgaccttaacctggcccctccccaggtcccatttccggctcgtcttagacaatcgccctatccactgtcccttatggcggaaatcaagcgtgcttctccctccaagggtatgatagccgaaaacgcgtgtgcgcccgctcaggccaggcaatacgcgaaggccggtgccagtgtcatctctgtgctcacagagcctgaatggttcaaaggcagcattgacgacttgcgtgccgttcgccaaagtctggagggcttgacgaacaggcccgccattctgcggaaggaattcgttttcgacgaatatcagatcctagaggcccgtttggccggtgctgacacggtcttgctcattgtgaagatgcttagtgttgaactcctcactcggttgtatcactactcccgtagccttggcatggagcctttggttgaagtgaacacacccgaagagatgaagattgcggtcgatcttggagctgaggttatcggtgtcaacaacagagacctcactagtttcgaggttgatctcggcactactagccggctcatggatcaggtgcccagcagcaccattgtgtgtgccctcagtggaatctccgggcctaaggatgtggaagcttacaagaaggagggtgtcaaagctatcctagtaggagaagcccttatgcgggcagcagacacggctgctttcattgctgagcttcttggaggcagctcacagaacgtttccaaagagtcccggagttcgccgttggtaaagatctgcggcactcgttctgaagaagcagcacgagcggcgatcgaggctggagcagacctaattggaattatcatggttcagggacgaacgcgatgcgtccctgatgacgtggccctccgtatatctcaagtggtcaagtccatcccgaagcctgctggtcaaactcctcccacatctcgaggaactcccgctgcagcatctgttgagtattttgaccactcagccagaatcctacgtcatcctagccgggcgcttctcgtgggcgtcttccagaaccaaccccttgattatattttgagccagcaacaaaagctgggactcgatgtcgtgcaacttcacggatctgagccgcttgaatgggccaaattgatcccagtgcctgtcatccgcaagtttgggcttgacgagcctgcgatcgcccgcagggcttatcactccctaccattactggattctggcgttgggggaactggtgagttgctggaccagtcccgcgttcagaacgtcctcgataaggatagcggtttgcgcgttattctggcaggtggcttagatcccaccaatgttgctgggattgtccagaagcttggcgaatccggtcgcaaggtagttggcgtcgatgtcagttctggcgtagagtcagacggtgctcaggatcttggcaaaattcgagcctttgtgcaggccgtgaggggactctag

SEQ ID NO: 76218 - protein, 768 aa, Aspergillus awamori
MADSGLVDHSPHHPTKAAQLNTASNVILIDNYDSFTWNVYLVLEGATVNVFRNDQITLEELIAKKPTQLVISPGPGHPETDAGISSAAIQYFSGKIPIFGVCMGQQCIITCFGGKVDVTGEILHGKTSALKHDGKGAYEGLPDSLALTRYHSLAGTHATIPDCLEVSSSVQLTDDSNKDVIMGVRHKKLAVEGVQFHPESILTEYGRTMFRNFLKLTAGTWEGNGKHFDEQSNTTKATVSSNTAPKTDKKLSILERIYDHRRAAVAVQKTIPSQRPADLQAAYDLNLAPPQVPFPARLRQSPYPLSLMAEIKRASPSKGMIAENACAPAQARQYAKAGASVISVLTEPEWFKGSIDDLRAVRQSLEGLTNRPAILRKEFVFDEYQILEARLAGADTVLLIVKMLSVELLTRLYHYSRSLGMEPLVEVNTPEEMKIAVDLGAEVIGVNNRDLTSFEVDLGTTSRLMDQVPSSTIVCALSGISGPKDVEAYKKEGVKAILVGEALMRAADTAAFIAELLGGSSQNVSKESRSSPLVKICGTRSEEAARAAIEAGADLIGIIMVQGRTRCVPDDVALRISQVVKSIPKPAGQTPPTSRGTPAAASVEYFDHSARILRHPSRALLVGVFQNQPLDYILSQQQKLGLDVVQLHGSEPLEWAKLIPVPVIRKFGLDEPAIARRAYHSLPLLDSGVGGTGELLDQSRVQNVLDKDSGLRVILAGGLDPTNVAGIVQKLGESGRKVVGVDVSSGVESDGAQDLGKIRAFVQAVRGL

SEQ ID NO: 76219 - DNA, 2313 bp, Aspergillus niger
  CDS (1)..(2313)
atggcggactccggactcgtcgatcattccccccaccatcccaccaaggccgcccaactgagcaccgcatcgaatgttatcttgattgataactacgactcgtttacttggaacgtctaccagtacttagttctcgagggtgctacagtcaatgtgtttcgtaatgaccagatcactttggaggaactgatcgccaaaaagcccacacagctggtcatcagtcccggtcccggtcaccccgagactgacgctggtatcagcagtgcagccattcaatatttcagcggcaagattcccatcttcggtgtatgcatgggtcagcaatgtattattacttgctttggtggaaaagttgatgtcaccggcgagattcttcatggcaagacatccccgcttaaacatgacggcaagggcgcctatgaaggactacctggctcgctcgccgtcactcgctatcactctctagctggtacacatgcgacaatccccgactgtctggaggtgtcctcttccgttcagttggcggacgacagtaacaaagatgtcataatgggcgtgagacacaagaagttggccgtggagggggttcagttccaccccgaaagtatcctcactgagtacggccgtatcatgttccgcaacttcctcaaacttactgcaggcacctgggaaggaaacgggaaacattttggtgagcagagcagcactaccaaggccaccgttccctcaaaccctcccccgaaaacggacaagaagttgtccatcctcgaaaggatctacgaccatcggagagccgctgtcgccgtgcaaaagactattccctcgcaacggccagccgacctccaggctgcctatgaccttaatctggcccctccccagatcccatttccggctcgtcttagacaatcgccctacccactgtcccttatggcagagatcaagcgtgcttctccctctaagggtatgatagccgaaaatgcatgcgcgcctgctcaggccaggcaatacgcgaaggccggtgccagtgtcatctctgtgctcacagagcctgaatggttcaaaggcagcattgacgacttgcgtgccgttcgccaaagtctggagggcatgacgaacaggcctgccattctgcggaaggaattcgtttttgacgaataccagatcctagaggcccgtttggccggtgccgacaccgttttgctcattgtgaagatgcttagtgttgaactcctcactcggttgtatcactactcccgtagccttggcatggagcctttggttgaagtgaacacacccgaagagatgaagattgcggtcgaccttggagccgaggttattggtgtcaacaacagggacctcacaagcttcgaggttgatctcggcactactagccggctcatggatcaggtgcccagcagcaccatcgtgtgtgctctcagtgggatctccgggccgaaggatgtggaggcttacaagaaggagggtgtcaaagctattctagtaggagaagccctgatgcgggcagcagacacggctactttcattgctgagcttcttggaggcagctcacaaaccgtttccagcgagtcccggagatcgccgttggtaaagatctgcggtactcgatctgaagaagctgcacgagcagcgatcgaggctggagcagacctaattggaatcatcatggtgcaagggcgaaccggatgcgtccccgatgacgtggcgctcccgatatcccaagtggtcaggtccaccccgaaacctgctagtcaagctcttcacacatctcaagaacctcccgctgcgacatctgtggagtactttgatcactcagccaaaattttgcgtcatcctagccgggcgcttctcgtgggcgtctttcagaaccagccccttgattatatattgagtcagcaacaaaaattgggacttgatgtcgtgcaacttcacggatctgagccgcttgaatgggccaagttgatcccagtgcctgtcatccgcaagtttggacttgacgagcctgcgatcgcccgcagggcttaccactccctaccgttactggattctggcgttgggggaactggtgagttgctggaccagtcccgcgttcagaatgtcctcgataaggactgtggtttgcgcgttattttggcgggtggtttagatcctaccaatgttgctggcattgtccagaagcttggcgaatctggccgcaaggtcgttggcgtagatgtcagttctggcgtagagtcagacggcgctcaggatcttaacaaaattcgcgcatttgtgcaggccgtgaggggactctag

SEQ ID NO: 76220 - protein, 770 aa, Aspergillus niger
MADSGLVDHSPHHPTKAAQLSTASNVILIDNYDSFTWNVYQYLVLEGATVNVFRNDQITLEELIAKKPTQLVISPGPGHPETDAGISSAAIQYFSGKIPIFGVCMGQQCIITCFGGKVDVTGEILHGKTSPLKHDGKGAYEGLPGSLAVTRYHSLAGTHATIPDCLEVSSSVQLADDSNKDVIMGVRHKKLAVEGVQFHPESILTEYGRIMFRNFLKLTAGTWEGNGKHFGEQSSTTKATVPSNPPPKTDKKLSILERIYDHRRAAVAVQKTIPSQRPADLQAAYDLNLAPPQIPFPARLRQSPYPLSLMAEIKRASPSKGMIAENACAPAQARQYAKAGASVISVLTEPEWFKGSIDDLRAVRQSLEGMTNRPAILRKEFVFDEYQILEARLAGADTVLLIVKMLSVELLTRLYHYSRSLGMEPLVEVNTPEEMKIAVDLGAEVIGVNNRDLTSFEVDLGTTSRLMDQVPSSTIVCALSGISGPKDVEAYKKEGVKAILVGEALMRAADTATFIAELLGGSSQTVSSESRRSPLVKICGTRSEEAARAAIEAGADLIGIIMVQGRTGCVPDDVALPISQVVRSTPKPASQALHTSQEPPAATSVEYFDHSAKILRHPSRALLVGVFQNQPLDYILSQQQKLGLDVVQLHGSEPLEWAKLIPVPVIRKFGLDEPAIARRAYHSLPLLDSGVGGTGELLDQSRVQNVLDKDCGLRVILAGGLDPTNVAGIVQKLGESGRKVVGVDVSSGVESDGAQDLNKIRAFVQAVRGL

SEQ ID NO: 76221 - DNA, 2352 bp, Cryptococcus neoformans
  CDS (46)..(2304)
ctttgacagaaaaaaaacctcggtacacccgaggaaagatcaaaaatgggctttactctccttatcgacaactatgactctttcacttggaacatttacgccgatctcgcttctgtcggcggtaacccctatgtcgtccgtaatgataagattacccttaaggagatcgaggggatgttttctgatggcgagcttgagcggatcgtcatatctcccggtcctgggcatcctaggacagactctggtgtctctagggacgtgatcgcttggggaatgggcaagttgcctattttgggtgtgtgcatgggtctggagtgtattgttgacctgctcggtggagagatcgcttatgccggtgaaattaagcatggtaaaacctcgcttgtccagcatgactctatcggggtcttccataacctcccccagtttctctcttctactcgataccattccctttccgcccaaatccagtcgcttccttcagtcttgcaagtcacttcgactaccaaagaatctggtgtgatcatgggtgtacgacacaggacctacaccgttgaagccgtgcagtatcatcctgagagttgcatgagtgaaggcggtcgaggcttaatggccaatttcatccaaatgaagggcggcaaatggggtggcgaaaatgcttggtgtggcgttcccgcggagggcgaggaggagcagcccaaggcgaagaccaatggtgctccaagcttgcctactattttgaataggattcacgcgcagaggttattggacgttgagcaagccgaaaaggttcctgctacaagccctgccaacgtctctacctctctttccctctacgcttctccacctctgatcaactttagggaccgtatggtctctactccccacactgccgtcatggctgagattaagcgtgcttctccctccaagggcgatatcgctcctaccgcttccgctcctgagcaagcactcaagtatgctcttgccggggcttccgtcatctcggttctcacagagcctacgtggttcaagggcagcttgcttgacatgctcgctgtgcgcaacgctgttgatagtcttcccaaccgtcctgccatcttgcgaaaggattttgttttgtccaaatacatgattgatgaggctagattatatggcgccgacactgtgcttctcattgtcgccatgctcgagcctcagcaacttaaggaattgtacgattactctgtctctcttggcatggaacccctcgtcgaggtcaacaaccctaccgagctctcactcgcccttgaaattggttccaaggtcattggtgttaacaaccgtaatctacatgactttaatgttgacatgtccaccacttctcgagtcaacgccgctctcaacggacgggacgttgttctttgcgctttgagcggtatttcgagtcacgaggatgttgagaagtatgtcaaagaaggtgtcaagggtgtgcttgttggtgaggctttgatgcgagcaagcgacactaaggctttcctccggtcgcttattggcttaccgcctttagaagtcgttcctaagtccaggccgctcgtcaagatttgcggtatccgttctacagatgacgctaagcttgcaattagtgccggtgccgatctccttggtgtaatccttgtccccggtacgaaacgttgcatatccacttctaccgcccgcgaaatttctgctcttgtgcaatccgcccgatctcaatcctcttccaagccattagaaccttctctttcctccccttggtttaccacccaatccgacctcctctcatcccggcgcaaacccctactagtcggtgtcttccaaaatcagtctctctccgacatcctctcagccgtggaggagattggcctcgaccttgttcaactacacggtgatgaaccccaagcctgggccaagttcatccccgtgcctgtggtcaaggtgttccgagtttcgcctgaaggaatagttagaggtggtgagttcaggcggccaggtttgaaccaagcaatcttgctcgatgctggtggtgtgtctggcggtggtggggaaggaaaagccttcccttgggaacatgccaagcggctcatccaatccggcgaggtggggtctgaaggtcatatgcctctccctgtcatcctcgctggtgggttgacgcctgagaatgtgggccaggcaattgaacaagctggtgaaggcgtttggtgtgtggacgtcagcagtggggtcgaaggagaaggaggaaaggtcaaggagaaggttgaggcgtttgtgaaggccgtaaggggttgatttttcttaaaagagtgtgtatatacatattagagaagtgatgcaatc

SEQ ID NO: 76222 - protein, 752 aa, Cryptococcus neoformans
MGFTLLIDNYDSFTWNIYADLASVGGNPYVVRNDKITLKEIEGMFSDGELERIVISPGPGHPRTDSGVSRDVIAWGMGKLPILGVCMGLECIVDLLGGEIAYAGEIKHGKTSLVQHDSIGVFHNLPQFLSSTRYHSLSAQIQSLPSVLQVTSTTKESGVIMGVRHRTYTVEAVQYHPESCMSEGGRGLMANFIQMKGGKWGGENAWCGVPAEGEEEQPKAKTNGAPSLPTILNRIHAQRLLDVEQAEKVPATSPANVSTSLSLYASPPLINFRDRMVSTPHTAVMAEIKRASPSKGDIAPTASAPEQALKYALAGASVISVLTEPTWFKGSLLDMLAVRNAVDSLPNRPAILRKDFVLSKYMIDEARLYGADTVLLIVAMLEPQQLKELYDYSVSLGMEPLVEVNNPTELSLALEIGSKVIGVNNRNLHDFNVDMSTTSRVNAALNGRDVVLCALSGISSHEDVEKYVKEGVKGVLVGEALMRASDTKAFLRSLIGLPPLEVVPKSRPLVKICGIRSTDDAKLAISAGADLLGVILVPGTKRCISTSTAREISALVQSARSQSSSKPLEPSLSSPWFTTQSDLLSSRRKPLLVGVFQNQSLSDILSAVEEIGLDLVQLHGDEPQAWAKFIPVPVVKVFRVSPEGIVRGGEFRRPGLNQAILLDAGGVSGGGGEGKAFPWEHAKRLIQSGEVGSEGHMPLPVILAGGLTPENVGQAIEQAGEGVWCVDVSSGVEGEGGKVKEKVEAFVKAVRG

SEQ ID NO: 76223 - DNA, 2289 bp, Neurospora crassa
  CDS (1)..(2289)
atgtcgtcctcctcagtcgtcgaccactctccccacgattccgctccttcgcccctggtgccaaccgcctccaacctcatcctcatcgacaactatgattcgtttacctggaacgtctaccagtacctcgtcctcgagggcgccaaggtgaccgtcttccgcaacgaccagatcaccatcgacgagctcatcgcaaagaaccccacccagctcgtcatcagccctgggcccggtcatcccggcaccgactccggtatctcgcgcgatgccatcaggcacttcgccggcaagatccccatctttggcgtgtgcatgggccagcagtgcatctttgacgtctatggcggcgacgtgtgcttcgccggtgagattctgcacggaaagacctctcctctgcgccacgacggcaagggcgcatatgccggtctgtctcaggatctgccagtgacgagataccactctcttgccggtactcatgtcacccttcccgagtgcttggaggttacctcttggattgcgaaggaggacggttccaagggtgtcatcatgggtgtccgccacaaggagtacaccattgagggtgttcagttccacccggagagtattctgtctgctgagggtcgtggcatgttccggaacttccttcacatgcagggaggcacttgggcggagaacgagagactgcaaaaggccgcccaggcacaggctgccaacacaaagtccgacgctcccacgcccaagaagagcaacatccttcaaaagatttacgcccaccgtaaggctgctgtggatgctcagaagcagattccttccctgagaccttctgacctccaagccgcttataacctgagcatcgcccctcctcaaatctctcttgtcgaccgtcttcgcaattcccccttcgatgtcgctctttgcgccgagatcaagagggcatctccctccaagggtgtctttgcgcttgatattgacgctccgtcgcaagctcgcaagtatgcgcttgccggcgcgagtgtcatctcggtcctgaccgagccagagtggttcaagggcagcatcgatgacctccgtgctgtccgtcaggtccttaacggcatgcccaaccggcccgccgtcctgcgcaaggagttcatctttgacgagtaccagatcctcgaagccagacttgccggtgctgacactgttctcctcattgtcaagatgctcgagtatgagctcctcgagcgcctatacaagtactccttgtctctcggcatggagcccctagtcgaggtccagaacaccgaggagatggccacagccatcaagctcggcgccaaggttatcggcgtcaacaaccgcaatctcgagagcttcgaagtcgaccttggcactaccggccgtctccgtagcatggtccccagcgacaccttcctctgcgctctcagcggcatcaacactcaccaagatgttcttgactgcaagcgcgacggtgtcaacggcattcttgtcggcgaggccatcatgcgtgcccctgatgccacccagttcatccgtgagctctgcgccggcctgacgggccccgtgcccaagtccgccgccgagccgctgcttgtcaagatctgcggcacccgttctgccgaggccgctgcggaagccatcaaggccggtgctgatcttgtgggcatgatcatggtgccaggcaccaagcgttgcgtcgaccatgagaccgccctttccatctcccaggctgtgcacatgagcaagaagaccggatccaccgaggtctcctcgcaagcctccaagtccgcaagggactttttcaatatcaacgccgagatcatccgcaagcggggacctctgctggtaggtgtcttcatgaaccagccccttgaggaggtgctcgagaagcagcatctctacgatctcgatatcgtccagctccacggtgacgagccgctcgagtgggccaaccttattccagtccccgttgtccgcaagttcaagcccggccaggtcggtcttgcgacccgtgggtaccatgccgtgcccctgctggattcgggcgctggatccggcacgttgttggacttggagtctgtcaagaaggagttggagaaggatgagcaggtaaccgtcttgcttgcgggcggattggagcctagcaatgttgtcgagacggtaaaatctttggggcctctgagtgagagggtgattggtgttgatgttagcagtggcgttgaggagggaggcaagcagagcttggagaagatcagggagtttgttaaggctgccaagtctgtcaggtaa

SEQ ID NO: 76224 - protein, 762 aa, Neurospora crassa
MSSSSVVDHSPHDSAPSPLVPTASNLILIDNYDSFTWNVYQYLVLEGAKVTVFRNDQITIDELIAKNPTQLVISPGPGHPGTDSGISRDAIRHFAGKIPIFGVCMGQQCIFDVYGGDVCFAGEILHGKTSPLRHDGKGAYAGLSQDLPVTRYHSLAGTHVTLPECLEVTSWIAKEDGSKGVIMGVRHKEYTIEGVQFHPESILSAEGRGMFRNFLHMQGGTWAENERLQKAAQAQAANTKSDAPTPKKSNILQKIYAHRKAAVDAQKQIPSLRPSDLQAAYNLSIAPPQISLVDRLRNSPFDVALCAEIKRASPSKGVFALDIDAPSQARKYALAGASVISVLTEPEWFKGSIDDLRAVRQVLNGMPNRPAVLRKEFIFDEYQILEARLAGADTVLLIVKMLEYELLERLYKYSLSLGMEPLVEVQNTEEMATAIKLGAKVIGVNNRNLESFEVDLGTTGRLRSMVPSDTFLCALSGINTHQDVLDCKRDGVNGILVGEAIMRAPDATQFIRELCAGLTGPVPKSAAEPLLVKICGTRSAEAAAEAIKAGADLVGMIMVPGTKRCVDHETALSISQAVHMSKKTGSTEVSSQASKSARDFFNINAEIIRKRGPLLVGVFMNQPLEEVLEKQHLYDLDIVQLHGDEPLEWANLIPVPVVRKFKPGQVGLATRGYHAVPLLDSGAGSGTLLDLESVKKELEKDEQVTVLLAGGLEPSNVVETVKSLGPLSERVIGVDVSSGVEEGGKQSLEKIREFVKAAKSVR

SEQ ID NO: 76225 - DNA, 2343 bp, Penicillium chrysogenum
  CDS (66)..(2324)
aagcttgcagattaacgattgtcctattctcgcaaccccccgatttcctacgacaatccctggccatggcggaccttgtcgaccactccccccaccatgccactaaagcggcaaaattggccagcgcatccaacgtgattctgatcgacaactacgactcatttacctggaatatctatcaataccttgtccttgaaggtgctaccgtcacagtctatcgcaatgacgaagttactgttgaggacttggttgcaaagaagcccactcagctggttatcagtcctggccccggccacccggacaccgatgcgggaatcagtaatgccgtaatcaaacatttcagtggaaaggttccgatctttggtgtgtgcatgggtcagcaatgtatgatcacctcgtttggtggtaaggtggacgtgaccggcgaaattctgcacgggaagacatcggagttgaagcatgactccaagggtgtctaccagggattgccaacctcgctcgaggtcactcgctaccattcgctcgcggggacacactcgactattccagattgcttggaagtgacttcgcgggtcgagcttggggacgctagtggcaagaacatcattatgggagtcagacataaggagttcgcagtggagggtgttcagttccaccccgagagtatcttgacacaatacgggcgcaagatgttcagaaacttcttggagctcaccgctgggacttgggataacaagcagggagctgccgtcgccgcaccggcagacaagaagttatccattttggataagatctacgcccatcgcaaaaatgctgttgacgagcagaagaaaattccggctctgcggccagaggctcttcaagccgcatatgatctgaacattgcgcctcctcaactgtcattccctgatcgcctgagacagtcagactatcctctctcactcatggcggagatcaaacgtgcatcaccctcgaaaggcatcatctcggccaatgtgtgtgcccctgctcaagcacgggagtacgccaaagctggcgctagcgtcatttctgtcctcacagagccggagtggttcaagggcaccatagatgacctgcgggctgttcgccagagcctggagggacttcccaaccgaccagctgtcctccgaaaggagttcgtctttgaagagtaccagatcctggaggcacgtttggctggagctgatacagttctgctgattgtgaaaatgctggacattgagctgttgactagactgtaccattactcgcgcagtcttggcatggagcctctggtcgaggttaatacccctgaagagatgaagattgcagttgacctgggttccgaagtcatcggcgttaacaaccgagacctgacaagcttcgaggtcgatctcgggacaactagtcgcctaatggatcaagtgcctgagagcacaattgtgtgtgcccttagtggaatatcgggcccccaggatgtggaagcttataagaaagaaggcgttaaggcaattcttgttggagaggctcttatgagggcacctgatacctctgcctttgtggcacagcttctcggcggttctaaccaaaattttgctggtgcatcaccaagttctccactggtgaagatctgtggaacacggaccgaagaaggagctctggctgctatccaagctggcgcggatttgattggcatcattatggttcagggccgctcacggcttgtcccagatgatgttgctctcggaatttctcgggtggtcaagtcgacccctcgtccggccgatacattgcagcagccctcaagcgctacatcattggaatggttcgatcactccactaatattttgcgtcacccttctcgtgctttgctcgtgggtgtgttcatgaaccagccgctatcatacgtcgtttctcaacaacagaagttgggtctcgatgttgtgcaactgcacggatctgagccattggagtggtctagtttgattccagttcctgtcattcgcaaattcgcccccggtgacattggaattgctcgcagagcataccacactctcccattgctggactctggtgccgggggctctggcgaacttctggaggagagtggtgtcaagaaggtcctcgatagcgacgagggcttgcgggttatcctggctggaggattaaatccggacaacgtggcaggcacagtgaaaaagctgggccagtcgggccagaaagtggttggcttggatgtcagctcaggtgtagagacaaatggcgctcaagatctggagaaaattcgagcctttgtcaagtctgccaaaagcattcggcaatgaacaggctaggaatatgcat

SEQ ID NO: 76226 - protein, 752 aa, Penicillium chrysogenum
MADLVDHSPHHATKAAKLASASNVILIDNYDSFTWNIYQYLVLEGATVTVYRNDEVTVEDLVAKKPTQLVISPGPGHPDTDAGISNAVIKHFSGKVPIFGVCMGQQCMITSFGGKVDVTGEILHGKTSELKHDSKGVYQGLPTSLEVTRYHSLAGTHSTIPDCLEVTSRVELGDASGKNIIMGVRHKEFAVEGVQFHPESILTQYGRKMFRNFLELTAGTWDNKQGAAVAAPADKKLSILDKIYAHRKNAVDEQKKIPALRPEALQAAYDLNIAPPQLSFPDRLRQSDYPLSLMAEIKRASPSKGIISANVCAPAQAREYAKAGASVISVLTEPEWFKGTIDDLRAVRQSLEGLPNRPAVLRKEFVFEEYQILEARLAGADTVLLIVKMLDIELLTRLYHYSRSLGMEPLVEVNTPEEMKIAVDLGSEVIGVNNRDLTSFEVDLGTTSRLMDQVPESTIVCALSGISGPQDVEAYKKEGVKAILVGEALMRAPDTSAFVAQLLGGSNQNFAGASPSSPLVKICGTRTEEGALAAIQAGADLIGIIMVQGRSRLVPDDVALGISRVVKSTPRPADTLQQPSSATSLEWFDHSTNILRHPSRALLVGVFMNQPLSYVVSQQQKLGLDVVQLHGSEPLEWSSLIPVPVIRKFAPGDIGIARRAYHTLPLLDSGAGGSGELLEESGVKKVLDSDEGLRVILAGGLNPDNVAGTVKKLGQSGQKVVGLDVSSGVETNGAQDLEKIRAFVKSAKSIRQ

SEQ ID NO: 76227 - DNA, 2280 bp, Schizosaccharomyces pombe
  CDS (1)..(2280)
atgtctgaaaaagttgacgttggtgaaagcgtcaaaggagacgcctcagaaaatgcagttaaagaagttgctgaaagaccaattgttatgatagataattatgacagtttcacctggaacgttgttcaatatctttctaatctggaaaaacgatatcctattatggtttttcgcaatgatgaaatcactgtcgatgaattagaaaaacttaatcctttaaaactagttctctcacctgggcctggacatcctgcgcgtgatggtggtatttgtaacgaggctatttcgagatttgctggaaagattcctatacttggtgtgtgtatgggacttcagtgtatttttgagacaatgggtggtaaagttgattccgctggtgaaatcatacatggaaaagtttctaaaataaatcacgacggtctcggattttaccaaggaatacctcaaaatatttctgtaacaagatatcattctcttgctggaaaaatttcatcacttcctgattgtttggacgttacaagctggaccgagaatggtgtaataatgggtgcacgccataaaaagtatgctattgagggtgttcaataccatcctgaaagtatccttagtgagtatggcaaagagtatattcagaattttttgaatctcactgctggaacctgggaagaaaatggcattgttatgcctacaaaaaataacgcatttaacgcggctatgcgtgaaaattcgaattctgtttcttcaactaaaattcgcaaacaagaatctatccttgagaaaatccacgcgcagagacttattgacattgctgaaagtaaaagaaagcctggtctttctgtgggtgatttgcaaacatatttgaaccttaacatagcacctccatgtataaatttttatgagagattaaagcaatctaaaccagctttaatggctgaagtcaaacgtgcttccccttctaaaggtgacattaagttagacgcaaatgctgctatccaagctcttacttatgctcaggttggcgcctcagtcatatctgtgttaacagaaccaaaatggttcaaaggctcattgaatgatttgtttgttgcgcgaaaagctgttgagcatgtagctaatcggcctgcaattttgagaaaggatttcattattgacccttatcaaattatggaggctcgtttgaatggtgctgatagtgtattgctaatcgttgcgatgttaagccgtgaacaattagagtccctctataaattttctaaatctttgggcatggaaccgttagtagaggttaactgtgctgaggaaatgaagactgctatagaacttggtgctaaagttatcggcgttaataacaggaatttgcatagttttgaagtagacctttccactacatcaaaattagccgaaatggtcccagatgatgttattcttgcagctctcagtggaattagtagtcctgctgatgttgcccattatagtagtcaaggtgtatcagcagttcttgttggtgaatctcttatgagagcttcggatcctgccgcttttgcacgagagttacttaatctttcttctagcgagatatctaatggtaaaaaaacatcaacacccctagtgaaggtatgtggtactcgttcattgttagctgctaaaaccattgtagaatcaggaggcgatttgatagggttaatttttgtggaaaagagcaaacgaaaagtggacttgtccgtggccaaggaaatttcacattttgttcatacaaccaatagaaaacacatttccccaaagaaagcagtgactggtcaaagttggtttgatcatcagtatgaaaatcttgcttcctctccgcaccctttgttagtcggtgtgttccaaaatcaaccattagaatacattcgttctataatagcagaagtgaacttggatattgtccagcttcatggacaagaacctttcgaatggatacatatgctcgatagacctgttattaaggtgtttccgctaaattcttctgaaatttcaaggcccaactatcatattgtacctttgattgatgcatatgtcggtggagagtcaggaggtttaggcaagaaagtagactgggaagctgcatctttcattccagtatcttatgtcttagctggtggtctaacacctaaaaatgtacaagatgctatatctgttagccgcccagctgtagtcgatgtatcgagtggggtggagactgacgggaaacaagatcttgaaaagatcaaggcatttataaacgccgtaaaagaactttaa

SEQ ID NO: 76228 - protein, 759 aa, Schizosaccharomyces pombe
MSEKVDVGESVKGDASENAVKEVAERPIVMIDNYDSFTWNVVQYLSNLEKRYPIMVFRNDEITVDELEKLNPLKLVLSPGPGHPARDGGICNEAISRFAGKIPILGVCMGLQCIFETMGGKVDSAGEIIHGKVSKINHDGLGFYQGIPQNISVTRYHSLAGKISSLPDCLDVTSWTENGVIMGARHKKYAIEGVQYHPESILSEYGKEYIQNFLNLTAGTWEENGIVMPTKNNAFNAAMRENSNSVSSTKIRKQESILEKIHAQRLIDIAESKRKPGLSVGDLQTYLNLNIAPPCINFYERLKQSKPALMAEVKRASPSKGDIKLDANAAIQALTYAQVGASVISVLTEPKWFKGSLNDLFVARKAVEHVANRPAILRKDFIIDPYQIMEARLNGADSVLLIVAMLSREQLESLYKFSKSLGMEPLVEVNCAEEMKTAIELGAKVIGVNNRNLHSFEVDLSTTSKLAEMVPDDVILAALSGISSPADVAHYSSQGVSAVLVGESLMRASDPAAFARELLNLSSSEISNGKKTSTPLVKVCGTRSLLAAKTIVESGGDLIGLIFVEKSKRKVDLSVAKEISHFVHTTNRKHISPKKAVTGQSWFDHQYENLASSPHPLLVGVFQNQPLEYIRSIIAEVNLDIVQLHGQEPFEWIHMLDRPVIKVFPLNSSEISRPNYHIVPLIDAYVGGESGGLGKKVDWEAASFIPVSYVLAGGLTPKNVQDAISVSRPAVVDVSSGVETDGKQDLEKIKAFINAVKEL

SEQ ID NO: 76229 - DNA, 25 bp, Artificial sequence
  primer
atgatgcaaaccgttttagcgaaaa

SEQ ID NO: 76230 - DNA, 22 bp, Artificial sequence
  primer
ttaatatgcgcgcagcgtctgg

SEQ ID NO: 76231 - protein, 561 aa, Artificial sequence
  consensus sequence
  Variant (2)..(3): Xaa in position 2 to 3 is any amino acid
  Variant (5)..(31): Xaa in position 5 to 31 is any amino acid
  Variant (32)..(40): Xaa in position 32 to 40 is any or no amino acid
  Variant (42)..(44): Xaa in position 42 to 44 is any amino acid
  Variant (46)..(54): Xaa in position 46 to 54 is any amino acid
  Variant (55)..(60): Xaa in position 55 to 60 is any or no amino acid
  Variant (62)..(62): Xaa in position 62 is any amino acid
  Variant (64)..(64): Xaa in position 64 is any amino acid
  Variant (71)..(71): Xaa in position 71 is any amino acid
  Variant (73)..(81): Xaa in position 73 to 81 is any amino acid
  Variant (83)..(84): Xaa in position 83 to 84 is any amino acid
  Variant (86)..(88): Xaa in position 86 to 88 is any amino acid
  Variant (89)..(89): Xaa in position 89 is any or no amino acid
  Variant (91)..(92): Xaa in position 91 to 92 is any amino acid
  Variant (98)..(101): Xaa in position 98 to 101 is any amino acid
  Variant (103)..(103): Xaa in position 103 is any amino acid
  Variant (105)..(108): Xaa in position 105 to 108 is any amino acid
  Variant (110)..(111): Xaa in position 110 to 111 is any amino acid
  Variant (113)..(120): Xaa in position 113 to 120 is any amino acid
  Variant (121)..(125): Xaa in position 121 to 125 is any or no amino acid
  Variant (127)..(127): Xaa in position 127 is any amino acid
  Variant (131)..(134): Xaa in position 131 to 134 is any amino acid
  Variant (137)..(139): Xaa in position 137 to 139 is any amino acid
  Variant (142)..(144): Xaa in position 142 to 144 is any amino acid
  Variant (147)..(148): Xaa in position 147 to 148 is any amino acid
  Variant (151)..(154): Xaa in position 151 to 154 is any amino acid
  Variant (156)..(162): Xaa in position 156 to 162 is any amino acid
  Variant (164)..(169): Xaa in position 164 to 169 is any amino acid
  Variant (171)..(171): Xaa in position 171 is any amino acid
  Variant (173)..(174): Xaa in position 173 to 174 is any amino acid
  Variant (176)..(176): Xaa in position 176 is any amino acid
  Variant (178)..(182): Xaa in position 178 to 182 is any amino acid
  Variant (184)..(186): Xaa in position 184 to 186 is any amino acid
  Variant (188)..(189): Xaa in position 188 to 189 is any amino acid
  Variant (191)..(191): Xaa in position 191 is any amino acid
  Variant (193)..(195): Xaa in position 193 to 195 is any amino acid
  Variant (197)..(197): Xaa in position 197 is any amino acid
  Variant (201)..(201): Xaa in position 201 is any amino acid
  Variant (203)..(203): Xaa in position 203 is any amino acid
  Variant (205)..(207): Xaa in position 205 to 207 is any amino acid
  Variant (210)..(211): Xaa in position 210 to 211 is any amino acid
  Variant (213)..(214): Xaa in position 213 to 214 is any amino acid
  Variant (216)..(228): Xaa in position 216 to 228 is any amino acid
  Variant (229)..(232): Xaa in position 229 to 232 is any or no amino acid
  Variant (236)..(249): Xaa in position 236 to 249 is any amino acid
  Variant (250)..(250): Xaa in position 250 is any or no amino acid
  Variant (252)..(252): Xaa in position 252 is any amino acid
  Variant (254)..(254): Xaa in position 254 is any amino acid
  Variant (256)..(257): Xaa in position 256 to 257 is any amino acid
  Variant (260)..(268): Xaa in position 260 to 268 is any amino acid
  Variant (269)..(273): Xaa in position 269 to 273 is any or no amino acid
  Variant (275)..(278): Xaa in position 275 to 278 is any amino acid
  Variant (280)..(281): Xaa in position 280 to 281 is any amino acid
  Variant (282)..(300): Xaa in position 282 to 300 is any or no amino acid
  Variant (302)..(302): Xaa in position 302 is any amino acid
  Variant (305)..(310): Xaa in position 305 to 310 is any amino acid
  Variant (312)..(317): Xaa in position 312 to 317 is any amino acid
  Variant (320)..(322): Xaa in position 320 to 322 is any amino acid
  Variant (324)..(324): Xaa in position 324 is any amino acid
  Variant (326)..(331): Xaa in position 326 to 331 is any amino acid
  Variant (333)..(338): Xaa in position 333 to 338 is any amino acid
  Variant (340)..(350): Xaa in position 340 to 350 is any amino acid
  Variant (351)..(396): Xaa in position 351 to 396 is any or no amino acid
  Variant (401)..(414): Xaa in position 401 to 414 is any amino acid
  Variant (415)..(416): Xaa in position 415 to 416 is any or no amino acid
  Variant (418)..(418): Xaa in position 418 is any amino acid
  Variant (420)..(421): Xaa in position 420 to 421 is any amino acid
  Variant (422)..(422): Xaa in position 422 is any or no amino acid
  Variant (428)..(435): Xaa in position 428 to 435 is any amino acid
  Variant (436)..(436): Xaa in position 436 is any or no amino acid
  Variant (438)..(440): Xaa in position 438 to 440 is any amino acid
  Variant (441)..(441): Xaa in position 441 is any or no amino acid
  Variant (443)..(465): Xaa in position 443 to 465 is any amino acid
  Variant (466)..(479): Xaa in position 466 to 479 is any or no amino acid
  Variant (481)..(483): Xaa in position 481 to 483 is any amino acid
  Variant (484)..(487): Xaa in position 484 to 487 is any or no amino acid
  Variant (490)..(490): Xaa in position 490 is any amino acid
  Variant (492)..(493): Xaa in position 492 to 493 is any amino acid
  Variant (495)..(495): Xaa in position 495 is any amino acid
  Variant (497)..(506): Xaa in position 497 to 506 is any amino acid
  Variant (507)..(523): Xaa in position 507 to 523 is any or no amino acid
  Variant (529)..(531): Xaa in position 529 to 531 is any amino acid
  Variant (533)..(535): Xaa in position 533 to 535 is any amino acid
  Variant (537)..(542): Xaa in position 537 to 542 is any amino acid
  Variant (543)..(548): Xaa in position 543 to 548 is any or no amino acid
  Variant (550)..(550): Xaa in position 550 is any amino acid
  Variant (552)..(553): Xaa in position 552 to 553 is any amino acid
  Variant (558)..(560): Xaa in position 558 to 560 is any amino acid
LXXIXXXXXXXXXXXXXXXXXXXXXXXXXXXXXXXXXXXXFXXXLXXXXXXXXXXXXXXXEXKXASPSKGXIXXXXXXXXXAXXYXXXXAXXISVLTXXXXFXGXXXXLXXVXXXXXXXXXXXXXLXKDFXXXXYQXXXARXXXADXXLLXXXXLXXXXXXXLXXXXXXLXMXXLXEXXXXXEXXXAXXLXAXXXGXNNRXLXDXXXDLXXTXXLXXXXXXXXXXXXXXXXXSGIXXXXXXXXXXXXXXXGXLXGXXLMXXXXXXXXXXXXXXRXXXXGXXXXXXXXXXXXXXXXXXXXXKXCGXXXXXXAXXXXXXGAXXXGXIXXXXXXRXXXXXXAXXXXXXXXXXXXXXXXXXXXXXXXXXXXXXXXXXXXXXXXXXXXXXXXXXXXXXXXXVGVFXXXXXXXXXXXXXXXXLXLXXXVQLHGXXXXXXXXXLXXXXPXXXXXXXXXXXXXXXXXXXXXXXXXXXXXXXXXXXXXDXXXXXXXGGXGXXFXWXXXXXXXXXXXXXXXXXXXXXXXXXXXLAGGLXXXNXXXAXXXXXXXXXXXXGXDXXSGVEXXXG

SEQ ID NO: 76232 - protein, 59 aa, Artificial sequence
  protein pattern
  Variant (2)..(4): Xaa in position 2 to 4 is any amino acid
  Variant (5)..(5): Xaa in position 5 is any or no amino acid
  Variant (7)..(7): Xaa in position 7 is any amino acid
  Variant (8)..(8): Xaa in position 8 is Phe, Ile, Leu or Val
  Variant (9)..(9): Xaa in position 9 is Asp, Glu or Ser
  Variant (10)..(10): Xaa in position 10 is any amino acid
  Variant (13)..(13): Xaa in position 13 is Ile or Val
  Variant (14)..(15): Xaa in position 14 to 15 is any amino acid
  Variant (18)..(20): Xaa in position 18 to 20 is any amino acid
  Variant (21)..(21): Xaa in position 21 is Ala, Gly or Val
  Variant (23)..(23): Xaa in position 23 is Ala, Gly, Ser or Thr
  Variant (24)..(24): Xaa in position 24 is any amino acid
  Variant (27)..(27): Xaa in position 27 is Ile or Met
  Variant (28)..(28): Xaa in position 28 is Leu or Val
  Variant (29)..(29): Xaa in position 29 is any amino acid
  Variant (30)..(30): Xaa in position 30 is Ile, Met or Val
  Variant (31)..(31): Xaa in position 31 is Leu or Val
  Variant (32)..(32): Xaa in position 32 is Asp, Glu, Asn, Ser or Thr
  Variant (33)..(33): Xaa in position 33 is any amino acid
  Variant (34)..(34): Xaa in position 34 is Asp, Glu, Gln or Ser
  Variant (35)..(38): Xaa in position 35 to 38 is any amino acid
  Variant (40)..(42): Xaa in position 40 to 42 is any amino acid
  Variant (43)..(43): Xaa in position 43 is Ala or Ser
  Variant (44)..(44): Xaa in position 44 is any amino acid
  Variant (45)..(45): Xaa in position 45 is Asp, Glu, Asn, Gln, Arg or Ser
  Variant (46)..(47): Xaa in position 46 to 47 is any amino acid
  Variant (48)..(48): Xaa in position 48 is Leu or Met
  Variant (49)..(49): Xaa in position 49 is Ala, Glu, Gly or Ser
  Variant (50)..(50): Xaa in position 50 is Ile, Pro or Val
  Variant (52)..(52): Xaa in position 52 is Thr or Val
  Variant (54)..(54): Xaa in position 54 is any amino acid
  Variant (55)..(55): Xaa in position 55 is Asn, Gln or Ser
  Variant (56)..(56): Xaa in position 56 is Cys, Asn, Ser or Thr
  Variant (57)..(58): Xaa in position 57 to 58 is any amino acid
LXXXXFXXXXYQXXXARXXXXDXXLLXXXXXXXXXXXXLXXXXXXXXXXXLXEXXXXXE

SEQ ID NO: 76233 - protein, 26 aa, Artificial sequence
  protein pattern
  Variant (2)..(3): Xaa in position 2 to 3 is any or no amino acid
  Variant (5)..(5): Xaa in position 5 is any amino acid
  Variant (7)..(7): Xaa in position 7 is Asp, Glu, Lys or Arg
  Variant (8)..(9): Xaa in position 8 to 9 is Ile, Met or Val
  Variant (11)..(11): Xaa in position 11 is Ile or Val
  Variant (15)..(15): Xaa in position 15 is Asp or Asn
  Variant (17)..(17): Xaa in position 17 is any amino acid
  Variant (18)..(18): Xaa in position 18 is Asp or Ser
  Variant (19)..(19): Xaa in position 19 is Phe or Leu
  Variant (20)..(20): Xaa in position 20 is Glu, Asn, Ser or Thr
  Variant (21)..(21): Xaa in position 21 is any amino acid
  Variant (23)..(23): Xaa in position 23 is Ile, Leu or Met
  Variant (24)..(25): Xaa in position 24 to 25 is any amino acid
  Variant (26)..(26): Xaa in position 26 is Thr or Val
AXXLXAXXXGXNNRXLXXXXXDXXXX

SEQ ID NO: 76234 - protein, 21 aa, Artificial sequence
  protein pattern
  Variant (2)..(3): Xaa in position 2 to 3 is any or no amino acid
  Variant (5)..(5): Xaa in position 5 is any amino acid
  Variant (7)..(7): Xaa in position 7 is Lys or Arg
  Variant (8)..(8): Xaa in position 8 is Ala or Gly
  Variant (14)..(14): Xaa in position 14 is any amino acid
  Variant (15)..(15): Xaa in position 15 is Phe or Ile
  Variant (16)..(19): Xaa in position 16 to 19 is any amino acid
  Variant (20)..(20): Xaa in position 20 is Cys, Asp or Asn
  Variant (21)..(21): Xaa in position 21 is Ala, Ile, Leu, Pro or Val
LXXEXKXXSPSKGXXXXXXXX

SEQ ID NO: 76235 - protein, 15 aa, Artificial sequence
  protein pattern
  Variant (2)..(2): Xaa in position 2 is Ala, Asp, Asn, Ser or Thr
  Variant (3)..(3): Xaa in position 3 is Ala, Cys, Gly or Val
  Variant (9)..(9): Xaa in position 9 is Asp or Glu
  Variant (10)..(11): Xaa in position 10 to 11 is any amino acid
  Variant (12)..(12): Xaa in position 12 is Phe, Trp or Tyr
  Variant (14)..(14): Xaa in position 14 is any amino acid
AXXISVLTXXXXFXG

SEQ ID NO: 76236 - protein, 23 aa, Artificial sequence
  protein pattern
  Variant (3)..(4): Xaa in position 3 to 4 is any amino acid
  Variant (5)..(5): Xaa in position 5 is any or no amino acid
  Variant (7)..(7): Xaa in position 7 is any amino acid
  Variant (8)..(8): Xaa in position 8 is any or no amino acid
  Variant (10)..(10): Xaa in position 10 is Phe, Leu or Met
  Variant (11)..(15): Xaa in position 11 to 15 is any amino acid
  Variant (17)..(17): Xaa in position 17 is any amino acid
  Variant (18)..(18): Xaa in position 18 is Ile, Leu or Val
  Variant (19)..(19): Xaa in position 19 is Asp, Asn, Pro, Ser or Thr
  Variant (20)..(22): Xaa in position 20 to 22 is any amino acid
GAXXXGXXIXXXXXXRXXXXXXA

SEQ ID NO: 76237 - protein, 28 aa, Artificial sequence
  protein pattern
  Variant (5)..(11): Xaa in position 5 to 11 is any amino acid
  Variant (12)..(12): Xaa in position 12 is Ile or Val
  Variant (13)..(18): Xaa in position 13 to 18 is any amino acid
  Variant (20)..(20): Xaa in position 20 is any amino acid
  Variant (22)..(22): Xaa in position 22 is any amino acid
  Variant (23)..(23): Xaa in position 23 is Ala or Val
  Variant (27)..(27): Xaa in position 27 is His or Tyr
VGVFXXXXXXXXXXXXXXLXLXXVQLXG

SEQ ID NO: 76238 - protein, 9 aa, Artificial sequence
  protein pattern
  Variant (2)..(2): Xaa in position 2 is Leu or Val
  Variant (4)..(4): Xaa in position 4 is Phe, Ile, Leu or Val
  Variant (5)..(5): Xaa in position 5 is Asn or Ser
  Variant (7)..(7): Xaa in position 7 is Ala or Gly
  Variant (8)..(8): Xaa in position 8 is Ile, Leu or Val
GXDXXSXXE

SEQ ID NO: 76239 - protein, 14 aa, Artificial sequence
  protein pattern
  Variant (2)..(2): Xaa in position 2 is any or no amino acid
  Variant (6)..(6): Xaa in position 6 is Ile or Leu
  Variant (7)..(7): Xaa in position 7 is Gly, Asn, Ser or Thr
  Variant (8)..(9): Xaa in position 8 to 9 is any amino acid
  Variant (11)..(13): Xaa in position 11 to 13 is any amino acid
LXAGGXXXXNXXXA

SEQ ID NO: 76240 - DNA, 1563 bp, Escherichia coli
  CDS (1)..(1563): transl_table=11
atgcaaacacaaaaaccgactctcgaactgctaacctgcgaaggcgcttatcgcgacaatcccaccgcgctttttcaccagttgtgtggggatcgtccggcaacgctgctgctggaatccgcagatatcgacagcaaagatgatttaaaaagcctgctgctggtagacagtgcgctgcgcattacagctttaggtgacactgtcacaatccaggcactttccggcaacggcgaagccctcctggcactactggataacgccctgcctgcgggtgtggaaagtgaacaatcaccaaactgccgtgtgctgcgcttcccccctgtcagtccactgctggatgaagacgcccgcttatgctccctttcggtttttgacgctttccgtttattgcagaatctgttgaatgtaccgaaggaagaacgagaagccatgttcttcggcggcctgttctcttatgaccttgtggcgggatttgaagatttaccgcaactgtcagcggaaaataactgccctgatttctgtttttatctcgctgaaacgctgatggtgattgaccatcagaaaaaaagcacccgtattcaggccagcctgtttgctccgaatgaagaagaaaaacaacgtctcactgctcgcctgaacgaactacgtcagcaactgaccgaagccgcgccgccgctgccagtggtttccgtgccgcatatgcgttgtgaatgtaatcagagcgatgaagagttcggtggcgtagtgcgtttgttgcaaaaagcgattcgcgctggagaaattttccaggtggtgccatctcgccgtttctctctgccctgcccgtcaccgctggcggcctattacgtgctgaaaaagagtaatcccagcccgtacatgttttttatgcaggataatgatttcaccctatttggcgcgtcgccggaaagctcgctcaagtatgatgccaccagccgccagattgagatctacccgattgccggaacacgcccacgcggtcgtcgcgccgatggttcactggacagagatctcgacagccgtattgaactggaaatgcgtaccgatcataaagagctgtctgaacatctgatgctggttgatctcgcccgtaatgatctggcacgcatttgcacccccggcagccgctacgtcgccgatctcaccaaagttgaccgttattcctatgtgatgcacctcgtctctcgcgtagtcggcgaactgcgtcacgatcttgacgccctgcacgcttatcgcgcctgtatgaatatggggacgttaagcggtgcgccgaaagtacgcgctatgcagttaattgccgaggcggaaggtcgtcgccgcggcagctacggcggcgcggtaggttatttcaccgcgcatggcgatctcgacacctgcattgtgatccgctcggcgctggtggaaaacggtatcgccaccgtgcaagcgggtgctggtgtagtccttgattctgttccgcagtcggaagccgacgaaacccgtaacaaagcccgcgctgtactgcgcgctattgccaccgcgcatcatgcacaggagactttctaa

SEQ ID NO: 76241 - protein, 520 aa, Escherichia coli
MQTQKPTLELLTCEGAYRDNPTALFHQLCGDRPATLLLESADIDSKDDLKSLLLVDSALRITALGDTVTIQALSGNGEALLALLDNALPAGVESEQSPNCRVLRFPPVSPLLDEDARLCSLSVFDAFRLLQNLLNVPKEEREAMFFGGLFSYDLVAGFEDLPQLSAENNCPDFCFYLAETLMVIDHQKKSTRIQASLFAPNEEEKQRLTARLNELRQQLTEAAPPLPVVSVPHMRCECNQSDEEFGGVVRLLQKAIRAGEIFQVVPSRRFSLPCPSPLAAYYVLKKSNPSPYMFFMQDNDFTLFGASPESSLKYDATSRQIEIYPIAGTRPRGRRADGSLDRDLDSRIELEMRTDHKELSEHLMLVDLARNDLARICTPGSRYVADLTKVDRYSYVMHLVSRVVGELRHDLDALHAYRACMNMGTLSGAPKVRAMQLIAEAEGRRRGSYGGAVGYFTAHGDLDTCIVIRSALVENGIATVQAGAGVVLDSVPQSEADETRNKARAVLRAIATAHHAQETF

SEQ ID NO: 76242 - DNA, 1734 bp, Oryza sativa
  CDS (1)..(1734)
atggccagcctcgtgctctccctgcgcatcgcccgttccacgccgccgctggggctgggcggggggcgattccgcggccgacgaggggccgtcgcctgccgcgccgccacgttccagcagctcgacgccgtcgcggtgagggaggaggagtccaagttcaaggcgggggcggcggagggttgcaacatcctgccgctcaagcgatgcatcttctccgaccacctcacgccggtgctcgcgtaccgctgcctcgtcagggaggacgaccgcgaggcgcccagcttcctgtttgagtccgtcgagcagggatccgagggcaccaatgtggggaggtacagtgtggttggggcacagcctgcgatggagatcgtagccaaggccaaccatgtgactgtcatggatcataagatgaagtctaggagggagcaatttgcgcctgacccgatgaagataccaaggagcattatggaacagtggaacccacagattgttgaaggcctccctcatgcattttgtggaggatgggttggattcttctcttacgacacagtgcgttatgttgaaacaaagaagcttccattttctaacgcgccagaggatgataggaaccttcctgacatccatttaggcctctacaatgacatagttgtgtttgatcatgttgaaaagaaaacacatgttatacattgggtgagggtagattgccatgagtcagttgacgaagcgtatgaggacgggaagaatcagctggaagctttgttatcaagattacatagtgttaatgtgccaactcttactgctggttctgtaaaacttaacgttgggcaatttgggtcagcactacagaaatcatcaatgtcaagggaggactataagaaagctgttgttcaagcaaaagagcacattctagctggtgacatttttcaagtagtcttaagccagcgttttgagaggcgtacatttgctgacccctttgaggtgtaccgtgcattgcgtattgtcaatcctagtccttatatggcctatctacaggctcgtggttgtattctggtagcatcaagtcctgaaattcttacccgggtggaaaagaggacaattgtcaacaggccacttgctggaacaattagaagaggaaaatcgaaagcagaagacaaagttttagaacaactgctgttgagtgatggaaagcagtgtgctgagcatattatgttagtagatcttggacggaatgatgttggaaaggtgtccaaaccaggttcagtaaaggtggagaaactgatgaacgttgaacgatattcacatgtcatgcacattagctcaacagttactggagagttgcgtgatgatctgacttgttgggatgctcttcgagcagcattgcccgttggaacagttagtggtgcaccaaaggtgagagcgatggagctgattgaccagatggaagggaagatgcgtgggccgtacagtggtggctttggaggggtttctttccgtggagacatggacatcgcacttgctctccgtaccatcgtcttccccacgggatctcgcttcgacaccatgtactcctacactgacaagaatgctcgtcaggagtgggtggctcaccttcaggctggagctgggatcgtcgctgacagcaagcctgacgatgagcatcaggagtgcttgaacaaggctgctggccttgctcgtgccatcgatcttgccgagtctacattcgtagatgagtag

SEQ ID NO: 76243 - protein, 577 aa, Oryza sativa
MASLVLSLRIARSTPPLGLGGGRFRGRRGAVACRAATFQQLDAVAVREEESKFKAGAAEGCNILPLKRCIFSDHLTPVLAYRCLVREDDREAPSFLFESVEQGSEGTNVGRYSVVGAQPAMEIVAKANHVTVMDHKMKSRREQFAPDPMKIPRSIMEQWNPQIVEGLPHAFCGGWVGFFSYDTVRYVETKKLPFSNAPEDDRNLPDIHLGLYNDIVVFDHVEKKTHVIHWVRVDCHESVDEAYEDGKNQLEALLSRLHSVNVPTLTAGSVKLNVGQFGSALQKSSMSREDYKKAVVQAKEHILAGDIFQVVLSQRFERRTFADPFEVYRALRIVNPSPYMAYLQARGCILVASSPEILTRVEKRTIVNRPLAGTIRRGKSKAEDKVLEQLLLSDGKQCAEHIMLVDLGRNDVGKVSKPGSVKVEKLMNVERYSHVMHISSTVTGELRDDLTCWDALRAALPVGTVSGAPKVRAMELIDQMEGKMRGPYSGGFGGVSFRGDMDIALALRTIVFPTGSRFDTMYSYTDKNARQEWVAHLQAGAGIVADSKPDDEHQECLNKAAGLARAIDLAESTFVDE

SEQ ID NO: 76244 - DNA, 1704 bp, Glycine max
  CDS (1)..(1704)
atggcgactgttccgcacccattatccctcgcaagtgtaggttttgctaaccgaacctcctccatctccagatccactctcaaatgctgcgctcaatctccttctccttcactagttgacaacgcccagaagtttctcgaagcttccaagaaggggaacgtcattcctctcttccgctgcatattttccgatcacctcactccggtgcttgcgtaccggtgcctggttaaggaggacgagagagatgctccgagttttctctttgaatcggtcgagccaggccaaatttctagcatcggacggtacagtgtggttggagcacagccgtgtatggaaattgtggcgaaagagaacgtggttactattatggaccacgtggaagggcgcaggagtgaggaaattgtagaggatcctctggtgattcctcgtaggatcatggagaagtggacgcctcaactcttagatgaacttcctgaagcgttttgtggtggttgggtagggtatttctcttatgatacaatgcgctatgtagaaaagaagaaacttccattttctaatgccccagtagatgacagaaaccttcctgatgttcatctgggcctttatgacagtgtgattgtgtttgatcatgttgaaaagaaagcatatgtgattcattgggttcgggtggatcgatattcttcagctgaggaggccttcgaagatggaaggaaccggctggaaactctagtatctcgggtgcatgatataattaccccaaggctgcctacaggttcgataaagttatacactcgtctctttggtcctaaactggagatgtcaaacatgacaaatgaggagtataagagggcagtattgaaggctaaagagcacatacgggctggtgatatttttcaaattgtactaagtcaacgttttgaacagagaacttttgcagacccatttgaaatctacagagcattgaggattgttaatcctagtccatatatgacttatttacaggccagaggaagtattttggttgcttcaagtccagaaattcttacacgggtgaagaagagaaagatcaccaatcggccccttgctggtactgttagaagaggaaaaacaccaaaagaagatatcatgttggagaaacaacttttgaatgatgaaaagcaatgtgcagagcacgtaatgctagttgatttggggagaaatgatgttggaaaggtctccaaaccgggttctgttcaagttgaaaagcttatgaatattgagcgctattcccatgttatgcacatcagctcaacagtcacaggggagttattagatcacttaacaagctgggatgcattgcgtgctgctttacctgttggtacagttagcggagcaccgaaggtcaaagccatgcagttgattgatgagttggaagtcgcaagaagggggccctatagtgggggatttggaggtatatcattcaatggcgatatggacatagcccttgctctgaggaccatagttttccctacaaatgctcgttatgacacaatgtactcctacaaggataagaacaaacgcagagaatgggttgcccatctccaggctggagcgggaattgtggctgacagtgatcctgctgatgaacaaagagagtgcgagaacaaagctgcagctcttgctcgtgccattgatcttgcagaatcttcatttgttgataaataa

SEQ ID NO: 76245 - protein, 567 aa, Glycine max
MATVPHPLSLASVGFANRTSSISRSTLKCCAQSPSPSLVDNAQKFLEASKKGNVIPLFRCIFSDHLTPVLAYRCLVKEDERDAPSFLFESVEPGQISSIGRYSVVGAQPCMEIVAKENVVTIMDHVEGRRSEEIVEDPLVIPRRIMEKWTPQLLDELPEAFCGGWVGYFSYDTMRYVEKKKLPFSNAPVDDRNLPDVHLGLYDSVIVFDHVEKKAYVIHWVRVDRYSSAEEAFEDGRNRLETLVSRVHDIITPRLPTGSIKLYTRLFGPKLEMSNMTNEEYKRAVLKAKEHIRAGDIFQIVLSQRFEQRTFADPFEIYRALRIVNPSPYMTYLQARGSILVASSPEILTRVKKRKITNRPLAGTVRRGKTPKEDIMLEKQLLNDEKQCAEHVMLVDLGRNDVGKVSKPGSVQVEKLMNIERYSHVMHISSTVTGELLDHLTSWDALRAALPVGTVSGAPKVKAMQLIDELEVARRGPYSGGFGGISFNGDMDIALALRTIVFPTNARYDTMYSYKDKNKRREWVAHLQAGAGIVADSDPADEQRECENKAAALARAIDLAESSFVDK

SEQ ID NO: 76246 - DNA, 1734 bp, Oryza sativa (japonica cultivar-group)
  CDS (1)..(1734)
atggccagcctcgtgctctccctgcgcatcgcgccgtccacgccgccgctggggctgggcggggggcgattccgcggccgacgaggggccgtcgcctgccgcgccgccacgttccagcagctcgacgccgtcgcggtgagggaggaggagtccaagttcaaggcgggggcggcggagggttgcaacatcctgccgctcaagcgatgcatcttctccgaccacctcacgccggtgctcgcgtaccgctgcctcgtcagggaggacgaccgcgaggcgcccagcttcctgtttgagtccgtcgagcagggatccgagggcaccaatgtggggaggtacagtgtggttggggcacagcctgcgatggagatcgtagccaaggccaaccatgtgactgtcatggatcataagatgaagtctaggagggagcaatttgcgcctgacccgatgaagataccaaggagcattatggaacagtggaacccacagattgttgaaggcctccctgatgcattttgtggaggatgggttggattcttctcttacgacacagtgcgttatgttgaaacaaagaagcttccattttctaacgcgccagaggatgataggaaccttcctgacatccatttaggcctctacaatgacatagttgtgtttgatcatgttgaaaagaaaacacatgttatacattgggtgagggtagattgccatgagtcagttgacgaagcatatgaggacgggaagaatcagctggaagctttgttatcaagattacatagtgttaatgtgccaactcttactgctggttctgtaaaacttaacgttgggcaatttgggtcagcactacagaaatcatcaatgtcaagggaggactataagaaagctgttgttcaagcaaaagagcacattctagctggtgacatttttcaagtagtcttaagccagcgttttgagaggcggacatttgctgacccctttgaggtgtaccgtgcattgcgtattgtcaatcctagtccttatatggcctatctacaggctcgtggttgtattctggtagcatcaagtcctgaaattcttacccgggtggaaaagaggacaattgttaacaggccacttgctggaacaattagaagaggaaaatcgaaagcagaagacaaagttttagaacaactgctgttgagtgatggaaagcagtgtgctgagcatattatgttagtagatcttggacggaatgatgttggaaaggtgtccaaaccaggttcagtaaaggtggagaaactgatgaacgttgaacgatattcacatgtcatgcacattagctcaacagttactggagagttgcgtgatgatctgacttgttgggatgctcttcgagcagcattgcccgttggaacagttagtggtgcaccaaaggtgagagcgatggagctgattgaccagatggaagggaagatgcgtgggccgtacagtggtggctttggaggggtttctttccgtggagacatggacatcgcacttgctctccgtaccatcgtcttccccacgggatctcgcttcgacaccatgtactcctacactgacaagaatgctcgtcaggagtgggtggctcaccttcaggctggagctgggatcgtcgctgacagcaagcctgacgatgagcatcaggagtgcttgaacaaggctgctggccttgctcgtgccatcgatcttgccgagtctacattcgtagatgagtag

SEQ ID NO: 76247 - protein, 577 aa, Oryza sativa (japonica cultivar-group)
MASLVLSLRIAPSTPPLGLGGGRFRGRRGAVACRAATFQQLDAVAVREEESKFKAGAAEGCNILPLKRCIFSDHLTPVLAYRCLVREDDREAPSFLFESVEQGSEGTNVGRYSVVGAQPAMEIVAKANHVTVMDHKMKSRREQFAPDPMKIPRSIMEQWNPQIVEGLPDAFCGGWVGFFSYDTVRYVETKKLPFSNAPEDDRNLPDIHLGLYNDIVVFDHVEKKTHVIHWVRVDCHESVDEAYEDGKNQLEALLSRLHSVNVPTLTAGSVKLNVGQFGSALQKSSMSREDYKKAVVQAKEHILAGDIFQVVLSQRFERRTFADPFEVYRALRIVNPSPYMAYLQARGCILVASSPEILTRVEKRTIVNRPLAGTIRRGKSKAEDKVLEQLLLSDGKQCAEHIMLVDLGRNDVGKVSKPGSVKVEKLMNVERYSHVMHISSTVTGELRDDLTCWDALRAALPVGTVSGAPKVRAMELIDQMEGKMRGPYSGGFGGVSFRGDMDIALALRTIVFPTGSRFDTMYSYTDKNARQEWVAHLQAGAGIVADSKPDDEHQECLNKAAGLARAIDLAESTFVDE

SEQ ID NO: 76248 - DNA, 2202 bp, Mesorhizobium loti MAFF303099
  CDS (1)..(2202): transl_table=11
atggagacggcaatgacgatgaaggttctggaaaacggcgctgaaagcttcgtgaccgcgggtggcatcaccattacgcgtgagcgccacgaccggccctatgcgggtgcgatcgacgcttatgtcgatggcttgaactcgcgccgcggcgcggtgttttcctccaactacgaatatcccggccgctatacgcgctgggacaccgccatcatcgatccgccgctggtcatttccgcgcggggccgcgccatgcgcatcgaagcgctgaaccgccgcggcgaggcgctgttgccggtgatcggcaaaacgctgggcggccttgccgacatcaccatcgccgagacgacgaagacgctcatccgcctcgacgtcgccaagcccggccgcgtcttcacggaggaagagcgcagccgcgtgccctcggtcttcaccgtgctgcgcgccatcaccgctttgttcaaaaccgacgaggacgccaatctcggcctctatggcgccttcggctacgacctctccttccagttcgacccggtcgactacaagctcgagcgcaagcccagccagcgcgacctcgtgctgttcctgcccgacgagatcctggtcgtcgaccactattccgccaaagcctggaccgaccgctacgactattcgggcgaaggattttcgaccgaaggtctgccgcgcgacgcaatcgccgagccgttcaagaccgccgaccgcatcccgccgcgcggtgaccatgagccgggcgaatacgctaatctggtgcggcgtgccatggactcgttcaagcgcggcgacctgttcgaggtcgtgcccggccagatgttctacgagcgctgcgagacgcagccctccgacatttcgcgcaagctgaaatcgatcaacccctcgccttattcgttcttcatcaacctcggcgaaaacgaatatctgatcggcgcctcgcccgaaatgttcgtgcgcgtcaatggccgccgcgtcgaaacctgcccgatttcgggcaccatcaaacgcggcgacgacgccatttccgatagcgagcagatcctgaagctgctcaattcgaagaaggacgaatccgagctcacaatgtgctcggacgtcgaccgcaacgacaagtcgcgggtctgcgagcccggctcggtgcgcgtcatcggccgccgccagatcgagatgtattcgcgcctcatccacaccgtcgatcacatcgaaggccggctgcgcgaaggcatggacgctttcgacgccttcctgtcgcatgcctgggcggtcactgtcaccggcgcgccgaaactgtgggccatgcgcttcatcgagcagaacgagaagagcccgcgcgcctggtatggcggcgcaatcggcatggtcaacttcaacggcgacatgaacaccggcctgacgctgcgcaccatccgcatcaaggacggcattgccgaagtgcgggccggcgcgacattgctgttcgacagcattcccgaggaagaagaagccgaaaccgaactgaaggcatccgccatgctctccgccatccgcgacgccaagacgggcaactccgccagcaccgagcgcaccaccgcgcgggtcggcgacggcgtcaacatcctgctcgtcgaccacgaggactctttcgtccacacgctggccaactacttccgccagaccggcgccaatgtctcgaccgtgcgcacgccggtgccggacgaagtgttcgagcggctgaagccggaccttgtcgtgctctcacccggaccgggtacgccgaaggatttcgattgcgccgcgaccatcagacgagcgcgcgcccgcgacctgccgatcttcggcgtctgcctaggcctgcaggcgctggccgaggcctatggcggggaactgcgccagctgcatattcccatgcacggcaagccctcgcgcatccgcgtctccaagcccggcatcatcttctccggcctgcccaaggaagtcactgtcggccgttaccactcgatcttcgccgatccggtgcgcttgcccgatgatttcattgtcacggcagagactgaggacggcatcatcatggctttcgagcaccgcaaggagccgatcgcggcggtgcagttccacccggaatcgatcatgacgctcggccacaatgccggcatgcgcatcatcgagaacatcgtcgcccatttgccgcgcaaggccaaggaaaaggcagcctga

SEQ ID NO: 76249 - protein, 733 aa, Mesorhizobium loti MAFF303099
METAMTMKVLENGAESFVTAGGITITRERHDRPYAGAIDAYVDGLNSRRGAVFSSNYEYPGRYTRWDTAIIDPPLVISARGRAMRIEALNRRGEALLPVIGKTLGGLADITIAETTKTLIRLDVAKPGRVFTEEERSRVPSVFTVLRAITALFKTDEDANLGLYGAFGYDLSFQFDPVDYKLERKPSQRDLVLFLPDEILVVDHYSAKAWTDRYDYSGEGFSTEGLPRDAIAEPFKTADRIPPRGDHEPGEYANLVRRAMDSFKRGDLFEVVPGQMFYERCETQPSDISRKLKSINPSPYSFFINLGENEYLIGASPEMFVRVNGRRVETCPISGTIKRGDDAISDSEQILKLLNSKKDESELTMCSDVDRNDKSRVCEPGSVRVIGRRQIEMYSRLIHTVDHIEGRLREGMDAFDAFLSHAWAVTVTGAPKLWAMRFIEQNEKSPRAWYGGAIGMVNFNGDMNTGLTLRTIRIKDGIAEVRAGATLLFDSIPEEEEAETELKASAMLSAIRDAKTGNSASTERTTARVGDGVNILLVDHEDSFVHTLANYFRQTGANVSTVRTPVPDEVFERLKPDLVVLSPGPGTPKDFDCAATIRRARARDLPIFGVCLGLQALAEAYGGELRQLHIPMHGKPSRIRVSKPGIIFSGLPKEVTVGRYHSIFADPVRLPDDFIVTAETEDGIIMAFEHRKEPIAAVQFHPESIMTLGHNAGMRIIENIVAHLPRKAKEKAA

SEQ ID NO: 76250 - DNA, 1461 bp, Bacillus halodurans C-125
  CDS (1)..(1461): transl_table=11
atggcaggagtgaggttgttgcagcaaggaaagcaagagacgaaacgaacggtttgcgccacttcctttccgatggaggagagccagttttttcgccgctataaaaagcaatcaagggatcgggagcggcacgtattgttggagagcggtaggggtggacgatacagcatggtcggacttgagccggtcatggttcttgaaggcaagaaagatacattaatcgttacgacagaaaatgaagtcgtgaaacggcaaggagctttattagatttaatgcgcgacgcacttgcctcgtatcaagcggaaacgttaccaggtgctcccccatttcagggaggtgcgattggctttttcagttatgaccttgtccgtgaaattgagcggttgccaactatcgctcaagatgacttgaatcttccggacttatattttcttatttttgatgatgtgtttatttatgatcatgaaaaaaaggttgcgtggatctttgttcatggggacgccagtgaacaagacttatcggagcaaaagctaagacattacgaagcgacatggaagcagccggtcagcttggacgaagaagttgcaacctcttatttggaaacagaaggggagaaggtccattcatttagcgaagagacgttcgcaaaagctgtagagagagtgcgagagtacattgcggcaggggatgtgttccaagtgaacttatccgttcgcgaaggacgccctttaaggacaactccattatcgatttatgaggcgttacgtcagatcaatccttcgccctatatgagttatttgcacaccccagatttccagcttgttagcggttctccagagttgttaatcaaaaaagatagccggaagttaagcactcgtccgattgccggtacccgttctcgcggggcaacggctgatgaggatgaagctctcgttcagacattattgtcaaatgaaaaagagcgggccgaacatgtgatgctcgtcgatttagagcgaaacgacctcgggcgtgtaagtgaatacggttcggttgaagtgaacgagcttatggttgtggaaaaatactcccatgtcatgcacattgtttccaacgtacgaggggtgttaaaagaggggcttgatgcatttgatgcgatccgcgctacgttcccaggcgggacgataacgggtgcgcctaaagtacgaacgatggaaatcattgaagagctagagccggttcgtagaggaatttatacgggttcaattggctggattggttataatggtgatatggaactgaacattgtcattcgcacaatgttgtgtaaagatgagatggcgtatgttcaagcgggagcgggtgtggtcattgactccaatcctcgctatgaatataaggaatcattgaagaaagcaaaagcattatggcgggcgtacgaccagagtatagacgagcaaaagcaaagaatagaaaagtag

SEQ ID NO: 76251 - protein, 486 aa, Bacillus halodurans C-125
MAGVRLLQQGKQETKRTVCATSFPMEESQFFRRYKKQSRDRERHVLLESGRGGRYSMVGLEPVMVLEGKKDTLIVTTENEVVKRQGALLDLMRDALASYQAETLPGAPPFQGGAIGFFSYDLVREIERLPTIAQDDLNLPDLYFLIFDDVFIYDHEKKVAWIFVHGDASEQDLSEQKLRHYEATWKQPVSLDEEVATSYLETEGEKVHSFSEETFAKAVERVREYIAAGDVFQVNLSVREGRPLRTTPLSIYEALRQINPSPYMSYLHTPDFQLVSGSPELLIKKDSRKLSTRPIAGTRSRGATADEDEALVQTLLSNEKERAEHVMLVDLERNDLGRVSEYGSVEVNELMVVEKYSHVMHIVSNVRGVLKEGLDAFDAIRATFPGGTITGAPKVRTMEIIEELEPVRRGIYTGSIGWIGYNGDMELNIVIRTMLCKDEMAYVQAGAGVVIDSNPRYEYKESLKKAKALWRAYDQSIDEQKQRIEK

SEQ ID NO: 76252 - DNA, 1509 bp, Bacillus halodurans C-125
  CDS (1)..(1509): transl_table=11
atgaacgtaacccctttttcggctgttaaagcagccaaccagcagtttcgcacaattcccgtaatcggtgaatgctttgccgatgctgttaccccgattcatattgtccagcaacttggagacgaagtggcgtttattttagaaagtaaggacgacgaatccccatgggcaagattttcatttattggtctgaacccgtttgtggagttaatagaacaaaatggtgtctatcaatcaatcagccgaagcggctcgattctcgtggagacggaagactttaaatcgtgtctacaacagacgattgacgttttggatgtacagccattggagcgggaactaccgttttacggcggggctgttggctatatggcgtatgatgcgattgaaacaattgagaaaacgttggcaaatgcaagagagagtgaggcgcctctctatcattttcttttttgtgagacgctgattgtctatgatcatacagaaaaaaagctagcggtcatctacttaagtactgaggatggaggatcccttgatacacggtataaatgtgcggtcaataccatcgaaacagtggttgaaacgattcataaacggcgggacggcgatcggctgttacgtcctgcaccggtccaagatgaagtctcgtttcaagaggtatcctctaactatgaaaaagaagtatttctacgcgacgtagaacgaattaaggaatatattcgcgcaggtgatgtttttcaagcggttttatcacagcgctttgaacgtgaactatcggtccgtgcccttgacgtctatcgcgtcctgagaatgattaacccatctccttatttgttttacattaagtttcatgacgtagaggttgtcggcagttctcctgagcggctcgttcaagtccaagatggacatgtggaaatccacccgattgctggaacgagaaaaagaggggcaacacgggaggaggatgaggcattagccaaggaactgctagctgacgaaaaagagcgcgccgagcattatatgcttgttgaccttgcacgtaacgacattggtcggattgcagaatatgggacggtcaagacgccaaccttgctagaaatcggtaaattttcacacgtgatgcacatcatttcaaaggtgacaggagagttgaagcaaacgctccatccgctagatgcgcttcgctatgggtttccagcaggaactgtttctggtgcaccgaaaattcgggcaatggaaattttaaatgaattggagccgacaaagcgagggatttatgcaggagcgatcgcgtacttagggtttgacggaaacatcgattcttgcattgccattcgcacgatgatcgtcaaagacggccgtgcttatatccaagcaggtgctggaattgtcgccgattcagtacccgaaaatgagtacgaagagacgagaaacaaagcaaaggcgttgctaaaggcggtagaaatggctgaagccatgtttgcgaaaaaggaggcgaccccgcgtgtttaa

SEQ ID NO: 76253 - protein, 502 aa, Bacillus halodurans C-125
MNVTPFSAVKAANQQFRTIPVIGECFADAVTPIHIVQQLGDEVAFILESKDDESPWARFSFIGLNPFVELIEQNGVYQSISRSGSILVETEDFKSCLQQTIDVLDVQPLERELPFYGGAVGYMAYDAIETIEKTLANARESEAPLYHFLFCETLIVYDHTEKKLAVIYLSTEDGGSLDTRYKCAVNTIETVVETIHKRRDGDRLLRPAPVQDEVSFQEVSSNYEKEVFLRDVERIKEYIRAGDVFQAVLSQRFERELSVRALDVYRVLRMINPSPYLFYIKFHDVEVVGSSPERLVQVQDGHVEIHPIAGTRKRGATREEDEALAKELLADEKERAEHYMLVDLARNDIGRIAEYGTVKTPTLLEIGKFSHVMHIISKVTGELKQTLHPLDALRYGFPAGTVSGAPKIRAMEILNELEPTKRGIYAGAIAYLGFDGNIDSCIAIRTMIVKDGRAYIQAGAGIVADSVPENEYEETRNKAKALLKAVEMAEAMFAKKEATPRV

SEQ ID NO: 76254 - DNA, 1551 bp, Pasteurella multocida subsp. multocida str. Pm70
  CDS (1)..(1551): transl_table=11
atgtcattcgcttttattcataccttaactcaatcattaccttattacgccgatccaacacatgtttttgcggcactctgtcaggataaaaccaacacgctgttactcgaatctgctgaaattcacagtaaaaatagtttaaaaagcctcttagttatacaacccgcactaaaaattacctgtcatggattacgtgtgaccttctgtgctaaaacacaaaatggcgtcgctgttttgcatgcacttatagagaagttacaatgtcactatgaaatcagtgcagtcacagagagtcaattctcagttatctttccaaaacttgacaaaaaccttgatgaagacaacaaattacatgcttcaacttgttttgatgcgctacgtgccctgctctcactttatcaacatagtgaggtccccgttctgttaggcggtttatttgcttatgatttagtgacccagtttatccctatggataacatccaattacaagaggatgggctcgattgccctgactattgtttctacttagcggaacatcaattgacactcgatcatcaattacaacaagctcagctacacagtttctgttttgcgccacaatatcaaacagcgctacagcaacaagctgatcagataatacaaaaatttgcaaatattgaaccgcacttacattgtgtttcagcggacactacgctgacaacgaaccttgatgatgtacaatttaaacaaattattcaggtattaaaacaacatctttatcaaggtgatgtatttcaaattgtgccttcccgtcgcttttcgttagcctgtccaaatacattggcaagttaccgacagctgaaacacacgaatccgagcccttatatgttctttatgcaagatgaagactttactctctttggcgcctcaccagaaagtgcattgaaatatacacagcaaacccgtcagctcgagatttatccgattgcgggttcacgcccgcgcggtttttatcccaatggtcagattgatccagaattggacgctcgcttagaactggaattacgtttagatcaaaaagaactcgcagaacatttgatgttagtggatttagcccgtaatgatattgcacgggtttgtgaaaccgggacacgccaagtggcggatttaatgcaggtagatcgctattctcacattatgcacttagtttctcgcgtggtgggcaaattacgacctgaattagatgcgttacacgcctatcaagcttgcatgaacatggggacactcactggtgctccaaaaattaaagcaatgcaactgctctatcaagttgaacaacaaaaacgacatagttatggcggtgcggtagggtatctcgcttcgaatggcgatttagacacgtgtattgtgatacgttccgcctttgtgcaacaaggtattgcctacatccaagccggttgtggcgaagtgctcgattcagatccgcaaaaagaagccgatgaaacacgacacaaagcacaagccgtgattaacgcgattgttcaaactcaccaaacacctcgtcaagcataa

SEQ ID NO: 76255 - protein, 516 aa, Pasteurella multocida subsp. multocida str. Pm70
MSFAFIHTLTQSLPYYADPTHVFAALCQDKTNTLLLESAEIHSKNSLKSLLVIQPALKITCHGLRVTFCAKTQNGVAVLHALIEKLQCHYEISAVTESQFSVIFPKLDKNLDEDNKLHASTCFDALRALLSLYQHSEVPVLLGGLFAYDLVTQFIPMDNIQLQEDGLDCPDYCFYLAEHQLTLDHQLQQAQLHSFCFAPQYQTALQQQADQIIQKFANIEPHLHCVSADTTLTTNLDDVQFKQIIQVLKQHLYQGDVFQIVPSRRFSLACPNTLASYRQLKHTNPSPYMFFMQDEDFTLFGASPESALKYTQQTRQLEIYPIAGSRPRGFYPNGQIDPELDARLELELRLDQKELAEHLMLVDLARNDIARVCETGTRQVADLMQVDRYSHIMHLVSRVVGKLRPELDALHAYQACMNMGTLTGAPKIKAMQLLYQVEQQKRHSYGGAVGYLASNGDLDTCIVIRSAFVQQGIAYIQAGCGEVLDSDPQKEADETRHKAQAVINAIVQTHQTPRQA

SEQ ID NO: 76256 - DNA, 1563 bp, Escherichia coli O157:H7 EDL933
  CDS (1)..(1563): transl_table=11
  misc_feature (302)..(302): r is g or a
atgcaaacacaaaaaccgactctcgaactgctaacctgcgaaggcgcttatcgcgacaatcccaccgcgctttttcaccaattgtgtggggatcgtccggcaacgctgctgctggaatccgcagatatcgacagcaaagatgatttaaaaagcctgctgctggtagacagtgcgctgcgcattacagctttaggtgacactgtcacaatccagtccctttccggcaacggcgaagccctgctgacactactggataacgccctgcctgcgggtgtggaaaatgaacaattaccaaactgccrtgtgctgcgcttcccccctgttggtccactgctggatgaagacgctcgcttatgctccctttcggtttttgacgctttccgcttattgcagaatctgttgaatgtaccgaaggaagaacgagaagccatgttcttcggcggcctgttctcttatgaccttgtggcggggtttgaagatttaccgcaactgtcagcggaaaataactgccctgatttctgtttttatctcgctgaaactctgatggtgattgaccatcagaaaaaaagcacccgcattcaggccagcctgtttgctccgaatgaagaagaaaaacaacgtctcactgctcgcctgaacgatcttcgccagcaactgaccgaaaccgcgccaccgctgccggtggtttccgtgccgcatatgcgttgtgaatgtaaccagagcgatgaagagttcggtggcgtagtgcgtttgttgcaaaaagcgattcgcgccggagaaattttccaggtggtgccatctcgccgtttctctctgccctgcccgtcaccgctggcggcctattacgtgctgaaaaagagtaatcccagcccgtacatgttttttatgcaggataatgatttcaccctgtttggcgcgtcgccggaaagttcgctcaagtatgacgccaccagccgccagattgagatctacccgattgccggaacacgtccacgcggtcgtcgcgccgatggctcgctcgacagggaccttgaaagccgtattgaactggaaatgcgtaccgatcataaagagctttctgaacatctgatgttggtggatctcgcccgtaatgacctggcacgcatttgcacccccggcagccgctacgtcgccgacctcaccaaagttgaccgttactcttacgtgatgcacctggtctcccgcgtggtcggtgagctgcgccacgatctcgacgccctgcacgcttaccgcgcctgtatgaatatggggacgttaagcggtgcgccgaaagtacgcgctatgcagttaattgccgaggctgaaggtcgtcgccgcggcagctacggcggcgcggtaggttatttcaccgcgcacggcgatctcgacacctgcattgtgatccgctcggcgctggtggaaaacggtatcgctaccgtgcaagccggtgctggcgtagtccttgattctgttccgcagtcggaagccgacgaaacccgtaataaagcccgcgctgtactgcgcgctattgccaccgcgcatcatgcacaggagacgttctaa

SEQ ID NO: 76257 - protein, 520 aa, Escherichia coli O157:H7 EDL933
  misc_feature (101)..(101): The Xaa at location 101 stands for Arg, or His.
MQTQKPTLELLTCEGAYRDNPTALFHQLCGDRPATLLLESADIDSKDDLKSLLLVDSALRITALGDTVTIQSLSGNGEALLTLLDNALPAGVENEQLPNCXVLRFPPVGPLLDEDARLCSLSVFDAFRLLQNLLNVPKEEREAMFFGGLFSYDLVAGFEDLPQLSAENNCPDFCFYLAETLMVIDHQKKSTRIQASLFAPNEEEKQRLTARLNDLRQQLTETAPPLPVVSVPHMRCECNQSDEEFGGVVRLLQKAIRAGEIFQVVPSRRFSLPCPSPLAAYYVLKKSNPSPYMFFMQDNDFTLFGASPESSLKYDATSRQIEIYPIAGTRPRGRRADGSLDRDLESRIELEMRTDHKELSEHLMLVDLARNDLARICTPGSRYVADLTKVDRYSYVMHLVSRVVGELRHDLDALHAYRACMNMGTLSGAPKVRAMQLIAEAEGRRRGSYGGAVGYFTAHGDLDTCIVIRSALVENGIATVQAGAGVVLDSVPQSEADETRNKARAVLRAIATAHHAQETF

SEQ ID NO: 76258 - DNA, 1422 bp, Deinococcus radiodurans R1
  CDS (1)..(1422): transl_table=11
atgtcccagacctctgcccacccgacctgtctcgccgtccatgaactcaatgccgacctcgacacgcccgtcaccgcttacctcaaggccgcacagggagaaacggtgtcgttcttgctcgaaagcgtggaagcgggcgaaaagctggggcgctactcgtttatcggcgtgggcgagcagggcacgtttcgcgcctgcgccggacgggtgcagagcagcgggcaattcggtgacttcgacggcgaggaagccgacccgctcgcccggctctaccgcgtcacgacccgcccgctggacgtgcccgccggattgcctgcgctggtaggcggcgcagtggggtacgcggcctacgacatcatccgcgcctacgaaaagctgcccgacgccaaccccgatgaactgaagctgcccgacgcgctgttcgtggcgccgcgtgggctggtgattttcgaccacctcaagcaccggctggtggtggtggcggctgcggaggagcaggcgcaggccgacgccgaggtggagcgcctgctcacccggctgcgcggcccgctgccggaggtgccggggcaaacgcccaccgccgcgcccgagttccgcagcaacttcacgccggcggagtacatggaggcggtgcgccggggcaaggagtatgtccacgcgggcgacattttccagttcgtgccctcgcagcgtttcagcgccgagctgggcgacctgcaccccttcgcgctctaccgcgccctgcggcgggtgaaccccagcccctacctcggctatctggcgctgggcgaggtgacactggtggcgagcagccccgagagcctgctgcgcagcgacggcgtgagcgtggtcacccgtccgattgccggcacccgcaagcgcggggcgactgaggccgaggacgacgcgctcgccgccgaactgctcgccgacgaaaaggagcgcgccgaacacttaatgctggtggacctcgggcgcaacgacatcggcaaggtgagcgcttacggcaccgtcaaggtcgaaaacgccttttccatcgagcgctacagccacgtcatgcacatcgtctcgggcgtgcgcggcgaactgcgggaggggcagacgccactgcacgcgctcgcctcggtgctaccgatgggcacggtcagcggcgcacccaaaatccgggcgatggaaatcatcgacgaactcgaacccgtgcgccgggggccgtatggcggctgcttcggctacgtcgctttcgatggcagcctcgacatggcgctcaccctgcggacgatggtgattgcgaacggcaaggtccacatccaggccggggcgggtgtggtcgccgacagcgtgcccgagctggaggagcaggaaacgcgcaacaaggcggcggccctgatgcgggcggtggagctggcggcgggggggctgtga

SEQ ID NO: 76259 - protein, 473 aa, Deinococcus radiodurans R1
MSQTSAHPTCLAVHELNADLDTPVTAYLKAAQGETVSFLLESVEAGEKLGRYSFIGVGEQGTFRACAGRVQSSGQFGDFDGEEADPLARLYRVTTRPLDVPAGLPALVGGAVGYAAYDIIRAYEKLPDANPDELKLPDALFVAPRGLVIFDHLKHRLVVVAAAEEQAQADAEVERLLTRLRGPLPEVPGQTPTAAPEFRSNFTPAEYMEAVRRGKEYVHAGDIFQFVPSQRFSAELGDLHPFALYRALRRVNPSPYLGYLALGEVTLVASSPESLLRSDGVSVVTRPIAGTRKRGATEAEDDALAAELLADEKERAEHLMLVDLGRNDIGKVSAYGTVKVENAFSIERYSHVMHIVSGVRGELREGQTPLHALASVLPMGTVSGAPKIRAMEIIDELEPVRRGPYGGCFGYVAFDGSLDMALTLRTMVIANGKVHIQAGAGVVADSVPELEEQETRNKAAALMRAVELAAGGL

SEQ ID NO: 76260 - DNA, 1464 bp, Xylella fastidiosa 9a5c
  CDS (1)..(1464): transl_table=11
atgcagtttcagcgtcaagttgccgaagggtgtacccgcattccagtggtgcgtgaagtccagtctgatttggatactccgctttcggtctatctaaaatttgccgatgctccatatacctatttgtttgagtcggtggaaggtggggagcattttgcgaggtattcgatcattgggttgccggcacgccgtgtctatacctttcatgggcataccctggtggtgagtgagttcggtaaggtgttggaaacgcgtcaagtcgccgatccgcttgccgaagttgagctgttgcgtgcgcagtatgtagtgccgcaattagaagggttgccaggttttacaggcggcttagtggggtggttcggctttgaatgtatccagtacatcgaacctcgcttcatggaaggtaaaaaacgtgatgaacttggtacgccagatattctgctgatgctttcggaagaattggcggtgttcgacagcctcaagggccgattatatttgatcgttcatgcggatcctgcgcaaccacacgcttacgctcgtgcagtggaacgtttggatgtgttgatctaccgtctgcggcaaggtggggtggattatccgcattcacatatttcggaagtgattaacgaggaagattttcactcttctttgacccgtgagcagtatcacgctgtggtgcgtcaggcgcaggagtatgtgcgttcgggtgatatttttcaggttgtaccaagtcagcgcctgtgtacgcagtttcatgcacgtccgattgatgtatatcgggcgttgcgcacgctgaatccgtcgccttatatgtatttcattgatattggtgctactcaggtggttggttcatcaccggagatattggcgcgattgcagggggatgtggtcacggtgcgtccgattgccggcacacgcccgcgaggtgcgactccggagcatgacaaacggttggaaatggagttgttagccgatccaaaagagcgtgctgaacacgtgatgctgattgatttgggtcgcaatgatatcggacgtgttgtcgaggcggggagtgtacaagtcaaggagtcgtttgtaatcgagcgttatagtcatgtcatgcatattgtcagtgaggtcaccggtatcttgaagccgggtttgaactacgttgatgtgttacgtgcaacgttccctgcgggtactgtgtccggcgcgccaaagatccgtgcattggagattatccgtgagttggaaccagtgtgtcgcaacgtatattccggtgcagtgggttacattggctggcatggagatgctgatactgcaatcgcgattcgtactgcggtgattcaaaacggttgcctgtacgtgcaggctggtggtggtgtggtgtatgactcggatccagatttggagtggcaggaaaccatgaacaaggcgcgtgcattatttagggctgtggcgcaggcggccagagggttgtga

SEQ ID NO: 76261 - protein, 487 aa, Xylella fastidiosa 9a5c
MQFQRQVAEGCTRIPVVREVQSDLDTPLSVYLKFADAPYTYLFESVEGGEHFARYSIIGLPARRVYTFHGHTLVVSEFGKVLETRQVADPLAEVELLRAQYVVPQLEGLPGFTGGLVGWFGFECIQYIEPRFMEGKKRDELGTPDILLMLSEELAVFDSLKGRLYLIVHADPAQPHAYARAVERLDVLIYRLRQGGVDYPHSHISEVINEEDFHSSLTREQYHAVVRQAQEYVRSGDIFQVVPSQRLCTQFHARPIDVYRALRTLNPSPYMYFIDIGATQVVGSSPEILARLQGDVVTVRPIAGTRPRGATPEHDKRLEMELLADPKERAEHVMLIDLGRNDIGRVVEAGSVQVKESFVIERYSHVMHIVSEVTGILKPGLNYVDVLRATFPAGTVSGAPKIRALEIIRELEPVCRNVYSGAVGYIGWHGDADTAIAIRTAVIQNGCLYVQAGGGVVYDSDPDLEWQETMNKARALFRAVAQAARGL

SEQ ID NO: 76262 - DNA, 1497 bp, Xylella fastidiosa 9a5c
  CDS (1)..(1497): transl_table=11
atgattaaaatactaacaactactacagatgtacctctagatggaagtgatctaagagaaaatgcctttttaatctatcgaaaactgttaaaaaattttgatagcgatcaattgatgcttttagagtctttggggataaattcggttgactctcgagtttcgatggtaggcataaacccgatcattactgttaatgtaaaaaataagacgatatcaatacacagcaatcctatcttactaaaagaattaaatatagctgacagtatcgcttcacttcagacaacaacattatcactgtccgtctatcaactcgtcgataaaaagatggtatggcaattcctaaaggaatttgagaaaaacttttctcaagtaccgacgcatcaatgcggaattatggctttctcctgcttttcttatgaaaccatccattacatagagacaattccagaaactgaactcaacgatcaagatgaccatgatataactttaatactttaccaatcacaattagtaattgaacaaaacaaggctgaacttatcacctattctttccctggtgttgaggatttttacgttgcgaatattattgatgcaatcacatgcatgactgatgttgaacaagtacaagataaaaatattgattttgaagtaatacaagaaacaacacgtcatgactaccttgataaagtaagaaaagcattacaccatgttactgtcggagatatttaccaagtacaaataggacagaagatccaagtaaaagcagagaccacaccgcttgatgtctatcggcgattacggatattaaatccttcaccctacatgtatttatttagtataaacggtcagacagtcattggcgccagccctgagttatttttgcgcatcagtacggatgaagaaattctcatgcgtccgattgctggcacattaggaaaaagagagggacgcactcttcatcatgcaacacaacatttgcaagctgacaacaaggaagttgctgagcacatgatgttagttgatttatgtcgtaatgatatatatcgcgtctgtactccagaatcactcaaagtttcaggcgtattggagattgaagaatactcgcatgtatatcatatggtttcgacaaccaaagcaatgttaaaacaaggactcgacaaatacgatgtgatgatcgcatcgtttccagcgggaaccatgactggagcaccgaaggttcgggccatggaaatcatctcagagcttgaggatagccagcgcggtaaatatgccggtgcgctcggcatcctaggcattggatccaactatatcaatactgcactttgtatccgctctactgtcttaaaaaaccaagtctataccttgcgcgcatctgcagggattgtttccgactctcaagaacagtctgagtacttagaaacacttcacaaaatgggatctatatttaaagcaattactggggaagaaatttcatgccatatcgagtcatcgtcgtag

SEQ ID NO: 76263 - protein, 498 aa, Xylella fastidiosa 9a5c
MIKILTTTTDVPLDGSDLRENAFLIYRKLLKNFDSDQLMLLESLGINSVDSRVSMVGINPIITVNVKNKTISIHSNPILLKELNIADSIASLQTTTLSLSVYQLVDKKMVWQFLKEFEKNFSQVPTHQCGIMAFSCFSYETIHYIETIPETELNDQDDHDITLILYQSQLVIEQNKAELITYSFPGVEDFYVANIIDAITCMTDVEQVQDKNIDFEVIQETTRHDYLDKVRKALHHVTVGDIYQVQIGQKIQVKAETTPLDVYRRLRILNPSPYMYLFSINGQTVIGASPELFLRISTDEEILMRPIAGTLGKREGRTLHHATQHLQADNKEVAEHMMLVDLCRNDIYRVCTPESLKVSGVLEIEEYSHVYHMVSTTKAMLKQGLDKYDVMIASFPAGTMTGAPKVRAMEIISELEDSQRGKYAGALGILGIGSNYINTALCIRSTVLKNQVYTLRASAGIVSDSQEQSEYLETLHKMGSIFKAITGEEISCHIESSS

SEQ ID NO: 76264 - DNA, 1362 bp, Streptococcus pneumoniae TIGR4
  CDS (1)..(1362): transl_table=11
atggaacgaatcattcatggagatgtcttatcaccaatcttggcttatatgcgcttaaaggggcaacataaggttattttagagagtattccgagagacaaggaaacagctcgtttttctatcctagcctataatccagtttttgagattaagtttgaaaatggggttctctatcaaaatggtcaagtgattgatcgggatcccttggatttcctttatgaagtgattcataagagtcagcaccactcagagctaccttttggtggtggagccattggttttgtgggttacgatatgatttcgctttatgaagaaattggtcaaatccctgaggatacaattgggacgccagacatgcatttctttgtctatgagagctatatggtctttgaccacaagaaggagaagatacatgtcatagaggatgcactttatagtgagcgcagtcaagaggccttggaaaaatccttgaaccaagtgcttgaggaattacgcattcctgctccaaatgaatttgaagatttggatctatctccgttagacttcaaaccgcatatcgctccacataagtttgagggaatggtagaaacagctcgtgacttgattcgtaacggagatatgttccaatgtgtactcagccagcgtttttcagcagaagttactggaaatccatttgacttctacagaaatctccgcgtgactaatccttctaattacctttatttctatgattttggggattatcaaatcatcggagctagtccagaaagtttggtttctgtcaaaaatggcatcgtgacaaccaatccgattgcagggacgcgaccaagaggggctacggatgaagaagacaaggccttggcgactgacctcctctctgatgagaaggaaacagcagaacatcgaatgttggtagacttggggcgtaacgatattggccgcatctctgaaacgaccagtgtccaagtcactaagtatatggaagtggagctcttccgctacgtcatgcatttgaccagcgtagtcaaggggcgtttgcttccagaactcactgccatggatgccttgaaagcaacgcttcctgctggaaccgtttctggagcaccaaagattcgagcgatgagacgtatctatgaactggaaacggaaaaacggggagtatacgctggggcaatcggctacttgtctgcgacgggtgatatggatttggccatcgccatccgaaccatgattctcaaaaatcaaagagcctatgtgcaggctggggcagggattgtctacgactctatcgcccaaaacgaataccaagaaaccattaacaaagcaaaatctatgactagaattggagaactaagaccatga

SEQ ID NO: 76265 - protein, 453 aa, Streptococcus pneumoniae TIGR4
MERIIHGDVLSPILAYMRLKGQHKVILESIPRDKETARFSILAYNPVFEIKFENGVLYQNGQVIDRDPLDFLYEVIHKSQHHSELPFGGGAIGFVGYDMISLYEEIGQIPEDTIGTPDMHFFVYESYMVFDHKKEKIHVIEDALYSERSQEALEKSLNQVLEELRIPAPNEFEDLDLSPLDFKPHIAPHKFEGMVETARDLIRNGDMFQCVLSQRFSAEVTGNPFDFYRNLRVTNPSNYLYFYDFGDYQIIGASPESLVSVKNGIVTTNPIAGTRPRGATDEEDKALATDLLSDEKETAEHRMLVDLGRNDIGRISETTSVQVTKYMEVELFRYVMHLTSVVKGRLLPELTAMDALKATLPAGTVSGAPKIRAMRRIYELETEKRGVYAGAIGYLSATGDMDLAIAIRTMILKNQRAYVQAGAGIVYDSIAQNEYQETINKAKSMTRIGELRP

SEQ ID NO: 76266 - DNA, 1428 bp, Clostridium acetobutylicum ATCC 824
  CDS (1)..(1428): transl_table=11
atgtacaatatttcagaagaacagtttaatgataacaaaaagttaaaaaaagcatttcaagttatttacgaggaaaatggagatgagataactccaatatcattattttataatctagaagggaaaaacaagttcttgcttgagagtaacttattttcggaatctaaaggaagatattctttcataggagctaatccttatgcaataataaaaggatttagtaacaatactgaaattattaggaatggctatgtaaaaaaagtagaagataaattccttaaggttgcaagaaagcttactgaggaaggaaagattgaaaagagtaaatatcctttttgtggtggaggagtagggtatgtaggctacgacataataaagcaatacgaaaaaatacccagcttaaatgaagatgatttaaaaataccagatgctattctcatgttttataaaaaaattatctgctatgaccatgtgaaaaacagtattgtatacatctataatgtgtttagagaagatgataaatcctacaaagaaatcaaacaagaactttttgaattgagtgaaatttcaaaaaaaactagagaaatgcacaagcttccggaaagtcataatccagctaatataagttctaattttacaaaggatgaattttgcaaaatggtaaaaaaagctcaggaatatatagttaagggtgatatttttcaaatggttccttctcaaaggtttgtaatggatatagatgaaagaccgtttaatgtgtacagaaggcttagaggcaaaaatccatccccatatcttttctatatagactttaatgattttcaggttacaggttcatcgcccgagagtttggtatgtgtgtttaaggatagggtaataacaaatccaatagcgggaacaagacctagaggaaaaaatgaacaagaggatattaagcttaagagcgagcttataaatgatgagaaggaaatagcggaacattcaatgcttttagacctggctagaaacgatatagggaaaataagtgagtttggcacagttactgtggataagtttatggaagtggaattgtattcacatgttatgcacatagtgtctaaggtttctggaaggcttaaaaaagaatacgattgctttgaagctttaaaatcatgtcttccagctggtacagtgtcaggagcgcctaaaataagagctatggagataatagacgaattagagaacacaaagagaggctgttatgcaggtgcagtcgggtatttttcttatgacggaaacatggatacatgtattgctataagaactcttgtcataaaagaaggtaaagcatatgcacaggcaggcggtggagttgtgtatgattccatccctgaaaatgagtacgaagagagtatgaataaatcccaaattcttaaggaagtgatataa

SEQ ID NO: 76267 - protein, 475 aa, Clostridium acetobutylicum ATCC 824
MYNISEEQFNDNKKLKKAFQVIYEENGDEITPISLFYNLEGKNKFLLESNLFSESKGRYSFIGANPYAIIKGFSNNTEIIRNGYVKKVEDKFLKVARKLTEEGKIEKSKYPFCGGGVGYVGYDIIKQYEKIPSLNEDDLKIPDAILMFYKKIICYDHVKNSIVYIYNVFREDDKSYKEIKQELFELSEISKKTREMHKLPESHNPANISSNFTKDEFCKMVKKAQEYIVKGDIFQMVPSQRFVMDIDERPFNVYRRLRGKNPSPYLFYIDFNDFQVTGSSPESLVCVFKDRVITNPIAGTRPRGKNEQEDIKLKSELINDEKEIAEHSMLLDLARNDIGKISEFGTVTVDKFMEVELYSHVMHIVSKVSGRLKKEYDCFEALKSCLPAGTVSGAPKIRAMEIIDELENTKRGCYAGAVGYFSYDGNMDTCIAIRTLVIKEGKAYAQAGGGVVYDSIPENEYEESMNKSQILKEVI

SEQ ID NO: 76268 - DNA, 2190 bp, Agrobacterium tumefaciens str. C58
  CDS (1)..(2190): transl_table=11
atggtaacgatcattcaggatgacggagcggagacctacgagacgaaaggcggcatccaggtcagccgaaagcgccggcccaccgattatgccaacgccatcgataattacatcgaaaagcttgattcccatcgcggcgcggttttttcgtccaactatgaatatccgggccgttacacccgctgggatacggccatcgtcgatccgccgctcggcatttcctgttttggccgcaagatgtggatcgaagcctataatggccgcggcgaagtgctgctcgatttcattacggaaaagctgaaggcgacacccgatctcaccctcggcgcttcctcgacccgccggctcgatcttaccgtcaacgaaccggaccgtgtcttcaccgaagaagaacgctcgaaaatcccgacggtcttcaccgctctcagagccatcgtcgacctcttctattcgagcgcggattcggccatcggcctgttcggtgccttcggttacgatctcgccttccagttcgacgcgatcaagctttcgctggcgcgtccggaagaccagcgtgacatggtgctgtttctgcccgatgaaatcctcgtcgttgatcactattccgccaaggcctggatcgaccgttacgatttcgagaaggacggcatgacgacggacggcaaatcctccgacattacccccgatcccttcaagaccaccgataccatcccgcccaagggcgatcaccgtcccggcgaatattccgagcttgtggtgaaggccaaggaaagcttccgccgcggcgacctgttcgaggtcgttcccggccagaaattcatggagcgttgcgaaagcaatccgtcggcgatttcccgccgcctgaaggcgatcaacccgtcgccctattccttcttcatcaatctcggcgatcaggaatatctggtcggcgcctcgccggaaatgttcgtgcgcgtctccggccgtcgcatcgagacctgcccgatatcaggcaccatcaagcgcggcgacgatccgattgccgacagcgagcagattttgaaactgctcaactcgaaaaaggacgaatccgaactgaccatgtgctcggacgtggaccgcaacgacaagagccgcgtctgcgagccgggttcggtgaaggtcattggccgccgccagatcgagatgtattcacgcctcatccacaccgtcgatcacatcgaaggccgcctgcgcgacgatatggacgcctttgacggtttcctcagccacgcctgggccgtcaccgtcaccggtgcaccaaagctgtgggccatgcgcttcatcgaaggtcatgaaaagagcccgcgcgcctggtatggcggtgcgatcggcatggtcggcttcaacggcgacatgaataccggcctgacgctgcgcaccatccggatcaaggacggtattgccgaagtgcgcgccggcgcgaccctgctcaatgattccaacccgcaggaagaagaagccgaaaccgaactgaaggcctccgccatgatatcagccattcgtgacgcaaaaggcaccaactctgccgccaccaagcgtgatgccgccaaagtcggcaccggcgtcaagatcctgctcgtcgaccacgaagacagcttcgtgcacacgctggcgaattatttccgccagacgggcgcgacggtctcgaccgtcagatcaccggtcgcagccgacgtgttcgatcgcttccagccggacctcgttgtcctgtcgcccggacccggcagcccgacggatttcgactgcaaggcaacgatcaaggccgcccgcgcccgcgatctgccgatcttcggcgtttgcctcggtctgcaggcattggcagaagcctatggcggcgagctgcgccagcttgctgtgcccatgcacggcaagccttcgcgcatccgcgtgctggaacccggcctcgtcttctccggtctcggcaaggaagtcacggtcggtcgttaccattcgatcttcgccgatcccgccaccctgccgcgtgatttcatcatcaccgcagaaagcgaggacggcacgatcatgggcatcgaacacgccaaggaaccggtggccgccgttcagttccacccggaatcgatcatgacgctcggacaggacgcgggcatgcggatgatcgagaatgtcgtggtgcatctgacccgcaaggcgaagaccaaggccgcgtga

SEQ ID NO: 76269 - protein, 729 aa, Agrobacterium tumefaciens str. C58
MVTIIQDDGAETYETKGGIQVSRKRRPTDYANAIDNYIEKLDSHRGAVFSSNYEYPGRYTRWDTAIVDPPLGISCFGRKMWIEAYNGRGEVLLDFITEKLKATPDLTLGASSTRRLDLTVNEPDRVFTEEERSKIPTVFTALRAIVDLFYSSADSAIGLFGAFGYDLAFQFDAIKLSLARPEDQRDMVLFLPDEILVVDHYSAKAWIDRYDFEKDGMTTDGKSSDITPDPFKTTDTIPPKGDHRPGEYSELVVKAKESFRRGDLFEVVPGQKFMERCESNPSAISRRLKAINPSPYSFFINLGDQEYLVGASPEMFVRVSGRRIETCPISGTIKRGDDPIADSEQILKLLNSKKDESELTMCSDVDRNDKSRVCEPGSVKVIGRRQIEMYSRLIHTVDHIEGRLRDDMDAFDGFLSHAWAVTVTGAPKLWAMRFIEGHEKSPRAWYGGAIGMVGFNGDMNTGLTLRTIRIKDGIAEVRAGATLLNDSNPQEEEAETELKASAMISAIRDAKGTNSAATKRDAAKVGTGVKILLVDHEDSFVHTLANYFRQTGATVSTVRSPVAADVFDRFQPDLVVLSPGPGSPTDFDCKATIKAARARDLPIFGVCLGLQALAEAYGGELRQLAVPMHGKPSRIRVLEPGLVFSGLGKEVTVGRYHSIFADPATLPRDFIITAESEDGTIMGIEHAKEPVAAVQFHPESIMTLGQDAGMRMIENVVVHLTRKAKTKAA

SEQ ID NO: 76270 - DNA, 1464 bp, Streptococcus pneumoniae R6
  CDS (1)..(1464): transl_table=11
ttgaggtggcaccgcgaatttcgtcctcacgcaagttattttgcgtggggatttttcatacagtcgctacgaactagaattagaactgaaagggaaattacaatggaacgaatcattcatggagatgtcttatcaccaatcttggcttatatgcgcttaaaggggcaacacaaggttatcttagagagtattccgagagacaaggaaacagctcgtttttctatcctagcctataatcctgtttttgagattaagtttgaaaatggagttctttatcaaaatggtcaagtgattgatcgggatcccttggatttcctttatgaagtgattcataagagtcagcaccattcagagctaccttttggtggtggagccattggttttgtgggttacgatatgatttcgctttatgaagaaattggtcaaatccctgaggatacaattgggacgccagacatgcatttctttgtctatgagagctatatagtctttgaccacaagaaggagaagatacatgtcatagaggatgcattttatagtgagcgcagtcaagaggccttggaaaaatccttgaaccaagtgcttgaggaattacgcattcctgctccaaatgaatttgaagacttggatttatcaccacttgacttcaaaccgcatatcgctccacataagtttgagggaatggtagaaacagctcgtgacttgattcgtaacggagatatgttccaatgtgtactcagccagcgtttctcagcagaagttactggaaatccatttgacttctacagaaatctccgcgtaactaatccttctaattacctttatttctatgattttggggattatcaaatcatcggagctagtccagaaagtttggtttctgtcaaaaatggcatcgtgacaaccaatccgattgcagggacgcgaccaagaggggctacggatgaagaagacaaggccttggcgactgacctcctctctgatgagaaggaaacagcagaacatcgaatgttggtagacttggggcgtaacgatattggccgcatctctgaaacgaccagtgtccaagtcactaagtatatggaagtggagctcttccgctacgtcatgcatttgaccagcgtagtcaaggggcgtttgcttgcagaactcactgccatggatgccttgaaagcaacgcttcctgctggaaccgtttctggagcaccaaagattcgagcgatgagacgtatctatgaactggaaacggaaaaacggggagtatacgctggggcaatcggctacttgtctgcgacgggtgatatggatttggccatcgccatccgaaccatgattctcaaaaatcaaagagcctatgtgcaggctggggcagggattgtctacgactctatcgcccaaaacgaataccaagaaaccattaacaaagcaaaatctatgactagaattggagaactaagaccatga

SEQ ID NO: 76271 - protein, 487 aa, Streptococcus pneumoniae R6
MRWHREFRPHASYFAWGFFIQSLRTRIRTEREITMERIIHGDVLSPILAYMRLKGQHKVILESIPRDKETARFSILAYNPVFEIKFENGVLYQNGQVIDRDPLDFLYEVIHKSQHHSELPFGGGAIGFVGYDMISLYEEIGQIPEDTIGTPDMHFFVYESYIVFDHKKEKIHVIEDAFYSERSQEALEKSLNQVLEELRIPAPNEFEDLDLSPLDFKPHIAPHKFEGMVETARDLIRNGDMFQCVLSQRFSAEVTGNPFDFYRNLRVTNPSNYLYFYDFGDYQIIGASPESLVSVKNGIVTTNPIAGTRPRGATDEEDKALATDLLSDEKETAEHRMLVDLGRNDIGRISETTSVQVTKYMEVELFRYVMHLTSVVKGRLLAELTAMDALKATLPAGTVSGAPKIRAMRRIYELETEKRGVYAGAIGYLSATGDMDLAIAIRTMILKNQRAYVQAGAGIVYDSIAQNEYQETINKAKSMTRIGELRP

SEQ ID NO: 76272 - DNA, 1365 bp, Listeria innocua Clip11262
  CDS (1)..(1365): transl_table=11
atgagaaaaatgaaaagaatggatgcagatacattaaccgcgattttagcctttcaacgtctttccggaacaggcaaaagcttacttgaaggagctgcaaaagatgcagaggcagggagatattctattattgctatcaatcctgtacatgaaattaaagtatatcaacatgaatattatatagacggggcacttcaaatagtgacagaccctttaaaagaaattgaactatttattgaaaaagcaaaggcggaggaagaaagcttgcctttagattcaggggcaattggttatgttggttatgacgttattgcactttatgaaaatttaggtgacattccagtcgaaacgcgggacatgccagatattcgtttttatatatatgaaagttttatcatcatggatcatcaagcggaagaacttattttagtgcaagataattgctactctgggagaagtgaagcagagctggatgaggcacttgaagcgatgtttttagaacttacaacaccaaaaaaagatgaacacaaagcagttcaagttccgaaaatgacttacaaaagtaattatacaaaagaggagtatatgaacttagtcaaaaaagcgaaaacctatattcaagatggcgatttctttcaaatagtactttctcagcggttagaggcagattttacagtggagccgtttgattattaccgaaaattacgattgttaaatccttcgccttatctctttttcattgattttggcgatacggtcttaattggttcttcaccagagagtttaattaaaacgaaagggcggactgttacgacaaatccaattgctggtacaaggcgtcgcggggcaacaaaacaagaagatgaaatgctggcagcggaattattatccgatgaaaaagaacttgcagagcacagaatgttagtggatttaggacgtaatgatattggaaaaattgcagaaacgggttcggttcatgtaccagtatatctaacaatcgaacgttaccgattcttgatgcatttagtttccgttgtcgaaggtacattaaaaccaggattaagtgcgatggatgctcttcggtcgacgctgccggctggtacagttagcggagcaccaaaaataagagccatggagcgaatctatgaatgggaaaatgtaaaacgtggaccatatgctggtgcggtaggttacttaacgaaaaatggtgattctgattttgctctttcgattagaacgatggtactccatgatggaaaagcttatgtgcaagctggtgcgggaattgtttatgattcagaacctgagagtgaatacttggaaacaatacaaaaagcgaaagcccttttggaggtgggagaatga

SEQ ID NO: 76273 - protein, 454 aa, Listeria innocua Clip11262
MRKMKRMDADTLTAILAFQRLSGTGKSLLEGAAKDAEAGRYSIIAINPVHEIKVYQHEYYIDGALQIVTDPLKEIELFIEKAKAEEESLPLDSGAIGYVGYDVIALYENLGDIPVETRDMPDIRFYIYESFIIMDHQAEELILVQDNCYSGRSEAELDEALEAMFLELTTPKKDEHKAVQVPKMTYKSNYTKEEYMNLVKKAKTYIQDGDFFQIVLSQRLEADFTVEPFDYYRKLRLLNPSPYLFFIDFGDTVLIGSSPESLIKTKGRTVTTNPIAGTRRRGATKQEDEMLAAELLSDEKELAEHRMLVDLGRNDIGKIAETGSVHVPVYLTIERYRFLMHLVSVVEGTLKPGLSAMDALRSTLPAGTVSGAPKIRAMERIYEWENVKRGPYAGAVGYLTKNGDSDFALSIRTMVLHDGKAYVQAGAGIVYDSEPESEYLETIQKAKALLEVGE

SEQ ID NO: 76274 - DNA, 1515 bp, Nostoc sp. PCC 7120
  CDS (1)..(1515): transl_table=11
atgattttccccaatttctccgaattttctcagctagctttgcaaggtaattttgtgccggtgtatcaggaatgggtggcagacctagatacacctgtttccgcttggtacaaagtttgcgctggagagccttatagctttttgctggaatcggtagaaggtggggaaaagattgggcgttatagtttactggggtgtgatcctttatgggttttggaagctaggggtgagacgaccactcagacaaaccgtgatggctcccaagttgtatttacaggcgatccatttacagctctagccgattgcctagcaccgtataaaccagtcaagttaccccaactaccaccaggaattggcggtttgtttggtttttggggttatgaattaattcgctggattgaaccgcgtgtaccagtgcatccccaagatgagcgcaacattcctgatggattgtggatgcaggtagaccatttgttaatatttgaccaggtaaagcggaaaatatgggcgatcgcctatgctgatttacgtgatccaaatgtagatttaaaagcggcgtatcagcaagcgtgcgatcgcgtcacccaaatggtgagcaaactatccttgcccctatcgccccaaaaaaccatattagaatggacacccccaggcagccaaaaagtgggggaaatacaagaatataccagcaacttcactcgaccggaattttgcgccagtgtccaaaaagccaaagagtacatcaaagcgggtgatatctttcaagtagttatttctcaacgcctttctacccaatacaccggcgatcccttctccctgtaccgttccctgcgtcagataaatccctcgccttacatggcgtactttaacttccaagactggcaaatcatcggttctagtcctgaagtgatggtgaaagcggaactggatgcagatggtgaagcaatagccacagttcgtcctattgccgggactcgtccacggggtaagacaaccaaagaagatgcagaattagccgcagatttactccaagaccccaaagaaatcgctgaacacgtcatgctggtggatttaggacgcaacgatttaggccgtgtttgtgccagtgggactgtaaaagttgatgaattaatggtggtggaacgctactctcatgtaatgcacattgtgagtaatgttgtggggaaattagccgcaaataaaaacgcctgggatttattaaaagcctgttttcccgccggcacagttagcggcgcaccgaaaattagggcgatggaaattattaatgagttagaacccagccgccggggtgtgtattctggggtgtatggatattatgattttgaaggacaattaaatagtgcgatcgctattcggacgatggtagtcagagatcaaaccgtaacagtgcaagctggtgcgggtttggtggctgattctgagccagagaaagaatatgaggaaactttaaataaagctagaggacttctcttggcgattcgctgtttacggtag

SEQ ID NO: 76275 - protein, 504 aa, Nostoc sp. PCC 7120
MIFPNFSEFSQLALQGNFVPVYQEWVADLDTPVSAWYKVCAGEPYSFLLESVEGGEKIGRYSLLGCDPLWVLEARGETTTQTNRDGSQVVFTGDPFTALADCLAPYKPVKLPQLPPGIGGLFGFWGYELIRWIEPRVPVHPQDERNIPDGLWMQVDHLLIFDQVKRKIWAIAYADLRDPNVDLKAAYQQACDRVTQMVSKLSLPLSPQKTILEWTPPGSQKVGEIQEYTSNFTRPEFCASVQKAKEYIKAGDIFQVVISQRLSTQYTGDPFSLYRSLRQINPSPYMAYFNFQDWQIIGSSPEVMVKAELDADGEAIATVRPIAGTRPRGKTTKEDAELAADLLQDPKEIAEHVMLVDLGRNDLGRVCASGTVKVDELMVVERYSHVMHIVSNVVGKLAANKNAWDLLKACFPAGTVSGAPKIRAMEIINELEPSRRGVYSGVYGYYDFEGQLNSAIAIRTMVVRDQTVTVQAGAGLVADSEPEKEYEETLNKARGLLLAIRCLR

SEQ ID NO: 76276 - DNA, 2208 bp, Nostoc sp. PCC 7120
  CDS (1)..(2208): transl_table=11
atgattgccgattcccacagctacagaactaatggtaacgtgcgtgtctctcgctccatcacacaagttaaaatggagacagctttagaagagattcttttctacttaaactctcagcgtggtggattgctgactagtagctatgaatatccaggaagatataaaagatgggcaattggttttgttaatccacctgtagaattatccacaagcggaaatacttttactctcacagcattaaatgagcgtggctatgtacttttaccagtgatctttgagtgtttatcaaaatcagaacaactccagaaactcactgaacatcatcataaaattactggattagttaaatctacaccagaattttttgccgaagaagaacgtagtaaacaaccttctacatttacggttattcgggaaatactacatatcttctctagtcaagaagacgaacatttaggattatatggtgcgtttggttatgacttagttttccaatttgagcaaataacccaatgcttagaacgtccacaagaccaacgagatttagttctatatttacccgacgaattgatagttgtagactactatcaacaacaagcatttcggctagagtatgacttcatcacagcgcatggtagtacttatgatttgccccgcacgggagaatctgttgattatcgaggtcaatgtttaacacctcctcaaaatgctgaccataaaataggtgagtatgccaaactagtagaatttgcccttgattatttccgtcggggtgacttatttgaagtggttcccagtcagaattttttcacagcttgcgaagcaccaccaagccaactatttgaaactttaaaacaaataaatcctagtccctatggatttatttttaatcttggtggagaatacatcattggcgcttcaccagaaatgtttgtacgggtggaaggtaggcgtgtagaaacttgtcctattagtggcactattactagagggcatgatgctatagatgatgctgtgcagattcgtcagttactcaactcccacaaagacgaagcagagttgactatgtgtactgacgtagaccgtaacgataagtctcgcatctgtgaacccggttcagtcaaggtgattggtcgccggcaaattgaattatatagccacttaattcatacggtagaccatgtagaaggcattctccgaccagagtttgatgctttagatgctttcctcagtcacacttgggctgttacagtcacaggcgcaccgaaaagggctgctattcaattcatcgaaaagaacgaacgcagcgtcagacgttggtatggtggcgcggttgggtatttgaattttaacgggaatttaaatactgggttaattttaaggacaatcagattgcaagactcaattgctgaagtgcgagttggtgctactctactgtatgactccataccccaagcagaagaacaagaaaccatcactaaagctgcggctgcttttgaaacgattcggcgtgctaaacaaatagacccacagattgaagaatctagtactagaaagttaagcaaatatcttcccgatggacaatcaggtaaacacatcttactaattgaccatgaagactcatttgttcataccctagctaactacatccgttccactggtgcaactgtcaccacactgcgtcacggcttctcagaatccctatttgatacagaacgcccagacttagtagtattatctcctggccccggtagaccgagtgaatttaaagtacaggaaaccgtcgccgcctgcgtccgtcgccaaatacctctgtttggtgtctgtttaggactgcaaggtattgtggaagctttcggtggagaattgggagtattgaattatccccaacatggtaaatcttcgcggatttttgttacagcacccgattctgtgatgtttcaagatttgcccgaatcttttacagtcgggagatatcattcattatttgcactatcacaacgcttaccaaaagaactgaaggtgacagcgatttctgatgatgaggtgattatggcgattgaacatcagacactacctatcgccgccgtccagtttcatccagaatcaatcatgactctagctggagaagttggtttaatgatgatcaaaaatgtggtgcaaaaatatacacaaagtcaacagtcaacagttcccatctatgactaa

SEQ ID NO: 76277 - protein, 735 aa, Nostoc sp. PCC 7120
MIADSHSYRTNGNVRVSRSITQVKMETALEEILFYLNSQRGGLLTSSYEYPGRYKRWAIGFVNPPVELSTSGNTFTLTALNERGYVLLPVIFECLSKSEQLQKLTEHHHKITGLVKSTPEFFAEEERSKQPSTFTVIREILHIFSSQEDEHLGLYGAFGYDLVFQFEQITQCLERPQDQRDLVLYLPDELIVVDYYQQQAFRLEYDFITAHGSTYDLPRTGESVDYRGQCLTPPQNADHKIGEYAKLVEFALDYFRRGDLFEVVPSQNFFTACEAPPSQLFETLKQINPSPYGFIFNLGGEYIIGASPEMFVRVEGRRVETCPISGTITRGHDAIDDAVQIRQLLNSHKDEAELTMCTDVDRNDKSRICEPGSVKVIGRRQIELYSHLIHTVDHVEGILRPEFDALDAFLSHTWAVTVTGAPKRAAIQFIEKNERSVRRWYGGAVGYLNFNGNLNTGLILRTIRLQDSIAEVRVGATLLYDSIPQAEEQETITKAAAAFETIRRAKQIDPQIEESSTRKLSKYLPDGQSGKHILLIDHEDSFVHTLANYIRSTGATVTTLRHGFSESLFDTERPDLVVLSPGPGRPSEFKVQETVAACVRRQIPLFGVCLGLQGIVEAFGGELGVLNYPQHGKSSRIFVTAPDSVMFQDLPESFTVGRYHSLFALSQRLPKELKVTAISDDEVIMAIEHQTLPIAAVQFHPESIMTLAGEVGLMMIKNVVQKYTQSQQSTVPIYD

SEQ ID NO: 76278 - DNA, 2148 bp, Nostoc sp. PCC 7120
  CDS (1)..(2148): transl_table=11
gtgcgcgtatctcgtagcacaaccgaggtgaagatggacactgcactagatgaaattctctttcacctaaatcaagtacgtggaggtttgttaaccagtagttacgaatatccagggcgatacaaaagatgggcgattggattcattaatcccccattacaactgacaacaagagagaacgcatttaccatctcttcactcaatcctcgcggacaggtgctactaccaaccttgttccagcatctatcagcccagtcgcaactacaacaaatcagcctcaatcatgactacatcacaggtgaaattcgacccacaaaacagttattcacagaagaacaacggagtaaacaaccgtcagcctttacagtcatccgcgaaattctccagatttttgcgagtgatgaagacgagcatttagggttatatggtgcatttggttacgacttagtatttcaatttgaaccaattccccaaaaaattgctcgtcccgcagaccaacgggatttagtcctgtatctacccgatgaactcatagttgtagattactatctacaaaaagcatatcgtcaccagtatgaatttgccacagaacatggcaacaccgagcatcttccacggacaggccagtccatcgactaccagggtaaacatcttctaccaaaccaaactgctgaccatcaaccaggagaatatgccaacctagttgagcaagcactcgactacttccgccggggtgacttatttgaagtagttcctagtcaaaacttttttacagcctgtgaacaatcacccagtcaactattccagaccttaaggcaaattaatcctagtccttatggatttctgttgaatttgggtggtgaatatctcataggtgcatcaccagaaatgtttgtgcgagttgatggtaggcgagtggaaacctgtcccattagtggcactattagacggggagaagatgctttaggcgacgctgtacaaattcgtcagttgcttaactcccataaagatgaagccgagttaacaatgtgtactgacgtagaccgcaacgataaatcgcggatttgtgaacccggttcagtcagggtgattggtcgtcgccagattgaactgtacagccacctcattcatacagtagaccatgtagaagggatactgaggccggaatttgacgctttagatgccttcttgagtcatacttgggcagttacagtcacaggcgcacccaaacgagccgccatgcagttcatcgaacagcatgaacgcagcgcccgtcgttggtatgggggagcagttggttatttaggctttaatggtaacttgaataccggattaaccttgcggacaattcgtttacaagactccatcgccgaagtgcgagttggtgcaacagtcctttacgactccattccgtcagccgaagaagaggaaacaattactaaagcgactgcattatttgagaccattcgccgtcataccactgccaataaaactcaaggaaacgatagtcatcgccctggggatatcgcccacaataagcgtatcctcctcatcgactacgaagattcatttgttcacacattagccaattacatccgcaccaccggcgcaaccgtcaccaccctacgtcatggttttgctgaatcatattttgatgcagaacgcccagacttagtggtattgtctcccggccctggtagacccagtgacttccgagttccccaaacggttgcagccttggtaggtcgagaaatccccatttttggcgtttgtctgggattacaaggcatagtggaagcttttggcggagaattaggcgtgcttgattatccccaacacggtaaacccgcacggatttcagtgactgcacctgattctgtgctgtttcaaaatttaccagcatccttcatcgtgggtagataccattccttatttgcccaaccccaaactatacccggtgaactcaaagtcacagcgatttctgaggacaatgtaattatggcaattgaacaccaaacactacctatagccgccgtccaatttcatccagagtcaatcatgaccctagcaggagaagttggtcagacaatcattaaaaatgtggtgcagacatatacccaaactttagaaacatcaatttactcttag

SEQ ID NO: 76279 - protein, 715 aa, Nostoc sp. PCC 7120
MRVSRSTTEVKMDTALDEILFHLNQVRGGLLTSSYEYPGRYKRWAIGFINPPLQLTTRENAFTISSLNPRGQVLLPTLFQHLSAQSQLQQISLNHDYITGEIRPTKQLFTEEQRSKQPSAFTVIREILQIFASDEDEHLGLYGAFGYDLVFQFEPIPQKIARPADQRDLVLYLPDELIVVDYYLQKAYRHQYEFATEHGNTEHLPRTGQSIDYQGKHLLPNQTADHQPGEYANLVEQALDYFRRGDLFEVVPSQNFFTACEQSPSQLFQTLRQINPSPYGFLLNLGGEYLIGASPEMFVRVDGRRVETCPISGTIRRGEDALGDAVQIRQLLNSHKDEAELTMCTDVDRNDKSRICEPGSVRVIGRRQIELYSHLIHTVDHVEGILRPEFDALDAFLSHTWAVTVTGAPKRAAMQFIEQHERSARRWYGGAVGYLGFNGNLNTGLTLRTIRLQDSIAEVRVGATVLYDSIPSAEEEETITKATALFETIRRHTTANKTQGNDSHRPGDIAHNKRILLIDYEDSFVHTLANYIRTTGATVTTLRHGFAESYFDAERPDLVVLSPGPGRPSDFRVPQTVAALVGREIPIFGVCLGLQGIVEAFGGELGVLDYPQHGKPARISVTAPDSVLFQNLPASFIVGRYHSLFAQPQTIPGELKVTAISEDNVIMAIEHQTLPIAAVQFHPESIMTLAGEVGQTIIKNVVQTYTQTLETSIYS

SEQ ID NO: 76280 - DNA, 1530 bp, Ralstonia solanacearum GMI1000
  CDS (1)..(1530): transl_table=11
atgaccgaactcgaattcaaatcgctggccgaccagggctacaaccgcatcccgctgatcgccgaggcgctggccgacctggagacgccgctctcgctgtacctgaagctggcgcaatcgcacgaccgcggcacgcacaccttcctgctggaatccgtggtgggcggcgagcgcttcgggcgctattccttcatcggcctgcatgcgcgcacgctgctgcgcaccaccggccaccgcaccgaggtcgtcaccgacggccaggtggtcgaaacgcatgacggcaatccgctggaattcatcgccgccttcgagcaacgccacaagatcgcgctgcgcccgggcctgccgcggttctgcggcggcctggccggctatttcggctacgacgccgtgcgctacatcgagccgcgcctgaccgacaccgcgccgcccgatgacctgcagttgcccgacatccagctgatgctgtgcgaagagctggccgtgatcgacaacctgtcgggcaagctctacctgatcgtctatgccgatccgtccaagcccgaggcttatccgcgcgccaggcagcgcctgcgcgaactgcgcgccaagctgcggcatccggtggacgtgccggtgacctcgccgtcggtgcgcacggacatcgtgcgggaattcgacaaggcggactacatcaccgcggtgctcaaggccaaggagtacatcgcggcgggcgatatgatgcaggtgcaggtcggccagcgcctggtcaagccgttccgcgacgcgccgctgtcgctgtaccgcgcgctgcgctcgctgaacccgtcgccctatatgtacttctacaacttcggcgacatgcagatcgtcggggcctcgccggagatcctggtgcgccaggaagagcgccgcgtgccggccggcgcgaacggcaacggcgcggaggaatccgcccgcatcgtgacgatccgcccgctggcgggcacccgcccgcgcggcagcacgcccgagcgcgacgcggaactggccaccgagctgctcaacgacccgaaggagatcgccgagcacgtcatgctgatcgacctggcgcgcaatgacatcggccgcatcgccgagatcggctcggtcaaggtgaccgaccagatggtcatcgagaagtattcgcacgtgcagcacatcgtcagctcggtcgaggggcgcctgaagcccggcatgaccaatatggacgtgctgcgcgccaccttccccgcaggcacgctgtcgggcgcgcccaaggtgcgggcgatggagatcatcgacgagctggagccggtcaagcgcggcatctacggcggcgcggtgggctacctgtcgttctcgggcgagatggacctggcgatcgccatccgcaccggcatcatcaaggacggcaacctgtacgtgcaggccgccgccggcgtggtggccgattccgacccggatgccgaatggcgcgagaccgaacacaaggcgcgcgccgtgctgcgcgccgccgagcaggtccaggacggcctggacgccgatttctga

SEQ ID NO: 76281 - protein, 509 aa, Ralstonia solanacearum GMI1000
MTELEFKSLADQGYNRIPLIAEALADLETPLSLYLKLAQSHDRGTHTFLLESVVGGERFGRYSFIGLHARTLLRTTGHRTEVVTDGQVVETHDGNPLEFIAAFEQRHKIALRPGLPRFCGGLAGYFGYDAVRYIEPRLTDTAPPDDLQLPDIQLMLCEELAVIDNLSGKLYLIVYADPSKPEAYPRARQRLRELRAKLRHPVDVPVTSPSVRTDIVREFDKADYITAVLKAKEYIAAGDMMQVQVGQRLVKPFRDAPLSLYRALRSLNPSPYMYFYNFGDMQIVGASPEILVRQEERRVPAGANGNGAEESARIVTIRPLAGTRPRGSTPERDAELATELLNDPKEIAEHVMLIDLARNDIGRIAEIGSVKVTDQMVIEKYSHVQHIVSSVEGRLKPGMTNMDVLRATFPAGTLSGAPKVRAMEIIDELEPVKRGIYGGAVGYLSFSGEMDLAIAIRTGIIKDGNLYVQAAAGVVADSDPDAEWRETEHKARAVLRAAEQVQDGLDADF

SEQ ID NO: 76282 - DNA, 2196 bp, Brucella melitensis 16M
  CDS (1)..(2196): transl_table=11
atgaatgcgaagactgcggatagcgagatattccagcacgaaacggcaggcggtatcatcgtcgagcgggtgcgccacctcacggcctataagggcgccattgaaagctatatcgatgtgctgaacgaatggcgcggtgcggtgttctcgtccaattacgaatatccgggccgctatacgcgatgggataccgcaattgtcgatccgccggtcgtcatcacgtcgcgtgcccgcacgatgcgcatcgaggcgctgaacgcgcgcggcgtcatcctgcttcggcccattctggataccgtcaaggcgctttcggaagtaaagatcgaccagtccggcgaaaaccgtatcgatctgacgattgtggaaccggtcggcaccttcacggaagaagaacgctcgcgcatgccctcggtctttacggtgctgcgcgccatagtcgggcttttcttctcggaggaggatgccaatctcggcctttatggcgcctttggctatgatctggcgttccagttcgatcccatccagtacaagctgaagcgcccggacgaccagcgtgacctcgtgctgttcattcccgacgaaatcttcgtcgccgaccattatgcggcgcgcgcctgggtggaccgttatgaatttcgctgcggcggttcgtccacgcacggtcttgatcgcgcgacgccggtggtgcctttcaagccatcggagcgcaagcttgcgcgcggcgatcataatccgggtgaatatgccaggcttgtcgagcgcgccaaggaaagcttcaagcgcggcgacctgttcgaggttgtgccgggccagaccttctatgagcgctgccacacggcgccgtcggagattttccgccggctgaagtcgatcaatccttcgccctattcctttttcatcaatctgggcgagagcgaatatctggtcggcgcatcgccggaaatgtttgtgcgcgtcaatgggcggcgcatcgagacctgcccgatttccggcaccatcaagcgcggtgaagatgcaatttcggattctgagcagatattgaaactgcttaattccaagaaggacgaatccgagctgaccatgtgttcggatgtggaccgcaacgacaagagccgcgtttgcgagccgggttcggtgcgtgttatcggtcgccgccagatcgagatgtattcccgcctgatccatacggtcgatcatatcgaaggccgcctgcgtgacggcatggatgcgtttgacggcttcctcagccatgcatgggctgtgacggtgacaggcgcgccgaagctgtgggcaatgcgctttcttgaggaaaacgaacgcagcccgcgcgcatggtatggcggcgcgatcggcatgatgcatttcaatggcgatatgaatacagggctgacgctgcgcaccatccgcatcaaggatggtgtggcggaaatccgtgcaggggcgacgcttctgttcgattccaaccctgacgaggaagaagccgagaccgaattgaaggcatcggccatgattgcggctgtgcgggacgcacagaagagcaatcagatcgcggaagaaagtgtggcggcaaaggtgggtgagggggtttcgatcctgctggtcgatcacgaggattccttcgtccatacgcttgccaattatttccgccagacgggcgccaaggtttccaccgtgcgttcaccggtggcagaggagatattcgaccgcgtcaatcccgatctggtggtgttatcgccgggaccgggctcgccgcaggatttcgattgcaaggcgaccatcgataaggcgcgcaagcgccagcttccgatttttggcgtctgcctcggccttcaggccctggcggaagcctatggcggggcgttgcgccagcttcgcgttccggtgcatggcaagccttcacgcatccgcgtatcaaagccggagcgcattttctccggcttgccggaggaagtgacggtggggcgttatcattcgatcttcgccgatcctgaacgcctgccggatgattttctcgtcacagccgaaacggaagacgggatcatcatggcttttgaacataaacatgaaccggtggcagccgttcaattccatcccgaatccatcatgacgcttggccataatgccggtatgcgcatgatcgagaatatcgtgacgcatcttgcaggcaagcacaaggcgcgccgcaccaactattga

SEQ ID NO: 76283 - protein, 731 aa, Brucella melitensis 16M
MNAKTADSEIFQHETAGGIIVERVRHLTAYKGAIESYIDVLNEWRGAVFSSNYEYPGRYTRWDTAIVDPPVVITSRARTMRIEALNARGVILLRPILDTVKALSEVKIDQSGENRIDLTIVEPVGTFTEEERSRMPSVFTVLRAIVGLFFSEEDANLGLYGAFGYDLAFQFDPIQYKLKRPDDQRDLVLFIPDEIFVADHYAARAWVDRYEFRCGGSSTHGLDRATPVVPFKPSERKLARGDHNPGEYARLVERAKESFKRGDLFEVVPGQTFYERCHTAPSEIFRRLKSINPSPYSFFINLGESEYLVGASPEMFVRVNGRRIETCPISGTIKRGEDAISDSEQILKLLNSKKDESELTMCSDVDRNDKSRVCEPGSVRVIGRRQIEMYSRLIHTVDHIEGRLRDGMDAFDGFLSHAWAVTVTGAPKLWAMRFLEENERSPRAWYGGAIGMMHFNGDMNTGLTLRTIRIKDGVAEIRAGATLLFDSNPDEEEAETELKASAMIAAVRDAQKSNQIAEESVAAKVGEGVSILLVDHEDSFVHTLANYFRQTGAKVSTVRSPVAEEIFDRVNPDLVVLSPGPGSPQDFDCKATIDKARKRQLPIFGVCLGLQALAEAYGGALRQLRVPVHGKPSRIRVSKPERIFSGLPEEVTVGRYHSIFADPERLPDDFLVTAETEDGIIMAFEHKHEPVAAVQFHPESIMTLGHNAGMRMIENIVTHLAGKHKARRTNY

SEQ ID NO: 76284 - DNA, 1479 bp, Arabidopsis thaliana
  CDS (1)..(1479)
atgatcaagaggctccaagtttccttttcgaatctgttgagccaggacatcactcttccactgtttgtcgttggagcgcatccgaaaatggaaattgtggcaaaggagaataaagttacagtcatggatcatgtgaaaggcactaagactacagaggaagttgaagatccaatgatgattcctagaagaatctcagagacttggaaaccacaattgatcgatgatcttcctgatgttttttgtggtggatgggttggttacttttcttatgatactgttccctatgccgaaaagcgaaagctacctctctcaaaggctccggttgatgaccgaaatttaccagatatgcatcttggtctttatgatgatgtggttgtgtttgatcatgtcgaaaagaaaatacatataattcattgggtgaggttatcagaaaactcatcatttgatgatgtttatgctaatgctgtgaaacacttggaagaacttgtttcgaggatcaaatgcatgaatccccccaagctaccttatggatcagtggacttgcacacaaatcaatttggcactcctttggaaaaatcaagcatgacaagtgatgcatataagaatgctgtacttcaagccaaagaacacatactggctggagatatctttcagattgttttaagtcaaagatttgagcgccacacttttgcccatccgtttgaagtttatcgagctttgagaattgtgaacccaagtccttctatgtgttacttgcaagcaagaggttgtattctagtagcgtcaagtcctgagattctcactagagtgaagaaaaacaagatcgtgaatagaccactagcaggaactgcaagacgaggaaagagtttcgaggaggatcaaatgttggaggaggcacttttaaaagatgaaaaacagtgtgcagaacacatcatgctcgttgacttgggtcgcaatgatgttggaaaggtgtccaagaacggctcagtgaaagtagaaaggctcatgaatatagagcgttattctcatgtcatgcatattagctcaacggtgattggagagttgcaagagaatctgacttgctgggacacgcttcgtgctgctttacccgttggaaccgttagcggagctccaaaggtgaaggctatggagttgatcgatgagctagaggtgactagaagaggtccatatagtggtggattcggtagtgtctcattcactggagacatggacatagctttggctcttaggaccattgtgttcccaacacaagctcgttacgacacaatgtactcatacaaagacaaagacacgccacgccgtgagtggatagcctatctacaagcaggtgcaggcattgtagctgatagtgacccagaggatgagcaccgtgagtgtcagaacaaagctgctgggctagcacgtgccattgacttggctgagtctgcattcgttgataaaagtgatacaacaatctag

SEQ ID NO: 76285 - protein, 492 aa, Arabidopsis thaliana
MIKRLQVSFSNLLSQDITLPLFVVGAHPKMEIVAKENKVTVMDHVKGTKTTEEVEDPMMIPRRISETWKPQLIDDLPDVFCGGWVGYFSYDTVPYAEKRKLPLSKAPVDDRNLPDMHLGLYDDVVVFDHVEKKIHIIHWVRLSENSSFDDVYANAVKHLEELVSRIKCMNPPKLPYGSVDLHTNQFGTPLEKSSMTSDAYKNAVLQAKEHILAGDIFQIVLSQRFERHTFAHPFEVYRALRIVNPSPSMCYLQARGCILVASSPEILTRVKKNKIVNRPLAGTARRGKSFEEDQMLEEALLKDEKQCAEHIMLVDLGRNDVGKVSKNGSVKVERLMNIERYSHVMHISSTVIGELQENLTCWDTLRAALPVGTVSGAPKVKAMELIDELEVTRRGPYSGGFGSVSFTGDMDIALALRTIVFPTQARYDTMYSYKDKDTPRREWIAYLQAGAGIVADSDPEDEHRECQNKAAGLARAIDLAESAFVDKSDTTI

SEQ ID NO: 76286 - DNA, 1407 bp, Methanopyrus kandleri AV19
  CDS (1)..(1407): transl_table=11
gtgcgcttgactgtaagggagctagatatagacaggtctcccgacgaggtctacgcggccttgaggacgctgtcctcacacacgttcctattcgagtcggccgagatcggtgccagcggccggtactccttcgtaggcttctcaccggcgcttaggatagagtgcgtcgacggtcgagtccgcgtggacgtcggtgacccggagtacgccgatttagtggttgaaggtcgaaaggaaacggatgaggaccacttccagctcatgcgccgcgtgttctcccgaatcccgaaggtcgaggggtccggcttcgtcggcggtctcgtgggctacatatcgtacgacgtcgtcgaagactggctggacgtcaaatcgaccaccgtcgccgacccggagtggccgtccttcgagctgtgcctctacgactcggtggtgcgcttcgaccactacgaggacagagtcgagctgatctccgtccatcccgacgactacgaggtcgagtggacggcggaggcgatcgaggagtgtgtccgagaggtgagcggacagacggcccctaaggtgcaccggacgggggagctgaagcgggacctggagaaagaggagttcgaggggatcgtcgagcgggcgaaggagtacataatctcgggggacatcttccaggttgtactctcgaggcgggtggaggtgcgagcggtcgcggatccgctcgaggtgtaccgaaggctccgcgacatcaacccgtccccgtacatgtactgcttggagttcggcgagcggaggatcatcgggtccagtcccgagacgctcgtccggctggaaggtgatcgcatcatcacgaaacccatagccggcaccaggccccgtggtagtaccccagaagaggacgaagagctggcccgtgagatgctcgaagatgagaaagagctcgcggagcacgcgatgctcgtggatctcgccagaaacgacgtgggtaaggtctcgagacccggaacggtcgaagtcacgcggctcatggagatcgagaagtacagtcacgtgcagcacatcgtgtccgaggtggtgggtgagagaaaggagggagttaccccctgggacgtactccgggcgacgttcccggccggaaccgtctccggggccccgaaggtgagggctatggaaatcatcgacgagctggaggtgtacaagcgaggcccgtacgccggaggcgtcggatacgtcagctggacaggggatatggacttcgcgatatcgatccgtaccattttctcgacgggccgtcgatggttcacgcaggcgggtgccggtatcgtgtacgactcggtgcccgaaaacgagtggttcgaaactgaaaataaaatgaaagcgatggtgggagctatccttgaggagactagttctgataaataa

SEQ ID NO: 76287 - protein, 468 aa, Methanopyrus kandleri AV19
MRLTVRELDIDRSPDEVYAALRTLSSHTFLFESAEIGASGRYSFVGFSPALRIECVDGRVRVDVGDPEYADLVVEGRKETDEDHFQLMRRVFSRIPKVEGSGFVGGLVGYISYDVVEDWLDVKSTTVADPEWPSFELCLYDSVVRFDHYEDRVELISVHPDDYEVEWTAEAIEECVREVSGQTAPKVHRTGELKRDLEKEEFEGIVERAKEYIISGDIFQVVLSRRVEVRAVADPLEVYRRLRDINPSPYMYCLEFGERRIIGSSPETLVRLEGDRIITKPIAGTRPRGSTPEEDEELAREMLEDEKELAEHAMLVDLARNDVGKVSRPGTVEVTRLMEIEKYSHVQHIVSEVVGERKEGVTPWDVLRATFPAGTVSGAPKVRAMEIIDELEVYKRGPYAGGVGYVSWTGDMDFAISIRTIFSTGRRWFTQAGAGIVYDSVPENEWFETENKMKAMVGAILEETSSDK

SEQ ID NO: 76288 - DNA, 1683 bp, Methanosarcina acetivorans C2A
  CDS (1)..(1683): transl_table=11
atgctttcctttgatcttggaaaagaagaatttctggagcttgtctccgggctcgaaaagccgggccttgtccagctctttgcaaaagtagaaggctgttcccctgcctgctctcccctcgaactttacggagccctgcggggttcagggacaacaggctactcttacctgctggaatccgtggaaaagcaggaaagcagggcaaggtactcttttgttggaaacgaccccgatgccgtgctgaaaataaatgaccgaaaaatttcccttgaactcctgaacccgaaagcttctcctctctttgaagcgatttgcacaaagatggaggaagtctgcggcccggaaaccgcagaaaaagaaaatgaatcaaagaaaaatgcaggtccggaaaagtttacggctgcaattcccagaggaaaagatgttttcgatgctctccgcctggcttttcctccggcaaacgggatagaacttctcaattccaggcgttttgcgaggcagactttcctggggggagctatcggctatactgcgtacgacgcaatctatgacagctggttaggagtcgagaagggctttgagtccgacattcccgaccttcagtacctcctcgtttcgaagagttttgtcctcgaccacctgactgaagaggtttacatagttctcacccccttcgtaagcccgggttcggatgcagaacaggtgtacgaagaagctctctcggaagcagaacggttttactccgtaattaaaaaagctactcaaccggaagatgcagcaaaggcagcagaaggaataattgcatcaggcacagatgtttccggtccggcaaaagccccaaattcaaatgtgcaggtctgcagcgttgatcggtcgggatttgaggagtccgtactccaggcaaaggagcatatttttgcaggagatattttccaggtcgtcctttccaggaaatgcgagtttaaaatggaacagtctcctttcgagctttacatacagctccgggcaataaacccgagtccctacatgtatatctttgagtttggggaccttgcaattgtgggggcaagccctgaaaccctgctgaccgtacacaaacgcactgttataataaaccccattgcaggcacctgtccgaggggaaagtccgaagctgaagacgaaaccctggcttcacacatgctcaacgacgaaaaggaaagggcggaacatgtaatgctagttgacctcggacgaaacgatgtccggatggtttcggaaagcggctcggtcaaggtctcaggttttatgaaagtcctgaagtattcccatgtccagcacatcgaaagcacggtttcgggaaccctaaggcccgaatgtgaccaattcgatgccttcagggcggtatttcctgcaggaacactttcaggggctccgaaaattcgggcaatggagattatttccgaacgtgaagctgtcccaagaggaatttacggaggtggggttgggtactacagctggaacggagatgctgattttgcaattgtaatcaggaccctgcttatacagggaagaaaggcttctgtgcaggcaggggcaggaattgttgcggactcagatcctgcgtatgagttcagggaaacagaccggaaaatggcagcaatgcttacagctatcggcggagaaatccgggttgagaaatga

SEQ ID NO: 76289 - protein, 560 aa, Methanosarcina acetivorans C2A
MLSFDLGKEEFLELVSGLEKPGLVQLFAKVEGCSPACSPLELYGALRGSGTTGYSYLLESVEKQESRARYSFVGNDPDAVLKINDRKISLELLNPKASPLFEAICTKMEEVCGPETAEKENESKKNAGPEKFTAAIPRGKDVFDALRLAFPPANGIELLNSRRFARQTFLGGAIGYTAYDAIYDSWLGVEKGFESDIPDLQYLLVSKSFVLDHLTEEVYIVLTPFVSPGSDAEQVYEEALSEAERFYSVIKKATQPEDAAKAAEGIIASGTDVSGPAKAPNSNVQVCSVDRSGFEESVLQAKEHIFAGDIFQVVLSRKCEFKMEQSPFELYIQLRAINPSPYMYIFEFGDLAIVGASPETLLTVHKRTVIINPIAGTCPRGKSEAEDETLASHMLNDEKERAEHVMLVDLGRNDVRMVSESGSVKVSGFMKVLKYSHVQHIESTVSGTLRPECDQFDAFRAVFPAGTLSGAPKIRAMEIISEREAVPRGIYGGGVGYYSWNGDADFAIVIRTLLIQGRKASVQAGAGIVADSDPAYEFRETDRKMAAMLTAIGGEIRVEK

SEQ ID NO: 76290 - DNA, 1431 bp, Thermoanaerobacter tengcongensis MB4
  CDS (1)..(1431): transl_table=11
gtggtaaatatttctaaagaagatttttatgcctataaaaaaatgggatacactttcccagtatatgaggaaataaatggtgatgaaatcacgccaataaacgttttttatagtctttctggtaaacacaaatttttattggaaagtgcaaatggagggagtcactggggtagatattcttttataggaaaggacccttatttgtcagttttaagctatggaagggatataaaaattatcacaacagaagaagaatcgaataaaagaggtttagcactggaagaggtaaaaaactttctgcagattaattataacccattagggcttaacattccttttacaggaggtgcggtaggctatgtatcttatgatgcgataaggctttatgaaaaattgccagaaaaaaatcctgatgaaataaatataccggatgtatacttcatgttttacaagagtttcatctgctatgaccattttaagcatgaagtctacattgtctacaatgtatttgctaatgaggataccgagtatgaggaagttttgcaaaagattaatgagcttttaaatgagataaagtcaaataaaatagagtttcacgacctttcgcttcaagaagaaaaagtgataacttacaacttcacaaaagaagagttttgtcaaattgttgaaagagccaaaaaatacattgaaaaaggagacatatttcaagtggtgttatcccagaggctaaaggcaaagacaaattcagatccttttgagatttacaggaggttgcgttcaaagaatccatctccctatcttttctatatcgactttggcgattttcagcttctgggttcttctcctgaaagtcttgtgagagtctttcaagacaaagtgaccacaaatcctatagcaggcacaagacgaaggggaaaagatgaaaaagaggatttaaaaaacaaagaagaacttttgaaggatgaaaaagaaagggcagagcatgtgatgttggttgacttagggagaaacgacataggaaaggtcagtgaatttggaagtgttaaagtggagcgctttatggaggtggatttttactctcatgtaatgcacattgtatcaactgtttctggaaaattaaaaaaaggatttaccgcttttgatgcccttatagcttgtcttcctgcaggcacagtttctggagcgccaaagataagagcgatggaaataatagaggaattagaaaatgtaaaaaggtccttttacgcaggggctgttggctatttttcctataacggcaatatggatatgtgcatagcaataaggactattctcataaaagaaaatactgcttattttcaagcaggagcaggtattgtgtatgactcaattcctgagatggaatactatgaaattttaaataaagtgatggtacttaaggaggttctttga

SEQ ID NO: 76291 - protein, 476 aa, Thermoanaerobacter tengcongensis MB4
MVNISKEDFYAYKKMGYTFPVYEEINGDEITPINVFYSLSGKHKFLLESANGGSHWGRYSFIGKDPYLSVLSYGRDIKIITTEEESNKRGLALEEVKNFLQINYNPLGLNIPFTGGAVGYVSYDAIRLYEKLPEKNPDEINIPDVYFMFYKSFICYDHFKHEVYIVYNVFANEDTEYEEVLQKINELLNEIKSNKIEFHDLSLQEEKVITYNFTKEEFCQIVERAKKYIEKGDIFQVVLSQRLKAKTNSDPFEIYRRLRSKNPSPYLFYIDFGDFQLLGSSPESLVRVFQDKVTTNPIAGTRRRGKDEKEDLKNKEELLKDEKERAEHVMLVDLGRNDIGKVSEFGSVKVERFMEVDFYSHVMHIVSTVSGKLKKGFTAFDALIACLPAGTVSGAPKIRAMEIIEELENVKRSFYAGAVGYFSYNGNMDMCIAIRTILIKENTAYFQAGAGIVYDSIPEMEYYEILNKVMVLKEVL

SEQ ID NO: 76292 - DNA, 1509 bp, Streptomyces coelicolor A3(2)
  CDS (1)..(1509): transl_table=11
atggacgtcacgcatgacatggacctcgacaccttccgcaagctcgccgccgaccgccgggtgatcccggtgagccgcaagctcctcgccgacggcgacaccccggtcgcgctgtaccgcaagctcgccgcctcgcgccccggcaccttcctgctggagtccgcggagaacggacgctcctggtccaggtactccttcgtcggcgtccgcagcgccgccaccctcaccgagaaggacggccaggcgcactggcagggcaccccgcccgtcggcgtccccaccgacggcgacccgctcgccgccctgcgcgccaccgtcgaggccctgcacaccccgcgcgacctcgcccacgacctgggcctgccgcccttcaccggcggcatggtgggctacctcgggtacgacatcgtgcgccgcctggagaaggtcggcccgggggagcgcgacgacctgaagctgcccgagctgaccatgctgctcaccagcgacctcgccgtcatggaccactgggagggctcggtcctgctgatcgccaacgcgatcaaccacaacgacctggagaccggcgtcgacgaggcctacgccgacgcgatcgcccgcctcgacgtcatggaggccgacctcacgcgtgccgtcgcccagcccccggccgcgctgcccccctccgagctgcccgagtacaccgcgctgtggggcggccccgacttccaggacgccgtcgaggacatcaaggagcgcatccgcgcgggcgaggccttccaggtcgtcccctcccagcgcttcgagacgccctgcacggcgagcgccctcgacgtctaccgggtcctgcgggccaccaacccctccccgtacatgtacctgctccgtctcgacggcttcgacgtcgtcggctcgtcccccgaggcgctggtcaaggtcgaggacgggcgcgccatggtgcaccccatcgccggtacccgcccgcgcggcgccaccccgcgggaggaccagtccctcgccgacgaactgctcgccgaccccaaggagcgcgccgagcacctgatgctggtcgacctcggccgcaacgacctcgggcgcgtctgcgagcccgggtccgtcgaggtcgtcgacttcatgtccgtcgagcggtactcgcacgtcatgcacatcgtctcgacggtcaccggccgggtcgccccgggccgcaccgccttcgacgtcctcaccgcctgcttcccggccggcaccctctccggcgcgcccaagccgcgcgccctgcagatcatcgacgaactcgagccctcccggcgcggcctgtacggcggctgcgtcggctacctcgacttcgccggcgactccgacaccgccatcgccatccgcaccgccctgctgcgcgacggcaccgcctacgtccaggcgggcgcgggcgtcgtcgccgactccgacccggtcgccgaggacaccgagtgccgcaacaaggcggcggccgtgctgagggccgtacacacggccaaccggctggcgcaatag

SEQ ID NO: 76293 - protein, 502 aa, Streptomyces coelicolor A3(2)
MDVTHDMDLDTFRKLAADRRVIPVSRKLLADGDTPVALYRKLAASRPGTFLLESAENGRSWSRYSFVGVRSAATLTEKDGQAHWQGTPPVGVPTDGDPLAALRATVEALHTPRDLAHDLGLPPFTGGMVGYLGYDIVRRLEKVGPGERDDLKLPELTMLLTSDLAVMDHWEGSVLLIANAINHNDLETGVDEAYADAIARLDVMEADLTRAVAQPPAALPPSELPEYTALWGGPDFQDAVEDIKERIRAGEAFQVVPSQRFETPCTASALDVYRVLRATNPSPYMYLLRLDGFDVVGSSPEALVKVEDGRAMVHPIAGTRPRGATPREDQSLADELLADPKERAEHLMLVDLGRNDLGRVCEPGSVEVVDFMSVERYSHVMHIVSTVTGRVAPGRTAFDVLTACFPAGTLSGAPKPRALQIIDELEPSRRGLYGGCVGYLDFAGDSDTAIAIRTALLRDGTAYVQAGAGVVADSDPVAEDTECRNKAAAVLRAVHTANRLAQ

SEQ ID NO: 76294 - DNA, 1476 bp, Xanthomonas campestris pv. campestris str. ATCC 33913
  CDS (1)..(1476): transl_table=11
ttgatcactgcagagcagttccagcgccaggccgctgaaggccacacccgtatccccgttgtccgtgaagtgctgtccgacctggacacgccgctgtcggtctatctgaaactcgccgacggcgcctacacctacctgttcgaatcggtcgaaggcggtgagcgcttcgggcgctattccatcatcggcctgccggcgcgacgcgtgtacagctttcgcggccacacgctggaagtcagcgaacacggcgaagtgctggagacccgcgaagtcgccgatccgctggccgaagtcgacgccttgcgcgccgagcactcggtgccccagctcgatggcctgcccgggtttaccggcgggctggtcggttggttcggcttcgaatgcatccagtacatcgaaccgcgcctgggtagcggcgagaagcccgacgaactgggcacgccggacatcctgctgatgctctccgaagagctggcggtgttcgacaatctcaagggccgcctgtacctgatcgtgcatgccgacccgcgccagccgcaggcctatgtgcgcgccaaccgccgcctggacgaactggcgcatcgcctgcgtcagggaggcgccgggtatccgcaggcgcaaatttccgatgccatcgacgaatcggatttccattcttcgttcacccgcgaggagtaccacgcggtggtgcgcaaggcgcaggaatacgtgcgcgccggcgacatcttccaggtggtgccgtcgcaacggttgcgggtgccattccgtgcgcgtccggtggatgtgtatcgcgcgctgcgtgcgttgaacccttcgccgtacatgtattttctggatgtcggcggcacccaggtagtcggctcctcgccggaaatcctcgcgcgcctgcgcgatggcgtggtcaccgtgcgtcccatcgccggcacccgcccgcgcggcgcaacaccggagctggacaaggcgctggaagaagaattgctggccgacccgaaagagcgcgccgagcatgtgatgttgatcgatctgggccgcaacgatgtcggccgcgtggccgagccgggcaccgtcaaggtgggcgagcagttcgtgatcgagcgctatagccacgtcatgcacatcgtcagcgaagtcaccggcacgctcaaagccggcctgaattacagcgatgtgctgcgcgcgacatttcccgccggcactgtcagtggcgcaccaaagatccgcgcgctggaaatcatccgcgagctggagccggtcaagcgcaacgtgtattccggcgcggtgggctacatcggctggcatggcgacgccgataccgcgattgcgatccgcaccgccgtgatccaggacggctacctgtatgtgcaggccggcggcggcgtggtctacgactccgatcccgatctggaatggcaggaaaccatgaacaagggccgcgccctgttccgcgcggttgcccaggccgccaaggggttgtga

SEQ ID NO: 76295 - protein, 491 aa, Xanthomonas campestris pv. campestris str. ATCC 33913
MITAEQFQRQAAEGHTRIPVVREVLSDLDTPLSVYLKLADGAYTYLFESVEGGERFGRYSIIGLPARRVYSFRGHTLEVSEHGEVLETREVADPLAEVDALRAEHSVPQLDGLPGFTGGLVGWFGFECIQYIEPRLGSGEKPDELGTPDILLMLSEELAVFDNLKGRLYLIVHADPRQPQAYVRANRRLDELAHRLRQGGAGYPQAQISDAIDESDFHSSFTREEYHAVVRKAQEYVRAGDIFQVVPSQRLRVPFRARPVDVYRALRALNPSPYMYFLDVGGTQVVGSSPEILARLRDGVVTVRPIAGTRPRGATPELDKALEEELLADPKERAEHVMLIDLGRNDVGRVAEPGTVKVGEQFVIERYSHVMHIVSEVTGTLKAGLNYSDVLRATFPAGTVSGAPKIRALEIIRELEPVKRNVYSGAVGYIGWHGDADTAIAIRTAVIQDGYLYVQAGGGVVYDSDPDLEWQETMNKGRALFRAVAQAAKGL

SEQ ID NO: 76296 - DNA, 1356 bp, Xanthomonas campestris pv. campestris str. ATCC 33913
  CDS (1)..(1356): transl_table=11
atgacgctgacccgaccactgcacgcggacatcgacctgctggcgctgcatcgcctggcaccgcagcggtatcccgcgttgctggaatccagcgcgtcgggcaccgcgcacgggcgttgggatgtgttgctgctggcgcagggcgcgcagctgcgtctggacccggacggctgcacccgcaatggtgacggccaactgctggaaggcggctttctcgacgccctggatgcagcctggcaggccgagcggctgccgcacgagggcgaaagttcttggccgtttcgcggtggctgggcggtgctgctggactatgaggtggccgcacaggtcgagccgatcctgcgcctgcccatgcgcagcgacgccgcgcccgcggcattggccctgcgggcgccggcggcagtgctgcgcgaccgcatggacgggcgctgcttcgccgtggccgagccggggcgcgaagacctgctgcagcagattgacgacgacatcaccgcctgcgccagcctgccagccttgcctgcctgggcagcgccgacggtggtgcaggaagacccgcctgagcaattcaccgatgcggtgctgcgggtgctggactatttgcgtgccggcgatgtgttccaggccaatatctcgcgcgcctggcaggcgcagttcgatcggcccgtcgaccctgccgccttgcatgcgcggctgcgtgcggccaatccggcgccgttttccggcctgtttgtggcggccgggcgcgcgatggtgagttcttcgccggagcggttggtgtcggtgcacgggcgagtagtgcagacccggccgattgccgggacccgtgcacgctttgccggtgacgatgatgccgcgcgcatccgcgagctggtcggtcacccgaaggaacgcgccgaacacgtgatgctgatcgacctggagcgcaacgacctgggccgcatctgcgcgccgggcagcgtggaggtggacgaactgatgggcgtagagagctatgcgcacgtgcatcacatcgtcagcaatgtccgcggccggttgcggcagggcgtcacccctggcgaggtgattgcggcggtatttccgggcggcaccatcaccggctgcccgaaggtgcgctgcatgcagatcattgccgagctggaacagaccgcgcgtggcgcctataccggcgcgttcggttggctcaaccgcgacggcgacatggatctgaacatcctgatccgcaccgccgaagtggccggcagccaggtacggttccgcaccggtgctggcatcgtggtggactcggacccgcagcgggaactggacgaaacccgtgccaaggcgcgcgggctgctgcgtgcgctggacccggcatga

SEQ ID NO: 76297 - protein, 451 aa, Xanthomonas campestris pv. campestris str. ATCC 33913
MTLTRPLHADIDLLALHRLAPQRYPALLESSASGTAHGRWDVLLLAQGAQLRLDPDGCTRNGDGQLLEGGFLDALDAAWQAERLPHEGESSWPFRGGWAVLLDYEVAAQVEPILRLPMRSDAAPAALALRAPAAVLRDRMDGRCFAVAEPGREDLLQQIDDDITACASLPALPAWAAPTVVQEDPPEQFTDAVLRVLDYLRAGDVFQANISRAWQAQFDRPVDPAALHARLRAANPAPFSGLFVAAGRAMVSSSPERLVSVHGRVVQTRPIAGTRARFAGDDDAARIRELVGHPKERAEHVMLIDLERNDLGRICAPGSVEVDELMGVESYAHVHHIVSNVRGRLRQGVTPGEVIAAVFPGGTITGCPKVRCMQIIAELEQTARGAYTGAFGWLNRDGDMDLNILIRTAEVAGSQVRFRTGAGIVVDSDPQRELDETRAKARGLLRALDPA

SEQ ID NO: 76298 - DNA, 1476 bp, Xanthomonas axonopodis pv. citri str. 306
  CDS (1)..(1476): transl_table=11
ttgatcactgcagagcagttccagcgccaggccgctgaaggtcacacccgtattcccgttgtccgcgaagtgttgtccgacctggacacgccgctctcggtctacctgaagctcgccgacggcgcctatacctatctgttcgaatcggtcgaaggcggggagcgcttcgggcgctactccatcatcggcctgccggcgcggcgcgtgtacagctttcggggccacacgctggaggtcagcgaacacggcgaagtcgtcgagacccgtgaggtcgccgacccgctggccgaagtcgatgcgttgcgggccgaacattcggtgccgcagctggatgggctgcccggcttcaccggcgggctggtcggctggttcggtttcgagtgcatccaatacatcgagccgcgcctggggagtggcgacaagcccgacgaactcggcacgccggacatcctgctgatgctctccgaagagctggcggtgttcgacaatctcaagggccgtctgtacctgatcgtgcatgccgacccgcggcagccgcaagcctatgtgcgcgccaatcggcgcctggacgagctggcgcatcgcctgcgtcagggcggcgccggttacccgcaggcgcagatttccgatgcgatcgacgaagcggacttccattcctcttttacccgcgaggaatatcacgccgtggtgcgcaaggcgcaggaatacgtgcgtgccggcgatatcttccaggtagtgccatcgcaacgcttgcgcgtgccgttccgcgcgcgcccggtggatgtgtatcgcgcgttgcgtgcactgaatccgtcgccgtacatgtattttctcgatgtcggcggtacccaggtggttggttcgtcgccagaaattctggcgcgcctgcgcgatggcgtggtcactgtgcgcccgatcgccggcacccgcccgcgcggcgccacgcccgaactggacaaggcactggaagccgaactgctggccgacccgaaggaacgcgccgagcacgtgatgctgatcgatctgggtcgcaacgatgtcggccgcgtggccgaaccgggcacggtcaaggtcggcgagcagttcgtgatcgaacgctatagccatgtcatgcacatcgtcagcgaggtgaccggcaccctgaaagccggcctgaattatagcgacgtgctgcgcgccaccttcccggccggcactgtcagcggcgcgccgaagatccgcgcgctggaaatcatccgcgagctggagccggtcaaacgcaacgtgtattccggcgcggtcggctatatcggctggcatggcgatgccgataccgccatcgccatccgcaccgccgtcatccaggacggttacctgtatgtgcaggccggcggcggcgtggtctacgactccgaccccgacctggagtggcaggaaaccatgaacaaggggcgtgcgctgtttcgcgcagttgcccaggcggcgaagggcctgtga

SEQ ID NO: 76299 - protein, 491 aa, Xanthomonas axonopodis pv. citri str. 306
MITAEQFQRQAAEGHTRIPVVREVLSDLDTPLSVYLKLADGAYTYLFESVEGGERFGRYSIIGLPARRVYSFRGHTLEVSEHGEVVETREVADPLAEVDALRAEHSVPQLDGLPGFTGGLVGWFGFECIQYIEPRLGSGDKPDELGTPDILLMLSEELAVFDNLKGRLYLIVHADPRQPQAYVRANRRLDELAHRLRQGGAGYPQAQISDAIDEADFHSSFTREEYHAVVRKAQEYVRAGDIFQVVPSQRLRVPFRARPVDVYRALRALNPSPYMYFLDVGGTQVVGSSPEILARLRDGVVTVRPIAGTRPRGATPELDKALEAELLADPKERAEHVMLIDLGRNDVGRVAEPGTVKVGEQFVIERYSHVMHIVSEVTGTLKAGLNYSDVLRATFPAGTVSGAPKIRALEIIRELEPVKRNVYSGAVGYIGWHGDADTAIAIRTAVIQDGYLYVQAGGGVVYDSDPDLEWQETMNKGRALFRAVAQAAKGL

SEQ ID NO: 76300 - DNA, 1356 bp, Xanthomonas axonopodis pv. citri str. 306
  CDS (1)..(1356): transl_table=11
atgacgcttacccgatcactgcacgcggacatcgacctgctggcgctgcatcggctgtcaccgcaacgctatccggccctgctggagtccagcgcttccggcaccgagcatggtcgctgggatgtgctgctgctggcagaggggccatgcctgcggctggatccggacggatgtacgcgcgatggcgctgggcggttgctggagggcggctttctggcggcgctggatgccgcctggcaggccgagcgcgtgccgcacgacgcggcaagcccatggccgtttcgcggcggttgggcagtgctgctggattacgaacttgccgcgcaggtcgagccgattctgcaactgcccacgcgccgcgacggcgtgcccaccgcgctggccttgcgcgcgccggcagcggtgctgcgcgatcgcctgcacgggcgctgtgtggcgctggcagagccgggccgcgaggagttgttgcagcagatcggcgacgaccttgctgcctgcgctgcactgccgccgctgcctgcctgggccgggccgcttgcggtggacgaagaggcccccgagcgttttaccggggcagtggagcgcgtgctcgattacctgcgtgccggcgatgtcttccaggccaatatctcgcgcgcctggcacgcggcattcgctgcggtggtcgatccggccgcgttgcatgcgcgcctgcgtgcggccaatccggcgccgtttgccggcctgttcgttgccgccgggcgtgcagtggccagttcctcgccagagcggctggtctcggtacagggcgatgtggtgcagacgcgcccgatcgccggcacccgcgcgcggtttgccggggacgacgatgccgcacgtatccgggagctggtcgggcatccgaaggagcgcgccgagcacgtgatgctgatcgatctggagcgcaacgacctgggccgcatctgcgcgccgggcaccgtggaggtggacgagttgatgtgcgtggagagctatgcgcatgtgcatcacatcgtcagcaacgtgcgcgggcgtctgcgcgccggggtaacgcccggtgaggtgattgccgcggtgtttcccggtggcaccattaccggttgcccgaaggtgcgctgcatgcaggtcatcgccgagctcgaacaaactgcgcgcggggcctataccggtgcattcggctggctcaatcgtgatggcgacatggatctgaatatcctgatccgcaccgccgaggtggccggtcaccatgtgcatttccgcaccggtgccgggatcgtggtggattcggatccgcagcgcgagctggatgaaacccgcgccaaggcgcgtggcgtgttgcgtgcgatcgagcagacatga

SEQ ID NO: 76301 - protein, 451 aa, Xanthomonas axonopodis pv. citri str. 306
MTLTRSLHADIDLLALHRLSPQRYPALLESSASGTEHGRWDVLLLAEGPCLRLDPDGCTRDGAGRLLEGGFLAALDAAWQAERVPHDAASPWPFRGGWAVLLDYELAAQVEPILQLPTRRDGVPTALALRAPAAVLRDRLHGRCVALAEPGREELLQQIGDDLAACAALPPLPAWAGPLAVDEEAPERFTGAVERVLDYLRAGDVFQANISRAWHAAFAAVVDPAALHARLRAANPAPFAGLFVAAGRAVASSSPERLVSVQGDVVQTRPIAGTRARFAGDDDAARIRELVGHPKERAEHVMLIDLERNDLGRICAPGTVEVDELMCVESYAHVHHIVSNVRGRLRAGVTPGEVIAAVFPGGTITGCPKVRCMQVIAELEQTARGAYTGAFGWLNRDGDMDLNILIRTAEVAGHHVHFRTGAGIVVDSDPQRELDETRAKARGVLRAIEQT

SEQ ID NO: 76302 - DNA, 1515 bp, Chlorobium tepidum TLS
  CDS (1)..(1515): transl_table=11
atgatcagatctttttcggacaatacggccgacccggcaaaggagccgtcttttattctgacccctctggtcagaacctttcaggctgatacggaaaccccggtgtcggtgtacctcaaactccagcgcccttactcctgcctgctcgagtcggtcgaaggggaggagcgtatggcccgttattcctatatcgccgtcgatccggtagccgtactcaaggggacggttggcggagagattttgcttgacgttcgtgacgagcgtttccgccagttgtctgccattgttgaacaggagcgtgaccttcgcgccgtcgtggatcgctgcatggcgatgttctcctccgaaaagctgcctcgccacaagagcggttcgcagcagatgagcacctccggtgtgttcggttatttcggttacgacaccatgcacctcatcgaaaagattcccgccgccgagcagcccgatccggcagggatgccagacctttgcttgcttttctgcgacacgctcgtcatctttgacaacgtgatgcgcaagctctttctcgtgaccaactatctcgacgccgccgaccgcacgcgcgccgaccgcaaaatcgacgagcttgccgcactgttgcagaagccgctcgtgcctgctctcgtgccgtttcagcccgagaaaccggagccggtcatctcgaacaccacgcgtgacgagtattacgccaaggtgctcaaggccaaggagtacattctgagcggtgacatcttccaggtgcagatttcgcagcgcctgaagcgcaagctgcacacccgtccgttcgacgtctatcgcgcgctccggacgatcaacccttcgccttacctctacttctttgacttcgaggattttcatgtcgtcggctcatcgcccgagctgctggtcaaggtagagcgcgaccacaccggacgccgcatggtcgatacccggcctatcgccggaacgcgacggcgcggcgagagcttcgaggaggacgagcgcaacgccaaggagctgatctccgacgaaaaggagcgggccgagcacctgatgctcatcgacctaagccgcaacgacatcgggcgcatcgccaagatcggcacggtcgagaccaacgagatgatggtgatcgagaagtactcgcatgttatgcacatcgtcagcaacgtccggggtgaattgcaggacggtctgacggcgatggacgccttctggtcgtgcttcccggcgggaacgctgaccggcgcgccgaaggttcgcgccatggagatcatctacgagctggagaaagagaagcgcggcctttacggcggcgcggtgggctacctcgatttccgggggcagctcaacactgccatcgctatccgcacgatggtgatccgcgacggcgttatctacttccaggcggcgggcggcatcgtggccgattcgacgccagaatttgaatacgaagagaccatgaacaagatgagagcaggcctgacggctcttgaaagtattgagacctttgtctga

SEQ ID NO: 76303 - protein, 504 aa, Chlorobium tepidum TLS
MIRSFSDNTADPAKEPSFILTPLVRTFQADTETPVSVYLKLQRPYSCLLESVEGEERMARYSYIAVDPVAVLKGTVGGEILLDVRDERFRQLSAIVEQERDLRAVVDRCMAMFSSEKLPRHKSGSQQMSTSGVFGYFGYDTMHLIEKIPAAEQPDPAGMPDLCLLFCDTLVIFDNVMRKLFLVTNYLDAADRTRADRKIDELAALLQKPLVPALVPFQPEKPEPVISNTTRDEYYAKVLKAKEYILSGDIFQVQISQRLKRKLHTRPFDVYRALRTINPSPYLYFFDFEDFHVVGSSPELLVKVERDHTGRRMVDTRPIAGTRRRGESFEEDERNAKELISDEKERAEHLMLIDLSRNDIGRIAKIGTVETNEMMVIEKYSHVMHIVSNVRGELQDGLTAMDAFWSCFPAGTLTGAPKVRAMEIIYELEKEKRGLYGGAVGYLDFRGQLNTAIAIRTMVIRDGVIYFQAAGGIVADSTPEFEYEETMNKMRAGLTALESIETFV

SEQ ID NO: 76304 - DNA, 1566 bp, Yersinia pestis KIM
  CDS (1)..(1566): transl_table=11
atgatgcaaacatcacgtcctactttacagttactcaccgctagcgcctgttaccgcgatgacccgacagcgctgtttcatcaattatgtggtgcccgccccgcgaccctgttgcttgagtctgcagaagttgacaacaaacagaatctgaaaagcctgttggtcatcgacagtgccttgcgtatcacggcattagggcaaaccgtcactctcgaagcattgacccgtaatggggcttctttattaccactgctggatgccagtctgcccactgaagtcgatattcaggttcgtccgaatggccgagagttaactttcccgttaataaatgaagtccaggatgaggattcacgcttacagtccttatctgtttttgatgctttacgtcaattattaacactggttaataccccacttgccgagcgtgaggccctgtttttgggcggtttgttcgcttacgatttagtcgctggttttgaaaatttgcctccgttgcgtcaggatcaacgctgccctgacttctgtttctatttagccgagacattgctggttttggatcatcagcatcgttcaactcgcttgcaggccagcctgttcacgccagacagttcagagtatcagcgcctggcgacccgtttagagcaactcagccaccagttacaacaagcgccacaccccattcctgccacctccgtgccagagatggcgttacagtgtaaccaatcagatgaagagtattgcaacgttgtcagtgaattgcaggtagcaatccgtgaaggtgagattttccaggtggtcccatcccgccgttttacgctgccctgcccatcaccgctggcggcctatcagacactgaaagaccataatcccagcccctacatgtttttcatgcaagacaatgatttttctctgtttggtgcatcacctgagagcgcactgaaatacgatgccagcaaccgtcaaattgagatttacccgattgcgggtactcgtccacgcggtcgtcgtcctaatggagaactcgatcgtgatttagacagccgtatcgagttggaaatgcgtactgaccataaagagatggcagaacatttaatgttggtggatctggctcgtaacgatctagcgcgtatttgcgaacccggtagccgctatgttgcagatttaaccaaagttgaccgttactcctttgtcatgcatctggtgtcccgcgtgattggcactctgcgtcaagatttagatgtgctgcatgcttatcaagcgtgtatgaacatgggtacgctaagcggtgcgcccaaagtacgggccatgcaattgattgccagtaatgaaggctcacgccgtggcagctacggcggtgcagtgggctacttcactgctcacggtgatttggatacctgcattgtgattcgttctgcctacgtagaggacggcatcgccaccgtacaagcgggtgcaggggtggttttggactcagttccacaagcagaagctgatgaaactcggaataaagccagagccgtactgcgcgccattgccactgcccatcatgccaaggagattttctaa

SEQ ID NO: 76305 - protein, 521 aa, Yersinia pestis KIM
MMQTSRPTLQLLTASACYRDDPTALFHQLCGARPATLLLESAEVDNKQNLKSLLVIDSALRITALGQTVTLEALTRNGASLLPLLDASLPTEVDIQVRPNGRELTFPLINEVQDEDSRLQSLSVFDALRQLLTLVNTPLAEREALFLGGLFAYDLVAGFENLPPLRQDQRCPDFCFYLAETLLVLDHQHRSTRLQASLFTPDSSEYQRLATRLEQLSHQLQQAPHPIPATSVPEMALQCNQSDEEYCNVVSELQVAIREGEIFQVVPSRRFTLPCPSPLAAYQTLKDHNPSPYMFFMQDNDFSLFGASPESALKYDASNRQIEIYPIAGTRPRGRRPNGELDRDLDSRIELEMRTDHKEMAEHLMLVDLARNDLARICEPGSRYVADLTKVDRYSFVMHLVSRVIGTLRQDLDVLHAYQACMNMGTLSGAPKVRAMQLIASNEGSRRGSYGGAVGYFTAHGDLDTCIVIRSAYVEDGIATVQAGAGVVLDSVPQAEADETRNKARAVLRAIATAHHAKEIF

SEQ ID NO: 76306 - DNA, 1377 bp, Yersinia pestis KIM
  CDS (1)..(1377): transl_table=11
atgtgtgagaaatttttaaccgtcaaagagttaccttatcaccctgatgccctgcttcaacaattcaccccacttgccaaccaagcttgggcgatgttgttgcactcaggatttgctcaacacccccatagtcgctttgatatcttggtcgctgatccaaaaataacgctgacaactcatggggataaaacggttattgtcagtgatcaggggcaggaaacctccctcgcggatcccttctctttgctgcagcagcaactggataaattcgccccagcgatgcctgctcaccctgatctgccgtttcagggcggagcgttagggctatttggttacgacttaggccgccgagttgaaaaattgcctgaactggcggcgcacgatatcgccttgccggatatggccattggcctgtatgactgggcgctcattgctgaccactctcggcagaagctcacgctggtatcccttggcgatgccgaacagcgcttgcattggctgcatcagcaaacaaccgatgagaacctcgtccccttcaaactcacggttccatggcaggcagatatgtcacgggagcagtacggcgaaaaattccgccaaattcaagcgtatctgcgtagcggtgactgttaccaaatcaatctggcacaaagattcagcgcagagtatcagggggatgaatggcaagcatttctgtcactgagtcgtagcaatcaagcccccttttcagcttttattcgcttacccgacaacgccatattgagtgtttcaccagaacgtttcttgtggttggagaatcatcaggttcaaacccggccgattaaaggtacgctaccccgtttggccgatcctgagcaggatcgccagcaagctgagcgattggcgaattcagccaaagatcaggctgaaaatctcatgattgtggacttactgcgtaacgatattggccgtgtcgcacgtccgggtagcgtccgcgtaccagagctgtttgtggtggagccttttcctgcggtgcaccacttagtcagtacaattaccgcaatacttcccccagaatgttcgccgaccgaattactgcgcgcctgtttccccggcgggtcaattactggtgcccccaaggtccgagcaatggaaattattgaacaactcgaaccctatcgacgcaatgcttattgcggtaacattggctacataagttgctgcggcaccatggataccaatattactatccgtaccctgatgacagagaacggtaagatatattgttctgccggaggggggattgtcgccgacagccaagagcaagctgaatatcaagaaacgttcgataaggtcgcccgtattttaccgcaactgggggagtgtgttatttcgtga

SEQ ID NO: 76307 - protein, 458 aa, Yersinia pestis KIM
MCEKFLTVKELPYHPDALLQQFTPLANQAWAMLLHSGFAQHPHSRFDILVADPKITLTTHGDKTVIVSDQGQETSLADPFSLLQQQLDKFAPAMPAHPDLPFQGGALGLFGYDLGRRVEKLPELAAHDIALPDMAIGLYDWALIADHSRQKLTLVSLGDAEQRLHWLHQQTTDENLVPFKLTVPWQADMSREQYGEKFRQIQAYLRSGDCYQINLAQRFSAEYQGDEWQAFLSLSRSNQAPFSAFIRLPDNAILSVSPERFLWLENHQVQTRPIKGTLPRLADPEQDRQQAERLANSAKDQAENLMIVDLLRNDIGRVARPGSVRVPELFVVEPFPAVHHLVSTITAILPPECSPTELLRACFPGGSITGAPKVRAMEIIEQLEPYRRNAYCGNIGYISCCGTMDTNITIRTLMTENGKIYCSAGGGIVADSQEQAEYQETFDKVARILPQLGECVIS

SEQ ID NO: 76308 - DNA, 1521 bp, Thermosynechococcus elongatus BP-1
  CDS (1)..(1521): transl_table=11
atgtaccccgattttcagactttttgtcagcttgccgagcagggtaactttatccccctctatgaggagtgggtggcggatatggatacacctgtgtcggcttggtatcgggtctgtcgcgatcgcccctacaactttttgctcgagtccgtcgagggaggcgaacaactggcccgctacagtctcctcagttgtgatcccctgtgggtactggaaacccgcggcaaccaaaccacccaaacccatcgcgatgggtcagttaccaggtttaccggcaatcccttcaccattttggccaactgccttgcaccctatcagccggtgaagctagcgcaactgccggggggcattggtggtctttttggtttttggggctatgaactgattcagtggattgagccacgggttcccattcatcctgccacggcaagggatttgcctgacggggtgtggatgcaggtggatcaaatcctgatttttgatcaggtgaagcgaaaaatctgggcggtggtctatgccgatacccgtgagacggacttgaaaacagcctatacccacgcgagcgatcgcctagagcggcttttgcgtaaactgcaaacccgtattccccctgaggccactcagctccattggcaacccagtcgtcagatccccagttacactagcaacattacctccgaagccttccgtaccaatgtggcgcgcgctaaggactatattcgtgcgggggatattttccaagtcgttctctcccaacgcctcagtgccacctaccgcggcgatccctttgccctctatcgctccttgcgcctgattaacccttccccctacatggcctactttcaatttggcacgtggcagatcattggctctagtccagaggtcatggttaaagccgagcaccatcctgaaaacgctggctctctccttgcgactgtgcgtcctattgccggtactcgccagcgggggcacacctacaccgaagatcagcagcttgccgcagaactccttgccgataccaaagaagtggccgaacacgtcatgctggttgatttggggcgcaatgatttggggcgcgtgtgtcgtcaggggagtgtcagcgttgaagcctttatggtgattgagcgctattcccatgtcatgcacattgtcagtaatgtggtgggtgaactattgcctgataaaacggcatgggacttactccaagcctgtttccccgctggtacagtcagtggtgcccccaaaattcgtgccatggaaattatctatgaattggagggttgccgccgtggcccctactccggtgcctatggttactatgactttgaaggtcaactcaatacagcgatcgccattcgcacaatggtggtgcaacccctgacggaccatcaacatctgattcatgtgcaagcgggtgctggtattgttgccgactccgatccgcagcgggaatacgaagaaaccctcaacaaagcacgggggctgttggaagcgatttctgccctgacaacaaaaccttaa

SEQ ID NO: 76309 - protein, 506 aa, Thermosynechococcus elongatus BP-1
MYPDFQTFCQLAEQGNFIPLYEEWVADMDTPVSAWYRVCRDRPYNFLLESVEGGEQLARYSLLSCDPLWVLETRGNQTTQTHRDGSVTRFTGNPFTILANCLAPYQPVKLAQLPGGIGGLFGFWGYELIQWIEPRVPIHPATARDLPDGVWMQVDQILIFDQVKRKIWAVVYADTRETDLKTAYTHASDRLERLLRKLQTRIPPEATQLHWQPSRQIPSYTSNITSEAFRTNVARAKDYIRAGDIFQVVLSQRLSATYRGDPFALYRSLRLINPSPYMAYFQFGTWQIIGSSPEVMVKAEHHPENAGSLLATVRPIAGTRQRGHTYTEDQQLAAELLADTKEVAEHVMLVDLGRNDLGRVCRQGSVSVEAFMVIERYSHVMHIVSNVVGELLPDKTAWDLLQACFPAGTVSGAPKIRAMEIIYELEGCRRGPYSGAYGYYDFEGQLNTAIAIRTMVVQPLTDHQHLIHVQAGAGIVADSDPQREYEETLNKARGLLEAISALTTKP

SEQ ID NO: 76310 - DNA, 1407 bp, Oceanobacillus iheyensis HTE831
  CDS (1)..(1407): transl_table=11
atgagtatccattatgtagttgagaaacaaccaatcgatcgattattacctattcaagtactaacccaactaactagcacaaaaaaatatttattagaaagcagctttccgcatgaagaaaaaggacgcttttcatttctaggaatgaatccataccaagaaattctaggattcgataaccgtaccaagatttgcaactatacgaatgacgaagatgaatgggtagaacaacatgccttacattatataaaacaccatctacctaaagccgaaatcgatatttccattccattctatggtggcgcaatcggatatatcggctacgatacgatacgttcctttgaacacatcggagatcgattacccgatgaacgaaacatgccagacatacatctgatgttatttgaagatacgatcatattcgaccatgaacaagatacctgctacctccttgtgattgatacggattcatccacttctcgagatgatttacaggaacgtctaggccaactcagaaaaataataaagaaagcaagagcagcgacagtccccatcccagcgagatattcatttactccagagatggaccaagacgtattcgaaaaaaatgtagctactgcaaaaaaacatattgaagacggagatatttttcaagttgtattgtctcagcgaatgaaggcaaaggtcgaaaatccagaaaccttttccctctccttttatgaacaactgagacaatcgaatccttccccttacatgttttatatggattttaatgattacctcattcttggggcttcaccagaaagtctcatcgaaacaactggcaagaagatcatcacgaatccaatagcaggtacaagaaaaagaggaagcacgaacgaaattgatctcatgctcacagaggaattgcttgctgatgaaaaagaaagagcggagcatcaaatgcttgtagatctaagtagaaatgaccttggaaaggtatgtgaaatcggaagtattgatattccggtatatatgaaaatagaaaaatatcaacatgtcatgcatatggtctctgaagtcactggcattttaaaatctaactactctagtattgatgctttaatctcttgtttaccagctggaacagtatccggagcacccaaaatacgtgcaatgcaaataatcaacgagttagagcaacaccaaagaggtccttatggaggaggtattggatttattaactttcaacaagatgttcacatggctttagctattcgaacggtgatcgttaaagatgacaaagcatacttacaagcaggagcaggaatcgtttatgattccatacctacaagtgagtatattgaaacgctaaataaagccaaatcatttatggaggtggacgatcatgattttattaatcgataa

SEQ ID NO: 76311 - protein, 468 aa, Oceanobacillus iheyensis HTE831
MSIHYVVEKQPIDRLLPIQVLTQLTSTKKYLLESSFPHEEKGRFSFLGMNPYQEILGFDNRTKICNYTNDEDEWVEQHALHYIKHHLPKAEIDISIPFYGGAIGYIGYDTIRSFEHIGDRLPDERNMPDIHLMLFEDTIIFDHEQDTCYLLVIDTDSSTSRDDLQERLGQLRKIIKKARAATVPIPARYSFTPEMDQDVFEKNVATAKKHIEDGDIFQVVLSQRMKAKVENPETFSLSFYEQLRQSNPSPYMFYMDFNDYLILGASPESLIETTGKKIITNPIAGTRKRGSTNEIDLMLTEELLADEKERAEHQMLVDLSRNDLGKVCEIGSIDIPVYMKIEKYQHVMHMVSEVTGILKSNYSSIDALISCLPAGTVSGAPKIRAMQIINELEQHQRGPYGGGIGFINFQQDVHMALAIRTVIVKDDKAYLQAGAGIVYDSIPTSEYIETLNKAKSFMEVDDHDFINR

SEQ ID NO: 76312 - DNA, 1557 bp, Bifidobacterium longum NCC2705
  CDS (1)..(1557): transl_table=11
atgagcgaatgcagcgtcaaacacctgaagtggggcgccacctggcccagtcgcgaacagttccacgaactggccgacgccggataccgtgtgattccgattgtgcgccgtctgctcgccgactcgctcaccccggtcggcttctacgagcgtctcgccggcggccgatccggcaccttcatcctcgaatcggcggaatacggcggcacgtggagccgttacagttttatcggcgtcaactcgatggcccagctgcgctccaacaacggtcaggccgactggctgggcaaggtcccggtcggcgtgcccgtcaccggtgacgtagtcgaagtcgctcacgccacgttgaagactctgaaggccccgcatgtggaaggcctgccgaacctgaccagcggtctggtcggcacggtcggctgggatgccatccgccactgggaaccgaccctgcgcgccgaagctccggacgagaccggccagcctgagaccgtgcttgccctggccaccgatatcgccgtggtcgaccacgtatccggttcggtatggctcatcgccaatgcggtgaatgtggatgataaatccactcgcgccgacgctgcctacaacgaggccgtcgctcgactcgaccagatgcagcgcgatgccgccaccccggctccggacgagtctcgcgtcaacatcctggacgaaacggtcgcccaacccgagctgcgcttccgcaccgagaagagccactacgagcaggccgtcgaacgagccaagcagtacatcgtcgacggcgacgtgttccaggtggtcatctcccagcgcctcgacatcgattcgcctgctgacccgttcgacgtgtaccgtgtgttgcgcacgctgaacccgagcccgtacatgtatttcatggcgttgaccgacgctcagggccgcgacttcaacgtgatcggctccagcccggaaaccctcatcaaggtggacaacggccacgcgatgaccttcccgattgctggatcccgccctcgcggcgccacccctgaggaagacgagaaattcgccaaggagctgcttgccgatccgaaggaatgcagcgagcacatcatgctcgtcgacctgtctcgcaacgacctgagtaaggtgtgcgtgccgcagtccgtggaagtcgtgcagctcatggacatcaagcgtttcagccacatcatgcacatctgctcgacggtcaccggcaaggtcgacccctcgctgaccgcattcgatgtgttcaagtccgcgttcccggccggcacgctgtctggcgcgcctaagccgcgcgcagtcgaaatcatcgacgagttggaaccggccgaccgcggcatctacggcggcaccgtcggctacttcgatttctccggcaacatggacatggccatcgccatccgcaccgcgttcctgcgcgaccatgaggcgagcgtgcaggccggtgccggcattgtgctcgactccgtgcccgccaccgaatggcaggagacgcgcaacaaggccgaggccagcgtcgaatccatccagatcgccgcccagttgcgcgaactgtaa

SEQ ID NO: 76313 - protein, 518 aa, Bifidobacterium longum NCC2705
MSECSVKHLKWGATWPSREQFHELADAGYRVIPIVRRLLADSLTPVGFYERLAGGRSGTFILESAEYGGTWSRYSFIGVNSMAQLRSNNGQADWLGKVPVGVPVTGDVVEVAHATLKTLKAPHVEGLPNLTSGLVGTVGWDAIRHWEPTLRAEAPDETGQPETVLALATDIAVVDHVSGSVWLIANAVNVDDKSTRADAAYNEAVARLDQMQRDAATPAPDESRVNILDETVAQPELRFRTEKSHYEQAVERAKQYIVDGDVFQVVISQRLDIDSPADPFDVYRVLRTLNPSPYMYFMALTDAQGRDFNVIGSSPETLIKVDNGHAMTFPIAGSRPRGATPEEDEKFAKELLADPKECSEHIMLVDLSRNDLSKVCVPQSVEVVQLMDIKRFSHIMHICSTVTGKVDPSLTAFDVFKSAFPAGTLSGAPKPRAVEIIDELEPADRGIYGGTVGYFDFSGNMDMAIAIRTAFLRDHEASVQAGAGIVLDSVPATEWQETRNKAEASVESIQIAAQLREL

SEQ ID NO: 76314 - DNA, 2196 bp, Brucella suis 1330
  CDS (1)..(2196): transl_table=11
atgaatgcgaagactgcggatagcgagatattccagcacgaaacggcaggcggtatcatcgtcgagcgggtgcgccacctcacggcctataagggcgccattgaaagctatatcgatgtgctgaacgaacggcgcggtgcggtgttctcgtccaattacgaatatccgggccgctatacgcgatgggataccgcaattgtcgatccgccggtcgtcatcacgtcgcgtgcccgcacgatgcgcatcgaggcgctgaacgcgcgcggcgtcatcctgcttcggcccattctggataccgtcaaggcgctttcggaagtaaagatcgaccagtccggcgaaaaccgtatcgatctgacgattgtggaaccggtcggcaccttcacggaagaagaacgctcgcgcatgccctcggtctttacggtgctgcgcgccatagtcgggcttttcttctcggaggaggatgccaatctcggcctttatggcgcctttggctatgatctggcgttccagttcgatcccatccagtacaagctgaagcgcccggacgaccagcgtgacctcgtgctgttcattcccgacgaaatcttcgtcgccgaccattatgcggcgcgcgcctgggtggaccgttatgaatttcgctgcggcggttcgtccacgcacggtcttgatcgcgcgacgccggtggtgcctttcaagccatcggagcgcaagcttgcgcgcggcgatcataatccgggtgaatatgccaggcttgtcgagcgcgccaaggaaagcttcaagcgcggcgacctgttcgaggttgtgccgggccagaccttctatgagcgctgccacacggcgccgtcggagattttccgccggctgaagtcgatcaatccttcgccctattcctttttcatcaatctgggcgagagcgaatatctggtcggcgcatcgccggaaatgtttgtgcgcgtcaatgggcggcgcatcgagacctgcccgatttccggcaccatcaagcgcggtgaagatgcaatttcggattctgagcagatattgaaactgcttaattccaagaaggacgaatccgagctgaccatgtgttcggatgtggaccgcaacgacaagagccgcgtttgcgagccgggttcggtgcgtgttatcggtcgccgccagatcgagatgtattcccgcctgatccatacggtcgatcatatcgaaggccgcctgcgtgacggcatggatgcgtttgacggcttcctcagccatgcatgggctgtgacggtgacaggcgcgccgaagctgtgggcaatgcgctttcttgaggaaaacgaacgcagcccgcgcgcatggtatggcggcgcgatcggcatgatgcatttcaatggcgatatgaatacagggctgacgctgcgcaccatccgcatcaaggatggtgtggcggaaatccgtgcaggggcgacgcttctgttcgattccaaccctgacgaggaagaagccgagaccgaattgaaggcatcggccatgattgcggctgtgcgggacgcacagaagagcaatcagatcgcggaagaaagtgtggcggcaaaggtgggtgagggggtttcgatcctgctggtcgatcacgaggattccttcgtccatacgcttgccaattatttccgccagacgggcgccaaggtttccaccgtgcgttcaccggtggcagaggagatattcgaccgcgtcaatcccgatctggtggtgttatcgccgggaccgggctcgccgcaggatttcgattgcaaggcgaccatcgataaggcgcgcaagcgccagcttccgatttttggcgtctgcctcggccttcaggcactggcggaagcctatggcggggcgttgcgccagcttcgcgttccggtgcatggcaagccttcacgcatccgcgtatcaaagccggagcgcattttctccggcttgccggaggaagtgacggtggggcgttatcattcgatcttcgccgatcctgaacgcctgccggatgattttctcgtcacagccgaaacggaagacgggatcatcatggcttttgaacataaacatgaaccggtggcagccgttcaattccatcccgaatccatcatgatgcttggccataatgccggtatgcgcatgatcgagaatgtcgtgacgcatcttgcaggcaagcacaaggcgcgccgcaccaactattga

SEQ ID NO: 76315 - protein, 731 aa, Brucella suis 1330
MNAKTADSEIFQHETAGGIIVERVRHLTAYKGAIESYIDVLNERRGAVFSSNYEYPGRYTRWDTAIVDPPVVITSRARTMRIEALNARGVILLRPILDTVKALSEVKIDQSGENRIDLTIVEPVGTFTEEERSRMPSVFTVLRAIVGLFFSEEDANLGLYGAFGYDLAFQFDPIQYKLKRPDDQRDLVLFIPDEIFVADHYAARAWVDRYEFRCGGSSTHGLDRATPVVPFKPSERKLARGDHNPGEYARLVERAKESFKRGDLFEVVPGQTFYERCHTAPSEIFRRLKSINPSPYSFFINLGESEYLVGASPEMFVRVNGRRIETCPISGTIKRGEDAISDSEQILKLLNSKKDESELTMCSDVDRNDKSRVCEPGSVRVIGRRQIEMYSRLIHTVDHIEGRLRDGMDAFDGFLSHAWAVTVTGAPKLWAMRFLEENERSPRAWYGGAIGMMHFNGDMNTGLTLRTIRIKDGVAEIRAGATLLFDSNPDEEEAETELKASAMIAAVRDAQKSNQIAEESVAAKVGEGVSILLVDHEDSFVHTLANYFRQTGAKVSTVRSPVAEEIFDRVNPDLVVLSPGPGSPQDFDCKATIDKARKRQLPIFGVCLGLQALAEAYGGALRQLRVPVHGKPSRIRVSKPERIFSGLPEEVTVGRYHSIFADPERLPDDFLVTAETEDGIIMAFEHKHEPVAAVQFHPESIMMLGHNAGMRMIENVVTHLAGKHKARRTNY

SEQ ID NO: 76316 - DNA, 1563 bp, Shigella flexneri 2a str. 301
  CDS (1)..(1563): transl_table=11
atgcaaacacaaaaaccgactctcgaactgctaacctgcgaaggcgcttatcgcgacaacccgactgcgctttttcaccagttgtgtgggaatcgtccggcaacgctgctgctggaatccgcagatatcgacagcaaagatgatttaaaaagcctgctgctgatagacagtgcgctgcgcattacagcattaggtgacaccgtcacaattcaggcactttccggcaatggcgaagccctgctggcactactggataacgccctgcctgcgggtgtggaaagtgaacaatcaccaaactgccgtgtgctgcgcttcccccctgtcagtccactgctggatgaagacgcccgcttatgctccctttcggtttttgacgctttccgtttattgcagaatctgttgaatgtaccgaaggaagaacgagaagcaatgttcttcggcggcctgttctcttatgaccttgtggcgggatttgaagatttaccgcaactgtcagcggaaaataactgccctgatttctgtttttatctcgctgaaacgctgatggtgattgaccatcagaaaaaaagcacccgtattcaggccagcctgtttgctccgaatgaagaagaaaaacaacgtctcactgctcgcctgaacgaactacgtcagcaactgaccgaagccgcgccgccgctgccagtggtttccgtgccgcatatgcgttgtgaatgtaatcagagcgatgaagagttcggtggcgtagtgcgtttgttgcaaaaagcgattcgcgctggagaaattttccaggtggtgccatctcgccgtttctctctgccctgcccgtcaccgctggcggcctattacgtgctgaaaaagagtaatcccagcccgtacatgttttttatgcaggataatgatttcaccctatttggcgcgtcgccggaaagctcgctcaagtatgatgccaccagccgccagattgagatctacccgattgccggaacacgcccacgcggtcgtcgcgccgatggttcactggacagagatctcgacagccgtattgaactggaaatgcgtactgaccataaagagctgtctgaacatctgatgctggttgatctcgcccgtaatgatctggcacgcatttgcacccctggcagccgctacatcgccgatctcaccaaagttgaccgttattcctatgtgatgcacctcgtctctcgcgtagtcggcgaactgcgtcacgatcttgacgccctgcacgcttatcgcgcctgtatgaatatggggacgttaagcggtgcgccgaaagtacgcgctatgcagttaattgccgaggcggaaggtcgtcgccgcggcagctacggcggcgcggtaggttatttcaccgcgcatggcgatctcgacacctgcattgtgatccgctcggcgctggtggaaaacggtatcgccaccgtgcaagcgggtgctggtgtagtccttgattctgttccgcagtcggaagccgacgaaacccgtaacaaagcccgcgctgtactgcgcgctattgccaccgcgcatcatgcacaggagactttctga

SEQ ID NO: 76317 - protein, 520 aa, Shigella flexneri 2a str. 301
MQTQKPTLELLTCEGAYRDNPTALFHQLCGNRPATLLLESADIDSKDDLKSLLLIDSALRITALGDTVTIQALSGNGEALLALLDNALPAGVESEQSPNCRVLRFPPVSPLLDEDARLCSLSVFDAFRLLQNLLNVPKEEREAMFFGGLFSYDLVAGFEDLPQLSAENNCPDFCFYLAETLMVIDHQKKSTRIQASLFAPNEEEKQRLTARLNELRQQLTEAAPPLPVVSVPHMRCECNQSDEEFGGVVRLLQKAIRAGEIFQVVPSRRFSLPCPSPLAAYYVLKKSNPSPYMFFMQDNDFTLFGASPESSLKYDATSRQIEIYPIAGTRPRGRRADGSLDRDLDSRIELEMRTDHKELSEHLMLVDLARNDLARICTPGSRYIADLTKVDRYSYVMHLVSRVVGELRHDLDALHAYRACMNMGTLSGAPKVRAMQLIAEAEGRRRGSYGGAVGYFTAHGDLDTCIVIRSALVENGIATVQAGAGVVLDSVPQSEADETRNKARAVLRAIATAHHAQETF

SEQ ID NO: 76318 - DNA, 1422 bp, Leptospira interrogans serovar Lai str. 56601
  CDS (1)..(1422): transl_table=11
atggaaactccagtttctctgtttgcaaaatggggatgtgagtcttctcaaaattccttcctactcgaatctgtagaaggcggagaaaaactgggaagaaattcttttttaggtaaaactccttctcgtctccttcaaggtaaggacggtcttttttatatcacagttgcaaatgaacctcctacagaagtaatcacttatgatcctttggttcttttagaaaatcttttgggagatgacgtatatgttcaagattatcgtcttcctccttttgcaggtggagcggtcggctttttatcctttgccgcggttcgttattacgaaaatattccagatacaaaaccagaagatgaaaatgctcccgactgctattttggaatttatgatgaacttctaatagtcgatcatattgatcatgtgttaagaattgttgtcaatgcaagagtcggagaacactcctccctgagagaatgttatgattttgtaattgataaaatcaactctatcgaaaacgaaattcgaaacggaagtatcccggaagagatcaaaaatcctaaaatagcaaccggaagcctagaattaaatccgaatattccagatgaagaatataagaaaaatgtagaaaaagccaaagaatatattcaagcaggagatatttttcaggtagttccttcccgtaagttgaaatttaagccggatgttcctccgtttcaagtctatcgtggcttaagaaccgtaaatcccagtccctacatgtattatcttaagttaggcgaaattactatcgtcggaagttctcccgaaattatggtaaaatacgctggaaatcagacctatcttcgtccgatcgccggaacccgtccacgaggcaaaaatccaaatgaagataagtttctagaagagaatcttctttctgatcctaaagaaatttccgaacatattatgttagtcgacttaggacgtaacgatctaggaagagtttgtaaacctggaagcgttcacgtgaatgatttcaaagttattgaaaaatattcccacattatgcacattgtaagtcagtgttccggcgaactggacgatgaaaaaactgtttacgatttgattcgcgccgctcttcccgcagggaccgtgtcgggtgcgcctaaaatccgcgcgatggagattatagacgaattagaaacaactcgaagagcgatttattctggcgctttgggctatatttctttttcgggagaaactgatcttgcaatcatcattcgtacaatcgtgttttacaaagacacggcgttcttacaggcaggcggaggagttgtatacgattcggttccagagttggaattagaagaaacgaaaaataaaatggcagcgcttttaaaagcggtagagttcgcaagaaatggactcaaaggagaatggaaataa

SEQ ID NO: 76319 - protein, 473 aa, Leptospira interrogans serovar Lai str. 56601
METPVSLFAKWGCESSQNSFLLESVEGGEKLGRNSFLGKTPSRLLQGKDGLFYITVANEPPTEVITYDPLVLLENLLGDDVYVQDYRLPPFAGGAVGFLSFAAVRYYENIPDTKPEDENAPDCYFGIYDELLIVDHIDHVLRIVVNARVGEHSSLRECYDFVIDKINSIENEIRNGSIPEEIKNPKIATGSLELNPNIPDEEYKKNVEKAKEYIQAGDIFQVVPSRKLKFKPDVPPFQVYRGLRTVNPSPYMYYLKLGEITIVGSSPEIMVKYAGNQTYLRPIAGTRPRGKNPNEDKFLEENLLSDPKEISEHIMLVDLGRNDLGRVCKPGSVHVNDFKVIEKYSHIMHIVSQCSGELDDEKTVYDLIRAALPAGTVSGAPKIRAMEIIDELETTRRAIYSGALGYISFSGETDLAIIIRTIVFYKDTAFLQAGGGVVYDSVPELELEETKNKMAALLKAVEFARNGLKGEWK

SEQ ID NO: 76320 - DNA, 1725 bp, Shewanella oneidensis MR-1
  CDS (1)..(1725): transl_table=11
atgaccctaaagacatttaatcaggttacccaagccgatagagcgaatttagcctcgtctcaacagacattcgcacgttcacatacgctcaaagccaccctggtataccatagcgatccactgcgtctgtaccagcacatcactgaagatgcgccccataccatgttgttagaatcagcggaaatcaacagtaaggaaaatcttaaaagcatggtgatgacccatgcggcactgatgatccgctgcgacggttatcgtttacgctttagcgcactgaccgacaatggtgccagtttgctcacgcccattgagcaattttttatggcgcgttcatgccatacacaatgccaacgcaatggccaacacttagtggtgacgctgcaaaaagacactgagcttaaggatgaagatgcgcgcttaaaatccacctcgcccctcgatggtttgcgcttgtttgttaaacatatcgactgcggcgctcatactgacagccaatccaagccagcgttcgaagacttatttttaggtggcgtgctttcctacgatttgattgataccgtcgagccgctgccagaagccccgaatggtgcaaatgattgtcctgattatttattttatctcgccgaaaccttaattcttatcgatcacaaacaaaaacaagccgagattatcacccacaacttcagtgaaagcgcagaacaacattcagaggtgacccaagccttagccgagcgagttgaaaacatccgcgcccaatgtgaagccttagccaagagtgcaacgcctgcgcctgccctcgttggcataacagccacagagcaagtgaatgtcagtgatgaggcctttaaacaaactgttatcgatttaaaagaacacattattgcgggcgatatcttccaagtggtgccttctcgcagttttagcctgccctgcccgaataccttaggtgcttaccgcgcgctgcgtctaaccaatcctagcccctatatgttttatttcaggggaaatgatttcaccctgtttggcgcctcgccagaaagcgcgctgaaatttgattccagcaacaatcaggtcgaagtctatccaatcgcaggtacccgtaaacgcggcaaaaccgccagtggcgagattgatttcgacctcgatagccgcatcgaactcgaactgcgtttagataaaaaagagttatctgaacatttaatgctggtcgatttggctcgcaacgatatcgcccgaatcagccaaagcggcagtcgtaaagtggctgagttacttaaagtcgaccgctactcccacgtcatgcaccttgtgagccgcgtcaccggccaattacgccaagacttagatgcgctccacgcctaccaagcctgtatgaacatgggcactttagttggcgcgcccaaagttcgtgcttcgcaattagtgcgtcaggcagaaaagacccgccgaggcagctatggcggcgccgtgggctacctcaatgcccttggcgatatggatacctgcattgtgatccgctccgcttttgttaaagacggtgtagcccatatccaagccggtgcaggagtggtgtttgactccgatccacaaagtgaagccgatgaaacccgccaaaaggcgcaagcggtgatttcggccatcaaaatgggcgcaggtttagcaggcataaataactgcaacgagcacacttccacaaaagtctcaacagcagcgcagcaaggataa

SEQ ID NO: 76321 - protein, 574 aa, Shewanella oneidensis MR-1
MTLKTFNQVTQADRANLASSQQTFARSHTLKATLVYHSDPLRLYQHITEDAPHTMLLESAEINSKENLKSMVMTHAALMIRCDGYRLRFSALTDNGASLLTPIEQFFMARSCHTQCQRNGQHLVVTLQKDTELKDEDARLKSTSPLDGLRLFVKHIDCGAHTDSQSKPAFEDLFLGGVLSYDLIDTVEPLPEAPNGANDCPDYLFYLAETLILIDHKQKQAEIITHNFSESAEQHSEVTQALAERVENIRAQCEALAKSATPAPALVGITATEQVNVSDEAFKQTVIDLKEHIIAGDIFQVVPSRSFSLPCPNTLGAYRALRLTNPSPYMFYFRGNDFTLFGASPESALKFDSSNNQVEVYPIAGTRKRGKTASGEIDFDLDSRIELELRLDKKELSEHLMLVDLARNDIARISQSGSRKVAELLKVDRYSHVMHLVSRVTGQLRQDLDALHAYQACMNMGTLVGAPKVRASQLVRQAEKTRRGSYGGAVGYLNALGDMDTCIVIRSAFVKDGVAHIQAGAGVVFDSDPQSEADETRQKAQAVISAIKMGAGLAGINNCNEHTSTKVSTAAQQG

SEQ ID NO: 76322 - DNA, 1362 bp, Streptococcus mutans UA159
  CDS (1)..(1362): transl_table=11
atgaaaaagaagatattgagtgctgatattttgaccccaatccttgcttacatgcgtgtacagggcgaccataaggtgattttggagtctatccctcgtgaaaaggaaaatgcgcgtttttcaattgttgcttacaatcctgtttttgaaatcaaatttgaaaatgggcaattgacagagaatgacaaagttattgaaagtgatcccttagattatctcagtcaaatcactgtcaaatcacaactgtctcaagatttaccttttaatggtggcgctattggttttgtgggctatgacatggttggtctttatgaaaatattggcaagattcctcaagatacgattggaacaccggatatgcacttttttgtttatgaatcttatcttatttttgatcataagaaagaaaaaattgtcattgttgaagataatatttacagcggcagagaagaagaggaacaaaaggctgccttgcaggaagtcttagcagatcttaaaaaacaggcggttgatgaattttcggaacgcgatttacacactttgacttttaggaaccatttggaagaagctacttttaaagacatggttaccaaagcaaaaaaatttattcgtcagggagatatgtttcaatgcgtgctcagccagcgtttctcagcggatattagtggcaagccgctagatttttatcgtaatttacgtattaccaacccttccaattatctttacttttatgattttggtgattatcagattattggagccagtccagaaagtctcgtttctcttaaaaatggtgtggttactacaaatcctattgcaggaacacgtcctcgtggtgccaacgatcagaaagacaaagacttatctgaagagctcttatcagatgtcaaggaagtagcagagcaccgtatgttggtagatttgggccgcaacgatattgggaaaattgctgaggtaggaagtgttcaagttaccaagtatatggaagtcgaattttttcgctatgttatgcatttaactagtgttgtcaagggtaaacttctgtcaggtttgactggtatggatgctcttaagtcaacattgccagcgggtacggtatcaggagcaccgaaaattcgtgctatgaagcgcatttatgagttggaaaaagaaaagcgcggtatctatgcaggagcaattggttatctgtcagcaagcggagatatggactttgccattgccattcgtaccatgattatcaaaaatcaaaaggcttatgttcaagcaggtgcggggattgtctatgatagcgttcctgaaaatgaatactacgaaaccattaataaggccaaagcaatgactagaataggagagatacagtga

SEQ ID NO: 76323 - protein, 453 aa, Streptococcus mutans UA159
MKKKILSADILTPILAYMRVQGDHKVILESIPREKENARFSIVAYNPVFEIKFENGQLTENDKVIESDPLDYLSQITVKSQLSQDLPFNGGAIGFVGYDMVGLYENIGKIPQDTIGTPDMHFFVYESYLIFDHKKEKIVIVEDNIYSGREEEEQKAALQEVLADLKKQAVDEFSERDLHTLTFRNHLEEATFKDMVTKAKKFIRQGDMFQCVLSQRFSADISGKPLDFYRNLRITNPSNYLYFYDFGDYQIIGASPESLVSLKNGVVTTNPIAGTRPRGANDQKDKDLSEELLSDVKEVAEHRMLVDLGRNDIGKIAEVGSVQVTKYMEVEFFRYVMHLTSVVKGKLLSGLTGMDALKSTLPAGTVSGAPKIRAMKRIYELEKEKRGIYAGAIGYLSASGDMDFAIAIRTMIIKNQKAYVQAGAGIVYDSVPENEYYETINKAKAMTRIGEIQ

SEQ ID NO: 76324 - DNA, 1668 bp, Corynebacterium efficiens YS-314
  CDS (1)..(1668): transl_table=11
ttgttcttaaacgttcgtcccagtgaaaggcccggttcccatgtcagttgtgacacccgtcctgagtctcaggcaggtgagtgccccatgagcaccgccccccatgttctatcccgcacggtgcggtaccacgaggatgcctccagtctgttcgcccacctcggtgggactgtagccgatgatgcggcgctgttggagagcgcggacatcaccaccaagaacggcatctcctccctggctgtgctcaagggttcggtccgggtcacctgcgagggccagcgggtcacggcgcagcctctgaccgagtcggggcgcatcgtagcctcccgcctggcggaggagctgggtgagtaccggatctccgcactgtcgccggagcatggcaacccggtcaccttcgagttcccggtctcggatgcggtggatgagcgcgagcgcctcacctccatcagcacgatcgaggtgctgcggaagctgcagttcgattccggttatgatcacccggcgctgccgttgctgatgggcggtttcgccttcgactacctggagaccttcgagactctgccggcggtgggagaggggatcaacacctaccccgattatcagttcctggtcgcggagatcatcctggacatcaaccaccaggagcagaccgcccagctggtcggtgtgtccagcgacccggacgcgctgggggaggagctcgcgcagctcgccgggcttatcgacgccgcactgcccggctccgatcacgcctacaaggtcaccccacacgccggcgacaccctgcgcgtggtcgccgacatcccggatgcggagttccgccagcaggtcgccgatctcaaggacaatatccacaacggtgacatctatcaggtggtgccggcgcggtccttctccgcaccgtgcccggatgccttcgcagcctatctccagctgcgggccaccaacccgagcccgtacatgttctatgtgcgcggtctggacaacaaccgtccctatgaactcttcggcgcctccccggagtccaacctgaagttcaccgccgccaccggcgagctgcagctgtatccgatcgccggcacccgcccgcgtgggttgaatgcggatggcaccattaatgatgagttggatatccgtaatgaactggatatgcgcaccaacgccaaggaggttgcggagcacaccatgctggtggatctcgcccgcaatgacctggcgcgggtgtcggtaccggcgacccgtcgcgtggcggatctgctccaggtcgaccgctactcccgggtgatgcacctggtgtcccgggtcaccgccaccctggatccggagctggatgccctggatgcctaccgtgcgtgcatgaacatggggacgttgacgggtgccccgaagttgcgcgccatggagttgctgcggggcgtcgagaagcgtcgccgtgggtcctacggcggtgccgtggggtacctgcgcggcaatggcgacatggataactgcattgtcatccgctccgcgttcgtgcaggacggggtggcggccgtgcaggccggcgccggtgttgtgcgcgattccaatccccagtccgaagccgatgagacactgcacaaggcctatgccgtgctcaatgccatcgcactcgccgccggttccaccctggaggtcgtccgatga

SEQ ID NO: 76325 - protein, 555 aa, Corynebacterium efficiens YS-314
MFLNVRPSERPGSHVSCDTRPESQAGECPMSTAPHVLSRTVRYHEDASSLFAHLGGTVADDAALLESADITTKNGISSLAVLKGSVRVTCEGQRVTAQPLTESGRIVASRLAEELGEYRISALSPEHGNPVTFEFPVSDAVDERERLTSISTIEVLRKLQFDSGYDHPALPLLMGGFAFDYLETFETLPAVGEGINTYPDYQFLVAEIILDINHQEQTAQLVGVSSDPDALGEELAQLAGLIDAALPGSDHAYKVTPHAGDTLRVVADIPDAEFRQQVADLKDNIHNGDIYQVVPARSFSAPCPDAFAAYLQLRATNPSPYMFYVRGLDNNRPYELFGASPESNLKFTAATGELQLYPIAGTRPRGLNADGTINDELDIRNELDMRTNAKEVAEHTMLVDLARNDLARVSVPATRRVADLLQVDRYSRVMHLVSRVTATLDPELDALDAYRACMNMGTLTGAPKLRAMELLRGVEKRRRGSYGGAVGYLRGNGDMDNCIVIRSAFVQDGVAAVQAGAGVVRDSNPQSEADETLHKAYAVLNAIALAAGSTLEVVR

SEQ ID NO: 76326 - DNA, 1482 bp, Pseudomonas putida KT2440
  CDS (1)..(1482): transl_table=11
atgaaccgcgaagaattcctgcgcctggccgctgccggctacaaccgtattcccttggcctgtgaaaccttggccgacttcgacacgccgctgtcgatctacctgaaactggctgaccagcccaactcgtacctgctcgaatcggtgcagggcggggagaagtggggccgttactcgatgatcggcttgccatcgcgcaccgtgatgcgtgtgcatggctaccgtgtcagcatcctgcacgatggcgtcgaggtggaaagctgtgaggtcgaagacccgctggcattcgttgaaaccttcaaggaccgctacaaagttgccgatatcccaggcctgccgcgtttcaatggcggcctggtcggctactttggctacgactgcgtgcgctatgtagaaaagcgcctgggggccagccccaacccagacccgctgggcgtaccggatatcctgctgatggtgtccgacgcggtggtggtgttcgacaacctggcgggcaagatgcacgccatcgtgttggtcgacccagctgaagatcaggccttcgaacagggccaggcacgtctgcaaggcttgctggaaaccttgcgccagccaatcaccccgcgccgcggcctggacctgagcggcccgcaggcggccgagccggcgttccgctccagctacacccgcgaggattacgaaaacgccgtcggtcgtatcaaggaatacatcctggccggggactgtatgcaggtggtgccgtcgcagcgcatgtcgatcgatttcaaggctgcgcctatcgacctgtaccgcgcgctacgctgcttcaacccgacgccatatatgtacttcttcaacttcggtgacttccatgtggtcggcagctcgcccgaagtgttggtacgtgtcgaggacaacctggtcaccgtacgcccgattgccggtacccgcccgcgtggtgcgaccgaagaggccgatcgtgcgctggaagatgacctgctgtcggacgacaaggaaattgccgagcacctgatgctgatcgatctgggccgcaacgatgtcggccgtgtgtcttcgaccggcagtgtgcgcctgaccgagaagatggtgatcgagcgttactccaacgtgatgcacattgtttccaacgttaccggccagctgcgtgaaggcctgacggcgatggatgcactgcgggcgattctgccggctggcaccttgtcgggtgcgcccaagatccgtgcgatggagatcatcgacgagctggaaccggtcaagcgtggggtttacggcggtgccgtcggctattttgcctggaacggcaacatggataccgcaattgccattcgtaccgcagtgatcaaggacggcgagctgcatgtgcaggccggtggcggcatcgttgccgactcggtgccggcgctggaatgggaagaaaccatcaacaagcgccgggcgatgttccgtgcggtggcgttggccgagcagacttccgccagataa

SEQ ID NO: 76327 - protein, 493 aa, Pseudomonas putida KT2440
MNREEFLRLAAAGYNRIPLACETLADFDTPLSIYLKLADQPNSYLLESVQGGEKWGRYSMIGLPSRTVMRVHGYRVSILHDGVEVESCEVEDPLAFVETFKDRYKVADIPGLPRFNGGLVGYFGYDCVRYVEKRLGASPNPDPLGVPDILLMVSDAVVVFDNLAGKMHAIVLVDPAEDQAFEQGQARLQGLLETLRQPITPRRGLDLSGPQAAEPAFRSSYTREDYENAVGRIKEYILAGDCMQVVPSQRMSIDFKAAPIDLYRALRCFNPTPYMYFFNFGDFHVVGSSPEVLVRVEDNLVTVRPIAGTRPRGATEEADRALEDDLLSDDKEIAEHLMLIDLGRNDVGRVSSTGSVRLTEKMVIERYSNVMHIVSNVTGQLREGLTAMDALRAILPAGTLSGAPKIRAMEIIDELEPVKRGVYGGAVGYFAWNGNMDTAIAIRTAVIKDGELHVQAGGGIVADSVPALEWEETINKRRAMFRAVALAEQTSAR

SEQ ID NO: 76328 - DNA, 1563 bp, Escherichia coli CFT073
  CDS (1)..(1563): transl_table=11
atgcaaacacaaaaaccgactctcgaactgctaacctgcgaaggcgcttatcgcgacaacccgactgcgctttttcaccagttgtgtggggatcgtccggcaacgctgctgctggaatccgcagatatcgacagcaaagatgatttaaaaagcctgctgctggtagacagtgcgctgcgcattacagcattaagtgacactgtcacaatccaggcgctttccggcaatggagaagccctgttgacactactggataacgccttgcctgcgggtgtggaaaatgaacaatcaccaaactgccgcgtactgcgcttcccgcctgtcagtccactgctggatgaagacgcccgcttatgctccctttcggtttttgacgctttccgcttattacagaatctgttgaatgtaccgaaggaagaacgagaagcaatgttcttcggcggcctgttctcttatgaccttgtggcgggatttgaaaatttaccgcaactgtcagcggaaaatagctgccctgatttctgtttttatctcgctgaaacgctgatggtgattgaccatcagaaaaaaagcactcgtattcaggccagcctgtttgctccgaatgaagaagaaaaacaacgtctcactgctcgcctgaacgaactacgtcagcaactgaccgaagccgcgccgccgctgccggtggtttccgtgccgcatatgcgttgtgaatgtaaccagagcgatgaagagttcggtggcgtagtgcgtttgttgcaaaaagcgattcgcgccggagaaattttccaggtggtgccatctcgccgtttctctctgccctgcccgtcaccgctggcagcctattacgtgctgaaaaagagtaatcccagcccgtacatgttttttatgcaggataatgatttcaccctgtttggcgcgtcgccggaaagttcgctcaagtatgacgccaccagccgccagattgagatttacccgattgccggaacacgtccacgcggtcgtcgtgccgatggttcgctggacagagacctcgacagccgcatcgaactggagatgcgtaccgatcataaagagctttctgaacatctgatgctggtggatctcgcccgtaatgacctggcacgcatttgcacacccggcagccgctacgtcgccgatctcaccaaagttgaccgttactcttacgtgatgcacctagtctcccgcgttgttggtgagctgcgccacgatctcgacgccctgcacgcttaccgcgcctgtatgaatatggggacgttaagcggtgcaccgaaagtacgcgctatgcagttaattgccgaagcagaaggtcgtcgacgcggcagctacggcggcgcggtaggttattttaccgcgcatggcgatctcgacacctgcattgtgatccgctcggcgctggtggaaaacggtatcgccaccgtgcaagccggtgctggcgtagtccttgattctgttccgcagtcggaagccgacgaaactcgtaataaagcccgcgctgtactgcgcgctattgccaccgcgcatcatgcacaggagacgttctaa

SEQ ID NO: 76329 - protein, 520 aa, Escherichia coli CFT073
MQTQKPTLELLTCEGAYRDNPTALFHQLCGDRPATLLLESADIDSKDDLKSLLLVDSALRITALSDTVTIQALSGNGEALLTLLDNALPAGVENEQSPNCRVLRFPPVSPLLDEDARLCSLSVFDAFRLLQNLLNVPKEEREAMFFGGLFSYDLVAGFENLPQLSAENSCPDFCFYLAETLMVIDHQKKSTRIQASLFAPNEEEKQRLTARLNELRQQLTEAAPPLPVVSVPHMRCECNQSDEEFGGVVRLLQKAIRAGEIFQVVPSRRFSLPCPSPLAAYYVLKKSNPSPYMFFMQDNDFTLFGASPESSLKYDATSRQIEIYPIAGTRPRGRRADGSLDRDLDSRIELEMRTDHKELSEHLMLVDLARNDLARICTPGSRYVADLTKVDRYSYVMHLVSRVVGELRHDLDALHAYRACMNMGTLSGAPKVRAMQLIAEAEGRRRGSYGGAVGYFTAHGDLDTCIVIRSALVENGIATVQAGAGVVLDSVPQSEADETRNKARAVLRAIATAHHAQETF

SEQ ID NO: 76330 - DNA, 1566 bp, Vibrio vulnificus CMCP6
  CDS (1)..(1566): transl_table=11
gtgaacaaggccattaacatcaccacactaggacagctagagcttctgtcaacgacggttccttaccattcggatcctacgcgcctttttcacactttgtgtgaaaacaagcgcgatagcttattgctcgaatcagctgaaatcgattcaaaacaagatcttaaaagcttactgattgtcgattccgcggtacgtatggtttgccatggccatgtcgtgaccatgacggcactcagtgacaacggcaagaatctgttaacgcatttgacaaagaatgtcgcgcaagaggttgaacatcagtttgatggacaacaacttactctcaccttctcaagcccagatgaccgcctagatgaagactctcgcttacgtgaagcctctagtttcgacgcattgagactggttcaacacagttttgatttggcggaaaaagacaagcacgcgatctttatcggcggtctgtttgcctatgacttggtggccaactttgaaccactgggtgaagcccacgcaataaatcaatgtcctgactatgtcttctacgtggcagaaacgctgatggtggtcgaccaccagaccgagagttgccatttacaagcaacgctttttgcagacgactcacaaaaagaagcactaaatcagcgtattgaacaaatccgcactctgtgtgctaccccgaaagcgctacctaaagccattcatctcgataaggttgaggtcgataccaatatcagcgatgacgccttttgccaagtggtacgcgacctaaagcaatacgtagtcaaaggcgacattttccaagtcgtaccatcacgccgctttaccctgccctgcccgtcaccattggcggcgtataaagagctcaaagtcagcaacccaagcccttacatgttttacatgcaagatgaactctttacgttgtttggcgcatcaccggaaagcgcgttgaaatatgaaacgcaaaccaatcaggtggagatctaccccattgctggtactcgacgccgtggcaagcgagccaatggtgagatcgatttcgacctcgatagtcgaattgaactcgaacttcgcactgacaagaaagaaaacgccgagcacatgatgttggtggatctcgctcgaaatgatgtcgcacgcatttctcgcgcagggacacgccacgtcgccgatttacttaaagtggaccgctacagccatgtgatgcacttggtctcacgcgttgttggacaattacgtgacgatcttgacgcactacacgcctaccaagcgtgtatgaatatgggcacattaacgggcgctccgaaaattcgtgccatgcaattgattcgtgatgttgaaggggctcgccgtggcagttacggtggggctgtcggttacctcactggcgaagggacactggatacctgtatcgtgattcgttcggcttacgttgaaaacggcattgcacaagtgcaagccggtgccggagtggtctttgattccgccccccaagccgaagccgatgagacgcgcggcaaagctcaggcagtcatctctgccattcagaaagcccacaaggagtcgtaa

SEQ ID NO: 76331 - protein, 521 aa, Vibrio vulnificus CMCP6
MNKAINITTLGQLELLSTTVPYHSDPTRLFHTLCENKRDSLLLESAEIDSKQDLKSLLIVDSAVRMVCHGHVVTMTALSDNGKNLLTHLTKNVAQEVEHQFDGQQLTLTFSSPDDRLDEDSRLREASSFDALRLVQHSFDLAEKDKHAIFIGGLFAYDLVANFEPLGEAHAINQCPDYVFYVAETLMVVDHQTESCHLQATLFADDSQKEALNQRIEQIRTLCATPKALPKAIHLDKVEVDTNISDDAFCQVVRDLKQYVVKGDIFQVVPSRRFTLPCPSPLAAYKELKVSNPSPYMFYMQDELFTLFGASPESALKYETQTNQVEIYPIAGTRRRGKRANGEIDFDLDSRIELELRTDKKENAEHMMLVDLARNDVARISRAGTRHVADLLKVDRYSHVMHLVSRVVGQLRDDLDALHAYQACMNMGTLTGAPKIRAMQLIRDVEGARRGSYGGAVGYLTGEGTLDTCIVIRSAYVENGIAQVQAGAGVVFDSAPQAEADETRGKAQAVISAIQKAHKES

SEQ ID NO: 76332 - DNA, 1407 bp, Staphylococcus epidermidis ATCC 12228
  CDS (1)..(1407): transl_table=11
atggatattgtatacaaaaaggtgaatgctcaaattacgccagaagctttagcaaaattaaaacaaaaaaagatcatttttgaaagtacaaatcaacagaaacttaaaggtaggtactcgatagtagtattcgatcattatggcaaaattacattagataattctcaacttttaattaatttagacaatcattgtgaaatagttaagaatcaaccgtatcaacgacttaaggaatttgtagataaatattattttgaaatcaaagataaatatttaaaagatttaccttttatttcgggctttatagggacatgtagctttgatttagtacgacatgaatttaaaaaattacaagatattaaattagaagatcatcaaactcatgatgtccaattttatctagtggaagatgtatttgtttttgatcattataaagatgaattatatattatcgcaagtaacttattttctgatagaacaaaagagagattaaaggaatctattgaacgtaaaattgaagatttaaaaaacatacatttttcggttgaggatataaattataaatccatccctcgacatataaccaccaatatatcagagcaacaatttgttcaaactattagaattttaaaaaagaaaattactgaaggagatatgtttcaagtagttccttcaagaatttatagttataaacaccattttcaacacaatttacatcaattaacttttcagttatatcaaaatttaaagcgacaaaatcctagtccatatatgtattatattaataaagatgtaccgattgtaataggaagttctcctgaaagttttgtaaaggtaaaagatggaaaagtttatacgaatcctatagctggaacaattaaaagaggtcaaaataaaaaagaagatgaaaataatgaaaagacattaatgaaagatgaaaaggaattgagtgaacatcgtatgctcgtagatttaggaagaaatgatattcatcgaataagtaaaacaggcacttcacaaattaccaaactaatgacaatagaacgttatgaacatgtcatgcatatcgttagtgaagttattggagaattaaaaccccatctatctcctatgagcgtcatcgcaagtttgctaccaacgggtactgtctcaggtgcacctaaacttagagctatacagagaatatacgaatcttatccttataaaagaggtatctatagcggtggtgttgggtatatcaactgtaatcatcatttagattttgcattggctatacgtaccatgattatcgatgaggaaaaagtcagtgtcgaggcaggatgtggagtagtatatgattctattccagagaaagaacttgaagaaacaaaacttaaagctaaaagtttattggaggtaactccatga

SEQ ID NO: 76333 - protein, 468 aa, Staphylococcus epidermidis ATCC 12228
MDIVYKKVNAQITPEALAKLKQKKIIFESTNQQKLKGRYSIVVFDHYGKITLDNSQLLINLDNHCEIVKNQPYQRLKEFVDKYYFEIKDKYLKDLPFISGFIGTCSFDLVRHEFKKLQDIKLEDHQTHDVQFYLVEDVFVFDHYKDELYIIASNLFSDRTKERLKESIERKIEDLKNIHFSVEDINYKSIPRHITTNISEQQFVQTIRILKKKITEGDMFQVVPSRIYSYKHHFQHNLHQLTFQLYQNLKRQNPSPYMYYINKDVPIVIGSSPESFVKVKDGKVYTNPIAGTIKRGQNKKEDENNEKTLMKDEKELSEHRMLVDLGRNDIHRISKTGTSQITKLMTIERYEHVMHIVSEVIGELKPHLSPMSVIASLLPTGTVSGAPKLRAIQRIYESYPYKRGIYSGGVGYINCNHHLDFALAIRTMIIDEEKVSVEAGCGVVYDSIPEKELEETKLKAKSLLEVTP

SEQ ID NO: 76334 - DNA, 2166 bp, Bradyrhizobium japonicum USDA 110
  CDS (1)..(2166): transl_table=11
atgaacaggacagtctttgccctcccggccagaagcgattacgtgacccgcggcggtctcgcgatcacgcgcgtggcggagcagtttaccggcggcgcgagccggctcgacgatctcgtcaacctgctcgaccgccgccgcggcgtggtgctgtcctcgggcacgaccgtgccgggccgctacgagagcttcgacctcggcttctccgatccgccgctcaagctcgagaccacaggcgtcaatttcaagctggaagccctgaacgagcgcggccaggtgctgatcgccttccttgccgatgtcctgcgcgagccctgcgtggtgatatccgaaaagaccgcttcgcgcctcgccggccacatcatccgcggcgatgccccggtcgaggaagaccagcgcacccggcgcgccagcgtggtgtcgctggtgcgcgacctcgtcgccgccttctccgccaatgacgacgggctgctcggcctgttcggcgccttcgcctacgatctcgtgttccagatcgaggatctcgtgcagaagcgcgcgcgcgagagcgaccagcgcgacatcgtgctctacgttcccgatcgcctgctggcctatgaccgcgccaccggccgcggcgtcgtgctcagctacgacttcacgtggaagggcagatccaccgagggcctgccgcgcgagaccgccgacagcccgtacatgaagacaccgcgccagggctttgccgatcatgcgcccggcgaataccaggccaccgtcgagaccgcgcgcgcggcctttgcccgcggcgatctgttcgaggccgtgccgggccagctgttcgccgagccctgcgatcgttctccggcggaagtgttccagcgcctctgtgtcatcaacccgtcgccctacggcgcgctgatgaatctcggcgacggcgagtttctcgtctccgcctcgcccgagatgttcgtgcgttcggacggccgccgcgtcgagacctgcccgatctcgggcaccatcgcgcgcggcaccgatgcgatcggcgatgccgagcagatccgccagctcctgaattcggagaaggacgagttcgagctcaacatgtgcaccgacgttgatcgcaacgacaaggcgcgcgtctgcgtccccggcaccatcaaggtgctggcgcgccggcagatcgagacctactcaaaactgttccacaccgtcgaccacgtcgagggcatgctgcgtcccggcttcgacgcgctcgatgccttcctcacccatgcctgggccgtcaccgtgacaggtgcgccgaagctctgggcgatgcagttcgtcgaggatcacgagcggtcgccgcggcgctggtatgcgggtgcgatcggcgcggtgaatttcgacggcagcatcaataccggcctcaccatccgcaccatccgcatgaaggatggtctcgccgaggtgcgcgtcggcgccacctgcctgttcgattccgatcccgctgccgaggaccgcgaatgccaggtcaaggcggcggcgctgttccaggcgctgcgcggcgatccgccaaaaccgctctcgacctttgcgcccgatgcgaccggaagcggcaagcgggtgctgctgatcgaccacgacgacagcttcgtgcacatgctcgccgactatttccgccaggtcggcgccagcgtcaccgtggtccgctatgtgcatgcgctcgacatgctcaagcagaagaggtgggatttgctggtgctgtcgcccggcccgggcaggcccgaagatttcgggatcaggaagacgatcgatgcggcgctggagaacaagctgccggtgttcggcgtctgcctcggcgtgcaggcgatcggcgaatattttggcggcgagctcggccagctcacgcatcccgcccacggccggccctcgcgggtgcaggtgcgcggcggccgcctgatgcgcaatttgccgagcgagatcgtgatcggccgctatcactcgctctatgtcgagcgcgacagcatgccggaggttttgtccgtcaccgccagcaccgaggacggcgtcgctatggcgctggagcacaagaccctgccggtcgcgggcgtgcaattccacccggagtcgctgatgtcgctcggcggcgaggtgggcttgaggattgtcgagaacgcgttccggctggatgcgcgtgttgattga

SEQ ID NO: 76335 - protein, 721 aa, Bradyrhizobium japonicum USDA 110
MNRTVFALPARSDYVTRGGLAITRVAEQFTGGASRLDDLVNLLDRRRGVVLSSGTTVPGRYESFDLGFSDPPLKLETTGVNFKLEALNERGQVLIAFLADVLREPCVVISEKTASRLAGHIIRGDAPVEEDQRTRRASVVSLVRDLVAAFSANDDGLLGLFGAFAYDLVFQIEDLVQKRARESDQRDIVLYVPDRLLAYDRATGRGVVLSYDFTWKGRSTEGLPRETADSPYMKTPRQGFADHAPGEYQATVETARAAFARGDLFEAVPGQLFAEPCDRSPAEVFQRLCVINPSPYGALMNLGDGEFLVSASPEMFVRSDGRRVETCPISGTIARGTDAIGDAEQIRQLLNSEKDEFELNMCTDVDRNDKARVCVPGTIKVLARRQIETYSKLFHTVDHVEGMLRPGFDALDAFLTHAWAVTVTGAPKLWAMQFVEDHERSPRRWYAGAIGAVNFDGSINTGLTIRTIRMKDGLAEVRVGATCLFDSDPAAEDRECQVKAAALFQALRGDPPKPLSTFAPDATGSGKRVLLIDHDDSFVHMLADYFRQVGASVTVVRYVHALDMLKQKRWDLLVLSPGPGRPEDFGIRKTIDAALENKLPVFGVCLGVQAIGEYFGGELGQLTHPAHGRPSRVQVRGGRLMRNLPSEIVIGRYHSLYVERDSMPEVLSVTASTEDGVAMALEHKTLPVAGVQFHPESLMSLGGEVGLRIVENAFRLDARVD

SEQ ID NO: 76336 - DNA, 1476 bp, Xylella fastidiosa Temecula1
  CDS (1)..(1476): transl_table=11
ttgatcactgcaatgcagtttcagcgtcaagttgccgaagggtgtacccgcattccagtggtgcgtgaagtccagtctgatttggatactccgctttcgatctatttaaagtttgccgatgctccatatacctatttgtttgagtcggtggaaggtggggagcattttgcgaggtattcgatcattgggttgccggcacgccgtgtctatacctttcatgggcataccctggtggtgagtgagttcggtaaggtgttggaaacgcgtcaagtcgccgatccgcttgccgaagttgagctgttgcgtgcgcagtatgtagtgccgcaattagaagggttgccaggttttacaggcggcttagtggggtggttcggctttgaatgtatccagtacatcgaacctcgcttcatgggaggtaaaaaacgtgatgaacttggtacgccagatattctgctgatgctttcggaagagtttgcggtgtttgacagcctcaagggtcgattatatttgatcgttcacgcggatcctgctcaaccgcattcttacgttcgtgcaatgaaacgtttggatgcgttgatccaccgtctgcggcaaggtgggatggattatccgcattcacatatttcggaagtgattaacgaggaagattttcactcttctttgacgcgtgagcagtatcacgctgtggtgcgtaaggcgcaggagtatgtgcgttcgggtgatatttttcaggttgtaccaagtcagcgcctgtgtacgcagtttcatgcacgtccgattgatgtatatcgggcgttgcgcacgctgaatccgtcgccttatatgtatttcattgatattggtgctactcaggtggttggttcatcaccggagatattggcgcgattgcagggggatgtggtcacggtgcgtcctattgccggcacacgcccgcgaggtgcgactccggagcatgacaaacggttggaaatggagttgttagccgatccaaaagagcgtgctgagcacgtgatgctgattgatttgggtcgcaatgatatcggacgtgttgtcgaggccgggagtgtacaagtcaaggagtcgtttgtaatcgagcgttatagtcatgtcatgcatattgtcagtgaggtcaccggtatcttgaagccgggtttgaactacgttgatgtgttacgtgcaacgttccctgcgggtactgtgtccggagcgccaaagattcgtgcattggagattatccgtgagttggaaccagtgtgtcgcaacgtatattccggtgcagtgggttacattggctggcatggagatgctgatactgcaatcgcgattcgtactgcggtgattcaaaacggttgcttgtacgtgcaggctggcggtggtgtggtgtatgactcggatccagatttggagtggcaggaaaccatgaacaaggcgcgtgcattatttagggctgtggcgcaggcggccagagggttgtga

SEQ ID NO: 76337 - protein, 491 aa, Xylella fastidiosa Temecula1
MITAMQFQRQVAEGCTRIPVVREVQSDLDTPLSIYLKFADAPYTYLFESVEGGEHFARYSIIGLPARRVYTFHGHTLVVSEFGKVLETRQVADPLAEVELLRAQYVVPQLEGLPGFTGGLVGWFGFECIQYIEPRFMGGKKRDELGTPDILLMLSEEFAVFDSLKGRLYLIVHADPAQPHSYVRAMKRLDALIHRLRQGGMDYPHSHISEVINEEDFHSSLTREQYHAVVRKAQEYVRSGDIFQVVPSQRLCTQFHARPIDVYRALRTLNPSPYMYFIDIGATQVVGSSPEILARLQGDVVTVRPIAGTRPRGATPEHDKRLEMELLADPKERAEHVMLIDLGRNDIGRVVEAGSVQVKESFVIERYSHVMHIVSEVTGILKPGLNYVDVLRATFPAGTVSGAPKIRALEIIRELEPVCRNVYSGAVGYIGWHGDADTAIAIRTAVIQNGCLYVQAGGGVVYDSDPDLEWQETMNKARALFRAVAQAARGL

SEQ ID NO: 76338 - DNA, 1437 bp, Lactobacillus plantarum WCFS1
  CDS (1)..(1437): transl_table=11
atgaatccaacattaccaaccttgattccttatcaggatcattatccctacgtaccagtgatggtcaaacgaccactcgccacatttgaccccattgcggttgctaaaattgtccaccagatggggaacggtttcgcgctgacgattgatcggcaccaacgatatagctattttagttttaaaccacagcgaagtctcacgggtcggcaactagccaagcacaaacgaccagctaatgagacactccaagccattctaaaccaatatcgaacaccacgaattcaaggattaccaccatttacggggggcttgatagggtacttcggctatgagtatattcaacaatttgtactcaagttgcatttgaaatcaccagcaaccgcagatctcgatgacttaggtttattcttagttacgagtgtgctcgtctatgatcatcgacatcatgagcttgggttgacgcagctgatttcaactgcggatttagcggcaacttacgccgtgactcaaacggctctaacgcaacagttagccgccattattgaacaattacagcaaccaatagctctgccaccatttgacttacagcaaccattacacatgcaagcggatcaagcgacctatgcgcgtcaggttgaccgaattcgccaacacatctacgctggtgatattttccaaatgatatatgctaatccatgtttggggaccatgagcgggtcattgctggcagtttatcagcaacttcaaaaaacagcggccccgtatacctgttattttaaacaggctaatttcgaaatgacggtggcctcaccagaaacgttagtgacgaaggatggggaacaaatcgcgacgtatccattggccgggacgagacgccgtggtcgaacacctgccgaggatcagcagttggctcatgaattacaaaccagccctaaagagattgccgagcacaatatgttagttgatttgggacgtaacgatttaggacaagttgcaaagtttaaaagtgtccgagtgactaatttacggcgattaattcgttattcgcaagtcatgcacttagggtctcgggtggccgcagaagtggcgccgactactacagcactccaagtgcttgccgctacttttccagctgggacgttagctggcgcgcctaagattgaagcaatgaccctgattaatcattatgagcaggtgccgcggggtgcttatggtggttgctttggttacttggattgtaacggtaatttagacatggcgattggcatccggctggcctaccgaatgaatgaacagttggtgattccagcgggtgcgggcattgttgctgacagtatcggcgctcaagaatttaaggagtgccagaataaacaacgagtgatcgttaatgcagtacaagacgcgaaaggacgagttaaagatggaattattaattga

SEQ ID NO: 76339 - protein, 478 aa, Lactobacillus plantarum WCFS1
MNPTLPTLIPYQDHYPYVPVMVKRPLATFDPIAVAKIVHQMGNGFALTIDRHQRYSYFSFKPQRSLTGRQLAKHKRPANETLQAILNQYRTPRIQGLPPFTGGLIGYFGYEYIQQFVLKLHLKSPATADLDDLGLFLVTSVLVYDHRHHELGLTQLISTADLAATYAVTQTALTQQLAAIIEQLQQPIALPPFDLQQPLHMQADQATYARQVDRIRQHIYAGDIFQMIYANPCLGTMSGSLLAVYQQLQKTAAPYTCYFKQANFEMTVASPETLVTKDGEQIATYPLAGTRRRGRTPAEDQQLAHELQTSPKEIAEHNMLVDLGRNDLGQVAKFKSVRVTNLRRLIRYSQVMHLGSRVAAEVAPTTTALQVLAATFPAGTLAGAPKIEAMTLINHYEQVPRGAYGGCFGYLDCNGNLDMAIGIRLAYRMNEQLVIPAGAGIVADSIGAQEFKECQNKQRVIVNAVQDAKGRVKDGIIN

SEQ ID NO: 76340 - DNA, 1482 bp, Pseudomonas syringae pv. tomato str. DC3000
  CDS (1)..(1482): transl_table=11
atgaaccgtgaagaattcctgcgtttggctgctgatggctacaaccgcatcccgcttgcccgcgaaaccctggctgacttcgacacgccgctgtcgatctacctcaagcttgccgatcagccgaactcctacttgctggaatcggtgcagggcggtgagaaatggggtcgttactcgatcatcggcctgccttgccgcactgtgatgcgcgtacatggccatcacgtcagcgtgacccacgatggcgtcgagatcgaaagcctggacgttgaagacccgctggacttcgtcgagaccttcaaagcgcgctacaacgtgccgaccatcgccggtctgccgcgtttcaatggcgggttggtcggttatttcggttatgactgcgtgcgttacgtcgaaaagcgtcttgccaactgcccgaaccctgacccgctgggcgtaccggatatcctgttgatggtgtccgatgccgtggtggtattcgacaatttggcgggcaagatgcacgccatcgtattggtcgacccggcgcagcaggacgcttacgacagtggcgctgcactgcttgatgagctgatgcacaagctgcgtcagccgatcacaccgcgtcgtggcctggatctggaccggcctccggctgccgacccggtgtttcgctcaagcttcacgcagaatgattacgaaaccgcagtcgacacgatcaagcagtacatcctggcgggcgacgtgatgcaggtcgtgccatcgcaacgcatgtccatcgattttgctgcagcgcccattgacctgtaccgtgcgctgcgctgcttcaacccgacgccgtacatgtatttctttaacttcggcgacttccacgttgtcggcagttcgccggaagtgctggtgcgcgtcgaggacaacctgatcacggttcggccaatcgccggtacgcgtccgcgcggggctactgaagaagcggatcgtgcgctggaagaggatctgctgtccgatcacaaggagatcgccgagcacttgatgctgatcgatctgggtcgtaatgacgtcgggcgggtgtccgggatcggtacggtcaaattgaccgagaagatggttatcgagcgttactccaacgtgatgcacattgtttccaacgtcactggcgagctgaaaagcgggctgacggcgatggatgcactgcgggcgattctgccggccggcaccttgtccggtgcgccgaaaatccgcgccatggaaatcatcgacgagctggagccggtcaagcgtggcgtctacggcggggcggtggggtacatggcgtggaacggcaacatggacaccgccatcgcaattcgtacggcggtgatcaagaacggtgagctgcacgtgcaggctggcggcggtatcgtcgccgactcggtgccagcactggagtgggaagaaaccctcaacaaacgccgcgccatgttccgtgccgtggctttggcttcgcagactgccgagggttga

SEQ ID NO: 76341 - protein, 493 aa, Pseudomonas syringae pv. tomato str. DC3000
MNREEFLRLAADGYNRIPLARETLADFDTPLSIYLKLADQPNSYLLESVQGGEKWGRYSIIGLPCRTVMRVHGHHVSVTHDGVEIESLDVEDPLDFVETFKARYNVPTIAGLPRFNGGLVGYFGYDCVRYVEKRLANCPNPDPLGVPDILLMVSDAVVVFDNLAGKMHAIVLVDPAQQDAYDSGAALLDELMHKLRQPITPRRGLDLDRPPAADPVFRSSFTQNDYETAVDTIKQYILAGDVMQVVPSQRMSIDFAAAPIDLYRALRCFNPTPYMYFFNFGDFHVVGSSPEVLVRVEDNLITVRPIAGTRPRGATEEADRALEEDLLSDHKEIAEHLMLIDLGRNDVGRVSGIGTVKLTEKMVIERYSNVMHIVSNVTGELKSGLTAMDALRAILPAGTLSGAPKIRAMEIIDELEPVKRGVYGGAVGYMAWNGNMDTAIAIRTAVIKNGELHVQAGGGIVADSVPALEWEETLNKRRAMFRAVALASQTAEG

SEQ ID NO: 76342 - DNA, 1578 bp, Vibrio parahaemolyticus RIMD 2210633
  CDS (1)..(1578): transl_table=11
gtgaacaaggccattgaaattaagaaacttggacaactggaagtattaaaagcttctgttccttacactcaagacccaacccgtctgttccatactatttgtgagaacaaaacggatagcttgcttttagaatcggctgaaattgattctaaacagaatctcaaatcgctgttaatcgtcgattctgcggttcgcatcgtttgttatggacataccgtcagctttcatgctctaacggagaacggcaaaaacctactgacgcatgtgaatcaaaacgtacgtggtgaagtcgcaagccaatttgacggcgaaacactgactttagaattcatccaaccatgcgatacgattgatgaagattctcgtctacgagaagcttcttcttttgatgcgcttcgtttggtacagcacagttttgatctttcttcgcaagacaaacatgccattttccttggtggcctatttgcgtatgacttggtggcgaacttcgaaccattaggagacgcggtagcaacaaaccagtgtccagattacgtcttctatgttgcggaaacattgctggttgtagatcaccaaacagaatcctgccaactgcaagcaacattgttcgttgacggctcgcaaaaagcagcgttagaaagtcgaatcgaagatatccgagctcaatgcacatcgccaaagcgtcttccagacgcaacgcaagtggccaatatcacagctcaaccaagcgttccggatcaagacttctgtcaaatcgtccgtgatctaaaagaattcgtggtaaaaggcgatattttccaagtggttccttctcgtcgattcacattgccttgcccttctccgctagcagcttacaaagagctaaagcaaagcaacccaagcccttacatgttctacatgcaagatgagcttttcactttgtttggtgcgtctccagaaagtgccttgaagtatgaaaccgacaccaaccaaatagaaatctacccaattgcggggactcgccgtcgcggtaaacgtccaaatggcgaaatcgattttgatttagatagccgtattgaacttgaactgcgtagcgacaaaaaagagaacgctgaacatatgatgttggtagacctagctcgtaatgatgtagcgcgcatctcgcaagctggtactcgtcatgttgccgatctccttaaagtcgaccgctatagccatgttatgcacttggtgtctcgcgtggttggccagttgcgcgatgaccttgatgctttgcacgcttaccaagcttgtatgaacatgggcacgttaactggggcgccaaaaattcgtgcaatgcaactgattcgcgatgttgaaggtgctcgtcgtggcagctatggcggagcggtaggctatctgaccggagaaggcacgctcgacacttgtatcgtgattcgctcggcttacgtggaaaacggcattgctcaagtacaagcaggtgcaggcgtggtattcgattctgaccctcaagcggaagccgatgaaacacgcggaaaagctcaagcggttatctctgctattcaagcagcgcattctcaacctgctaacaaggagtag

SEQ ID NO: 76343 - protein, 525 aa, Vibrio parahaemolyticus RIMD 2210633
MNKAIEIKKLGQLEVLKASVPYTQDPTRLFHTICENKTDSLLLESAEIDSKQNLKSLLIVDSAVRIVCYGHTVSFHALTENGKNLLTHVNQNVRGEVASQFDGETLTLEFIQPCDTIDEDSRLREASSFDALRLVQHSFDLSSQDKHAIFLGGLFAYDLVANFEPLGDAVATNQCPDYVFYVAETLLVVDHQTESCQLQATLFVDGSQKAALESRIEDIRAQCTSPKRLPDATQVANITAQPSVPDQDFCQIVRDLKEFVVKGDIFQVVPSRRFTLPCPSPLAAYKELKQSNPSPYMFYMQDELFTLFGASPESALKYETDTNQIEIYPIAGTRRRGKRPNGEIDFDLDSRIELELRSDKKENAEHMMLVDLARNDVARISQAGTRHVADLLKVDRYSHVMHLVSRVVGQLRDDLDALHAYQACMNMGTLTGAPKIRAMQLIRDVEGARRGSYGGAVGYLTGEGTLDTCIVIRSAYVENGIAQVQAGAGVVFDSDPQAEADETRGKAQAVISAIQAAHSQPANKE

SEQ ID NO: 76344 - DNA, 1563 bp, Salmonella enterica subsp. enterica serovar Typhi Ty2
  CDS (1)..(1563): transl_table=11
atgcaaacaccaaaacccacgctcgaactattgacctgcgatgccgcctaccgggaaaacccaacggcgctttttcaccaggtctgcggcgatcgcccggcaacgctgctgctggaatccgcggatatcgacagtaaagacgatttaaaaagcctgctgctggtagatagcgcgctgcgcattaccgctttaggtgacactgtcactattcaggcgttatctgataatggcgcctcgttattgccgctactggataccgccctgcccgctggcgtggagaacgaagtcctgcctgccggtcgcattctacgctttccgcccgtcagcccattattagatgaagacgcccgtttatgctctctgtcggtatttgatgcgttccgcctgttacagggagtggtgaacataccgacgcaagagcgggaggctatgtttttcggcggtctgtttgcctacgacctggtcgctggctttgaagcgctgccacaccttgaggctggcaataactgcccggactactgcttttatttagcggaaacgctgatggtgatagatcatcagaaaaaaagcacccgtattcaggccagtctgttcaccgccagcgacctggaaaaacagcgcctcaacgcccgcctggcgtaccttagccaacagttaacccagcctgcgccgccgttgccggtgacgccggtgccggacatgcgctgtgaatgcaatcagagcgatgacgcgttcggcgcggtggtacgccagttgcaaaaagccatccgcgcgggcgagatatttcaggtggtgccgtcgcgccgcttttcactgccctgcccgtcgccgttggctgcctactacgtgctgaaaaagagcaaccccagcccgtatatgttctttatgcaggataatgatttcacgcttttcggcgcgtcgccggaaagctcgctgaaatatgacgccgccagccgtcagattgagatttaccccatcgcgggtacccgtccacgcggtcgccgcgccgatggtacgctggacagagatctcgacagccgtattgagctggacatgcgtaccgaccagaaagagctttccgaacatctgatgctggtcgatctggcgcgcaatgacctggcgcgcatctgtacgccgggcagtcgctacgttgccgatctgaccaaagttgaccgctattcgtacgtgatgcatctggtttcccgggtagtgggcgaactgcgtcacgatctcgacgcgctgcacgcctatcgcgcctgcatgaacatgggcaccctgagcggcgcgccgaaagtacgcgccatgcagttgattgccgatgcggaaggacagcgccgcggcagctatggcggcgcggtcggttacttcaccgcccacggcgatctggacacctgtattgttatccgctccgcgctggtggagaacggtatcgccaccgtacaggcgggcgccggaatcgtgctggactctgttccgcagtctgaagccgatgaaacccgtaataaagcgcgcgccgtattgcgtgctatcgccaccgcgcatcatgcacaggagaccttctga

SEQ ID NO: 76345 - protein, 520 aa, Salmonella enterica subsp. enterica serovar Typhi Ty2
MQTPKPTLELLTCDAAYRENPTALFHQVCGDRPATLLLESADIDSKDDLKSLLLVDSALRITALGDTVTIQALSDNGASLLPLLDTALPAGVENEVLPAGRILRFPPVSPLLDEDARLCSLSVFDAFRLLQGVVNIPTQEREAMFFGGLFAYDLVAGFEALPHLEAGNNCPDYCFYLAETLMVIDHQKKSTRIQASLFTASDLEKQRLNARLAYLSQQLTQPAPPLPVTPVPDMRCECNQSDDAFGAVVRQLQKAIRAGEIFQVVPSRRFSLPCPSPLAAYYVLKKSNPSPYMFFMQDNDFTLFGASPESSLKYDAASRQIEIYPIAGTRPRGRRADGTLDRDLDSRIELDMRTDQKELSEHLMLVDLARNDLARICTPGSRYVADLTKVDRYSYVMHLVSRVVGELRHDLDALHAYRACMNMGTLSGAPKVRAMQLIADAEGQRRGSYGGAVGYFTAHGDLDTCIVIRSALVENGIATVQAGAGIVLDSVPQSEADETRNKARAVLRAIATAHHAQETF

SEQ ID NO: 76346 - DNA, 1407 bp, Bacteroides thetaiotaomicron VPI-5482
  CDS (1)..(1407): transl_table=11
atgaaaacattcagttatacagcccatagcaaacaggtactcggagatatgcacactcctgtcagtatctatctgaaagtacgtgatatgtacccacaatctgcattgatggagagttccgattatcatgcaggagaaaattccctctcgttcatcgctctttgtccgctggcaagtatcggtgtcaatagcggaatagtcactgctagttatcctgacaaaagtcggaaggaagagccgctcacccaatcattcacggtagaaaaagcgatgaatcaattcatcagtcagtttcaagtgaccggagaaaacaagaatgtgtgcggactttacggatacaccacattcaacgcagtgaaatacttcgaacatatcccggtgaaagaaagtcatgatgagcagaatgatgctccggacttgctatacatattatataagtatatcatcgttttcaatcatttcaagaatgaattgacattggtagaaatgctgggcgaaggtgaagaaagcggtttgccggaactggaggccgctatcgaaaacagaaattatgcttcttataatttctcggtgacaggtcctgtcagcagcccgatctccgatgaggagcataaagcgaacgttcgcaagggtattgcccattgtatgcgtggtgatgtttttcagattgtcctttccagaagattcatccagccttatgccggagatgatttcaaagtctatcgtgctcttcgcagcatcaacccttctccttatcttttctatttcgatttcggaggataccgcattttcggttcttctccggagactcactgtaaaattgaagacggacgtgcctacatcgacccgattgccggaacaacccgccgtaccggagatacggtaaaagaccgcgaattggcggaagcactgcttgccgatccgaaagagaacgcggagcatgtgatgctggttgatctggcaagaaatgatctttcacgtaattgccatgatgtacgggtattgttttataaggaaccacagtattacagtcatgtgattcatctggtcagccgcgtgagcggtcagctgaatgaaggggcggataagattaaaactttcatcgatactttccctgcgggaacgttgagcggagcaccgaaagtacgcgccatgcagctgatcagtgaaatcgaacctcataaccgcggtgcttatggcggctgtatcggctttatcggacttaacggagaactgaaccaggcaatcaccatccgtacttttgtcagccgtaataacgagttatggttccaggccggaggcggtatcgttgcacgcagtcaggatgaatacgagttgcaagaggtaaacaataaattaggagctcttaaaaaggctatcgatttagctgttaatttaaaaaactaa

SEQ ID NO: 76347 - protein, 468 aa, Bacteroides thetaiotaomicron VPI-5482
MKTFSYTAHSKQVLGDMHTPVSIYLKVRDMYPQSALMESSDYHAGENSLSFIALCPLASIGVNSGIVTASYPDKSRKEEPLTQSFTVEKAMNQFISQFQVTGENKNVCGLYGYTTFNAVKYFEHIPVKESHDEQNDAPDLLYILYKYIIVFNHFKNELTLVEMLGEGEESGLPELEAAIENRNYASYNFSVTGPVSSPISDEEHKANVRKGIAHCMRGDVFQIVLSRRFIQPYAGDDFKVYRALRSINPSPYLFYFDFGGYRIFGSSPETHCKIEDGRAYIDPIAGTTRRTGDTVKDRELAEALLADPKENAEHVMLVDLARNDLSRNCHDVRVLFYKEPQYYSHVIHLVSRVSGQLNEGADKIKTFIDTFPAGTLSGAPKVRAMQLISEIEPHNRGAYGGCIGFIGLNGELNQAITIRTFVSRNNELWFQAGGGIVARSQDEYELQEVNNKLGALKKAIDLAVNLKN

SEQ ID NO: 76348 - DNA, 1392 bp, Coxiella burnetii RSA 493
  CDS (1)..(1392): transl_table=11
atgcttacgccaacccgggctttttatcaattgctggatttgtatccaacagcgattttgctggaatttagcccacgcaatgaaaagccctacgcttttatcggattcaacccgttagcccagatcatcgctcgcggggatgaaattaccgtttttttaaaaaacactgtcaccaaaatgaagggtgaccccttccatcatctacgccgtttacgccaacaaatcaattgcattgataaccatccattaacgaaattaacaggcgcagcaatcggctatttaagttacgatgctatccgttatgtagaatctattcctgatcgtcacacagcctctgaaaaaattgctgacattgattttaaattttatcgcgatggcattacctttgatctagaaagcaataatgccattgtttctcacattgttgaagttaaagacgaattaaaacattgctacgaatacggattagaaaaactagccgatattaccaataatctttttacgcccgcccgcccaaagctttcgacgaatcgaaaaactcattactcaaaatcaacttccctggatttcaaacccgatagcaatgacaccgattttaaaaaaatcgttaacaaggccaagcaatacattgccgcgggcgacatctttcaagtcgtgtcttcccgaacttttaaaaaaccgtatcaaggcaaaccctttgatatctaccgcgctttaaaaaaagtaagcccttctccctatcacttttatttacaaaatgattctcttgctatcgccggcgcttcaccggaaaaaatggttagcgttaaaaacggcataatcgacagcgtacctctcgccggcacgcggcctcgcggtaacggcaaaagtgatcagacattagcgcaggaattaataaatgatccgaaagaaacggctgagcatttaatgctagtggatctcgctcgcaatgatatcgggattgtttcacaagcgggtagcgtggaagtagcagaactgatgcagccggttaatttttcgcatgtcatgcaccttgcttctcgagttcaagtctcattagcaaaaaattatgacgcgattgatgtattaaaagctacctttcccgctggcactttaagcggtgcacctaaaattcgagcgatggaaattatcgatgaactcgaacattctcgtcgcggtttatacggtggcgccatcgttgctttagaccgcgacgataatttagatacttgcattattattcgtacgacgatagtcgaaaatggaatagcttctattcgcgcgggcgccggtattgttcatgattcggatccgattgccgaagctaatgaaacgcgtcacaaagcgaaaagcgtcatggccgccatccaactgaccgaaggaggattataa

SEQ ID NO: 76349 - protein, 463 aa, Coxiella burnetii RSA 493
MLTPTRAFYQLLDLYPTAILLEFSPRNEKPYAFIGFNPLAQIIARGDEITVFLKNTVTKMKGDPFHHLRRLRQQINCIDNHPLTKLTGAAIGYLSYDAIRYVESIPDRHTASEKIADIDFKFYRDGITFDLESNNAIVSHIVEVKDELKHCYEYGLEKLADITNNLFTPARPKLSTNRKTHYSKSTSLDFKPDSNDTDFKKIVNKAKQYIAAGDIFQVVSSRTFKKPYQGKPFDIYRALKKVSPSPYHFYLQNDSLAIAGASPEKMVSVKNGIIDSVPLAGTRPRGNGKSDQTLAQELINDPKETAEHLMLVDLARNDIGIVSQAGSVEVAELMQPVNFSHVMHLASRVQVSLAKNYDAIDVLKATFPAGTLSGAPKIRAMEIIDELEHSRRGLYGGAIVALDRDDNLDTCIIIRTTIVENGIASIRAGAGIVHDSDPIAEANETRHKAKSVMAAIQLTEGGL

SEQ ID NO: 76350 - DNA, 1482 bp, Streptomyces avermitilis MA-4680
  CDS (1)..(1482): transl_table=11
atggacctcgagacgttccgcaagctggccaccgaccgccgtgtcattcccgtcagccgcaaactcctcgccgacggcgacaccccggtcgggctctaccgcaagctcgccgccgagcgccccggcaccttcctcctggagtccgcggagaacggccgctcggcgttcaaatggtcccgctactccttcgtgggcgtccgctccgccgccaccctcaccgagcgtgacgggcaggcgcactggctcggcaccccgcccgtgggcgtccccacggacggcgacccgctcgccgccctgcgcgccaccatcgaggcgctgcacacgccccacgaggagggcctgccgcccttcaccggcggcatggtcggctatctcggctacgacatcgtgcgccgcctggagaagatcggccccggcgagcgcgacgatctgaaacttcccgagctgaccatgctcctcaccagcgatctggccgtcatggaccactgggagggctccgtcctgctgatcgccaacgcgatcaaccacaacgacctcgacacgggcgtcgacgaggcctacgcggacgcggtcgcccgcctcgacgccatggaggcggacctgtcgcgcgcggtcgcgcagccccccgccgccctcccgccctccgaactcccggagtacaccgccctctggggcggccccgacttccaggacgccgtcgaggacatcaaggagcgcatccgggcgggcgaggcgttccaggtcgtcccctcccagcgcttcgaaacgccgtgcacggcaagcgcgttggacgtctaccgggtactgcgggcgaccaacccctcaccgtacatgtacctcttccgcttcgagggcttcgacgtggtcggctcgtcccccgaggccctcgtcaaggtcgaggacgggcaggcgatggtccaccccatcgcgggcacccggccgcgcggcgcgaccccgcaggaggaccaggccctcgcggacgagctgctggccgaccccaaggagcgcgccgagcacctgatgctcgtcgacctggggcgcaacgatctggggcgggtctgcgagcccggttccgtcgaggtcgtcgacttcatgaccatcgagcgctactcgcacgtgatgcacatcgtgtcgaccgtgaccgggcgggtcgcgcgggggcgtacggccttcgacgtgctgacggcctgcttcccggccggcaccctctccggcgcgcccaagccccgcgccctgcagatcatcgacgaactggagccgtcccggcgggggctgtacggcggctgcgtcggctacctcgacttcgcgggcgactccgacaccgccatcgccatccgcacggcgctgctgcgcgacggcacggcgtacgtgcaggcgggcgccggcatcgtcgcggactcggacccggtcgccgaggacgacgagtgccgcaacaaggcggcggcggtcctgcgcgcggtccacacggcgaaccggctgtag

SEQ ID NO: 76351 - protein, 493 aa, Streptomyces avermitilis MA-4680
MDLETFRKLATDRRVIPVSRKLLADGDTPVGLYRKLAAERPGTFLLESAENGRSAFKWSRYSFVGVRSAATLTERDGQAHWLGTPPVGVPTDGDPLAALRATIEALHTPHEEGLPPFTGGMVGYLGYDIVRRLEKIGPGERDDLKLPELTMLLTSDLAVMDHWEGSVLLIANAINHNDLDTGVDEAYADAVARLDAMEADLSRAVAQPPAALPPSELPEYTALWGGPDFQDAVEDIKERIRAGEAFQVVPSQRFETPCTASALDVYRVLRATNPSPYMYLFRFEGFDVVGSSPEALVKVEDGQAMVHPIAGTRPRGATPQEDQALADELLADPKERAEHLMLVDLGRNDLGRVCEPGSVEVVDFMTIERYSHVMHIVSTVTGRVARGRTAFDVLTACFPAGTLSGAPKPRALQIIDELEPSRRGLYGGCVGYLDFAGDSDTAIAIRTALLRDGTAYVQAGAGIVADSDPVAEDDECRNKAAAVLRAVHTANRL

SEQ ID NO: 76352 - DNA, 1398 bp, Bacillus cereus ATCC 14579
  CDS (1)..(1398): transl_table=11
atgcaacgaagaaaatctttagcgctttctattccatatcagttagatttctttaagcaatataaatttctttctcagggtaaatcgcaacatattttgttagaaagcggccgtggcggtcgttataacattgtagggctgaacccagtagcggtaatccgagggaaggatgaaacgttacatataagtgaaagtggtaagggaacaataaaacgagggaatccgttagatttaatgcaagaatatatggaacaatggaagacggactataacccagagtatccgccttttcaaggtggtgcaattggctatttcagttatgactgtatccgttatattgaaaagctgccttctcttgcggaagatgatattgatatacctgacatcttctttttattatttgatgacgtatttgtctatgatcaaaaagaacaagtgttatgggttattacgcattatgtagataaatatgaagaggcgaaagaacggctaaatgagtggaagagtctttggatgacagaagcgcctgaagtgaccgtgccctttgaaagtcctgaaaagaaaagtgaagcagttgcttttactgaagctggctttatgaaggcagttgaatgtattcaagaatatattggagcgggtgatgtgttccaagtaaacttgtcgatgagacaagaaagaacgttacagacacacccactagaaatttatacaagtcttcgtgaaattaatccatctccatatatgggttacctggagcttggggattttcaaatcgttagtggatcgccagagttgttaattaagaaacaaggaactgaagtaagtacaagaccgattgctggaacgagatctagaggcgcggatgagcaagaggatgaagaattagcaagagaattaattgagaacgaaaaagaaagagcagagcatgtaatgcttgtggatttagaaagaaatgatttaggacgtgtttgtaaatatggcactgtagaagtagatgaatttatggtaattgagaaatactcacatgttatgcatattgtttctaatgtgcgtggtgaggtggaagaagataaagatgcttttgatttagtgaaggctgtattccctgggggaacaattactggtgccccaaaaatacgtacgatggaaattattgaggaattagaacctgttcgaagagggatttatacagggtcaatcggttggattggttattctggagatacagaattgaatattgtaattagaacacttcttgctaaagatggaaaagctcatgtacaagcaggggcgggaattgtaattgattcaaatccggaaaatgaatataaagagtcgttaaaaaaggcgattgctttatggcgtgcaaaagaacgtagtgaagaaacggttaggtga

SEQ ID NO: 76353 - protein, 465 aa, Bacillus cereus ATCC 14579
MQRRKSLALSIPYQLDFFKQYKFLSQGKSQHILLESGRGGRYNIVGLNPVAVIRGKDETLHISESGKGTIKRGNPLDLMQEYMEQWKTDYNPEYPPFQGGAIGYFSYDCIRYIEKLPSLAEDDIDIPDIFFLLFDDVFVYDQKEQVLWVITHYVDKYEEAKERLNEWKSLWMTEAPEVTVPFESPEKKSEAVAFTEAGFMKAVECIQEYIGAGDVFQVNLSMRQERTLQTHPLEIYTSLREINPSPYMGYLELGDFQIVSGSPELLIKKQGTEVSTRPIAGTRSRGADEQEDEELARELIENEKERAEHVMLVDLERNDLGRVCKYGTVEVDEFMVIEKYSHVMHIVSNVRGEVEEDKDAFDLVKAVFPGGTITGAPKIRTMEIIEELEPVRRGIYTGSIGWIGYSGDTELNIVIRTLLAKDGKAHVQAGAGIVIDSNPENEYKESLKKAIALWRAKERSEETVR

SEQ ID NO: 76354 - DNA, 1428 bp, Bacillus cereus ATCC 14579
  CDS (1)..(1428): transl_table=11
gtgaaggacatgatgacgaaagaagaatttataaaacaaaaaagagagagaaagacatttttagtaatcactgaagaagaaggagatagcattacgccaatttctttatatagacgtatgaaagggaagcagaaattcttattagaaagttcacagcttcatcaagataaagggcgttattcttacttgggatgtaatccttatggagaagtgaaaagcgttggtacggaagtggaacgaacaatttacggccgggcagaaaagttacaaggtaatgtactgcaagtgttagaagaagtaatcgcaccatcacaagtagacagtccatttccattttgcggaggagcagttggttatattggatatgatgtcattcggcagtatgaaaacattggagcggatttacacgacccattaaatattccggaagtacaccttttactatatcgtgagtttatcgtttacgatcatttacgccaaaagttgtcgtttgtatatgtatgcaggcaagatgattcagcagattatgaagaagtatacgaaaggctacgagtatacaaagaggaagtgctacaaggagaagaagctgaagtaaatacaatacaatccccattatcatttacttcttctataacggaaaaagagttttgtgagatggtagaaatggcgaaagaatatataagagcgggagacatattccaagttgtactgtcacagcgtttacaaagtgaatgtattggtgatccattcgcgttatatcgaaaacttcgaattgcaaatccatcaccatatatgttctatatcgattttcaagattatgttgtactcggttcttcgccggaaagtttactatcagtaagggaggataaagtgatgacgaatccaattgctggtacaaggccgagggggaaaacgaagagggaagatgaggaaatcgcaaaagaactgttaggcaatgagaaagagcgagcagagcatatgatgcttgtagatcttgggcgaaacgatattggtagagtgagtgaaatcggctcggttacgatagataaatatatgaaagtagaaaaatattctcacgttatgcacattgtatccgaagtttacggaacattgcaaaaacaaatgggcggatttgatgcgttagcgtattgcttaccagcagggacggtttctggagctccgaaaattagagcgatggaaattataaatgaactagagaatgaaaaaagaaatgtatacgctggtgcagttggatacgttagtttttcaggaaatcttgatatggcgctcgccattcgaacgatggtcgtaaaggatgaaaaagcatacgttcaggcaggagcaggagtcgtttacgattcagatccagtagctgaatatgaagaaacattaaataaagcgagagcgcttttggaggtaatgaaatga

SEQ ID NO: 76355 - protein, 475 aa, Bacillus cereus ATCC 14579
MKDMMTKEEFIKQKRERKTFLVITEEEGDSITPISLYRRMKGKQKFLLESSQLHQDKGRYSYLGCNPYGEVKSVGTEVERTIYGRAEKLQGNVLQVLEEVIAPSQVDSPFPFCGGAVGYIGYDVIRQYENIGADLHDPLNIPEVHLLLYREFIVYDHLRQKLSFVYVCRQDDSADYEEVYERLRVYKEEVLQGEEAEVNTIQSPLSFTSSITEKEFCEMVEMAKEYIRAGDIFQVVLSQRLQSECIGDPFALYRKLRIANPSPYMFYIDFQDYVVLGSSPESLLSVREDKVMTNPIAGTRPRGKTKREDEEIAKELLGNEKERAEHMMLVDLGRNDIGRVSEIGSVTIDKYMKVEKYSHVMHIVSEVYGTLQKQMGGFDALAYCLPAGTVSGAPKIRAMEIINELENEKRNVYAGAVGYVSFSGNLDMALAIRTMVVKDEKAYVQAGAGVVYDSDPVAEYEETLNKARALLEVMK

SEQ ID NO: 76356 - DNA, 1488 bp, Nitrosomonas europaea ATCC 19718
  CDS (1)..(1488): transl_table=11
atgaatcattgcataactgaaagtgaattcaacgatctggcagcacaaggctataaccggatacctctggtgctggaaacattcgctgatctggatacgcccctctccatttacctcaagctggcgaaccagccttattcctatttactggaatcgatcctgggaggggagcggttcgggcgttactcggtcatcggattacctgcagaaatacggctggaagcatgttccagccgtgttcgcgtcatcagtggcaatgaaacgaaggaagaaatcgataccagcgacgtgctgggtttcattggcaccttcctgaaccggttcaaggtagcaccccatgcggaattgcctcgtttcagcggaggactggccgggtatttttcctacgataccattcgttacatcgagccaaaactagcagggcatgcacggccggatacgatacaaacaccggatattctgttactgctgtcggaagaactggttgtcatggacaatctctccggcaagctttacctgatcatctataccgacccgacactggaaaatgcctatcagaccagcaaaaatcggctccgggaattgctgcacaaactgcgagagccgctctcgataccagtcgagaaatctacttcctccaaagtagctgtgagtgaatttcccgaagccgacttcattgccgcagtggaaaaagccaagcattacatcctggagggcgacatcatgcaggttgtcctctcgcagcgtaccagcaaaccctactctgcttcaccattggcactgtatcgtgcgctgcgcagcctcaacccatcaccctatatgttcaattatcatctgggaaattttcatatcgttggcgcctcaccggaaattctggtcagactggaaaaggatacagttaccgtccgtccaattgccggtacccgaccacgtggccaggatacccaggctgacctggcactggcggcagatttgctggccgatcccaaggagcgggcggaacatatcatgctgatggatctgggacgcaacgatatcggccgggttgcccagaccggtagcgtaaaagtcactgagaacatgcagatagaatattattcgcatgtcatgcacattgtttccaatgttgaaggaaagctcaaatcgggtttgaatgcgatcgacgtactacgcgccaccttccctgcgggtaccgtcagcggcgcacccaaagtcagagcaatggaaatcatcgatgagctggaaatctccaagcgcggtatttatgctggcgcagtcggttatctcgaattcaatggcgacatggacttggccatcgcaatccgtaccggcctgatcaaggacggcatactgcatgtgcaggcgggagctggtatcgtagctgactctgttccacaaagtgagtggaccgaaacctgcaacaaagcgagggctgtcctgcgagcggcagaaattgccgagaatggcctggacagtacgatcacctga

SEQ ID NO: 76357 - protein, 495 aa, Nitrosomonas europaea ATCC 19718
MNHCITESEFNDLAAQGYNRIPLVLETFADLDTPLSIYLKLANQPYSYLLESILGGERFGRYSVIGLPAEIRLEACSSRVRVISGNETKEEIDTSDVLGFIGTFLNRFKVAPHAELPRFSGGLAGYFSYDTIRYIEPKLAGHARPDTIQTPDILLLLSEELVVMDNLSGKLYLIIYTDPTLENAYQTSKNRLRELLHKLREPLSIPVEKSTSSKVAVSEFPEADFIAAVEKAKHYILEGDIMQVVLSQRTSKPYSASPLALYRALRSLNPSPYMFNYHLGNFHIVGASPEILVRLEKDTVTVRPIAGTRPRGQDTQADLALAADLLADPKERAEHIMLMDLGRNDIGRVAQTGSVKVTENMQIEYYSHVMHIVSNVEGKLKSGLNAIDVLRATFPAGTVSGAPKVRAMEIIDELEISKRGIYAGAVGYLEFNGDMDLAIAIRTGLIKDGILHVQAGAGIVADSVPQSEWTETCNKARAVLRAAEIAENGLDSTIT

SEQ ID NO: 76358 - DNA, 1398 bp, Bacillus anthracis str. Ames
  CDS (1)..(1398): transl_table=11
atgcaacgaagaaaatctttagcgctttctattccatatcagttagatttctttaagcaatataaatttctttctaaggataaaccgcaacacattttgttagagagtggacgtggcggtcgttataacatcgtgggattaaacccagtagcggtaatccgagggaagggtgaagcgttacatataagtgaaagtggtaaggaaacaataaagcaaggaaacccattggatttaatgcaggaatatatggagcgatggaaaacggattataatccggaatacccgccttttcaaggtggtgcaattggttactttagttatgattgcatccgttatattgaaaaacttccttctcttgcggaggatgatattaatatacctgatatattctttttattatttgatgatgtgtttgtgtatgatcaaaaagaaaaagtattatggattattacacattatgtagataagcatgaagaggcaaaagagcgattaaatgaatggaagattctttgggcgacagaagcgccggaagtgactataccgtttgcgtgccctgaaaagaaaaatgaagcagttgcttttactgaagaaagctttatgaaggcggttgaatgtattcaagaatatattggggctggtgatgtgttccaagtaaacttgtcgacaagacaagaaagaacgttacaaacacacccactagaaatatatacaagtcttcgtgaaattaatccatctccatatatgggttacttggagctcggggattttcaaattgtaagtggatcgccagagttgctaattaagaaacagggaactgaagtaagtacaagaccaattgctggaacgagatctagaggggcaaatgaacaagaggatgaagaattggcaagggaattaattgagaatgaaaaagaaagagcagagcacgtcatgcttgtggatttagaacgaaatgatttaggacgtgtttgtaaatatggcactgtagaagtagacgagtttatggtaattgagaaatactcacatgttatgcatattgtttctaatgtgcgtggtgaggtggaagaagataaagatgctttcgatttagtgaaggctgtattccctggaggaacaattacgggtgctccgaaaatacgtacgatggaaattattgaagaattagaacctgttcgccgagggatttatacaggttcaatcggttggattggttattctggagatacagaattgaatattgtaattaggacacttcttgctaaagacggaaaagcgcatgtacaagcaggggcgggaattgtcattgattcaaatccggaaaatgaatataaagagtcgttaaaaaaggcgattgctttatggcgtgcaaaagaacgtagcgaagaaacggttaggtga

SEQ ID NO: 76359 - protein, 465 aa, Bacillus anthracis str. Ames
MQRRKSLALSIPYQLDFFKQYKFLSKDKPQHILLESGRGGRYNIVGLNPVAVIRGKGEALHISESGKETIKQGNPLDLMQEYMERWKTDYNPEYPPFQGGAIGYFSYDCIRYIEKLPSLAEDDINIPDIFFLLFDDVFVYDQKEKVLWIITHYVDKHEEAKERLNEWKILWATEAPEVTIPFACPEKKNEAVAFTEESFMKAVECIQEYIGAGDVFQVNLSTRQERTLQTHPLEIYTSLREINPSPYMGYLELGDFQIVSGSPELLIKKQGTEVSTRPIAGTRSRGANEQEDEELARELIENEKERAEHVMLVDLERNDLGRVCKYGTVEVDEFMVIEKYSHVMHIVSNVRGEVEEDKDAFDLVKAVFPGGTITGAPKIRTMEIIEELEPVRRGIYTGSIGWIGYSGDTELNIVIRTLLAKDGKAHVQAGAGIVIDSNPENEYKESLKKAIALWRAKERSEETVR

SEQ ID NO: 76360 - DNA, 1416 bp, Bacillus anthracis str. Ames
  CDS (1)..(1416): transl_table=11
atgacaaaagaggaatttataaaacagaaagaacaaagaaaaacatttttggtaatcgctgaagaagaaggagatagcattacgccaatttctttatatagacgtatgaaaggtaaaaagaaatttttattagaaagctcacagcttcatcaagataaagggcgttattcttacttaggttgtaatccatatggtgaagtgaaaagcgttggtacggaagtggaacgaacgatttacggcagggcagaaaagttgcaaagtaacgtactacaagtgttagaagaaataatcgcaccatcacaagtagacagtccatttccattttgcggaggagcagttggatacattggctatgacgtcattcggcaatatgaaaacattggagcagatttacatgatccattgaatattccagaagtacaccttttactgtaccgtgagtttatcgtgtatgaccacttacgccaaaagttgtcgtttgtatatgtatgcagggaagatgattcagcagattatgaagaagtatacgaaaggctgcgagtatacaaagaggaagtgctacagggagaagaagcggaagtaactgaaataagatcaacattatcattcacttcttctataacggaaagagaattttgcgtgatggtagaaacggcgaaagaacacatcggggccggggacatatttcaagttgtattatctcagcgtttgcaaagcgaatgtattggagatccattcgcgttatatcgaaaacttcgaattgccaatccatcaccatatatgttttatatcgattttcaagattatgttgtactcggttcttcgccagaaagtttgttatcagtaagggaggataaagtgatgacgaatccaattgctggtacgaggccgagagggaaaacgaaggaggaagatacggagattgaaaaagaactgttagaaaatgagaaagagcgagcggagcatatgatgcttgtagatcttgggcgaaatgatattggtagagtgagtgaaatcggctcagttacgatagataaatatatgaaagtagaaaaatattctcacgttatgcacattgtatctgaagtttacggaacattgcgaaaacaaatgagcggatttgatgcattagcgtactgtttaccagcggggacggtatcaggtgctccgaaaattagagcgatggaaattataaatgagctagagaatgaaaaaagaaatgtgtacgccggtgcagttggatacgttagtttttcagggaatcttgatatggcgctcgccattcgaacaatggttgtaaaggatgaaaaagcatacgttcaggcaggagcgggtattgtttacgattcagatccagtagctgaatatgaagaaacattaaataaagcgagagcgctattggaggtaatgaaatga

SEQ ID NO: 76361 - protein, 471 aa, Bacillus anthracis str. Ames
MTKEEFIKQKEQRKTFLVIAEEEGDSITPISLYRRMKGKKKFLLESSQLHQDKGRYSYLGCNPYGEVKSVGTEVERTIYGRAEKLQSNVLQVLEEIIAPSQVDSPFPFCGGAVGYIGYDVIRQYENIGADLHDPLNIPEVHLLLYREFIVYDHLRQKLSFVYVCREDDSADYEEVYERLRVYKEEVLQGEEAEVTEIRSTLSFTSSITEREFCVMVETAKEHIGAGDIFQVVLSQRLQSECIGDPFALYRKLRIANPSPYMFYIDFQDYVVLGSSPESLLSVREDKVMTNPIAGTRPRGKTKEEDTEIEKELLENEKERAEHMMLVDLGRNDIGRVSEIGSVTIDKYMKVEKYSHVMHIVSEVYGTLRKQMSGFDALAYCLPAGTVSGAPKIRAMEIINELENEKRNVYAGAVGYVSFSGNLDMALAIRTMVVKDEKAYVQAGAGIVYDSDPVAEYEETLNKARALLEVMK

SEQ ID NO: 76362 - DNA, 1497 bp, Helicobacter hepaticus ATCC 51449
  CDS (1)..(1497): transl_table=11
atgtttgattttagcaattcacgcatagcctcaatagctcataaagaaatattgtgcgataatcttacccctttggcagtgcttggctcactgaatgcaaaagtgcttttagaatctgcttataacgaaacaggcaaagatagattttccattgtgattttaaacgaagcttttagaatctacaaagaatgtggtgcacattttctttatacgcaagggcaaaaaatccctttatatgaggctttagcagactatacgccactagattctatttctctacctcccacacataaagctggttttttagaatctctcgctcttgtgcgcactcttgcaccaaatcctactgatagtattcctgctcatttgcctttgcctcttggcggagcaggatatatcggttatgaattttttgcagagattgaagaggtaacatttaagaatccctccctctataatgcgcctgaatgtgcatttatctttggacgagattttttaatttttgaccatctttttgatagattgcatattgtgagtgtgggctatgcacacgagagagaagagcactcaactaagcagcgaatagagcatattgcacatagtcttgccactttagtgccacaaaatggattagattctatgcaaaaatcagattttgagtgtgtgagtgctacttcgcagcaagaatatgaatctatggtggaggcaatcaaaaaggcaatttatgcgggaaatttactccaatgtgtgccaagtcaatatatgcagattcgctcttcactttctccgcttcaagcttatcggaatttacgccatcaaaaccctagtccttatatgttttattataattttgatgattttgtgatacttggagcgagtccggagattatgctaaggcttaaaagcaagcaaggacaatcattttttacacttcgtccaattgcaggcacacgtcctagaggtgagagtgtggcgcaagatttggagcttgaaacagagcttttaaatgatgaaaaagaaaatgcagaacatctaatgttacttgatttagctcgtaatgatgcgggtaaagtaagtgtaggtggaggtgtaaaagtaatagcgcgtaataaaattgagcgatattcgcgtgttatgcacattgtatccgaagtgcaaggagagctagattctaagcattttagcaaagctgatgcgtttaaatctgtttttcctgcaggcacattaagtggtgcgccaaaaattgaggcaatcaaaaccatagaatctttagaatctcacgcacgaggtgtgtatggcggtgcgatagggtatttcacttatgatgaagatatggattttgctattgctattcgcacagcggtgtatcaaaatggtatgtattatatgcgctctggtgcgggtgtggtgcaagattctattccaagtgcagagtatatggagacacaaaataaagtccgctcacagcttgatatgtttaatatagacaaggaataa

SEQ ID NO: 76363 - protein, 498 aa, Helicobacter hepaticus ATCC 51449
MFDFSNSRIASIAHKEILCDNLTPLAVLGSLNAKVLLESAYNETGKDRFSIVILNEAFRIYKECGAHFLYTQGQKIPLYEALADYTPLDSISLPPTHKAGFLESLALVRTLAPNPTDSIPAHLPLPLGGAGYIGYEFFAEIEEVTFKNPSLYNAPECAFIFGRDFLIFDHLFDRLHIVSVGYAHEREEHSTKQRIEHIAHSLATLVPQNGLDSMQKSDFECVSATSQQEYESMVEAIKKAIYAGNLLQCVPSQYMQIRSSLSPLQAYRNLRHQNPSPYMFYYNFDDFVILGASPEIMLRLKSKQGQSFFTLRPIAGTRPRGESVAQDLELETELLNDEKENAEHLMLLDLARNDAGKVSVGGGVKVIARNKIERYSRVMHIVSEVQGELDSKHFSKADAFKSVFPAGTLSGAPKIEAIKTIESLESHARGVYGGAIGYFTYDEDMDFAIAIRTAVYQNGMYYMRSGAGVVQDSIPSAEYMETQNKVRSQLDMFNIDKE

SEQ ID NO: 76364 - DNA, 1644 bp, Rhodopirellula baltica SH 1
  CDS (1)..(1644): transl_table=11
gtggaggcggactcgttcacgccttggaattctatcgctggccaacccggtttccaagcccgccgtcgcacttcacactatcgcaacgtcacaacgcgccgaaacttcatgcttggaaacctcatgcaccaaccgccgctttcgtcgttcgaatcgctggcccgtcggttcgacttcgttcccgtctaccgacgcttgctctctgatacgttgacccccgtcacggcgttcatgcacttggacgatggaggccccgctttcctgatcgaaagcgtgatcggaggcgaaaaggtgggacgtttcagcttcctgggctctcgaccactggcccgattcacggccaaaggcaacacggttcggcggacaaacatgtccaccggcgaggtcgttgaatcccagtgcgatgatccactgaacgcttttcgcgagagctttcaggaccgcactgccaccctggacgggttgcctcccttcatcggtggagcaatcgggtacgcgggttacgatgtggtgcgttatgtcgagaatttgccggacaccaccgaggacgaccgaaaccttcccgatctgaacttcgccttttatcacaccctgtgcgtgttcgatcacgtcgataaaaccatcaccgtggtctccctagccgattgccgcggcattgacgaggaaaccgattcaaccgccatttccgaggctcggcaagccgcggccgaagaagtcgaccaaacgatcaaacgcctgatgaccagtccacccgacctccgggtggacgagatcatcgaagaagaccaacgccagccgctgccggtcgagtccaacttcacccgtgagtcgttctgtgacgcggttcgccactgcgtcgagtacattcgtgccggcgatatcttccaagtcgtccccagccaacgactgaccgtcaaaagcgacgtcgacccgttcgcggtctaccgctcgctccgcgtcgtcaatccgtcgccgttcatgttctttgtccgcaacccggaatgcgtcctggtgggttgctcgccggagatcatgtgccgggtcaaagaccgtgaggtcacggtgcgtccacttgccggaacgcggccccgtggagcaactgaaaaagaagacaaagctctcgaaaaagacttgctggccgaccccaaggaacgtgccgaacacgtgatgctggtcgacctgggtcgcaacgacatcggccggatcgccgaattcggcaccgtggacttgaccgaaatcatggttatcgagcgttacagccacgtgatgcacatcagcagcgaggtgcgaggcaaactgcgggaaggcctcgacgcctttgacgctctgaaatcatgtttgcccgcggggactgtttcaggtgcccccaaagtccgggcgatgcaggtcatcgacgagatcgaaccgcatcgtcgcggcccctacggtggcgcggtgggctacatcgactaccgaggcaacatggacacctgcttggcccttcgcacgatcgtgcatcaaaacggggcgtatcacgtgcaagccggctgcggagtcgtcgccgacagcaaccccgactcggaatacgaagaaaccctcaacaaggcccgcgccctgatcgccgcgatcgagtggaccatcgcccgagaatcccgcaacgcctga

SEQ ID NO: 76365 - protein, 547 aa, Rhodopirellula baltica SH 1
MEADSFTPWNSIAGQPGFQARRRTSHYRNVTTRRNFMLGNLMHQPPLSSFESLARRFDFVPVYRRLLSDTLTPVTAFMHLDDGGPAFLIESVIGGEKVGRFSFLGSRPLARFTAKGNTVRRTNMSTGEVVESQCDDPLNAFRESFQDRTATLDGLPPFIGGAIGYAGYDVVRYVENLPDTTEDDRNLPDLNFAFYHTLCVFDHVDKTITVVSLADCRGIDEETDSTAISEARQAAAEEVDQTIKRLMTSPPDLRVDEIIEEDQRQPLPVESNFTRESFCDAVRHCVEYIRAGDIFQVVPSQRLTVKSDVDPFAVYRSLRVVNPSPFMFFVRNPECVLVGCSPEIMCRVKDREVTVRPLAGTRPRGATEKEDKALEKDLLADPKERAEHVMLVDLGRNDIGRIAEFGTVDLTEIMVIERYSHVMHISSEVRGKLREGLDAFDALKSCLPAGTVSGAPKVRAMQVIDEIEPHRRGPYGGAVGYIDYRGNMDTCLALRTIVHQNGAYHVQAGCGVVADSNPDSEYEETLNKARALIAAIEWTIARESRNA

SEQ ID NO: 76366 - DNA, 1518 bp, Prochlorococcus marinus subsp. marinus str. CCMP1375
  CDS (1)..(1518): transl_table=11
atgtcaatatctgatcgtgtttcttttttagatgctgcttctaggggtataaattttattcccttagttcaaacttggccagcagatcttgagactcctctttctacatggctaaaaattggccagaagaatccaccaggggttctgcttgaatcagttgaaggtggagatactttgggtaggtggagtgttgtagcgtccaatccattatgggtagtgactataaaaggagagaaaataactagaacttggagaaataacgagaaagaagaatttgttggaaatccatttgaacttcttagaaagtgtttagcaccatataaatcgcaattaattcctggcctgccatctttagggcagctttatggaatgtggggatatgagttgatcaaatggattgaacctaaagtaccagtgtattctcaaaatgatgaacaattccctgatggtatctggatgttcatggataaaattttaatttttgatcaagttaaaagactaatcacagcagtatcttatggagatttgacgtccgcggattcccctgaagacgcgtatgaaaaagccttccaaggaattaaggaatttgagagtcttatgcaagaaccactgccttctattaaatctttgaaatggaaccaaaagccttcaatacctgattccattgagagtaattggagcaagtctgaatttgaacatgctgttgaagaagcaaaagaatacatttctaaaggcgatatttttcaacttgttttgagtcaaaaatttacgacccaagttcctcactctcctttggaactctataggagtttgcgaatagtcaacccttctccatttatggctttttatgattttggtgattggcaacttattggatctagtcccgaggtcatggttcaggcgaagcctattgataaaaaagtttcagcaagtttacgcccaattgcaggtactcgcccgagaggaaaaactgctaatgaagattccgagttggaagctcaacttttagctgatcctaaagaaatagctgagcatgtcatgttagtagatctaggccgcaacgatttaggacgcgtctgcagagcaggttctgtatcagtaaatgaattaatgattatcgaaaaatattcgcatgtcatgcatattgttagtgagctgcagggataccttaaagatgatatggatgtatgggatttattgatggcagcattccctgcaggaacagtctcaggggcgccaaaaattagagctatgcaattaattcatgagttggaacctcatatcagaggaccttattctggcgtatatggttcgatggatttaaatggagcattaaatactgcaataacgattcgtacaatgcttgtgtctcatcattccaaggatctttttaatgtggaagttcaagccggtgcaggaattgtggctgattcaattccacaaaatgaatttcaagaaactttgaataaagccaaaggaatgcttatcgctttgggttgcctagaaccttctatttga

SEQ ID NO: 76367 - protein, 505 aa, Prochlorococcus marinus subsp. marinus str. CCMP1375
MSISDRVSFLDAASRGINFIPLVQTWPADLETPLSTWLKIGQKNPPGVLLESVEGGDTLGRWSVVASNPLWVVTIKGEKITRTWRNNEKEEFVGNPFELLRKCLAPYKSQLIPGLPSLGQLYGMWGYELIKWIEPKVPVYSQNDEQFPDGIWMFMDKILIFDQVKRLITAVSYGDLTSADSPEDAYEKAFQGIKEFESLMQEPLPSIKSLKWNQKPSIPDSIESNWSKSEFEHAVEEAKEYISKGDIFQLVLSQKFTTQVPHSPLELYRSLRIVNPSPFMAFYDFGDWQLIGSSPEVMVQAKPIDKKVSASLRPIAGTRPRGKTANEDSELEAQLLADPKEIAEHVMLVDLGRNDLGRVCRAGSVSVNELMIIEKYSHVMHIVSELQGYLKDDMDVWDLLMAAFPAGTVSGAPKIRAMQLIHELEPHIRGPYSGVYGSMDLNGALNTAITIRTMLVSHHSKDLFNVEVQAGAGIVADSIPQNEFQETLNKAKGMLIALGCLEPSI

SEQ ID NO: 76368 - DNA, 1566 bp, Candidatus Blochmannia floridanus
  CDS (1)..(1566): transl_table=11
atgaaatatcaaatcacacatgcagaaaactttagaattccagtactatatcattccaatccaaccatagtttttaatcagttatgtagaaatcgttattcaacattattattagaatccgcagaaatccaaaacaaaagcaatatagaaagtatgatgattattgatagtgcattaagaatcacagcttataatacaaatgtcataattcataccctgactagaaacggaattaatttactaccactattacaaaaaacactacctagtattgttaaaataaaaaaaatacatgctggaatgcaattaacatttccaatgatacaagataaaaccgatgaagatacacgtcttaaatcaatctctattttagattgtttacgatcattactaaaaatcataaaaacgcctaaagataatcctaaatctatattcttaggaggattattttcttatgatttaatatcatgttttgaacctgtaccaaaatttaccaatgatattatatgtccagactattgcttttacttatctgaaatattattaatttttgatcatcaaaaaaaacttgcagaattacatggcacattatttattcctgatattacagaaaaaaatagattacaaagtagaatgcatgaattaaaaaaacaaattaatcatcaaacccataatactattccacataaacctatacagaatatacaattaaattgtaatcaagatgatgaatcttataaaaaaactatccgtaaaatacaacacgccatacaaagaggagaaatattacaagccgtaccatcaagatgttttttcctaccatgtccttctccgttagcagcatatcatgaattaaaaactaataatcctagtccttacatgtttttcatgcaagatgaaatattcactttatttggagcatctccagaaagctcattgaaatatgatgctaaaactagaaaaattgaaattcatcccatagccggcactagagcacgcgcatactataatgatggctcattagatatggatacagacaacaaaatagaattagaaatgcgtttaaatcataaagaattatcagaacatttaatgttagtagatttagccagaaatgatttagctcgagtttgtacagccggtagtcgctacgtagctgacttattaaaagtagaccgttattcttatgttatgcatttagtctctaaagtgataggaaaattagatcctagtcttgatgctttacatgcttatcgagcttgtatgaacatgggcacattaacaggagcaccaaaaattaaggctatgcaaataatccataaagtggaaagtagacgtcgaaatacttacggtggagcaattggatatttaacaggattaggtaatttagatacatgtatcataattagatcagcttatgttataaatggaatagctactgtacaagcaggagctggcattgtaatagattctgaaccccaatctgaagctgacgaaagtagaaataaagcacgagccgtgttacgctccattgctatagctcataattgtaaggaaattttctaa

SEQ ID NO: 76369 - protein, 521 aa, Candidatus Blochmannia floridanus
MKYQITHAENFRIPVLYHSNPTIVFNQLCRNRYSTLLLESAEIQNKSNIESMMIIDSALRITAYNTNVIIHTLTRNGINLLPLLQKTLPSIVKIKKIHAGMQLTFPMIQDKTDEDTRLKSISILDCLRSLLKIIKTPKDNPKSIFLGGLFSYDLISCFEPVPKFTNDIICPDYCFYLSEILLIFDHQKKLAELHGTLFIPDITEKNRLQSRMHELKKQINHQTHNTIPHKPIQNIQLNCNQDDESYKKTIRKIQHAIQRGEILQAVPSRCFFLPCPSPLAAYHELKTNNPSPYMFFMQDEIFTLFGASPESSLKYDAKTRKIEIHPIAGTRARAYYNDGSLDMDTDNKIELEMRLNHKELSEHLMLVDLARNDLARVCTAGSRYVADLLKVDRYSYVMHLVSKVIGKLDPSLDALHAYRACMNMGTLTGAPKIKAMQIIHKVESRRRNTYGGAIGYLTGLGNLDTCIIIRSAYVINGIATVQAGAGIVIDSEPQSEADESRNKARAVLRSIAIAHNCKEIF

SEQ ID NO: 76370 - DNA, 1521 bp, Bordetella pertussis Tohama I
  CDS (1)..(1521): transl_table=11
atgactgaacttgaattcaaagcgctggccgcccaaggctacaaccgcattcccctggtcgcggaaacctacgccgacctcgacacgccgctggcgatctacctcaagctggcccacagcggcccgcaaggcggccgcatgagctgcctgatggagtcggtggtgggcggcgagcgctttggccgctactcgttcatcggcctgccggcgcgcaccgtcatccgcgccagcggctcgaccaccgaagtgctgcaggacggccacgtcgccgaaacccacgaaggcgacccgctggcgttcatcgagtcgtaccaggcccgcttcaaggtggcgctgcgccccggcatgccgcgcttttgcggcggcctggccgggtacttcggctacgacaccgtgcgctacatcgaacagcgcctgggcccggcggtcaagccgtttcccgacggcatggaagaaggcacgcccgacatcatgctgctgcacgtcgacgaactggtcatcgtcgacaacctggccggccgcacctacctgatggtgtatgccgacccggcccagcccgaagcctacagccacgcccagcagcgcctgctggagttgcgcgcgcggctgcgccgcccggtcgagatcccgtacagctacgccagcatgcagaccgaagagcggcgcgacttccagaaggccgactacctggccgcggtggcgcgcgccaaggaatacatcgccgccggcgacgtcatgcaggtgcaggtcggccaggtcatcgccaagccgtttcgcgacgcgccgctgtcgctgtaccgcgcgctgcgttcgctgaacccctcgccctatatgtatttctggaacttcggcgatttccaggtggtcggcgcctcgccggaaatcctggtgcgccaggagcagatcgacgaccagggcgaaacccgctcgcagatcaccatccggccgctggccggcacccgcaagcgcggcggcacgcccgaagaagacctggcgctggccgccgaactgcaggccgaccccaaggagcgcgccgaacacgtgatgctgatcgacctggcgcgcaacgacgtgggccgggtggcggaaatcggctcggtgcgcgtcagcgacaccatggtcatcgagcgctactcgcatgtcatgcacctggtctccaacgtggcgggcaagctgctgcccggcatgagcagcatggacgtgctgcgcgccgccttcccggccggcacgctgaccggcgcccccaaggtacgggccatggaaatcatcgacgaactcgagccggtgcgccgcggcatctacggcggcgccgccggctacctgagctacggcggcgagatggacgtggccatcgcgatccgcaccggggtgatcaagaacggcacgctgtacgtgcaggcggccgcgggcatcgtggccgactccagccccgaagccgaatgggccgagaccgaggccaaggcgcgcgccgtgctgcgcgcggccgagcaggtccagcacggcctggacgaacccatctga

SEQ ID NO: 76371 - protein, 506 aa, Bordetella pertussis Tohama I
MTELEFKALAAQGYNRIPLVAETYADLDTPLAIYLKLAHSGPQGGRMSCLMESVVGGERFGRYSFIGLPARTVIRASGSTTEVLQDGHVAETHEGDPLAFIESYQARFKVALRPGMPRFCGGLAGYFGYDTVRYIEQRLGPAVKPFPDGMEEGTPDIMLLHVDELVIVDNLAGRTYLMVYADPAQPEAYSHAQQRLLELRARLRRPVEIPYSYASMQTEERRDFQKADYLAAVARAKEYIAAGDVMQVQVGQVIAKPFRDAPLSLYRALRSLNPSPYMYFWNFGDFQVVGASPEILVRQEQIDDQGETRSQITIRPLAGTRKRGGTPEEDLALAAELQADPKERAEHVMLIDLARNDVGRVAEIGSVRVSDTMVIERYSHVMHLVSNVAGKLLPGMSSMDVLRAAFPAGTLTGAPKVRAMEIIDELEPVRRGIYGGAAGYLSYGGEMDVAIAIRTGVIKNGTLYVQAAAGIVADSSPEAEWAETEAKARAVLRAAEQVQHGLDEPI

SEQ ID NO: 76372 - DNA, 1569 bp, Bordetella parapertussis 12822
  CDS (1)..(1569): transl_table=11
ttgctgcatgcccggtccgtaccagaaaaacgccgtacgagacccgacatgactgaacttgaattcaaagcgctggccgcccaaggctacaaccgcattcccctggtcgcggaaacctacgccgacctcgacacgccgctggcgatctacctcaagctggcccacagcggcccgcaaggcggccgcatgagctgcctgatggagtcggtggtgggcggcgagcgctttggccgctactcgttcatcggcctgccggcgcgcaccgtcatccgcgccagcggctcgaccaccgaagtgctgcaggacggccacgtcgccgaaacccacgaaggcgacccgctggcgttcatcgagtcgtaccaggcccgcttcaaggtggcgctgcgccccggcatgccgcgcttttgcggcggcctggccgggtacttcggttacgacaccgtgcgccacatcgaacagcgcctgggcccggcggtcaagccgtttcccgacggcatggaagaaggcacgcccgacatcatgctgctgcacgtcgacgaactggtcatcgtcgacaacctggccggccgcacctacctgatggtgtatgccgacccggcccagcccgaagcctacagccgcgcccagcagcgcctgctggagttgcgcgcgcggctgcgccgcccggtcgagatcccgtacagccacgccagcatgcagaccgaagagcggcgcgacttccagaaggccgactacctggccgcggtggcgcgcgccaaggaatacatcgccgccggcgacgtcatgcaggtgcaggtcggccaggtcatcgccaagccgtttcgcgacgcgccgctgtcgctgtaccgcgcgctgcgttcgctgaacccctcgccctatatgtatttctggaacttcggcgatttccaggtggtcggcgcctcgccggaaatcctggtgcgccaggagcagatcgacgaccagggcgaaacccgctcgcagatcaccatccggccgctggccggcacccgcaagcgcggcggcacgccggaagaagacctggcgctggccgccgaactgcaggccgaccccaaggagcgcgccgaacacgtgatgctgatcgacctggcgcgcaacgacgtaggccgggtggcggaaatcggctcggtgcgcgtcagcgacaccatggtcatcgagcgctactcgcatgtcatgcacctggtctccaacgtggcaggcaagctgctgcccggcatgagcagcatggatgtgctgcgcgccgccttcccggccggcacgctgaccggcgcccccaaggtacgggccatggaaatcatcgacgaactcgaaccggtgcgccgcggcatctacggcggcgccgccggctacctgagctacggcggcgaaatggacgtggccatcgcgatccgcaccggggtgatcaagaacggcgcgctgtacgtgcaggccgccgcgggtatcgtggccgactccagccccgaagccgaatgggccgagaccgaggccaaggcgcgcgccgtgctgcgcgcggccgagcaggtccagcacggcctggacgaacccatctga

SEQ ID NO: 76373 - protein, 522 aa, Bordetella parapertussis 12822
MLHARSVPEKRRTRPDMTELEFKALAAQGYNRIPLVAETYADLDTPLAIYLKLAHSGPQGGRMSCLMESVVGGERFGRYSFIGLPARTVIRASGSTTEVLQDGHVAETHEGDPLAFIESYQARFKVALRPGMPRFCGGLAGYFGYDTVRHIEQRLGPAVKPFPDGMEEGTPDIMLLHVDELVIVDNLAGRTYLMVYADPAQPEAYSRAQQRLLELRARLRRPVEIPYSHASMQTEERRDFQKADYLAAVARAKEYIAAGDVMQVQVGQVIAKPFRDAPLSLYRALRSLNPSPYMYFWNFGDFQVVGASPEILVRQEQIDDQGETRSQITIRPLAGTRKRGGTPEEDLALAAELQADPKERAEHVMLIDLARNDVGRVAEIGSVRVSDTMVIERYSHVMHLVSNVAGKLLPGMSSMDVLRAAFPAGTLTGAPKVRAMEIIDELEPVRRGIYGGAAGYLSYGGEMDVAIAIRTGVIKNGALYVQAAAGIVADSSPEAEWAETEAKARAVLRAAEQVQHGLDEPI

SEQ ID NO: 76374 - DNA, 1521 bp, Prochlorococcus marinus subsp. pastoris str. CCMP1986
  CDS (1)..(1521): transl_table=11
atgatcagttctcaaaaagatagttttttaaaggcttataaagaaggtaaaaattttatacctattttcaaaacatggcctgctgatttagagactccattatctacatggcttaaattatcaaataaagattcacatggggtcttttttgaatccgtcgaaggtggggaaaatttaggtagatggagtatcgttgctactgatcctctttgggaagcagtttgtcttggagaagaaactattaagacttggaataatggaaatagtgaaaaatataaaggcgatccttttgatttattaagaacttggaccgaagaatataagtcatataatatcgataatttaccttatgttggtcagttatatggttcttggggttatgaattaatcaatcgcatagagcctaatgtgcctattaatcctctagaagataataatataccctatggatcttggatgttttttgatcaattagtaatatttgatcaaatgaaaagatgtatcactgtagttgtatatgctgacacttccagaacatcagaaactcatgttcaagaaatttatcaagattcgattttaagaattaatagaatcaaagatttaatgagtgctccaattaatgaaagacatgctcttaactgggatgaaaaaaaagatttgaatattgcaatttcaagtaattgggaaagaaaagagtttgaagaagctgttgtttctgcaaaggaatatataagaaaaggagatatttttcaaattgttattagccaaaaatttcaatcgaaagttaaaagtgatccctttaatctatatagaagcttaaggattgttaatccttcaccttatatggctttctttgattttggatcatggtacttaataggttctagtcctgaagtaatggtcaaagcagagaagaataaaactaatcaaattgttgcaagcttaagaccgatagctggtacaaggccaagaggtcaagatgctgaacaagatttaaaatttgagaaagatttattaaaagatcctaaagagatatcagaacatgtaatgcttattgatctgggaagaaatgatttaggaagagtatgtgaaacaggcacagtagaggttaaagatttgatgataattgaaaaatattcacacgtaatgcacatagttagtgaagttgaaggtatcttaaaaagtaatactggggtatgggatttacttaaagcatgttttcctgctggtacagtaactggggctccaaaaattagagctatgcaattaattaaagactttgagaaagatgctagaggtccttatgctggagtttatgggtctatagatataaatggtgcactaaatactgcgataacaataagaacaatgatagttcagccttcaaatgatggggaatatatagtttctgttcaggctggtgctgggatagttgcagattcctctcctgcgaatgaatatcaagagactattaataaagccaaaggcatattaatggcattggcttgtttggatagataa

SEQ ID NO: 76375 - protein, 506 aa, Prochlorococcus marinus subsp. pastoris str. CCMP1986
MISSQKDSFLKAYKEGKNFIPIFKTWPADLETPLSTWLKLSNKDSHGVFFESVEGGENLGRWSIVATDPLWEAVCLGEETIKTWNNGNSEKYKGDPFDLLRTWTEEYKSYNIDNLPYVGQLYGSWGYELINRIEPNVPINPLEDNNIPYGSWMFFDQLVIFDQMKRCITVVVYADTSRTSETHVQEIYQDSILRINRIKDLMSAPINERHALNWDEKKDLNIAISSNWERKEFEEAVVSAKEYIRKGDIFQIVISQKFQSKVKSDPFNLYRSLRIVNPSPYMAFFDFGSWYLIGSSPEVMVKAEKNKTNQIVASLRPIAGTRPRGQDAEQDLKFEKDLLKDPKEISEHVMLIDLGRNDLGRVCETGTVEVKDLMIIEKYSHVMHIVSEVEGILKSNTGVWDLLKACFPAGTVTGAPKIRAMQLIKDFEKDARGPYAGVYGSIDINGALNTAITIRTMIVQPSNDGEYIVSVQAGAGIVADSSPANEYQETINKAKGILMALACLDR

SEQ ID NO: 76376 - DNA, 1521 bp, Prochlorococcus marinus str. MIT 9313
  CDS (1)..(1521): transl_table=11
atgctcagctctgatcgtgaccatttctttgagatggctgctagtggtgccaatttcattcctttggcccgcagttggccagcggatctggagactcctctaacaacttggttaaaagttggggcagatcatccccctggggtcttactcgaatcggtcgaagggggtgaaactcttgggcgctggagtgtggtggcctgcaatccactttggacagccacctgccgagggaaacacctcacacgtcgttggcgagaaggacgaaccgatgaagccatcggcaacccttttgaaggcctcaggcaatggcttgctccttatcgcaccgcaaccctgccaggcctacccccccttggccagctctatggaatgtggggttttgaactgatcaagtgggttgaacccacagtgcccgttcacttaagggacaacaacgatccgcctgatggcatctggatgctgatggacagcatcttgatcattgatcaagttaaacgcctcatcactgccgtggcatacgcagacctgagtgtcgagcaaacggctaacgaagcttgggacaaggcacaagcacgcattcaagacctagaaaagtgcatggcggaaccacttgcgccgattcagccactgcaatggcaaccaaaaagtcaatctccaccttccaccatcagtaactacagccaacaaggctttgaggaggcagttcaaaccgccaagcaacacatcgccgcaggtgatgtgttccagcttgtaatcagtcaacggctggagaccagagttcctcaacagccacttgagctctacagaagtctgcggatggtgaatccttctccatatatggctttctttgacttcggcgactggcagctgattggctcaagcccggaggtcatggtcaaggcggagcctgtcgccgatggcattaaggccagccttcggcctattgccggcacgcgtcagcgtggcggcaacgaacttgaggaccacaatcttgaagcagagttgatggcagatcccaaggaacgtgccgagcatgtgatgttggttgatcttggccgcaatgaccttggacgcgtttgcaggccgggcagtgtgatggtgaaagagctgatggtgatcgagaaatattcccacgtcatgcacatcgtcagtgcagtggaaggtgtgcttgccaaaggcaaggatgtttgggatctactcatggcctcattcccagcaggcacggtcagtggcgccccaaaaatcagagccatgcagctcattcatgagctcgaacccgactcaagaggaccttattcaggtgtgtatgggtccatcgatctcaacggtgctctgaatacagctataaccattcgcacaatgattgtgcggccccatcctgaaggcggctggcaagtcaaggttcaagcaggcgctggtgtggtggccgattccatccccaccaaggaatacgaagagaccctcaacaaggcaaggggaatgctcacagccctggcctgcctcgagtcccacaagtcatga

SEQ ID NO: 76377 - protein, 506 aa, Prochlorococcus marinus str. MIT 9313
MLSSDRDHFFEMAASGANFIPLARSWPADLETPLTTWLKVGADHPPGVLLESVEGGETLGRWSVVACNPLWTATCRGKHLTRRWREGRTDEAIGNPFEGLRQWLAPYRTATLPGLPPLGQLYGMWGFELIKWVEPTVPVHLRDNNDPPDGIWMLMDSILIIDQVKRLITAVAYADLSVEQTANEAWDKAQARIQDLEKCMAEPLAPIQPLQWQPKSQSPPSTISNYSQQGFEEAVQTAKQHIAAGDVFQLVISQRLETRVPQQPLELYRSLRMVNPSPYMAFFDFGDWQLIGSSPEVMVKAEPVADGIKASLRPIAGTRQRGGNELEDHNLEAELMADPKERAEHVMLVDLGRNDLGRVCRPGSVMVKELMVIEKYSHVMHIVSAVEGVLAKGKDVWDLLMASFPAGTVSGAPKIRAMQLIHELEPDSRGPYSGVYGSIDLNGALNTAITIRTMIVRPHPEGGWQVKVQAGAGVVADSIPTKEYEETLNKARGMLTALACLESHKS

SEQ ID NO: 76378 - DNA, 1521 bp, Synechococcus sp. WH 8102
  CDS (1)..(1521): transl_table=11
atgctcagtcctgatcgcgtcgcctttcacgaggccgcagccaacggtgccaatctgattccgctggcccagagctggccggcggatcttgaaacccctctgacggcctggatcaaggtcggggccgatcatgcccctggagtgttgttggaatcggttgagggtggtgaaaccctcggcaggtggagtgtgatcgcctgcgatcccctgtggaccgcatcagcccgcaacgattgcctgcaacgacgttggcgtgacggccgcgaggaaaccttccgtggcaatcccttcgacagtctcaggcgttgtctggagccttaccgctgcatcagcctgcccggactgccaccgctagggcagctctacggtgtctggggctatgagctgattcagtggattgaacccagtgttccggtgcatccgcggcaggagtcggatccaccggacggcatctggatgctgatggactcgatcctgattttcgatcaggtgaagcgacagatcacggccgtggccttcgccgacctgagccagggtcaatcggaagacgctgcctgggacggggcgatggcgcggattgcagcgctccggcggcgcatggaagccccgctccctctggtggatccccttccctgggatgcgcaggccaagcagcttcccgatgtgaagagcaactgcagccaggagcgcttcgaggcggcggtcgacaccgcccgggaacacatcgccgccggtgacgtcttccagctggtgatcagccaacgcctggagacggttgttccccagcagccgctggagctctatcgcagcctgcggatggtcaatccatcgccctacatggccttcttcgacttcggcgactggcagttgatcggatcgagtccggaggtgatggtgcaggccgaccctgcgccggagggcatccgagccagcctcagacccattgccggcacccgtccgcgcggcacgacagcccatgaggatcgcgacctggagctggatctgctggccgaccccaaggaacgtgccgagcacgtgatgctggtggatctcggccgcaatgacctcggcagggtctgtcagcccggcagtgtggcggtgaaggatctgatggtgatcgagcggtactcgcacgtgatgcacatcgtcagccaggtggaggggcgtctggccccccagcacgacgtgtgggacctgctgatggcatccttccctgccggaaccgtgagtggagcccccaagatccgtgccatgcagctgatccatgagctggaacccgatgcccgaggcccctattccggtgtgtatggatcggtggatctggcgggagccctgaacaccgccatcacgatccgcaccatggtggttcaaccggacccgtccggtggttgcagggtgaaggtgcaggcgggtgcaggcgtggtggcggattcgaagcccacggcggaataccaggagaccctcaacaaggcccgcgggatgctcacggccctggcctgcctcaacccggagcggccatga

SEQ ID NO: 76379 - protein, 506 aa, Synechococcus sp. WH 8102
MLSPDRVAFHEAAANGANLIPLAQSWPADLETPLTAWIKVGADHAPGVLLESVEGGETLGRWSVIACDPLWTASARNDCLQRRWRDGREETFRGNPFDSLRRCLEPYRCISLPGLPPLGQLYGVWGYELIQWIEPSVPVHPRQESDPPDGIWMLMDSILIFDQVKRQITAVAFADLSQGQSEDAAWDGAMARIAALRRRMEAPLPLVDPLPWDAQAKQLPDVKSNCSQERFEAAVDTAREHIAAGDVFQLVISQRLETVVPQQPLELYRSLRMVNPSPYMAFFDFGDWQLIGSSPEVMVQADPAPEGIRASLRPIAGTRPRGTTAHEDRDLELDLLADPKERAEHVMLVDLGRNDLGRVCQPGSVAVKDLMVIERYSHVMHIVSQVEGRLAPQHDVWDLLMASFPAGTVSGAPKIRAMQLIHELEPDARGPYSGVYGSVDLAGALNTAITIRTMVVQPDPSGGCRVKVQAGAGVVADSKPTAEYQETLNKARGMLTALACLNPERP

SEQ ID NO: 76380 - DNA, 1467 bp, Chromobacterium violaceum ATCC 12472
  CDS (1)..(1467): transl_table=11
atgcaagcgcaagagtttgaccaactggccgccgccggctacaaccgcatccccgtcacccaggaactgctggccgatctggacagcccgctgtccatctatctgaagctggccaaccagccgtacagctacctgctggaatcggtggtgggcggcgagcgccacggccgctactccatcatcggcctgccggccgacacccggctgcgcgtcaacggccagcgggtgcaggtggaatgcggcgacaaggtgatagaacgccacgacggcgacccgctggccttcatcgaggcgttccagcaccgtttccgtatccccgagctgcccggcctgccgcgctactccggcggcctggtcggctatttcggctacgacaccatacgctacattgaacgccgcctcgccgacgttcagaaacccgacccggtgggcacaccggacatcctgctgatgctgtcggaagagatcgccgtggtcgacaacctgtccggcaagctctacctggtggtctacgccgaccccgaggtgcccaacgcgctgcagaaagcgaaagcgcggctggcccagcttcgcgccaagctgcgcgagccgctggccatcccgctgtcgctgccccagccgcacgagggcgaggcggtgtcggaatacggcgaggaggcgttcaagcaggcggtggcgtcctgtcagcgctacatccacgacggcgacatcatgcaggtggtgctggcccagcgcatgcagcagccttaccacggctcgccgatcgcgctgtaccgcgcgctgcgcaacctcaacccgtcgccgtacatgttcttctaccacttcgacgacttccacgtggtgggcgcttcgccggaaatcctggtgcggcgcgaaggcgaaaccgtgaccgtgcgtccgatcgccggcacccgcccgcgcggccacacccgcgagcaggatgaggcgctggcggccgagctgctggccgaccccaaggaaatcgccgaacacgtgatgctgatggacctgggccgcaacgacgtcggccgcgtcgccgacatcggcacggtgaagatcaccgacaacatggcgatcgagcgctactcgcacgtgatgcacatcgtgtccaacgtggaaggccaggtggaccgcaagatcagcaatatcgacgtgatcaaggccaccttccccgccggcacgctgtccggcgcgcccaaggtgcgggcgatgcagatcatcgacgagttcgagccgaccaagcgcggcgtctacggcggcgcggtgggttacctcggcttcaacggcgacatggacctcgccatcgccatccgcaccgcggtgctgaagaacggcatgctctacgtgcagtccggcgccggcgtcgtcgccgactcggtgccgcaatcggaatggcaggaaacgcagaacaaggcgcgcgcggtgctgcgcgccgcgcagatggtgcgggacggcctggacgcctga

SEQ ID NO: 76381 - protein, 488 aa, Chromobacterium violaceum ATCC 12472
MQAQEFDQLAAAGYNRIPVTQELLADLDSPLSIYLKLANQPYSYLLESVVGGERHGRYSIIGLPADTRLRVNGQRVQVECGDKVIERHDGDPLAFIEAFQHRFRIPELPGLPRYSGGLVGYFGYDTIRYIERRLADVQKPDPVGTPDILLMLSEEIAVVDNLSGKLYLVVYADPEVPNALQKAKARLAQLRAKLREPLAIPLSLPQPHEGEAVSEYGEEAFKQAVASCQRYIHDGDIMQVVLAQRMQQPYHGSPIALYRALRNLNPSPYMFFYHFDDFHVVGASPEILVRREGETVTVRPIAGTRPRGHTREQDEALAAELLADPKEIAEHVMLMDLGRNDVGRVADIGTVKITDNMAIERYSHVMHIVSNVEGQVDRKISNIDVIKATFPAGTLSGAPKVRAMQIIDEFEPTKRGVYGGAVGYLGFNGDMDLAIAIRTAVLKNGMLYVQSGAGVVADSVPQSEWQETQNKARAVLRAAQMVRDGLDA

SEQ ID NO: 76382 - DNA, 1419 bp, Wolinella succinogenes DSM 1740
  CDS (1)..(1419): transl_table=11
atggagatttttcacgaaagactcttggtcgatcagctcactcccgtctctctttatgcaaaattgcgtgaattttttgcgggagagaccacttttttgttcgagagcgccgctagcagtagcgagagtgggactcacagctttatcatcatcggagccaaagaagaggtaatctctcaagggggcgagagtttttatatcgattctaaagggaatcgccaaaacatcggcgctaatcccttcccttttctcaaagagtactacgcgagattggaccagagtgcctatcgggcgtggggtgaagagaatggcgtgggatttgtggatggatttatcggctatatcggttatgatatcgtcaaattttttgagccctgcctcaaagaggcgatggatgcgctagaggatcagactaagattcccgatatgagattgattcgccctcgatggatcttctgctactcccacaaaaacgctcatctgagtatgctcacccaagatccccaagaggcaaaacgctttgaagcgctcaaaagcacacttcactccaaggagccctttagagagctgcttccgctcaaaaatgctaaatctggctctttctatcatgataaagagcgattctttgggatggtggatgagtcgttggagcgtattcgatcaggagatgtgtttcagattctcatctctaaccgttatatccaagaggcagagatcgatccttttagtttctatcgaatcttgcgcggcaaaaacccctctccctatctctttttactcgaatttccagattttgccatcgcgggaagctcgcctgaggtgatggtgcgtctgcaggagaattcgattcttttgcgccctattgcaggaacgagaaaacggggtaaaaatcgcctgcgcgatagagagctggagctggagctcaaaagtgacactaaagagtgtgctgaacacgtgatgctcattgacttagggcgaaatgatgtgggtcgagtcgccaaatcaggaagcgtgaaggtgggagaggtgatgagaatcgagcgctattcccatgtcatgcatatggtgagcgatgtggagggggaactaaaagagggcaaagatatgtttgacctctttgccgcaaccttcacggcgggcaccatgacgggagcccccaaaatcaaggcaatggagatcattgcagagctagagggactcaagagaggattttatagcggtgcggtggggtatttcggctttagcggagacatggatagcgcgattacgattcgcactgccctgatcaagcctgataagatattcctccaagcaggggctggaatcgtcgctgacagtcaaaaagagttggagcaccttgaggtgaccaacaagctaggcgccctcactagcaccctccaagagctcgctaagctctaa

SEQ ID NO: 76383 - protein, 472 aa, Wolinella succinogenes DSM 1740
MEIFHERLLVDQLTPVSLYAKLREFFAGETTFLFESAASSSESGTHSFIIIGAKEEVISQGGESFYIDSKGNRQNIGANPFPFLKEYYARLDQSAYRAWGEENGVGFVDGFIGYIGYDIVKFFEPCLKEAMDALEDQTKIPDMRLIRPRWIFCYSHKNAHLSMLTQDPQEAKRFEALKSTLHSKEPFRELLPLKNAKSGSFYHDKERFFGMVDESLERIRSGDVFQILISNRYIQEAEIDPFSFYRILRGKNPSPYLFLLEFPDFAIAGSSPEVMVRLQENSILLRPIAGTRKRGKNRLRDRELELELKSDTKECAEHVMLIDLGRNDVGRVAKSGSVKVGEVMRIERYSHVMHMVSDVEGELKEGKDMFDLFAATFTAGTMTGAPKIKAMEIIAELEGLKRGFYSGAVGYFGFSGDMDSAITIRTALIKPDKIFLQAGAGIVADSQKELEHLEVTNKLGALTSTLQELAKL

SEQ ID NO: 76384 - DNA, 1359 bp, Gloeobacter violaceus PCC 7421
  CDS (1)..(1359): transl_table=11
atgtcgatggttgcccccacctggcactggctgtaccttcccctcgaaggacgcaccggctcgtgcctgtttgagcgcctgttcggcgaggaggcggtggcggtcctgctcgaaagcccccaactctcgccgcgtaccgcccgctactcgatcttggctgcctgtccgcggcgcgtgcttgctcccgccgtcggtgagattctgcccgcgctgcgcgcttggcttgccgccgcgcggcggcagctgccgccgcccgagtggagggggctgccctttcgcggcgggcttgtgggctggttcggctacgacctggcctgggaaatcgaaaggctgccgtggctgcggaacgaccccttgccttttccgacggcctggtggtttgagccggccgtctttgccgtcgccgatcatcgcgaggataagcttttgctcgccgtcgacaatcggtcgggactcggtcccgaccggggaagcctggcgtactggtgcaagcggctcgacagaccgattttgaccgacgaggagatcaacagtggtgcgttgccgcgcctgacgtcgcgcgacaggtttttggaggctgtccatcaggtcaaggagcacattgcggccggggatatctttcagtgcaacctctcgcttcgcttcgaactcgactgggaaggcaatggctggcggctctaccgacggctggtcgggctcaatccttcgcctttcgcctgttactggcgcacgcccttcggcgaaatcgtcagctgctcgcccgagcggcttttagaagtgcgcggcgaagcgctgagcacccgcccgatcgcgggaacgcgcccgcgcgggttcaccgctgccgccgatcaacgcctggaaagcgaactgttaatcagtcccaaggaacgcgccgagcacatcatgctggtcgatctcgaacgcaacgatctcgggcgggtctcacaaccgggcagcgtgcaggtggacgaactgatggtcatcgagcgctactcccacgtcatgcacattgtctccaacgtcgtcggccgcctgcagcccggatgcgacgccctggacgcggtgcgcgccgtctatcccggcggcacgatcaccggctgtccgaaggtgcgctgcatggaaattatcgagaggctcgaaccggtgcgccgctcgcttttttacggctcggcgggttacctcgactgcaccggtgacctggatctcaacattttgatccgcacgctgctcaagtccggctcccggatttgggggcaagtcggggcgggcatcgtcgccgattctgatccccagggcgaatacctcgaatcgctcgccaaggccaaagccctctggaaagccctgggagacagtcgataa

SEQ ID NO: 76385 - protein, 452 aa, Gloeobacter violaceus PCC 7421
MSMVAPTWHWLYLPLEGRTGSCLFERLFGEEAVAVLLESPQLSPRTARYSILAACPRRVLAPAVGEILPALRAWLAAARRQLPPPEWRGLPFRGGLVGWFGYDLAWEIERLPWLRNDPLPFPTAWWFEPAVFAVADHREDKLLLAVDNRSGLGPDRGSLAYWCKRLDRPILTDEEINSGALPRLTSRDRFLEAVHQVKEHIAAGDIFQCNLSLRFELDWEGNGWRLYRRLVGLNPSPFACYWRTPFGEIVSCSPERLLEVRGEALSTRPIAGTRPRGFTAAADQRLESELLISPKERAEHIMLVDLERNDLGRVSQPGSVQVDELMVIERYSHVMHIVSNVVGRLQPGCDALDAVRAVYPGGTITGCPKVRCMEIIERLEPVRRSLFYGSAGYLDCTGDLDLNILIRTLLKSGSRIWGQVGAGIVADSDPQGEYLESLAKAKALWKALGDSR

SEQ ID NO: 76386 - DNA, 1527 bp, Gloeobacter violaceus PCC 7421
  CDS (1)..(1527): transl_table=11
atggttgcgccggactttgagcgcttcgagacactggcaaaagacggcaattttattcctgtgtaccgcgagattctggcggatctcgaaacgccggtctctgcctggtatcgagtctgtgacggggcgagggaaagttttttgctcgaatcggtcgaggggggcgagaggctgggacgctacagcttcctggggtgcgagccgctctggaccctcgccgcccggggcgatacgtgcgagcaggtgtttcgcgacggtgggcggctcacccacacgggcgacccgttcgcggtgctcgatcgctgtttggaaccctaccagccggtgcacctgccggagttgccgccgggaatcggtgggctttttggttactggggctatgaactgattcgctggatcgaaccgacggtgcccgtgtatagcgatcccgacggcctgcccgacggcttctggatgcaggtcgattcgctgctcatcttcgatcaaatcaagcgcaagatctgggtgatcgcctacgcggatctgcgcgagggcgacacggcgagcgcctaccggctcgccggccaaaaagtggacgcgctggtggaacgattggcccggcccgccgccaaggccgagcccctgggcctggagtggacgccccacagggtccaagcccaaagtaccttcagccgcgagcagtactgtggggccgtcgagcgcgcccgcgaatatatccgggctggggatatctttcaggtggtactcgcccagcgcttcagcacgccctttgcgggcgagagctttgatctctaccggatgctgagggcgattaacccttcgccctacatggcttactaccagttcggcgattttcaactgatcggttcgagcccggaggtgatggtgcgtctggatcggcgcgacgggggagccctcgccaccgtccggccgatcgcgggcacccggcggcgcggccagagcgaagcggaggaccgctggctcgaaaaagatctgctcgccgatcccaaggaggtggccgagcacgtcatgctcgtggatctgggccgcaacgacctgggccgggtgtgcaaaccgggcagcgtgcgggtggacgaactgctcaccgtcgagcgctactcccacgtcatgcacatcgtctccaacgtcaccggcgaactagcctccggccgaggggcctgggatctgctcagggccacttttccggccggtacggtgagtggcgcccccaaaatccgggcgatggagattatccacgcactggaaccgtttcggcgcggaccctacgcgggcgcctacggctactacagcttcgacggccagctcaacaccgccatcaccatccgcacgctggtcgtccacggggggctcgccaacatccaggccggggcggggctggtggccgactcggtacccgagaccgagtacgaggaaacgctcaacaaagcccgcggcatgctcgaaacgatcgcccgcctcgcccggagcgggggcgcgtccgctaacgtagaagggcaagtgcaatag

SEQ ID NO: 76387 - protein, 508 aa, Gloeobacter violaceus PCC 7421
MVAPDFERFETLAKDGNFIPVYREILADLETPVSAWYRVCDGARESFLLESVEGGERLGRYSFLGCEPLWTLAARGDTCEQVFRDGGRLTHTGDPFAVLDRCLEPYQPVHLPELPPGIGGLFGYWGYELIRWIEPTVPVYSDPDGLPDGFWMQVDSLLIFDQIKRKIWVIAYADLREGDTASAYRLAGQKVDALVERLARPAAKAEPLGLEWTPHRVQAQSTFSREQYCGAVERAREYIRAGDIFQVVLAQRFSTPFAGESFDLYRMLRAINPSPYMAYYQFGDFQLIGSSPEVMVRLDRRDGGALATVRPIAGTRRRGQSEAEDRWLEKDLLADPKEVAEHVMLVDLGRNDLGRVCKPGSVRVDELLTVERYSHVMHIVSNVTGELASGRGAWDLLRATFPAGTVSGAPKIRAMEIIHALEPFRRGPYAGAYGYYSFDGQLNTAITIRTLVVHGGLANIQAGAGLVADSVPETEYEETLNKARGMLETIARLARSGGASANVEGQVQ

SEQ ID NO: 76388 - DNA, 1575 bp, Photorhabdus luminescens subsp. laumondii TTO1
  CDS (1)..(1575): transl_table=11
atgacggataaacaaccaaaaatcacagtaatcgagcaggaagctgcttaccaacccgatcctacgcagctattcaaccagctctgcggtgagcgaccagcaactttattgctagaatctgcggaaattaacagcaaaaaaaacttaaaaagtctgctaattatcgatagtgccttgcgcatcagtgccaacggcaatcaggttacttttgacgcgttaacagaaaatgggcgaaatttattacccattttggccaacaaattttccagcgacgttcaatctgaaataacacacaatgctcttcaagtgattttcccacccatcaatcacaatatagatgaagataatcgtctgaaagcggtatccgtatttgatgcactgcgtgccctgctctctctggcggaagagccgtcaccatataattcgtcaagcgcagaagcgatattcgttggcggccttttttcctacgatctggtggccggatttgagccgttaccggcagtaaaaaccgttcaacgctgcccagatttctgtttttatctcgcagaaacgttattggtgatcaaccaccagaataaaaatgcacgcttgcaaatctctcttttcagtgattctcaagcagaagagcaacgccttaaacaacgattgaaaacattagtggcactcattaccgagcccattgagccagtacaacaaatctctctgccaaccatgaaagtttcatacaatcgggatgacaagagctatgcagaaatggtggcacagttgcaacaatacatccgccaaggggatatttttcaagtagtgccatcaagacgcttctttttaccctgcccggcaccacttcatgcttatcaaaaacttaagtaccacaatccaagtccctacatgtttttcatgcaggacaaagatttctgtctgtttggcgcgtctcctgaaagcgcgcttaaatatgatgcatccaatcgccaaattgaaatctacccaatcgccggcacccgcccccgtgggcgcaatgcggccggcgagctggatgcggatcttgatagccggaccgaactggaaatgcgaacagatcataaggagctagctgagcacttaatgttagttgatttggcgcgtaatgacctggcccgcatttgtgaaccgggcagtcgctatgtcgcggatctgacaaaagttgatcgctactcttttgttatgcatctggtctcccgcgtcgtggggacattacgccatgatttagacacctttcatgcctatcaagcttgtatgaatatgggtacccttaccggcgcaccgaaagtacgcgcaatgcaacttatcgctcactatgaaagtgaacgccgtggtagttacggtggggctgtcggttatttcaccggcaaaggggatatggataattgtatcgttattcgctctgcttacgtggaagatggcatggcgacgattcaggttggcgcaggtatcgtactggattccgaacctttagccgaatccgaagagactcgtaacaaagcaagagccgtcattcgggcaattattgaggctcatcaggcagaggagactttctaa

SEQ ID NO: 76389 - protein, 524 aa, Photorhabdus luminescens subsp. laumondii TTO1
MTDKQPKITVIEQEAAYQPDPTQLFNQLCGERPATLLLESAEINSKKNLKSLLIIDSALRISANGNQVTFDALTENGRNLLPILANKFSSDVQSEITHNALQVIFPPINHNIDEDNRLKAVSVFDALRALLSLAEEPSPYNSSSAEAIFVGGLFSYDLVAGFEPLPAVKTVQRCPDFCFYLAETLLVINHQNKNARLQISLFSDSQAEEQRLKQRLKTLVALITEPIEPVQQISLPTMKVSYNRDDKSYAEMVAQLQQYIRQGDIFQVVPSRRFFLPCPAPLHAYQKLKYHNPSPYMFFMQDKDFCLFGASPESALKYDASNRQIEIYPIAGTRPRGRNAAGELDADLDSRTELEMRTDHKELAEHLMLVDLARNDLARICEPGSRYVADLTKVDRYSFVMHLVSRVVGTLRHDLDTFHAYQACMNMGTLTGAPKVRAMQLIAHYESERRGSYGGAVGYFTGKGDMDNCIVIRSAYVEDGMATIQVGAGIVLDSEPLAESEETRNKARAVIRAIIEAHQAEETF

SEQ ID NO: 76390 - DNA, 1566 bp, Vibrio vulnificus YJ016
  CDS (1)..(1566): transl_table=11
gtgaacaaggccattaacatcaccacactaggacagctagagcttctgtcaacgacggttccttaccattcggatcctacgcgcctttttcacactttgtgtgaaaacaaacgcgatagcttattgcttgaatcggctgaaatcgattcaaaacaagatcttaaaagcttactgattgtcgattccgcggtacgtatggtttgccatggccatgtcgtgaccatgacggcactcagtaacaacggcaggaatctgttaacgcatttgacaaagaatgtcgcgcaagaggttgaacatcagtttgatggacaacaacttaccctcaccttctcaagcccagatgaccgcctagatgaagactctcgcttacgtgaagcctctagtttcgacgcgttgagactggttcaacacagttttgatttggcggaaaaagacaagcacgcgatttttatcggcggtctgtttgcctatgacttggtggccaactttgaaccactgggtgaagcccacgcgataaatcaatgtcctgactatgtcttctacgtggcagaaacgctgatggtggtcgaccaccagaccgagagttgccatttacaagcaacgctttttgcagacgactcacaaaaagaagcactaaatcagcgtattgagcaaatccgcactctgtgtgctaccccgaaagcgctacctaaagccattcatctcgatgaggttgaggtcgataccaatatcagcgatgacgccttttgccaagtggtacgcgacctaaagcaatacgtcgtcaaaggcgacattttccaagtcgtaccatcacgccgctttaccctgccctgcccgtcaccattggcggcttataaagagctcaaagtgagcaacccaagtccttacatgttttacatgcaagatgaactctttacgttgtttggcgcatcaccggaaagcgcgttgaaatatgaaacgcaaaccaatcaagtggagatctaccccattgctggtactcgacgccgtggcaagcgagccaatggtgagatcgatttcgacctcgatagccgaattgaacttgaacttcgtactgacaagaaagaaaacgccgagcacatgatgttggtggatctcgctcgaaatgatgtcgcacgcatttctcgcgcggggacgcgccacgtcgccgatttacttaaagtggaccgctacagccatgtgatgcacttggtctcacgcgttgttggacaattacgtgacgatcttgatgcactacacgcctaccaagcgtgtatgaatatgggcacattaacgggcgctccgaagattcgtgccatgcaattgattcgtgatgttgaaggtgcccgccgtggcagttacggtggggctgtcggttacctcactggcgaagggacactggatacctgtatcgtgattcgttcggcttacgttgaaaacggcattgcacaagtacaagccggtgccggagtggtctttgattccgacccccaagccgaagccgatgagacacgcggcaaagctcaggcagtcatctctgccattcagaaagcccacaaggagtcgtaa

SEQ ID NO: 76391 - protein, 521 aa, Vibrio vulnificus YJ016
MNKAINITTLGQLELLSTTVPYHSDPTRLFHTLCENKRDSLLLESAEIDSKQDLKSLLIVDSAVRMVCHGHVVTMTALSNNGRNLLTHLTKNVAQEVEHQFDGQQLTLTFSSPDDRLDEDSRLREASSFDALRLVQHSFDLAEKDKHAIFIGGLFAYDLVANFEPLGEAHAINQCPDYVFYVAETLMVVDHQTESCHLQATLFADDSQKEALNQRIEQIRTLCATPKALPKAIHLDEVEVDTNISDDAFCQVVRDLKQYVVKGDIFQVVPSRRFTLPCPSPLAAYKELKVSNPSPYMFYMQDELFTLFGASPESALKYETQTNQVEIYPIAGTRRRGKRANGEIDFDLDSRIELELRTDKKENAEHMMLVDLARNDVARISRAGTRHVADLLKVDRYSHVMHLVSRVVGQLRDDLDALHAYQACMNMGTLTGAPKIRAMQLIRDVEGARRGSYGGAVGYLTGEGTLDTCIVIRSAYVENGIAQVQAGAGVVFDSDPQAEADETRGKAQAVISAIQKAHKES

SEQ ID NO: 76392 - DNA, 1554 bp, Corynebacterium diphtheriae NCTC 13129
  CDS (1)..(1554): transl_table=11
atggcagatttccatgcatccgcccgcgaggtgcgctatcacgaggatgccgccgacctctttcatcatcttggcgggacctcggctagtgactccgttcttttagagtccgcagacattaaatccaagaagaacaccacatccatggcagtacttcaatcagcggttcgcgtgacgtgcatggggcaaaccgtgaccgccacgcccctaacatctacgggccatacaatggtggcgcgcctacaggagcactttggcacgagcggcacgaaatttagtttccgccgctccgagcttcacgacgaacgccagcgcctccttgacaccaataacgccgagattcttcgcctcctacagtgtgaggccggctattccggtgagcagttaccacttcttgccggcggtttcgccttcgactacgtggagacatttgagcaattacctcctgtaccggtaggggataattcttatcccgattaccagtttgtggtggcagaaacagtgctggtgaccgatcatctcaagcgcagtgcggttatcgagggcgtgtccattgatccaagcgagttggaggatcgactagattcccttgttgccacgattgacagccatgaaacagtcgaggaatgtcccgcgaccacggcaaccaatgagatattgactgtgcgtgccgatatttctgatgtggatttttgccaaagcgtaagcgcactgcaggacaatatccaggcgggagacatctatcaggtggttccagcacgcagctttagcgcgccctgtgagagtgcttatgcagcttatagacacttgcgcacaatcaatcccagcccctatatgttttacgtgcgcggcattacccccatttcatgcaattcaaataaaacatatgagctgataggagcgtcgccggagtctaatctcaagttcgattccagaacacgcgagatacaattgtatccgatcgccggtacccggccacggggacttaatcccgacgggagtattaatcacgaactcgacattcgtgccgagctggatatgcgaactaacgtcaaggaaatcgccgaacatactatgctagttgatcttgcacgcaatgatcttgcacgtgtttcattgcccacaacacgtcgcgttgcagagttattgcaggtagatcgctactcccgggtgatgcatctcgttagccgtgtggtagctacgctggatccagagttcgacgctattaacgcctaccgtgcctgcatgaacatgggaacgctaaccggagcaccaaaattgcgcgcaattgaattactgcgaggtgtggaagctaaacgtcgcggttcctatggtggtgcggttggataccttcaaggagatggctccatggatacttgcattgtcattcgttccgcctttattcaggatggggtagcggtggtacaggccggtgccggagtggtgcgggattctattccacaatcagaggccgatgaaacactccataaggcctatgccgttttgcatgccattgcattggcggccggaaaggatctggaggtggttcgctaa

SEQ ID NO: 76393 - protein, 517 aa, Corynebacterium diphtheriae NCTC 13129
MADFHASAREVRYHEDAADLFHHLGGTSASDSVLLESADIKSKKNTTSMAVLQSAVRVTCMGQTVTATPLTSTGHTMVARLQEHFGTSGTKFSFRRSELHDERQRLLDTNNAEILRLLQCEAGYSGEQLPLLAGGFAFDYVETFEQLPPVPVGDNSYPDYQFVVAETVLVTDHLKRSAVIEGVSIDPSELEDRLDSLVATIDSHETVEECPATTATNEILTVRADISDVDFCQSVSALQDNIQAGDIYQVVPARSFSAPCESAYAAYRHLRTINPSPYMFYVRGITPISCNSNKTYELIGASPESNLKFDSRTREIQLYPIAGTRPRGLNPDGSINHELDIRAELDMRTNVKEIAEHTMLVDLARNDLARVSLPTTRRVAELLQVDRYSRVMHLVSRVVATLDPEFDAINAYRACMNMGTLTGAPKLRAIELLRGVEAKRRGSYGGAVGYLQGDGSMDTCIVIRSAFIQDGVAVVQAGAGVVRDSIPQSEADETLHKAYAVLHAIALAAGKDLEVVR

SEQ ID NO: 76394 - DNA, 2160 bp, Rhodopseudomonas palustris CGA009
  CDS (1)..(2160): transl_table=11
atgaacaggaccgttttctcgcttcccgcgaccagcgactataagaccgccgcgggcctcgcggtgacgcgcagcgcccagccttttgccggcggccaggcgctcgacgagctgatcgatctgctcgaccaccgccgcggcgtgatgctgtcgtccggcacaaccgtgccgggccgctacgagagcttcgacctcggctttgccgatccgccgctggcgctcaccactagggccgaaaaattcaccatcgaggcgctcaatccgcgcggccgggtgctgatcgcgttcctgtccgacaagcttgaagagccctgcgtggtggtggagcaggcctgcgccaccaagatcaggggccacatcgtccgcggcgaggccccggtcgacgaagaacaacgcacccgccgcgccagcgcgatctccctggtgcgcgcggtgattgctgccttcgcctcgccggccgatccgatgctcgggctgtacggcgccttcgcctacgaccttgtgttccagttcgaggatctgaagcagaagcgtgcccgcgaagccgaccagcgcgacatcgtgctgtacgtgccggatcgcctgctggcctacgatcgcgccaccggccgcggcgtcgacatttcctacgaattcgcctggaagggccagtccaccgccggcctgccgaacgagaccgccgagagcgtctacacccagaccggccggcagggtttcgccgaccacgccccgggcgactatcccaaggtggtcgagaaggcccgcgcggcgttcgcccgcggcgacctgttcgaggcggtgccgggccagctgttcggcgagccatgcgagcggtcgccggccgaagtgttcaagcggttgtgccggatcaacccgtcgccctatggcggcctgctcaatctcggcgacggcgaattcctggtgtcggcctcgccggaaatgttcgtccgctcggacggccgccggatcgagacctgcccgatctccggcactatcgcccgcggcgtcgatgcgatcagcgatgctgagcagatccagaagctcttgaactccgagaaggacgagttcgagctgaatatgtgcaccgacgtcgaccgcaacgacaaggcgcgggtctgcgtgccgggcacgatcaaagttctcgcgcgccgccagatcgagacctattcgaagctgttccacaccgtcgatcacgtcgagggcatgctgcgaccgggtttcgacgcgctcgacgccttcctcacccacgcctgggcggtcaccgtcaccggcgcgccgaagctgtgggcgatgcagttcgtcgaggatcacgagcgtagcccgcggcgctggtatgccggcgcgttcggcgtggtcggcttcgatggctcgatcaacaccggcctcaccatccgcaccatccggatgaaggacggcctcgccgaagttcgcgtcggcgccacctgcctgttcgacagcaatccggtcgccgaggacaaggaatgccaggtcaaggccgcggcactgttccaggcgctgcgcggcgatcccgccaagccgctgtcggcggtggcgccggacgccactggctcgggcaagaaggtgctgctggtcgaccacgacgacagcttcgtgcacatgctggcggactatttcaggcaggtcggcgcccaggtcaccgtggtgcgctacgttcacggcctgaagatgctggccgaaaacagctatgatcttctggtgctgtcgcccggtcccggccggccggaggacttcaagatcaaggatacgatcgacgccgcgctcgccaagaagctgccgatcttcggcgtctgcctcggcgtccaggcgatgggcgaatattttggcggtacgctcggccagctcgcgcagccggctcacggccgcccgtcgcggattcaggtgcgcggcggcgcgctgatgcgcggtctcccgaacgaggtcaccatcggccgctaccactcgctctatgtcgacatgcgcgacatgccgaaggagctgaccgtcaccgcctccaccgatgacggcatcgcgatggcgatcgagcacaagaccctgccggtcggcggcgtgcagttccaccccgagtcgctgatgtcgctcggcggcgaggtcgggctgcggatcgtcgaaaacgccttccggctcggccaggcggcctaa

SEQ ID NO: 76395 - protein, 719 aa, Rhodopseudomonas palustris CGA009
MNRTVFSLPATSDYKTAAGLAVTRSAQPFAGGQALDELIDLLDHRRGVMLSSGTTVPGRYESFDLGFADPPLALTTRAEKFTIEALNPRGRVLIAFLSDKLEEPCVVVEQACATKIRGHIVRGEAPVDEEQRTRRASAISLVRAVIAAFASPADPMLGLYGAFAYDLVFQFEDLKQKRAREADQRDIVLYVPDRLLAYDRATGRGVDISYEFAWKGQSTAGLPNETAESVYTQTGRQGFADHAPGDYPKVVEKARAAFARGDLFEAVPGQLFGEPCERSPAEVFKRLCRINPSPYGGLLNLGDGEFLVSASPEMFVRSDGRRIETCPISGTIARGVDAISDAEQIQKLLNSEKDEFELNMCTDVDRNDKARVCVPGTIKVLARRQIETYSKLFHTVDHVEGMLRPGFDALDAFLTHAWAVTVTGAPKLWAMQFVEDHERSPRRWYAGAFGVVGFDGSINTGLTIRTIRMKDGLAEVRVGATCLFDSNPVAEDKECQVKAAALFQALRGDPAKPLSAVAPDATGSGKKVLLVDHDDSFVHMLADYFRQVGAQVTVVRYVHGLKMLAENSYDLLVLSPGPGRPEDFKIKDTIDAALAKKLPIFGVCLGVQAMGEYFGGTLGQLAQPAHGRPSRIQVRGGALMRGLPNEVTIGRYHSLYVDMRDMPKELTVTASTDDGIAMAIEHKTLPVGGVQFHPESLMSLGGEVGLRIVENAFRLGQAA

SEQ ID NO: 76396 - DNA, 1476 bp, Geobacter sulfurreducens PCA
  CDS (1)..(1476): transl_table=11
gtgtatttccccgatgtggatacctttcgcgccctgggcgcccggggtaacctgattcccgtctgccgcgagatcatggcggatatggacaccccggtcagtgccttccgcaagctcgacgacggccgctatgccttcctcctggagagtatcgaggggggcgaaaagtgggcccgctataccttcctcggcgccagcccctccacggtcatccggagccggggcaccaccgtcgagatcatcaccaacggcgagacccgttccgtgacgacggacgaccccctcggctttgtccgcgatttcctggcccggttccggcccgtggagatccccgggcttccccgcttcttcggcggcgccgtggggtacctcggctacgacatggtccgccaattcgagcggcttcccacggacaaacccgccgtgatcggcgcctgggactcctgtttcctcatcaccgacaccatcgtgattttcgacaatatgcgccagaagatcacggtggtctccaatgcccacctggacgagggcgtttccgtcgaagcggcctatgccgacgccgttgcccggatcgacgggatcattgcccggctcaaggcgccgctgccggcccagcccgccgcggccgcggcccggaaggtctccttttcttccaacatcacccgggaggcgttcgaggatgccgtggaacgggccaaggagtacgtccgggccggcgacatcatccaggtggtcctgtcccagcgtttttccggcgagctcaccgtggaccctctcgacatctaccgggtattgcggaccctgaacccgtcgccctacatgtttttcctccgcctggacgataccctggtggtgggcgcctctcccgaagtcatggtgcgtcgggaggggaaccgggtggagctccgccccatcgccggcacccgcccccggggcgccacgccggaacaggacgagcaactggcggaggaactcctggccgaccccaaggagcgggccgagcacgtgatgctcgtggacctggggcgcaacgacctggggcgggtctgccgcaccggcaccgtgaaggtgtcggagctcatggtgatcgagcgctactcccacgtgatgcacatcgtttccaacgtccagggcgaactggccgaggggagggacgccttcgacgtggtgcgggccaccttcccggccggcaccctctccggcgcccccaaggtgcgggccatggagatcatcgacgagctggagccggtgcgccgggaagtctacggcggcgccgtgggctacttctccttctccggcaccatggacctggccatcgccatccgcactctcgtcatccgcgacggcgtggtgcacctccaggccggggccggcatcgtggccgactctgatccggcctccgagtaccaggagacggtcaacaaggccatggccgtggtaaaggccatcgagaccgcggaaaaggggttggactga

SEQ ID NO: 76397 - protein, 491 aa, Geobacter sulfurreducens PCA
MYFPDVDTFRALGARGNLIPVCREIMADMDTPVSAFRKLDDGRYAFLLESIEGGEKWARYTFLGASPSTVIRSRGTTVEIITNGETRSVTTDDPLGFVRDFLARFRPVEIPGLPRFFGGAVGYLGYDMVRQFERLPTDKPAVIGAWDSCFLITDTIVIFDNMRQKITVVSNAHLDEGVSVEAAYADAVARIDGIIARLKAPLPAQPAAAAARKVSFSSNITREAFEDAVERAKEYVRAGDIIQVVLSQRFSGELTVDPLDIYRVLRTLNPSPYMFFLRLDDTLVVGASPEVMVRREGNRVELRPIAGTRPRGATPEQDEQLAEELLADPKERAEHVMLVDLGRNDLGRVCRTGTVKVSELMVIERYSHVMHIVSNVQGELAEGRDAFDVVRATFPAGTLSGAPKVRAMEIIDELEPVRREVYGGAVGYFSFSGTMDLAIAIRTLVIRDGVVHLQAGAGIVADSDPASEYQETVNKAMAVVKAIETAEKGLD

SEQ ID NO: 76398 - DNA, 1533 bp, Mycobacterium avium subsp. paratuberculosis K-10
  CDS (1)..(1533): transl_table=11
gtgcacgcccacctcgccgcgacgacctcacgagaggatttccgccagctggcagccgagcaccgcgtggtcccggtgacccgcaaggtgctggccgacagcgagacgccgctgtcggcctaccgcaaactcgccgccaaccgcccgggcaccttcctgctggagtcggccgagcacggccggtcctggtcgcggtggtcgttcatcggcgccgggtcgccgtcggcgctgaccgtgcgcgacggggaagccggctggctgggggtggtgccgcaggacgcaccgaccggcggcgatccgctgcaggcactgcgcgccaccctggacctgctggccaccgggccgctgagcgggctgccgccgttgtcgggcggcatggtcggcttcttcgcctacgacctggtgcggcgcctggagcggctgcccgagctggccgtcgacgacctgggcctgccggacatgctgctgctgctggccaccgatctggcggccgtcgaccaccacgagggcaccatcacgctgatcgccaacgcggtgaactggaacgggaccgacgaacgggtcgacgaggcctacgacgacgccgtcgcccggctggacgtgatgaccgcggcgctgggccagccgctagcctccaccgtggccaccttcgagcggcccgagccgcgctaccgcgcgcagcgcagcgtcgaggagtacggcaagatcgtcgactacctcgtcgagcagatcgccgccggtgaggcgtttcaggtggtgccctcgcagcggttcgaaatggacaccgacgtcgacccgatcgacgtgtaccggatgttgcgggtcaccaaccccagcccctacatgtatctgctgcatgtaccgaatgatgctgggggaacggacttttcgatcgtcgggtccagcccggaggctctggtcacggtggccgacggcgtcgcgaccacccacccgatcgccgggacccggtggcgcgggcagaccgacgacgaggaccagctgctggaaaaggagctgctggccgacgagaaggaacgcgccgagcatctgatgctggtcgatctgggccgcaacgatctgggccgggtgtgcgcgccgggcaccgtccgggtcgacgactacagccacatcgagcgctacagccacgtcatgcatctggtctcgacggtgaccggcgtgctcgacgcgggcaggaccgccctggacgcggtgacggcctgcttcccggccggcaccctgtcgggtgcgccgaaggtccgggcgatggagctgatcgaagaggtggagaagacgcgccgcggcctctacggcggcgtggtcggctacctggacttcgccggcaacgccgacttcgccatcgccatccgcaccgcgctgatgcgcggcggcaccgcctacgtgcaatcgggtggcggggtggtggcggactccaacggcccctacgaatacaccgaggccaccaacaaggcgcgcgcggtgctcggcgcgatcgcggccgccgagacgctgaccgaaccgggcgcgcggcgatga

SEQ ID NO: 76399 - protein, 510 aa, Mycobacterium avium subsp. paratuberculosis K-10
MHAHLAATTSREDFRQLAAEHRVVPVTRKVLADSETPLSAYRKLAANRPGTFLLESAEHGRSWSRWSFIGAGSPSALTVRDGEAGWLGVVPQDAPTGGDPLQALRATLDLLATGPLSGLPPLSGGMVGFFAYDLVRRLERLPELAVDDLGLPDMLLLLATDLAAVDHHEGTITLIANAVNWNGTDERVDEAYDDAVARLDVMTAALGQPLASTVATFERPEPRYRAQRSVEEYGKIVDYLVEQIAAGEAFQVVPSQRFEMDTDVDPIDVYRMLRVTNPSPYMYLLHVPNDAGGTDFSIVGSSPEALVTVADGVATTHPIAGTRWRGQTDDEDQLLEKELLADEKERAEHLMLVDLGRNDLGRVCAPGTVRVDDYSHIERYSHVMHLVSTVTGVLDAGRTALDAVTACFPAGTLSGAPKVRAMELIEEVEKTRRGLYGGVVGYLDFAGNADFAIAIRTALMRGGTAYVQSGGGVVADSNGPYEYTEATNKARAVLGAIAAAETLTEPGARR

SEQ ID NO: 76400 - DNA, 1443 bp, Bacillus cereus ATCC 10987
  CDS (1)..(1443): transl_table=11
gtggttaatataagagggtgggataaaagaagacggggtgttgatatgcaacgaagaaaatctttagcgctttctattccatatcagttagatttctttaagcaatataaatttctttctaaggataaaccgcaacatattttgttagagagtgggcgtggcggtcgttataacattgtggggttaaacccggtagcggtaatccgagggaagggtaaaacattacatataagtgaaagtggtaaggaaacaataaagcaaggaaacccattagatttaatgcaggaatatatggagcgatggaaaacggattataatccggaatacccgccttttcaaggtggtgcaattggctactttagttatgattgcatccgttatattgaaaaacttccttctcttgccgaggatgatattaatatacctgacatattctttttattatttgatgatgtgtttgtgtatgatcaagaagaaaaagtattatggattattacacattatgcagataagcatgaagaggcaaaagaacgattaaatgaatggaaggttctttggacgacagaagcgccagaagtgactatgccgtttgcgtgccctgaaaagaaaagtgaagcagttgcttttactgaagaaggttttatgaaggcagttgaatgtattcaagaatatattggtgctggtgatgtgttccaagtgaacttgtcaacaagacaagaaagaacgttacaaacacatccactagaaatttatacaagtcttcgcgaaattaatccatctccatatatgggttacttggagcttggggattttcaaattgttagtggatcgccggagttgctaattaagaaacaaggagctgaagtaagtacaagaccaattgctggaacgagatctagaggggcgaatgagcaagaggatgaagagttggcaagagaattaattgagaatgaaaaggaacgagcagagcatgtcatgcttgtagatttagagcgaaatgatttagggcgtgtttgtaaatatggcactgtagaagtagatgaatttatggtaattgagaaatactcacacgttatgcatattgtttctaatgtgcgtggtgaggtggaagaagataaagatgcttttgatttagtgaaggctgtattccctggggggacaattactggtgccccgaaaatacgtacgatggaaattattgaagaactagaacctgttcgccgagggatttatacaggttcaattggttggattggttattctggagatacagaattgaatattgtgattaggacacttcttgctaaagatggaaaagcacatgtacaagcgggagcgggaattgtaattgattcaaatccggaaaatgaatataaagagtcgttaaaaaaggcgattgctttatggcgtgcaaaagaacgtagcgaagaaacggttaggtga

SEQ ID NO: 76401 - protein, 480 aa, Bacillus cereus ATCC 10987
MVNIRGWDKRRRGVDMQRRKSLALSIPYQLDFFKQYKFLSKDKPQHILLESGRGGRYNIVGLNPVAVIRGKGKTLHISESGKETIKQGNPLDLMQEYMERWKTDYNPEYPPFQGGAIGYFSYDCIRYIEKLPSLAEDDINIPDIFFLLFDDVFVYDQEEKVLWIITHYADKHEEAKERLNEWKVLWTTEAPEVTMPFACPEKKSEAVAFTEEGFMKAVECIQEYIGAGDVFQVNLSTRQERTLQTHPLEIYTSLREINPSPYMGYLELGDFQIVSGSPELLIKKQGAEVSTRPIAGTRSRGANEQEDEELARELIENEKERAEHVMLVDLERNDLGRVCKYGTVEVDEFMVIEKYSHVMHIVSNVRGEVEEDKDAFDLVKAVFPGGTITGAPKIRTMEIIEELEPVRRGIYTGSIGWIGYSGDTELNIVIRTLLAKDGKAHVQAGAGIVIDSNPENEYKESLKKAIALWRAKERSEETVR

SEQ ID NO: 76402 - DNA, 1413 bp, Bacillus cereus ATCC 10987
  CDS (1)..(1413): transl_table=11
atgacgaaagaagaatttataaaacaaaaaagagagagaaagacatttttagtaatcactgaagaagaaggagatagcattacgccaatttctttatatagacgtatgaaagggaagaagaaattcttattagaaagttcacagcttcatcaagataaaggacgctattcctacttagggtgtaatccgtatggggaagtgaaaagtatcggtacggaagtggaacgaacgatttacggccgggcagaaaagttgcaaggtaacgtactagaagtgttagaagaaatcgcgtcagctcaagtagacagtccatttccgttttgcggaggagcagttggttatattggctatgacgttattcggcaatatgaaaacattggagcaaatttacacgatccattgaatattccagaggtacaccttttactgtaccgtgagtttatcgtgtatgaccacttacgccaaaagttgtcgtttgtatatgtatgcagggaagatgatgcagcagattatgaagaagtatacgaaaggctgcgagtatacaaagaggaagtgctacagggagaagaagcggaagtaactgaaataagatcaacattatcattcacttcttctataacggaaaaagaattttgcgtaatggtagaaacggcgaaagaacacattcgagccggggacatattccaagtcgtattatcccagcgtttacaaagtgaatgtattggtgatccattcgcgttataccgaaaactacgaattgccaatccatcaccatatatgttttatatcgattttcaagattatgttgtaatcggttcttcgccagaaagtttgctatcggtaagagaggataaagtgatgacaaatccaattgctggtacgaggccgagagggaagacaaagcaggaagatacggaaattgaaaaagagctgttagaaaatgagaaagagcgagcagagcatatgatgcttgtagatcttgggcgaaatgatattggtagagtgagtgaaatcggctcagttacgatagataaatatatgaaagtagaaaaatattctcacgttatgcacattgtatctgaagtttacggaacattgcgaaaacaaatgagcggatttgatgcattagcgcattgcttaccggcggggacggtatcaggtgctccgaaaattagagcgatggaaattataaatgagctagagaatgaaaaaagaaatgtgtacgccggtgcagttggatacgttagtttttcagggaatcttgatatggcgcttgccattcgaacaatggtcgtgaaagatgagaaagcatacgttcaggcaggagcggggattgtctacgattcagacccagttgctgaatatgaagaaacattaaataaagcgagagcgctcttggaggtaatgaaatga

SEQ ID NO: 76403 - protein, 470 aa, Bacillus cereus ATCC 10987
MTKEEFIKQKRERKTFLVITEEEGDSITPISLYRRMKGKKKFLLESSQLHQDKGRYSYLGCNPYGEVKSIGTEVERTIYGRAEKLQGNVLEVLEEIASAQVDSPFPFCGGAVGYIGYDVIRQYENIGANLHDPLNIPEVHLLLYREFIVYDHLRQKLSFVYVCREDDAADYEEVYERLRVYKEEVLQGEEAEVTEIRSTLSFTSSITEKEFCVMVETAKEHIRAGDIFQVVLSQRLQSECIGDPFALYRKLRIANPSPYMFYIDFQDYVVIGSSPESLLSVREDKVMTNPIAGTRPRGKTKQEDTEIEKELLENEKERAEHMMLVDLGRNDIGRVSEIGSVTIDKYMKVEKYSHVMHIVSEVYGTLRKQMSGFDALAHCLPAGTVSGAPKIRAMEIINELENEKRNVYAGAVGYVSFSGNLDMALAIRTMVVKDEKAYVQAGAGIVYDSDPVAEYEETLNKARALLEVMK

SEQ ID NO: 76404 - DNA, 1629 bp, Magnaporthe grisea 70-15
  CDS (1)..(1629)
atggaagagccagatttggtagtgccgtccctcgagacggtacaaaagttcctctcagagcccacaaagcaggacgccaccaagagggcaaacctcatccctctgtatggccaaatctcgtccgacctcatcacgccgtcggccgcctatctcaaggtctcggcgcactaccgatccaagagcagtagctcaggcgccgatgatcagctgtcgtttctgttcgagagcgcagcaaccgagcgtgtgggccgctacagcttcgtcgctgcgggcccgcgcaaggtggtccgcaccggccccggcttcgctggtggcgcctgcgaccccctgccggcccttgaggaggagctggcccgccatgtcgtcgccaccgacgtccccggcctgaagctgccgccgtttgctggtggggccgtcggctatgtgggttacgactgcgtgcgttactttgagcccaagacggcacggccgatgaaggatgtcctgggaatccccgagtccgtctttatgtttttcgacacggctgtggtctttgatcgtttctacggcatcatcaaggtcgtgacgtatctgcatgtccctgatggcgcctttgacgaggccgagggaaccgcacaaaatgtcgaggccgaatataaacgcgcccttgcaactatccgggagctgatagaactcctcaacgggcctgagatcccgcttccagagcagaagcctgtccggttggggcaagagtacaggtccaacgttggacaggcaggctacgagggacatgtcacagctctcaagaagcacatcgtgaagggcgacatcatccaggccgtgccgtcacagcgcttcgctcgccccacggacctgcaccccttcaatatctaccggcaccttcggaccgtcaacccgtcgccgtacctgttctacgtcgactgcgccgacttccaaatcgtcggcgccagcccggagctgctggtcaagagcgagggcggccgcgtcatcacgcacccgatcgcgggcacggtcaagcgcggcgccacgcccgaggaggaccagcggctggcggacgagctggcggcgagcctcaaggaccgcgccgagcacgtcatgctggtggacctggcgcgcaacgacgtcacgcgcgtgtgcgacccgctcgagacccgcgtcgaccgcctcatggtggtcgagcgcttcagccacgtacagcacctcgtctcccaggtctcgggcgtgctcaggcccggaaagacccgcttcgacgccttccgctccatcttccccgccggcaccgtctcgggcgcccccaaagtccgcgcaatggagctcatcgccgagctcgagggagagaaacgcggcgtttatgccggcgccgtgggatactttggctatgggggtgtggatcgccaggggaaggagagtgagggcgagatggacacttgcattgcgctgaggaccatgctggtcaaggatggtattgcctatcttcaggctggcggcggtatcgtgttcgactcggacgagtacgacgagtggatggagacgatgaacaaactcggcgccaacatgcactgcatcacttcagccgagcagttgtgggccaggcggcaggcaactgcagcagacaagtcaaagcaatga

SEQ ID NO: 76405 - protein, 542 aa, Magnaporthe grisea 70-15
MEEPDLVVPSLETVQKFLSEPTKQDATKRANLIPLYGQISSDLITPSAAYLKVSAHYRSKSSSSGADDQLSFLFESAATERVGRYSFVAAGPRKVVRTGPGFAGGACDPLPALEEELARHVVATDVPGLKLPPFAGGAVGYVGYDCVRYFEPKTARPMKDVLGIPESVFMFFDTAVVFDRFYGIIKVVTYLHVPDGAFDEAEGTAQNVEAEYKRALATIRELIELLNGPEIPLPEQKPVRLGQEYRSNVGQAGYEGHVTALKKHIVKGDIIQAVPSQRFARPTDLHPFNIYRHLRTVNPSPYLFYVDCADFQIVGASPELLVKSEGGRVITHPIAGTVKRGATPEEDQRLADELAASLKDRAEHVMLVDLARNDVTRVCDPLETRVDRLMVVERFSHVQHLVSQVSGVLRPGKTRFDAFRSIFPAGTVSGAPKVRAMELIAELEGEKRGVYAGAVGYFGYGGVDRQGKESEGEMDTCIALRTMLVKDGIAYLQAGGGIVFDSDEYDEWMETMNKLGANMHCITSAEQLWARRQATAADKSKQ

SEQ ID NO: 76406 - DNA, 1521 bp, Candida glabrata CBS 138
  CDS (1)..(1521)
atgcagattcaaccagacttacctactcttaagggtctctatgagcagaacaatgccctggatgaagggattaacatgtatccggtgtatgcgtttctgcctgcacttgatcttactccacacgtcgcttatttgaagctggcacaattgaacaacaaggatagaactgagtcgttcttgctggaaagtgccaaaaccactgatgaattggaccgttactctttcattggtgtgtcaccaagaaagattataaagactggacctacggaaggcattgagactgatcctctagatgtattggaagaagagatgtcccagttcaagctggccacaaacgtgccaggtttaccgaaactaagtggtggtgccatcggttacatatcctacgactgtataaggtattttgagccaaaaacgaaaagagacttgaaggatgtgctacaattgccagaggcctatttgatgatgtgtgacactattatagcctttgatcacgtattccaaagattccaaatcatgcataacatcaacactaaaaagcaatctctagaggaaggttacagtcacgcagtagaaatcatcaatgacattataaagagaatgactgatgattcaaagccaataccttaccctgaacaaccaccaatcaaaatggacaggtccttccagtctaatatcggtcaagaaggttacgaaaaccacgtcggcaacttgatagaacacataaaaaagggtgacatcattcaagcggttccttctcagcgagttgcaaggccaacagacctacatccattcaacatttacaggcatctacgtacagttaacccatcgccatatctcttttacatcgactgtctggatttccaaattatcggtgcttccccagaacttctatgtaaatccgatagcaagaataaagtaatcacacatccaattgctggtactatcaagagaggtgctacaactgaggaagatgatgaattaggtaaccaactgcgtaactctttgaaagatagagccgaacatgttatgctggtggatcttgctcgtaatgacatcaaccgtgtttgtgatccaaagacaacgaacgtcgacaagttactgacaattcaaaaattttcacatgtgcaacatttggtatctcaagtcagtggtactttaagaccggacaagactagattcgatgctttcagatctattttcccagccggtactgttagtggtgcacctaaagttaaagccatggaattaatctcagaactagaaggtgaaagacgtggtgtttacgctggtgccgttggtaactggtcttatgatggtaaaactatggatacctgtattgctcttagaacaatggtttacaaaaatggaacggcttacctgcaagcaggtggtggtattgtgtttgattccgacaagtacgatgaatatatagaaaccatgaacaaaatgatggctaatcacaataccattgttcaagctgagaagatttgggctgaaaaggttggaacgactaactaa

SEQ ID NO: 76407 - protein, 506 aa, Candida glabrata CBS 138
MQIQPDLPTLKGLYEQNNALDEGINMYPVYAFLPALDLTPHVAYLKLAQLNNKDRTESFLLESAKTTDELDRYSFIGVSPRKIIKTGPTEGIETDPLDVLEEEMSQFKLATNVPGLPKLSGGAIGYISYDCIRYFEPKTKRDLKDVLQLPEAYLMMCDTIIAFDHVFQRFQIMHNINTKKQSLEEGYSHAVEIINDIIKRMTDDSKPIPYPEQPPIKMDRSFQSNIGQEGYENHVGNLIEHIKKGDIIQAVPSQRVARPTDLHPFNIYRHLRTVNPSPYLFYIDCLDFQIIGASPELLCKSDSKNKVITHPIAGTIKRGATTEEDDELGNQLRNSLKDRAEHVMLVDLARNDINRVCDPKTTNVDKLLTIQKFSHVQHLVSQVSGTLRPDKTRFDAFRSIFPAGTVSGAPKVKAMELISELEGERRGVYAGAVGNWSYDGKTMDTCIALRTMVYKNGTAYLQAGGGIVFDSDKYDEYIETMNKMMANHNTIVQAEKIWAEKVGTTN

SEQ ID NO: 76408 - DNA, 1527 bp, Kluyveromyces lactis NRRL Y-1140
  CDS (1)..(1527)
atggcttctgatcatattactattcagccatcaattgaggtgattaaagaatgcatcgctgctaatgatgattccatcaatatgtacccagtataccacttcatgccagcaatggaccttacacctcatgtggcgtatttgaaaatgagtgagttgaacaataaggagaggtcaccatcttttctatttgaatccgcaaacggtaaccaattgagtcgatactcgttttttggtcatagtccacgtaagattatcaagactggtcctactgaaggtcaagcgtgtgacccattgaatattctacaagacgaattggctcagtatcgattggctgaaaatgttccaggcttacccaagctttctggtggtgctattggttatgtttcttacgactgtgttcagtattttgaaccaaagacgaagagaccattgaaagatgtgctacaagtaccagaatctgctttgatgctatacgataccattgttgcatttgatcatgttttccaaaggttccagatcataactaatatcaatgtgaagacggtctcatctttggaacaaggttacgaagatgcatctgagattatcaaacgcattatcgccatcttgaaggatgaatctagtccgataccattacctgaacaaccatcaatcaaattgaaccagactttcacatcaaacattggtcaagaaggatacgaacagcacgtgagagatttgaaagaacatatcaagaagggtgatatcatccaatgtgttccatctcaacgtgtcgctagaccaacttcacttcacccattcaatatctacaaacacttgcgtactgtgaatccctcgccatacttattctatatcgattatttggatttccaaatcattggtgcttcacctgaattgttatgccaagttgatgccaaaaacgaagttatcactcatcccattgctggtacagtcagaaggggtcagactccagaagaagatgacagattagcggaagagttgagaaattctactaaggacagagcagaacatgtgatgttagttgatctagcccgtaatgatgtgaacagggtctgtgatccaaccaccacttccgtggatgagttactttcagtgcaaaagttctctcacgtccaacatcttgtctctcaagtcagtggtacactaaggaaggatcaaaacagatttgatgctctaaggtctattttccctgcaggaacagtttctggtgctcctaaggtcaaggccatggaattgatcggagaactggaaggtgaaaaacggggtgtttacgctggtgccgttggacactggtcatatgacggaaaatccatggacacatgcattgccttgagaacaatggtttataaagacggtatagcctatttgcaagctggtggtggtatcatatttgattctgacccatatgatgagtacgtagaaacaatgaacaaaatgaaagctaaccacaatactattctacaagcagagcaaatttgggctgagaaagttggcactcaagactag

SEQ ID NO: 76409 - protein, 508 aa, Kluyveromyces lactis NRRL Y-1140
MASDHITIQPSIEVIKECIAANDDSINMYPVYHFMPAMDLTPHVAYLKMSELNNKERSPSFLFESANGNQLSRYSFFGHSPRKIIKTGPTEGQACDPLNILQDELAQYRLAENVPGLPKLSGGAIGYVSYDCVQYFEPKTKRPLKDVLQVPESALMLYDTIVAFDHVFQRFQIITNINVKTVSSLEQGYEDASEIIKRIIAILKDESSPIPLPEQPSIKLNQTFTSNIGQEGYEQHVRDLKEHIKKGDIIQCVPSQRVARPTSLHPFNIYKHLRTVNPSPYLFYIDYLDFQIIGASPELLCQVDAKNEVITHPIAGTVRRGQTPEEDDRLAEELRNSTKDRAEHVMLVDLARNDVNRVCDPTTTSVDELLSVQKFSHVQHLVSQVSGTLRKDQNRFDALRSIFPAGTVSGAPKVKAMELIGELEGEKRGVYAGAVGHWSYDGKSMDTCIALRTMVYKDGIAYLQAGGGIIFDSDPYDEYVETMNKMKANHNTILQAEQIWAEKVGTQD

SEQ ID NO: 76410 - DNA, 1545 bp, Debaryomyces hansenii CBS767
  CDS (1)..(1545)
atgttttctaaaattcaaccatcgcttgaagcattgacttcaattgttcaatcacatcaagatgatgaaaataagcctaatttgtatccaatttacaaatatgttacagcagatgatttgactgttcataaagcatatttgaaattagcaaaattgaacgacccaaagagatcaccatcatttttatttgagtcggcagttaacggtgataccgttgatagatactcgtttattggtctcaatccaaggaaagtgataagaactggtgaagacgaaagattattccctaaagagcattgtaatgttgatccaattaccatattagaaaaggaacttgcaaagtataatcaaattcaattaccgggattgccaaaatttagtggtggtgcagttggttacatttcatatgattgtattaaatacttcgaacctaagactcgtaagcccttagaagatgtattacagttaccagaagctgtgttaatgttatgtgatttaattgttgcattcgaccgtgtttatgatagatttcagatcatcaataatgtggcggttactgattcaaatgatttacaagcaagcttcaataaagctgccgaagcgattgataatgtggaaaagattttaagatccgaatctacaccagaagaaataaacccaaaacaacctccaatcaaggctaatcaaacgttcacatcaaacataggtcaagaaggttacgagggccatgtttcgaccttgaagaagcacatcttaaaaggtgacatcatccaggcggttccatctcaaagggttgctagacctacgtcattacatccattcaacatatatcgtcatttaagaactgtgaacccatcaccatatttgttctacatagatcttattgattttgagattatcggtgcatccccagagcttcttgtgaaagcggatgaaaagggtaaggttgtgactcatccaattgccggaactgtgaagagaggtaaaactaacgaagaagatgaagcaaatgccgaaattttaagatcgagtttgaaggacagggcggaacacatcatgttggtggatttggcccgtaacgacataaatagaatctgtacgccggaaagcaacaaagtagaccgtctcttgacaattgaaagattctctcacgttatgcatttggtatctgaagtgagcggtaccttgagatcggataaaacgaggtttgatgccttcagatctattttccctgctggaacagtaagtggtgcaccaaaggttaaagccatggagttaattggtacactcgagaaagagaagagaggtgtttatgcgggtgctgttggtcactggggttatgatggtaagaccatggacacttgtatcgccttgagaaccatggtttacaagaatggcattgcatatttgcaagctggtgggggaattgttttcgacagtgatgaatatgatgaatacgtggaaactatgaataagatgaaggccaacaatcagaccattattgatgccgaaaaggtttggattgaaaaagttggacaagaatag

SEQ ID NO: 76411 - protein, 514 aa, Debaryomyces hansenii CBS767
MFSKIQPSLEALTSIVQSHQDDENKPNLYPIYKYVTADDLTVHKAYLKLAKLNDPKRSPSFLFESAVNGDTVDRYSFIGLNPRKVIRTGEDERLFPKEHCNVDPITILEKELAKYNQIQLPGLPKFSGGAVGYISYDCIKYFEPKTRKPLEDVLQLPEAVLMLCDLIVAFDRVYDRFQIINNVAVTDSNDLQASFNKAAEAIDNVEKILRSESTPEEINPKQPPIKANQTFTSNIGQEGYEGHVSTLKKHILKGDIIQAVPSQRVARPTSLHPFNIYRHLRTVNPSPYLFYIDLIDFEIIGASPELLVKADEKGKVVTHPIAGTVKRGKTNEEDEANAEILRSSLKDRAEHIMLVDLARNDINRICTPESNKVDRLLTIERFSHVMHLVSEVSGTLRSDKTRFDAFRSIFPAGTVSGAPKVKAMELIGTLEKEKRGVYAGAVGHWGYDGKTMDTCIALRTMVYKNGIAYLQAGGGIVFDSDEYDEYVETMNKMKANNQTIIDAEKVWIEKVGQE

SEQ ID NO: 76412 - DNA, 1524 bp, Yarrowia lipolytica CLIB122
  CDS (1)..(1524)
atgatccaactcagacccactctagaggctcttcagaccatcgtggccgacaaccgagccgccgccaccaaggagactcttcccgacaacctctatcccgttttcgcctatgtggatgctgaggccctgactcctcatactgcctacctcaagttggctcgtctggatgaccccaaccgaagtccctcgttcctgttcgagtctgccctcggtggtaagcatctgtcccgatactctttcattggatctaatccccggaagatgatcaagactggtgctccccatggacctgacgttgatccgctcaacctgctggagtctgaactcgaccagtaccgacagttccagacccccggcgtccccactctttgtggaggagccatcggatacatttcgtacgactgcatcaagtacttcgagccccgaaccaagcgagatctcaaggacgtcctggaggtccccgaaagtgccctcatgctctacgacaccattgtggcctttgaccacgtctaccagcgactccaggttatcaccaatgtcaaggttgaggccgacaccgatctcaccaaggcctacgaggacgccaagaaggaggtgcagcgaatcgcagacctgctgacttcccctgaggttccccagcccccccagggacccgtgacccttggaaagactttcacttccaacattggccagaagggttacgaacagcacgtgaccactcttaaggagcgaatcaagaagggagacatcatccaggccgtgccctcacagcgagtagctcggcccaccgacctgcatcccttcaacgtctacagacacctgcgaaccgtcaacccctctccctacctgttctacattgactatcttgatttccagcttgttggtgcttctcctgagctgctcgtcaagattgagaacggccgaattgtgtctcatcccattgctggaacggttaagcggggagctactcctgccgaggataaccagctggctcaggagcttctcaactctgagaaggaccgagctgagcacgtcatgctggtcgatttggcccgaaacgatgtcaaccgagtatgtgatcctcgatccacttccgtcgatcggcttttgggtgtcgaaaccttctcgcacgtccagcatctcgtttcccaggtgtctggtgttctgcgacccgaccagacccgattcgacgccttccgatccattttccctgccggaaccgtttctggtgcccccaaggtcaaggccatggagctggttggagagcttgagaaggaaaagcgaggtgtctacgccggtgccgttggatctttcggctacaacggagaggccatggacacttgcattgctcttcgaactatgcttctcaaggacggtgttgcgtacctgcaggccggaggaggcattgtcttcgattctgacgagtacgacgaatatgtcgagactatcaacaagatgatggcaaacaaccggtgtattgtcgaggccgaggagatctgggctggacagcagaagggtgagtag

SEQ ID NO: 76413 - protein, 507 aa, Yarrowia lipolytica CLIB122
MIQLRPTLEALQTIVADNRAAATKETLPDNLYPVFAYVDAEALTPHTAYLKLARLDDPNRSPSFLFESALGGKHLSRYSFIGSNPRKMIKTGAPHGPDVDPLNLLESELDQYRQFQTPGVPTLCGGAIGYISYDCIKYFEPRTKRDLKDVLEVPESALMLYDTIVAFDHVYQRLQVITNVKVEADTDLTKAYEDAKKEVQRIADLLTSPEVPQPPQGPVTLGKTFTSNIGQKGYEQHVTTLKERIKKGDIIQAVPSQRVARPTDLHPFNVYRHLRTVNPSPYLFYIDYLDFQLVGASPELLVKIENGRIVSHPIAGTVKRGATPAEDNQLAQELLNSEKDRAEHVMLVDLARNDVNRVCDPRSTSVDRLLGVETFSHVQHLVSQVSGVLRPDQTRFDAFRSIFPAGTVSGAPKVKAMELVGELEKEKRGVYAGAVGSFGYNGEAMDTCIALRTMLLKDGVAYLQAGGGIVFDSDEYDEYVETINKMMANNRCIVEAEEIWAGQQKGE

SEQ ID NO: 76414 - DNA, 1470 bp, Aspergillus nidulans FGSC A4
  CDS (1)..(1470)
atggcgcctcctgtgagcctcttcctttctagccaaattttgccccttgtccataccagctctgcgccgaagccctcgaatagttcgaaattgtcatttctttatgagagtgccgcgacaacagaaacgattgggaggtacagctttgttggtgcagacccccacaccgttctcaagacaggacctggtcatggccctgaaagcgatccgctcccgattctcgaagagaaactggccaacttccgtgtcgcgtccgtgcccggactgaccctgcctccgcttaccggtggtgctattgggtacgtggggtacgactgcgtcaaatactttgagcccaagactgcgcgtccgcttaaggatatcctcggcattccggagtcgctttttatgctgttcaacaccattgtggccttcgatcatttctaccaggttgtcaaggtcgtcacatacatcccaattaccgataacgacgcggaactcgacgccaactacaagcatggacaggcggtcatccagcgcatcatcgatactcttcagcgtccggatactcctttaccccctcagggcccgattatccaaaatcaggagtacacctccaacatcggacgcgaagggtacgaaggacacgtcgtgaaactaaaggaacacattgccaagggtgacatcttccaaaccgtgccgtcgcagcgtctttcccgcccaacgtcgcttcatccattcaacctcttccgccatctccgcaccgtcaatccctctccttacctcttctacatcgactgcgaggatttccagctagtcggagccagcccagagcttctggcaaaggaggaaaagggccgcatcatcacacaccctattgccggaacggtgaagcgtggcaagactgctgaagaagatgaagcgctcgctgaggaactacggtctagcctgaaggatcgcgcagagcacgtcatgttggtggacctagcgcgcaacgatgtcaaccgcgtctgtgacccactgaccacgcaagtcgatcgactgatggtcgttgagaagttctcccatgtccagcacctggtatcacaagtctccggtgttttgcgtcctgaaaagacccgctttgatgccttccgctccatcttcccggcaggcacagtctctggagcaccaaaagtccgagccatgcagttaattgcagaactggagggtgagaaacgaggagtctacgctggtgcagtcggctacttcggatacaacatagcctcggccgacggatctaaggagattcctggtgcaatggacacctgtattgctttgcgtaccatgctggtgaaggacggcgtggcgtatctgcaagcaggtggtggtattgtgtttgattcagacccttacgatgagtatgtggagacactgaacaaactgggtgcgaacatcgcctgtatcaagggagcggaggaaaagtatctcagcatggaggcgaaaagctag

SEQ ID NO: 76415 - protein, 489 aa, Aspergillus nidulans FGSC A4
MAPPVSLFLSSQILPLVHTSSAPKPSNSSKLSFLYESAATTETIGRYSFVGADPHTVLKTGPGHGPESDPLPILEEKLANFRVASVPGLTLPPLTGGAIGYVGYDCVKYFEPKTARPLKDILGIPESLFMLFNTIVAFDHFYQVVKVVTYIPITDNDAELDANYKHGQAVIQRIIDTLQRPDTPLPPQGPIIQNQEYTSNIGREGYEGHVVKLKEHIAKGDIFQTVPSQRLSRPTSLHPFNLFRHLRTVNPSPYLFYIDCEDFQLVGASPELLAKEEKGRIITHPIAGTVKRGKTAEEDEALAEELRSSLKDRAEHVMLVDLARNDVNRVCDPLTTQVDRLMVVEKFSHVQHLVSQVSGVLRPEKTRFDAFRSIFPAGTVSGAPKVRAMQLIAELEGEKRGVYAGAVGYFGYNIASADGSKEIPGAMDTCIALRTMLVKDGVAYLQAGGGIVFDSDPYDEYVETLNKLGANIACIKGAEEKYLSMEAKS

SEQ ID NO: 76416 - DNA, 1569 bp, Candida albicans SC5314
  CDS (1)..(1569): transl_table=12
atgcagtcacaacttgtgcaaccaacaatcgaaacattgaagaagactattgatgccaatagttctttgaaagaaagtccaaatgtatatccagtatataaatatgtgccatataatgatataactattcatcaagcatatttgaaattagccaacttgaatgattcaaatagaacagaatcatttctttttgaatcctcggttaaaggtgacactgttgatagatattcatttattgggatacaacctaccaaaatcatcaagacaggtgacgatcctaagcaatttgctgatgaattttgtaatgtggatcccataactgttttggaaaaggaattgtctaagtataaacaagcaccattgcctggtttgcctaaattcaatggaggtgccactggatatatatcttatgattgtatcaagtattttgaaccaaaaaccaaacgaccaatgaaagatgttttgggattaccagaagcggttttaatgttttgtgatttggttgtggcttttgaccatgtttaccaaagattccaaatcatttacaacatcaaaatagacgacaatagagacaaaataaatgaagatatagaaagtttatataaacaggccacggaaaacattgaaaaagttgaaaaagttttattaaggaacacaactagtgaagaaattgctccaaaacaagggccaattaagttgggacagaatttcacttctaacattggtcaagaaggttacgaaaaacatgtcaccattttgaaagaacatattttaaaaggggacattattcaggcagtgccttcacaaagaattgctcgtccaacatcattacatccatttaatatatatagacatttgagaacagtcaatccatcaccttacttgttttacattgatttattagatttccaaatcattggtgcctcaccagaattattggttcaatctgacactaaggggagaattgttactcatcctattgctggtacaatgcctcgtggtaaaaccaacgaagaagacgaagaaaatgctgagattttgagagcaagtttgaaagatagagctgaacatattatgcttgttgatttggcaagaaatgatgtcaatagagtgtgtcatcccaccacaatcaaagttgacaaattattgactattcagagattttctcatgtcatgcatttggtgtctgaagtcagtgggactctacgtgaagatcaaacaagatttgatgcatttagatctatattcccagcagggactgttagtggtgctcctaaagttaaggctatggaattgattgcagaattggaaaaggaaaaaagaggtgtttatgctggtgctgttggccattggggatacgatgggaaaactatggacacttgtatcgcattgcgtaccatggtgtataaagatggtgttgcctatttacaagctggaggtggtattgtctttgatagtgatgaatatgatgaatacattgaaacaatgaataaaatgaaagctaataacaacaccattgtcgaagcagaaaagatttgggctaacaaagttggccaattagaggggtaa

SEQ ID NO: 76417 - protein, 522 aa, Candida albicans SC5314
MQSQLVQPTIETLKKTIDANSSLKESPNVYPVYKYVPYNDITIHQAYLKLANLNDSNRTESFLFESSVKGDTVDRYSFIGIQPTKIIKTGDDPKQFADEFCNVDPITVLEKELSKYKQAPLPGLPKFNGGATGYISYDCIKYFEPKTKRPMKDVLGLPEAVLMFCDLVVAFDHVYQRFQIIYNIKIDDNRDKINEDIESLYKQATENIEKVEKVLLRNTTSEEIAPKQGPIKLGQNFTSNIGQEGYEKHVTILKEHILKGDIIQAVPSQRIARPTSLHPFNIYRHLRTVNPSPYLFYIDLLDFQIIGASPELLVQSDTKGRIVTHPIAGTMPRGKTNEEDEENAEILRASLKDRAEHIMLVDLARNDVNRVCHPTTIKVDKLLTIQRFSHVMHLVSEVSGTLREDQTRFDAFRSIFPAGTVSGAPKVKAMELIAELEKEKRGVYAGAVGHWGYDGKTMDTCIALRTMVYKDGVAYLQAGGGIVFDSDEYDEYIETMNKMKANNNTIVEAEKIWANKVGQLEG

SEQ ID NO: 76418 - DNA, 1569 bp, Candida albicans SC5314
  CDS (1)..(1569): transl_table=12
  misc_feature (462)..(462): n is a, g, c or t
atgcagtcacaacttgtgcaaccaacaatcgaaacattgaagaagactattgatgccaatagttctttgaaagaaagtccaaatgtatatccagtatataaatatgtgccatataatgatataactattcatcaagcatatttgaaattagccaacttgaatgattcaaatagaacagaatcatttctttttgaatcctcggttaaaggtgacactgttgatagatattcatttattgggatacaacctaccaaaatcatcaagacaggtgacaatcctaagcaatttgctgatgaattttgtaatgtggatcccataactgttttggaaaaggaattgtctaagtataaacaagcaccattgcctggtttgcctaaattcaatggaggtgccactggatatatatcttatgattgtatcaagtattttgaaccaaaaactaaacgaccaatgaaagatgtnctgggattaccagaagcggttttaatgttttgtgatttggttgtggcttttgaccatgtttaccaaagattccaaatcatttacaacatcaaaatagacgacaatagagacaaaataaatgaagatatagaaagtttatataaacaggccacggaaaacattgaaaaagttgaaaaagttttattaaggaacacatctagtgaagaaattgctccaaaacaagggccaattaagttgggacagaatttcacctctaacattggtcaagaaggttacgaaaaacatgtcaccactttgaaagaacatattttaaaaggagacattattcaggcagtgccttcacaaagaattgctcgtccaacatcattacatccatttaatatatatagacacttgagaacagtcaatccatcaccttacttgttttacattgatttattagatttccaaatcattggtgcctcaccagaattattggttcaatctgacactaaagggagaattgttactcatcctattgctggtacaatgcctcgtggtaaaaccaacgaagaagacgaagaaaatgctgagattttgagagcaagtttgaaagatagagctgaacatattatgcttgttgatttggcaagaaatgatgtcaatagagtgtgtcaacccaccacaaacaaagttgacaaattattgactattcagagattttctcatgtcatgcatttggtgtctgaagtcagtgggactctacgtgaagatcaaacaagatttgatgcatttagatctatattcccagcagggactgttagtggtgctcctaaagttaaggctatggaattgattgcagaattggaaaaggaaaaaagaggtgtttatgctggtgctgttggccattggggatacgatgggaaaactatggacacttgtatcgcattgcgtaccatggtgtataaagatggtgttgcctatttacaagctggaggtggtattgtctttgatagtgatgaatatgatgaatacattgaaacaatgaataaaatgaaagctaataacaacaccattgtcgaagcagaaaagatttgggctaacaaagttggccaattagaggggtaa

SEQ ID NO: 76419 - protein, 522 aa, Candida albicans SC5314
MQSQLVQPTIETLKKTIDANSSLKESPNVYPVYKYVPYNDITIHQAYLKLANLNDSNRTESFLFESSVKGDTVDRYSFIGIQPTKIIKTGDNPKQFADEFCNVDPITVLEKELSKYKQAPLPGLPKFNGGATGYISYDCIKYFEPKTKRPMKDVSGLPEAVLMFCDLVVAFDHVYQRFQIIYNIKIDDNRDKINEDIESLYKQATENIEKVEKVLLRNTSSEEIAPKQGPIKLGQNFTSNIGQEGYEKHVTTLKEHILKGDIIQAVPSQRIARPTSLHPFNIYRHLRTVNPSPYLFYIDLLDFQIIGASPELLVQSDTKGRIVTHPIAGTMPRGKTNEEDEENAEILRASLKDRAEHIMLVDLARNDVNRVCQPTTNKVDKLLTIQRFSHVMHLVSEVSGTLREDQTRFDAFRSIFPAGTVSGAPKVKAMELIAELEKEKRGVYAGAVGHWGYDGKTMDTCIALRTMVYKDGVAYLQAGGGIVFDSDEYDEYIETMNKMKANNNTIVEAEKIWANKVGQLEG

SEQ ID NO: 76420 - DNA, 1536 bp, Ustilago maydis 521
  CDS (1)..(1536)
atgatcggcaaatcccagcacgcactcaagccttccctagaggaagtgcagtcggcgctcctttctgacaaccccacaggtaacatcattccggtctacacatcacttccctccgacctgctcacgcctgtcacggcgtatctcaagctttctaatggtgccgacacgtctcgtcgctctttcctgttcgagtcggtaaccggcggtgaaaagatcggtcgctactcgttcatcggctcagacccgctcaagattatccgtaccggtccagggctcgatgtcgaaggcgacccgcttctcgccattgaaaaagagctgagcccatacaagtacattcccgtgcaaggcttgcccaccttcactggcggtgccatcggctacatcagctacgattgcgttcaatactttgaacctcgaaccaagcgcgagctcaaggatgtcgtcggtattccagagagcgttttcatggtcgccgactcgttgatcgtgttcgaccacgtctttagcacggttcgttgcgttagccacgttcaccttgcgtcggagcttgccaagaatgcaacacctgccgatatcgagtcgttgtacgcaaaggcaaatgacaaggtcaacaagttgatcagcatcctcactctggctacgacgcctcttcctgagcagcctgcgatcctggccggtcaagaagctgtctcgaacgtcggcaaagcaggctacgaggcttttgtcacgtcgctgcgcaagaacatcgtcaagggagacattatccaagcggtgccatctcaacgactcaagcgtcgcacaacgctgcacgcgttcaactgctatcgacatctgcgacaggtgaatccttcaccgtatatgttctatgtcgactgtggagattgtcagttggtgggagcgtcgccggaaacgctgtgcaagatcgaggctggtaaggtggcggttcacgcgattgctggaacggtcaagagaggagccaatgatgttgaagatgctgagcttgcgtcgcagctcgcttcgtcggtgaaagatcaagccgagcatgtgatgcttgttgatctggcgcgcaacgacatcaatcgggtttgtgacccggctacgacgcaagtagaatcgttcatgaatgtggaaaagttctcgcatgtcatgcacctcacctcgcgcatcacgggacaacttcgtgctggcaagtcgcgcttcgacgcgctccgatccatcttccccgctggaaccgtatcgggcgcccccaagatccgcgccatcgaacttgtcagcgagctcgaacaggaaaaacgcggcgtatacgccggcgcggtcggccgcatcgacttcgcccacaacgagatggacgtctgcatcgccatccgcaccatgaccttcaaagacggcttcgcctacctacaggctggtggcggcatcgtctacgatagcatcgaagaggacgagtacatcgaaaccatcaacaagctacgtgccaacatcaggtgcatcgatcaggccgaacagtattattctgctcaacagcttcaccactga

SEQ ID NO: 76421 - protein, 511 aa, Ustilago maydis 521
MIGKSQHALKPSLEEVQSALLSDNPTGNIIPVYTSLPSDLLTPVTAYLKLSNGADTSRRSFLFESVTGGEKIGRYSFIGSDPLKIIRTGPGLDVEGDPLLAIEKELSPYKYIPVQGLPTFTGGAIGYISYDCVQYFEPRTKRELKDVVGIPESVFMVADSLIVFDHVFSTVRCVSHVHLASELAKNATPADIESLYAKANDKVNKLISILTLATTPLPEQPAILAGQEAVSNVGKAGYEAFVTSLRKNIVKGDIIQAVPSQRLKRRTTLHAFNCYRHLRQVNPSPYMFYVDCGDCQLVGASPETLCKIEAGKVAVHAIAGTVKRGANDVEDAELASQLASSVKDQAEHVMLVDLARNDINRVCDPATTQVESFMNVEKFSHVMHLTSRITGQLRAGKSRFDALRSIFPAGTVSGAPKIRAIELVSELEQEKRGVYAGAVGRIDFAHNEMDVCIAIRTMTFKDGFAYLQAGGGIVYDSIEEDEYIETINKLRANIRCIDQAEQYYSAQQLHH

SEQ ID NO: 76422 - DNA, 1605 bp, Cryptococcus neoformans var. neoformans B-3501A
  CDS (1)..(1605)
atggacccctcagtttcgaagcctacgccctctcttgaggagcttacaaacctcttcgccacggcctcctcgtctaccaccactctcacttctcgatccgccaccttatttcccactcccaatgccgaaccctcaaaacccgtcgagcccgcgaagcctaatctcattcctatctatgttgaaattcctgccgatttgctcacccccgtttcggcctatttgaagattgcaaaggatgaaaagtacagctacttattggagagtgttgttggtggagaaagcttggccagatatagttttgtcggttctaaccctttcaaaaccatcaaaaccggcgcgggagaagaagtcgagggtgaccccctggaagctttggagaaggaacttgagccctacagattcgctaagatccctgaaatctctgccttcactggaggtgccgttggttttattacctacgacgctatcaaccactttgaacccgtcaccacccccgccacaccccttcacaaccctatccctggcatgcctgaggcttgtttcatgcttttctctaccaatatcatctttgaccacatctaccagacagtcaagatagtgtctcatgtctacctccgcgacggtacacccgcttcccaaatcccttctctttacgatgaagcctcagccagaattgagagtgtccgacgtaagctcatgaaccccgaaacccccatgcctcaccaagggcctatcactcttggtaaccagtccgagagcaatgttggaaaggccggatacgaaggtttcgttaccaagctcaaggagcacattgttaagggcgatatcatccaggctgtgccctcgcaaagactgactagagagactgctttgcatccgttcaatgtgtacaggcacttgagaagattgaaccccagtccttacatgttctacttggactgcggagatgttcgattagtgggcgcaagtccagagacgctgtgtaaggtcgagggaagaaaagtgtacaaccacgctattgcaggtactgttaaacgagggaagaccgcggaggaggacgccgtccttggtgccggacttcttgcctctgacaaggaccgagcggagcacatcatgcttgtcgaccttgccagaaacgatgtcaatagaatttgcaagcccgagaccgttaatgttgacaaccttatgcaagtcgaaaagttcagtcacgttatacacttgacaagtcagatcagcggtatgctgagggatgaccaatctaggttcgacgccttccgatccatcttccctgccggtaccgtctctggcgctcccaagatcaaggcagtccaactcatttctggtcttgagaaggagcgacgtggtgtctacgccggtgcggttggtcgattcgactttgacagggacaatctcgatacctgtatcgccatccgaacaatgacatttaaggatggaaaggtgttcttgcaggcaggtggaggtatcgtctttgacagtgtggaagaagatgagtttgtggagaccattaacaagttgggggcgaatgtcaaatgtatcgaagaggctgagaagtactacgcgaggttgcaaggacagaacgtgtaa

SEQ ID NO: 76423 - protein, 534 aa, Cryptococcus neoformans var. neoformans B-3501A
MDPSVSKPTPSLEELTNLFATASSSTTTLTSRSATLFPTPNAEPSKPVEPAKPNLIPIYVEIPADLLTPVSAYLKIAKDEKYSYLLESVVGGESLARYSFVGSNPFKTIKTGAGEEVEGDPLEALEKELEPYRFAKIPEISAFTGGAVGFITYDAINHFEPVTTPATPLHNPIPGMPEACFMLFSTNIIFDHIYQTVKIVSHVYLRDGTPASQIPSLYDEASARIESVRRKLMNPETPMPHQGPITLGNQSESNVGKAGYEGFVTKLKEHIVKGDIIQAVPSQRLTRETALHPFNVYRHLRRLNPSPYMFYLDCGDVRLVGASPETLCKVEGRKVYNHAIAGTVKRGKTAEEDAVLGAGLLASDKDRAEHIMLVDLARNDVNRICKPETVNVDNLMQVEKFSHVIHLTSQISGMLRDDQSRFDAFRSIFPAGTVSGAPKIKAVQLISGLEKERRGVYAGAVGRFDFDRDNLDTCIAIRTMTFKDGKVFLQAGGGIVFDSVEEDEFVETINKLGANVKCIEEAEKYYARLQGQNV

SEQ ID NO: 76424 - DNA, 1422 bp, Leptospira interrogans serovar Copenhageni str. Fiocruz L1-130
  CDS (1)..(1422): transl_table=11
atggaaactccagtttctctgtttgcaaaatggggatgtgaatcttctcaaaattccttcctactcgaatctgtagaaggcggagaaaaactgggaagaaattcttttttaggtaaaactccttctcgtctccttcaaggtaaggacggtcttttttatatcacagttgcaaatgaacctcctacagaagtaatcacttatgatcctttggttcttttagaaaatcttttgggagatgacgtatatgttcaagattatcgtcttcctccttttgcaggtggagcggtcggttttttatcctttgccgcggttcgttattacgaaaatattccagatacaaaaccagaagatgaaaatgcccccgactgctattttggaatttatgatgaacttctaatagtcgatcatattgatcatgtgttaagaattgttgtcaatgcaagagtcggagaacactcctccctgagagaatgttacgattttgtaattgataaaatcaactctatcgaaaacgaaattcgaaacggaagtatcccggaagagatcaaaaatcctaaaatagcaaccggaagtctagagttaaatccgaatattccagatgaagaatataagaaaaatgtagaaaaagccaaagaatatattcaagcaggagatatttttcaggtagttccttcccgtaagttgaaatttaagccggatgttcctccgtttcaagtctatcgtggcttaagaaccgtaaatcccagtccctacatgtattatcttaagttaggcgaaattaccatcgtcggaagttctcccgaaattatggtaaaatacgctggaaatcagacctatcttcgtccgatcgccggaacccgtccacgaggcaaaaatccaaatgaagataagtttctagaagagaatcttctttctgatcctaaagaaatttccgaacatattatgttagtcgacttaggacgtaacgatctaggaagagtttgtaaacctggaagcgttcacgtgaatgatttcaaagttattgaaaaatattcccacgttatgcacattgtaagtcagtgttccggcgaactggacgatgaaaaaactgtttacgatttgattcgcgccgctcttcccgcagggaccgtgtcgggtgcgcctaaaatccgcgcgatggagattatagacgaattagaaacaactcgaagagcgatttattctggtgctttgggctatatttctttttcgggagaaactgatcttgcaatcatcattcgtacgatcgtgttttacaaagacacggcgttcttacaggcaggcggaggagttgtatacgattcggttccagagttggaattagaagaaacgaaaaataaaatggcagcgcttttaaaagcggtagagttcgcaagaaatggactcaaaggagaatggaaataa

SEQ ID NO: 76425 - protein, 473 aa, Leptospira interrogans serovar Copenhageni str. Fiocruz L1-130
METPVSLFAKWGCESSQNSFLLESVEGGEKLGRNSFLGKTPSRLLQGKDGLFYITVANEPPTEVITYDPLVLLENLLGDDVYVQDYRLPPFAGGAVGFLSFAAVRYYENIPDTKPEDENAPDCYFGIYDELLIVDHIDHVLRIVVNARVGEHSSLRECYDFVIDKINSIENEIRNGSIPEEIKNPKIATGSLELNPNIPDEEYKKNVEKAKEYIQAGDIFQVVPSRKLKFKPDVPPFQVYRGLRTVNPSPYMYYLKLGEITIVGSSPEIMVKYAGNQTYLRPIAGTRPRGKNPNEDKFLEENLLSDPKEISEHIMLVDLGRNDLGRVCKPGSVHVNDFKVIEKYSHVMHIVSQCSGELDDEKTVYDLIRAALPAGTVSGAPKIRAMEIIDELETTRRAIYSGALGYISFSGETDLAIIIRTIVFYKDTAFLQAGGGVVYDSVPELELEETKNKMAALLKAVEFARNGLKGEWK

SEQ ID NO: 76426 - DNA, 1521 bp, Prochlorococcus marinus str. NATL1A
  CDS (1)..(1521): transl_table=11
atgcttaatttagataaggaagaatttattttgtcagcgtccagcggggctaattatattccgttggcaaaaagttggccggcagatttagaaactcctcttactacctggcttaaagttggtaatgatgctccttcaggagtattgcttgaatcagtagagggtggagaaactatcggtaggtggagtgtggttgcatcagatcccctttggaaagtagtagtaaggggcgatgaattaactagatgctggagggatggaaaacaagaaaagtttcatggaaatccagtggaaatcctcaggaaaatgcttgagccgtataaatctgtttctttgcctggcttgccacaactgggacaactttttggcatgtggggatatgaactaattcaatggatagagccctcagtgcctacttatgaattatcagatcaagacttacctgatggtatttggatgtttatggacaaagttctgatttttgatcaagtcaaacgcctaataacagctgttgcatatggaaatttaagtgatggagtttcttctcaaaaagcttatgaaattgcctgtgaacaaatcaatgaactgcaagatttaatgtcttctcctttaaagccaataaagtctttaaagtggaatcaaaaatcgaatagatctcctgatatggctgctaatacctcaaaaagtgaatttgaacatagtgttgaagcggcaaaagaatttattaaacaaggcgatgtttttcagttagttcttagtcaaaaattggagtcgactgttacgcaaaaaccctttgaactatatcgaagcctaaggatggtaaatccctctccatttatggcgttttttgactttggtgactggcaacttattggttctagcccggaggtaatggttaaggcccaaaaaacagaaaagggtattcaaacaagtttgagaccaattgcaggtacacgtcctagaggtaaaaatgatttggaagatgcagccttagagaaagatcttttaaaagatcccaaagaacgagcagaacatgtgatgttggtagatttgggtcgaaatgatttaggtcgtgtttgtaccccaggtagtgttgttgtgaaagaattaatggttattgaaaaatattcgcatgtaatgcatatcgtcagtgaggttgaaggcactttaaaaaaagaacaggatgtttgggacttattaattgcttctttcccagctgggactgtaagtggagccccaaaaataagagcaatgcaactaattaatcaattagaaaaacaacgtagagggccttattcaggcgtttatgggtctatagatttaaatggcgcattaaatacagctattactattaggacaatgattgtacgtaaaaaaaataaaaatggttttactgttgaagtgcaagcaggggcaggggttgttgcagattccatttcttctaatgagtatcaagaaactttaaataaagccaaagggatgtttactgctttagcttgcttagacccccaagatttatga

SEQ ID NO: 76427 - protein, 506 aa, Prochlorococcus marinus str. NATL1A
MLNLDKEEFILSASSGANYIPLAKSWPADLETPLTTWLKVGNDAPSGVLLESVEGGETIGRWSVVASDPLWKVVVRGDELTRCWRDGKQEKFHGNPVEILRKMLEPYKSVSLPGLPQLGQLFGMWGYELIQWIEPSVPTYELSDQDLPDGIWMFMDKVLIFDQVKRLITAVAYGNLSDGVSSQKAYEIACEQINELQDLMSSPLKPIKSLKWNQKSNRSPDMAANTSKSEFEHSVEAAKEFIKQGDVFQLVLSQKLESTVTQKPFELYRSLRMVNPSPFMAFFDFGDWQLIGSSPEVMVKAQKTEKGIQTSLRPIAGTRPRGKNDLEDAALEKDLLKDPKERAEHVMLVDLGRNDLGRVCTPGSVVVKELMVIEKYSHVMHIVSEVEGTLKKEQDVWDLLIASFPAGTVSGAPKIRAMQLINQLEKQRRGPYSGVYGSIDLNGALNTAITIRTMIVRKKNKNGFTVEVQAGAGVVADSISSNEYQETLNKAKGMFTALACLDPQDL

SEQ ID NO: 76428 - DNA, 1521 bp, Prochlorococcus marinus str. MIT 9303
  CDS (1)..(1521): transl_table=11
atgctcagctctgatcgtgaccatttctttgagatggctgctagtggtgccaatttcattcctttggcccacagttggccagcggatctggagacccctctcacaacttggttaaaagttggggcagaccatccccctggggttttacttgaatcggtcgaagggggtgaaactcttgggcgctggagtgtggttgcctgcaatccactttggactgccacatgccgagggaaacacctcacacgtcgttggcgagaaggacgaacagatgaagccatcggcaacccttttgaaggcctcaggcaatggctagctccttatcgcaccgcaacccttccaggcctacccccccttggtcagctctatggaatgtggggttttgaactgatcaagtgggttgaacccacagtgcccgttcacttaagggacaacaacgatccgcctgatggcatctggatgctgatggacagcatcttgatcattgatcaagtcaaacgcctcatcactgccgttgcatacgcagacctgagtggcgagcaaacggctaacgaagcttgggacaaggcacaagcacgcattcaagacctagaaaagtgcatggcggaaccacttgcaccgattcagccactgaaatggcaaccaaaaggtcaatctccaccttccaccatcagtaactacagccaaaaaggctttgaggaggcagttcaaacggccaagcaacacatcgccgcaggggatgtgttccagcttgtgatcagtcaaaggctggagaccagagttcctcaacagccacttgagctctaccgaagtctgcggatggtgaatccttctccatatatggctttctttgacttcggcgactggcagctgattggctcaagcccggaggtcatggtcaaggcggagccagtcgtcgatggcattaaggccagccttcggcctattgccggcacgcgtccgcgtggcggcaacgaacttgaggaccgcaatcttgaagcagagttgatggcagatcccaaggaacgtgccgagcatgtgatgttggttgatcttggccgcaatgaccttggacgcgtttgcaggccgggcagtgtgacggtgaaagagctgatggtgatcgagaaatattcccacgtcatgcacatcgtcagtgcagtggaaggtgtgcttgccaaaggcaaggatgtttgggatctactcatggcctcattcccagcaggcacggtcagtggcgccccaaaaatcagagccatgcagctcattcatgacctcgaacccgactcacgaggaccttattcaggtgtttatgggtccatcgatctcaatggtgccctgaatacagctataaccattcgcacaatgattgtgcggccccatcctgaaggcggctggcaagtcaaggttcaagcaggcgctggtgtggtggccgattccatccccaccaaggaatacgaagagaccctcaacaaggcaaggggaatgctcacagccctggcctgcctcgagtcccacaagtcatga

SEQ ID NO: 76429 - protein, 506 aa, Prochlorococcus marinus str. MIT 9303
MLSSDRDHFFEMAASGANFIPLAHSWPADLETPLTTWLKVGADHPPGVLLESVEGGETLGRWSVVACNPLWTATCRGKHLTRRWREGRTDEAIGNPFEGLRQWLAPYRTATLPGLPPLGQLYGMWGFELIKWVEPTVPVHLRDNNDPPDGIWMLMDSILIIDQVKRLITAVAYADLSGEQTANEAWDKAQARIQDLEKCMAEPLAPIQPLKWQPKGQSPPSTISNYSQKGFEEAVQTAKQHIAAGDVFQLVISQRLETRVPQQPLELYRSLRMVNPSPYMAFFDFGDWQLIGSSPEVMVKAEPVVDGIKASLRPIAGTRPRGGNELEDRNLEAELMADPKERAEHVMLVDLGRNDLGRVCRPGSVTVKELMVIEKYSHVMHIVSAVEGVLAKGKDVWDLLMASFPAGTVSGAPKIRAMQLIHDLEPDSRGPYSGVYGSIDLNGALNTAITIRTMIVRPHPEGGWQVKVQAGAGVVADSIPTKEYEETLNKARGMLTALACLESHKS

SEQ ID NO: 76430 - DNA, 1560 bp, Mycobacterium sp. JLS
  CDS (1)..(1560): transl_table=11
gtgcagacgaccgccgcttccgccttcgactcctcgcgcgagcgttcgtcgctggccacgaccacgtctcgcgaggacttccgggcactggcagccgagcaccgcgtggtgccggtggtccgcaaggtgctcgccgacagcgagaccccgctgtcggcgtaccgcaagctcgccgccaaccggcccggcacgttcctgctcgaatcggccgagaacggcaggtcgtggtcgcggtggtcgttcatcggggcgggcgcaccgtcggcgctgacagttcgcgacggcgaggcggtgtggttgggcgtgacgccgaaggatgcgccgagcggtggtgatccgctgcaggcactgcggtccacgctggcgctgctggagaccgcgccgctgccgggcctgccgccgctgtcgagcggtctggtcgggttcttcgcctatgacatggtgcggcggctggagcggctgccgtcgctggccgtcgacgatctcggactgcccgacatgctgctgctgttggccaccgacatcgccgccgtcgaccaccacgagggcaccatcacgctgatcgccaacgcggtgaactggaacggcaccgacgagaacgtggacggcgcgtatgacgacgcagtcgcccggctcgacgtgatgaccaaggcgctggggcagtcgctgccctcgtcggtggccacgttcgcccggccggccccgacgcaccgggcgcagcgcaccgtcgaggagtacaccgcgatcgtcgagaagctcgtcggcgacatcgaggccggtgaggcgttccaggtggtgccgtcgcaacgcttcgagatggacaccgtcgccgatccgctcgatgtgtaccggatgctgcgggtcaccaaccccagcccgtacatgtacctgctgaacgtgccggatgagactgggggactggacttctcggtggtcgggtcgagtccggaggcgctggtgaccgtcgccgacgggaaggccacgacgcacccgatcgccggcacccgctggcgcggcgacaccgaggaagaggacctgctgctcgagaaggagctgctggccgacgagaaggaacgcgccgaacacctgatgctggtggacctgggccgtaacgatctgggccgggtgtgtgaacccggcaccgtgcgggtcgaggactacagccacatcgagcggtacagccacgtcatgcacctggtgtcgacggtcaccggacgtctcgccgagggcatgaccgcgctcgacgcggtgacggcctgtttcccggcgggcacgctgtcgggcgccccgaaggtgcgggccatggagctcatcgaggaggtcgagaagacccgccgcgggctctacggcggggtgctgggctacctcgacttcgcgggcaacgccgatttcgcgatcgccatccggaccgcgctgatgcgcgacggggtcgcctacgtccaggccggcgggggagtcgtggccgactccaacgggccgtacgagttcaacgaggccaccaacaaggccaaggcggtgctggccgccgtcgccgccgccgaaaccctgcgcgaaccatga

SEQ ID NO: 76431 - protein, 519 aa, Mycobacterium sp. JLS
MQTTAASAFDSSRERSSLATTTSREDFRALAAEHRVVPVVRKVLADSETPLSAYRKLAANRPGTFLLESAENGRSWSRWSFIGAGAPSALTVRDGEAVWLGVTPKDAPSGGDPLQALRSTLALLETAPLPGLPPLSSGLVGFFAYDMVRRLERLPSLAVDDLGLPDMLLLLATDIAAVDHHEGTITLIANAVNWNGTDENVDGAYDDAVARLDVMTKALGQSLPSSVATFARPAPTHRAQRTVEEYTAIVEKLVGDIEAGEAFQVVPSQRFEMDTVADPLDVYRMLRVTNPSPYMYLLNVPDETGGLDFSVVGSSPEALVTVADGKATTHPIAGTRWRGDTEEEDLLLEKELLADEKERAEHLMLVDLGRNDLGRVCEPGTVRVEDYSHIERYSHVMHLVSTVTGRLAEGMTALDAVTACFPAGTLSGAPKVRAMELIEEVEKTRRGLYGGVLGYLDFAGNADFAIAIRTALMRDGVAYVQAGGGVVADSNGPYEFNEATNKAKAVLAAVAAAETLREP

SEQ ID NO: 76432 - DNA, 1521 bp, Prochlorococcus marinus str. MIT 9301
  CDS (1)..(1521): transl_table=11
atgatcagctcacagaaaattagttttttaaaggcttataaagaaggtaaaaattttatacctatagtagaaacttggccagctgatttggagactccattatcaacttggttaaaattatcttcaaaagattcccatggtgtttttcttgaatctgttgaaggtggggagaatttgggcaggtggagtattgttgctactaaacctctttgggaggcagtttgttatggagaagaaatagttaaaacttggaataatggcaaaactgaaacacataaaggtgatccttttgatattttaaaaagttggacaatggaatataagtcaaccatgcttgaagaattaccatcaattggacagttatatggctcttggggttatgaattaataaatcgaatagagccaagcgttccaataaatgaaatgccagaaaacaatatccctcaaggttcctggatgttttttgatcaattagttgtttttgatcaaataaaaagatgtattactgcggtggtttatgcagatacaacttcttctcaagagtcttcaattgaagagttgtatctaaactcaatatctaaaattcaggaaactagaaatttaatgagagttcctctaaaagaaaatgagtttttagattggaatgaaaatgataatttaaatttagatttagaaagtaattgggagaaaaaagattttgaggatgcagttctctctgcaaaagaatacataagaaagggagatatcttccaaatagttataagtcaaagatttcaaactcaagtcaataatgatccctttaacttatatagaagtctgaggatggttaatccatctccttacatgtcattttttgatttcggctcatggtatctgataggttcaagtcctgaagtaatggttaaagcagaaaaaaataaaaatagtcagattgttgcaagcttaagaccaatagctggcacgagaccaagaggtattgataatcaacaagacttggaattagaaaaggaattattaaaggatcccaaagagatagctgagcatgtaatgttgattgatcttggaagaaatgatcttggaagagtttgtgaaattggtactgtcaaggtaaaggatttaatgattattgagaaatattcacatgttatgcatatagtcagtcaagttgagggaatcttaaaaaataatgctgatgtatgggatttgctcaaagcatcctttcctgctgggactgtgactggcgccccaaaaataagagctatgcaattgattaagcattttgaaaaagatgctagaggaccttatgctggtgtatacggatctattgatattaatggtgcattaaatacagcaattacgataagaaccatgatagttaaaccctcaagagatgggaaatatgatgtgtcagtgcaagcaggagctggaatagttgctgattcttttcctgaaaatgaatatcaagagacgataaataaagcaaagggaatacttaaagcattagcctgtttggataaataa

SEQ ID NO: 76433 - protein, 506 aa, Prochlorococcus marinus str. MIT 9301
MISSQKISFLKAYKEGKNFIPIVETWPADLETPLSTWLKLSSKDSHGVFLESVEGGENLGRWSIVATKPLWEAVCYGEEIVKTWNNGKTETHKGDPFDILKSWTMEYKSTMLEELPSIGQLYGSWGYELINRIEPSVPINEMPENNIPQGSWMFFDQLVVFDQIKRCITAVVYADTTSSQESSIEELYLNSISKIQETRNLMRVPLKENEFLDWNENDNLNLDLESNWEKKDFEDAVLSAKEYIRKGDIFQIVISQRFQTQVNNDPFNLYRSLRMVNPSPYMSFFDFGSWYLIGSSPEVMVKAEKNKNSQIVASLRPIAGTRPRGIDNQQDLELEKELLKDPKEIAEHVMLIDLGRNDLGRVCEIGTVKVKDLMIIEKYSHVMHIVSQVEGILKNNADVWDLLKASFPAGTVTGAPKIRAMQLIKHFEKDARGPYAGVYGSIDINGALNTAITIRTMIVKPSRDGKYDVSVQAGAGIVADSFPENEYQETINKAKGILKALACLDK

SEQ ID NO: 76434 - DNA, 1497 bp, Herminiimonas arsenicoxydans
  CDS (1)..(1497): transl_table=11
atgactgaactcgaattcaaatcgctggccacgcaaggctataaccgcattccactggtcgccgaagcattcgccgatctggaaacgccgctttcactgtacctcaagctggcgcaaacccaggatggcgggaaaaacacctttctgctcgaatccgtggtgggcggcgaacgttttggccgctattcctttatcggcctgcctgccaacaccttgatgcgcagcttcggcacgcgcgttgaagtggtacgcaacggcgccgttgtggaaacctttgacggcaacccgctcgatttcatcgcggaatttcaggcgcgctataaagtcgcgatcctgcccggcatgccgcgcttttgcggcggcctggccggctacttcggctacgacaccgtgcgccatgttgaaaaacgccttgcgcatacaacgcccaaagacgatctcggcctgccggaaatccagttgctgctgaccgaagaactggcggtcatcgacaatctgtcaggcaagctctatctgattgtgtatgccgatccagcgcagccggaagcctatgccaacgcacgtcagcgtctgaaagacttgcgcaacaaattgcatagagccgtcgaagcgccggtcacatccgcgtcggtacgcactgatacgattcgcgaattcaacaaaaatgattacctggctgcggtcgccaaagccaaggaatacgtgatggccggcgatctgatgcaggtccagatcggacagcgcatcaagaagccgtatgtcgatgcgccgctgacactgtatcgcgcgttgcgctccctgaatccttcaccgtatatgtacttctacaatttcggcgacatgcaaatcgtcggcgcctcaccggaaattctggtgcgtaatgaaacggtagccagcggcaagaaaaaaatcacgatacgtcctttggccggcacccgtccgcgcggcgagacgccagaaaaagacgcgatcctcgccaaggaattgctggccgatccaaaagagatcgccgaacacgtaatgctgatcgatctcgcacgcaacgacatcggccgcattgccgaaaccggcagcgtattggtcaccgacaagctggtgatcgaaaaatattcgcacgtgcagcacatcgtctcgaatgtcgaaggcacattgaaagacggcttgtcgaatctggacgtattgaaagccactttcccggccggcaccttgtcgggcgcaccgaaagtgcgggcaatggaaatcattgacgaactggaaccgaccaagcgcggcatctatggcggcgcatgcggctatctgtccttcggtggggaaatggatctggcaatcgcgatccgcaccggcgtcatcaaggatggcatgctgtacgtgcaggctgcagccggcatcgttgccgactcggtacccgagatggaatggcaggaaaccgagaacaaggcccgcgctgttttgagagctgcggaacaggtgcaagatggtttggatggggagatttaa

SEQ ID NO: 76435 - protein, 498 aa, Herminiimonas arsenicoxydans
MTELEFKSLATQGYNRIPLVAEAFADLETPLSLYLKLAQTQDGGKNTFLLESVVGGERFGRYSFIGLPANTLMRSFGTRVEVVRNGAVVETFDGNPLDFIAEFQARYKVAILPGMPRFCGGLAGYFGYDTVRHVEKRLAHTTPKDDLGLPEIQLLLTEELAVIDNLSGKLYLIVYADPAQPEAYANARQRLKDLRNKLHRAVEAPVTSASVRTDTIREFNKNDYLAAVAKAKEYVMAGDLMQVQIGQRIKKPYVDAPLTLYRALRSLNPSPYMYFYNFGDMQIVGASPEILVRNETVASGKKKITIRPLAGTRPRGETPEKDAILAKELLADPKEIAEHVMLIDLARNDIGRIAETGSVLVTDKLVIEKYSHVQHIVSNVEGTLKDGLSNLDVLKATFPAGTLSGAPKVRAMEIIDELEPTKRGIYGGACGYLSFGGEMDLAIAIRTGVIKDGMLYVQAAAGIVADSVPEMEWQETENKARAVLRAAEQVQDGLDGEI

SEQ ID NO: 76436 - DNA, 1494 bp, Burkholderia vietnamiensis G4
  CDS (1)..(1494): transl_table=11
atgaccgaactcgaattccaatcgcttgcgaacgaaggctacaaccgcattccgctgatcgcggaagcactcgccgacctcgaaacgccgctgtccctctacctgaagctggcacagcccgaacgcgcgggcgccaactcgttcctgctcgaatcggtggtgggcggcgaacgcttcggccgctactcgttcatcggcctgccggcacgcacgctggtgcgcgcccgcaacggcgtgtccgaagtcgtgcgcgacggcgaggtgatcgaaacgcacgacggcgacccgttcgccttcatcgagtcgttccaggcgcgcttcaaggtcgcgcagcgcccgggcctgccgcgcttctgcggcggcctggccggctatttcggctacgacgccgtgcgctacatcgagaagaagctggcgaacaccgcgccgcgcgacgatctcggcctgcccgacatccagctgctgctcaccgaggaagtcgcggtgatcgacaacctcgccggcaagctgtacctgatcatctatgccgacccggcgcagcccgaggcgtacacgaagggcaagcagcgtctgcgcgaactgaagcagcgcctgcgcacgacggtgcagccgcccgtcacgtcggcgagcgtgcgtaccgagacgttccgcgaattcaagaaggaagactatctggccgccgtgcgtcaggcgaaggaatacatcgcggccggcgagctgatgcagatccaggtcggccagcggctgaccaagccgtaccgcgacaatccgctgtcgctgtatcgcgcgctgcgttcgctgaacccgtcgccgtacatgtattactacaacttcggcgatttccacgtggtcggcgcatcgccggaaatcctcgtgcgccaggaaaagcgcggcgacgaccagatcgtcacgatccggccgctggccggcacgcgcccgcgcggcaacacgcccgagcgcgacgccgaactcgcgaccgaattgctgaacgacccgaaggaaatcgccgagcacgtgatgctgatcgacctcgcgcgcaacgacgtcggccgcatcgcgcagatcggctcggtgcaggtgaccgacaagatggtgatcgagaagtactcgcacgtgcagcacatcgtcagctcggtcgagggcaagctcaagcccggcatgacgaactacgacgtgctgcgcgcgacgttcccggccggcacgctgtcgggcgcgccgaaggtgcgcgcgatggagctgatcgacgagctcgagccggtcaagcgcgggctgtacggcggcgcggtcggctacatgtcgttctcgggcgagatggacctcgcgatcgcgatccgcacgggcctgatccacaacggcaacctgtacgtgcaggcggcggcgggcgtcgtcgccgactcggtgcccgaatccgaatggcaagagaccgaaaacaaggcgcgcgcggtgctgcgtgcggccgaacaggtccaggacggcctcgatagcgacttctga

SEQ ID NO: 76437 - protein, 497 aa, Burkholderia vietnamiensis G4
MTELEFQSLANEGYNRIPLIAEALADLETPLSLYLKLAQPERAGANSFLLESVVGGERFGRYSFIGLPARTLVRARNGVSEVVRDGEVIETHDGDPFAFIESFQARFKVAQRPGLPRFCGGLAGYFGYDAVRYIEKKLANTAPRDDLGLPDIQLLLTEEVAVIDNLAGKLYLIIYADPAQPEAYTKGKQRLRELKQRLRTTVQPPVTSASVRTETFREFKKEDYLAAVRQAKEYIAAGELMQIQVGQRLTKPYRDNPLSLYRALRSLNPSPYMYYYNFGDFHVVGASPEILVRQEKRGDDQIVTIRPLAGTRPRGNTPERDAELATELLNDPKEIAEHVMLIDLARNDVGRIAQIGSVQVTDKMVIEKYSHVQHIVSSVEGKLKPGMTNYDVLRATFPAGTLSGAPKVRAMELIDELEPVKRGLYGGAVGYMSFSGEMDLAIAIRTGLIHNGNLYVQAAAGVVADSVPESEWQETENKARAVLRAAEQVQDGLDSDF

SEQ ID NO: 76438 - DNA, 2166 bp, Bradyrhizobium sp. ORS278
  CDS (1)..(2166): transl_table=11
atgaacaggaccgttttcgcccttccggcccgcagcgactaccgcacctcgagcgggctcgcgatcacgcgcgccgtcgagcagttttccggcggcgccagccggctcgacgacctgatcgacctgctggaccgccgccgcggcgtggtgctgtcctcgggcacgaccgtgcccggccgctacgagagtttcgacctcggcttcgccgatccgccgttggtgctggagacgaaggggaccgatttcacgctgcaggccctgaacaagcgcggcgaggtcctgatcgccttcctgaaggacaccctgcgcgagccctgcgtcgtcatcaccgcagcctcgccagcgcggctcgccggccatatcgtccgcgggcccgcgccggtcgaggaggaccagcgcacccggcgcgccagcgtgatgtcgctggtgcgggcgatgatcgcgacgctcgcagccaatgacgatccgctgctcggcctgttcggcgccttcgcctatgatctcgtgttccagatcgaggacctcgtccaaaagcgcccgcgcgagaaggaccagcgcgatatcgtgctctacgtgcccgatcgcctgctggcctacgaccgcgccactggtcgcggcgtggttctgtcttacgatttttcctggaacggccagtcgacatcaggcctgccgcgcgacacggacgccagcgtctatctgaaggaaccccgccagggttttgccgaccacgcgccgggcgaataccaggcgacggtggacaaggcccgcgcggcgttcgcccgcggtgacctgttcgaggcggtgcccggccagctgttcgccgagccctgcgagcgttcgccggccgaggtgttccagcggctctgccgcatcaacccgtcgccctacggcgcgctgatgaatctcggcgatggcgaattcctcgtttccgcgtcgccggagatgttcgtgcgctccgacggccgccgcgtcgagacctgtccgatctccggcaccatcgcgcgcggccgcgacgccatcggcgacgccgagcagatccgccagctcctgaactccgagaaggacgagttcgagctcaacatgtgcaccgacgtcgaccgcaacgacaaggcgcgcatttgcgtgcccggcaccatcaaggtgctggcgcgccggcagatcgagacctactcgaaactgttccacaccgtcgatcacgtcgagggcatgctgcggccgggctttgacgcgctcgatgcgtttttgactcacgcctgggcggtcacagtgaccggcgcgccaaaactgtgggcgatgcagttcgtcgaggaccatgagcgctcgccgcggcgctggtacgccggcgcgatcggcgcggtgaatttcgacggctcgatcaataccgggctgaccatccggaccattcgcatgaaggacgggctcgccgaggttcgcgtcggcgccacctgtttgttcgatagcgacccggcggccgaggatcgcgagtgccaggtcaaggcggcggcgctgtttcaggcgctgcggggcgatccgccgaagccgctgtcctcgacagcgccggatgccaccggctcgggcaagaacgtgctgctgatcgatcacgacgactcgttcgtgcacatgcttgcggattatttccgccaggtcggcgccaacgtgaccgtggtgcgttacgtccatgcgctgaccatgctggccgagcgcagctgggatctcatcgtgctgtcgccgggccctggccggccggaagacttcaagatctccacgaccatcgacgccgcgctcgccaagaagctgccgatcttcggcgtctgcctgggcgtgcaggcgatgggcgagtattttggcggccagctcggtcagctcgcccagcccgcgcatggccggccgtcgcgcgtgcaggtgcgcggcggacgcttgatgcaggggctgccgaacgagatcgtgatcggccgctaccattcgctgttcgtcgagcgcgacagcatgcccgaggtgctgacggtgacggcggcgaccgaggatggggtggcgatggcgatcgagcacaagacgctgccggtcggcggcgtgcagttccatccggaatcgctgatgtcgctcggcgatgccgtgggcttgaggatcgtggagaatgcgttccggctcaatcagccggggagttga

SEQ ID NO: 76439 - protein, 721 aa, Bradyrhizobium sp. ORS278
MNRTVFALPARSDYRTSSGLAITRAVEQFSGGASRLDDLIDLLDRRRGVVLSSGTTVPGRYESFDLGFADPPLVLETKGTDFTLQALNKRGEVLIAFLKDTLREPCVVITAASPARLAGHIVRGPAPVEEDQRTRRASVMSLVRAMIATLAANDDPLLGLFGAFAYDLVFQIEDLVQKRPREKDQRDIVLYVPDRLLAYDRATGRGVVLSYDFSWNGQSTSGLPRDTDASVYLKEPRQGFADHAPGEYQATVDKARAAFARGDLFEAVPGQLFAEPCERSPAEVFQRLCRINPSPYGALMNLGDGEFLVSASPEMFVRSDGRRVETCPISGTIARGRDAIGDAEQIRQLLNSEKDEFELNMCTDVDRNDKARICVPGTIKVLARRQIETYSKLFHTVDHVEGMLRPGFDALDAFLTHAWAVTVTGAPKLWAMQFVEDHERSPRRWYAGAIGAVNFDGSINTGLTIRTIRMKDGLAEVRVGATCLFDSDPAAEDRECQVKAAALFQALRGDPPKPLSSTAPDATGSGKNVLLIDHDDSFVHMLADYFRQVGANVTVVRYVHALTMLAERSWDLIVLSPGPGRPEDFKISTTIDAALAKKLPIFGVCLGVQAMGEYFGGQLGQLAQPAHGRPSRVQVRGGRLMQGLPNEIVIGRYHSLFVERDSMPEVLTVTAATEDGVAMAIEHKTLPVGGVQFHPESLMSLGDAVGLRIVENAFRLNQPGS

SEQ ID NO: 76440 - DNA, 1458 bp, Dehalococcoides sp. BAV1
  CDS (1)..(1458): transl_table=11
atgtattacccatctttagccgaagtaaaaaagctggccgcacagggcaacctgatacccatctcctgtgagattatggccgaccttgaaaccccggtttccgcttttctgaaaatcaaagacagccaaaatgcttttctgctggaaagtgtggaaggcggggagcgcgtagcccgatatagtttcatcggcaccaacccctataaagtgcttacagcctatcagacagataccgttccccctctaacccaagttgaaaatgaactaaacaaataccgggtagtaccggtgggggatttgccccgtttctgcggcggggcggtgggttttctgggctacgaggcagttacccgctttgaggagttgccctcgccatcggctgaccccctaaatcttccggaagcagtcttcatgctggttgataccatgctggtttttgaccacatcagccattccataaaagtactaagctatgtccataccgaacaggatattgaaacgtcatataatcaggctatccggaatatagaaaatctggttaaccgccttagaaagccgctgcccgaaaccgccccaaaatctaccgccgcaagtatccccgaaatgaaatccaatttcaaacaggcggattttgagggcaaggtatccaaaataagagattaccttaactcaggcgaagctattcaggtagttttgtcacagcgtctgtccagacccacctccgcccatccctttgacatctaccgtgccttgcgttcggtaaacccttcaccatacatgtactatctggatttcggtgatttccagattgtgggcgcctcgccggaggtactggtacgggtggaagacggcgaggttatgacccgccctctggcaggcaccagaaaacggggcaaaacccagaaagaagacaccagtcttgagcaggaactccgccatgacgaaaaagagtgtgccgaacataccatgctggtggatttgggacgaaacgatatcgggcgtataagccagccgggcacagtccgcataaccgacgtcatggatgtggaacgctattcccacgtaatgcatctggtttcccacgtacagggcaaattaaaaccaaacattactccgtttgaggctttgcaatcctgcttcccggcaggcacagtctcaggcgcacctaaaatacgggctatggaaataatagctgaaatggaaaccgaaaagagaggcatttatgccggggcagtcggatatttttcttattcgggcaatatggacatggctatagccatacgcaccatggttgtcaagggaggcattgcccatatccaggcaggctgcggcatagtaagtgacagcgtacccgaacatgagtatcaggaaacattaaacaaagctcaggctttgctgaaagctctggacagggcagaaaatcaggcatcggagaaaccgcatgttattactaattga

SEQ ID NO: 76441 - protein, 485 aa, Dehalococcoides sp. BAV1
MYYPSLAEVKKLAAQGNLIPISCEIMADLETPVSAFLKIKDSQNAFLLESVEGGERVARYSFIGTNPYKVLTAYQTDTVPPLTQVENELNKYRVVPVGDLPRFCGGAVGFLGYEAVTRFEELPSPSADPLNLPEAVFMLVDTMLVFDHISHSIKVLSYVHTEQDIETSYNQAIRNIENLVNRLRKPLPETAPKSTAASIPEMKSNFKQADFEGKVSKIRDYLNSGEAIQVVLSQRLSRPTSAHPFDIYRALRSVNPSPYMYYLDFGDFQIVGASPEVLVRVEDGEVMTRPLAGTRKRGKTQKEDTSLEQELRHDEKECAEHTMLVDLGRNDIGRISQPGTVRITDVMDVERYSHVMHLVSHVQGKLKPNITPFEALQSCFPAGTVSGAPKIRAMEIIAEMETEKRGIYAGAVGYFSYSGNMDMAIAIRTMVVKGGIAHIQAGCGIVSDSVPEHEYQETLNKAQALLKALDRAENQASEKPHVITN

SEQ ID NO: 76442 - DNA, 1533 bp, Synechococcus sp. WH 7803
  CDS (1)..(1533): transl_table=11
atgctcacacccgaccgcactgcatttctggaagccgttgcatccggttccacgttgattcccgtggccagcagctggcctgcggatctggagacacccctcaccacctggttgaaagtgggcgaggggcgtccccctggagttctgctcgaatccgtcgagggaggcgaaaccctcgggcgttggagcgtggtggcatgcaacccgctctggacactttccgcccggaaagatcgtctgcaaaggatctggagggatggccgggaagagacgttctcaggcaatcccttcgacaccttgcgcgcgtgtcttgcgccctacaagccggccaccttgtcgggactgccaccgctcggtcagctctatggcatgtggggctatgaactgattcgctggattgagccctcggtgccggtccatcccaatgatggggagggtccgccggagggactgtggatgctgatggacagcattctcattttcgatcaggtgaaacggctgatcacagccgtggcctacgccgatctgtcgggcgagcacaacgcttttgccgacccagaggccgcatggggcgatgccatccagcgcatccaagccctgaaaaactccatggccgagccgcttcccccagtgcgcccgctcgactggacacccagccaaggggacacaccctcaacatccagcaatcgaacccaggatgacttccaacaggcggttctcaaggccagggagcacatcgccgctggagatgcctttcagctggtgatcagccagaaactcagcacggagatcgaccaccccccccttgatctctaccgaagcctgcgcatggtgaatccatcgccctacatggcgtttttcgatttcggcgactggcagctgatcggatccagccctgaggtgatggtcaaggccgaacctgatcaaggagggatccgcgctgtcctgcgaccgattgcaggaacaaggccccggggaagcaatgaactggaagatcgcagtcttgaggcggagctgctcgctgaccccaaagaacgtgctgaacacgtgatgcttgttgacctcgggcgcaatgacctcggccgcgtctgcgttcccgggtcagtgaacgtgcgcgagctgatggtgatcgagcgctactcccatgtcatgcacatcgtcagtgaggtggagggtcgactggctccgggcaacgacatctgggatctgctgatggcgtccttccctgctggaaccgtgagcggagctcccaagatcaaggcgatgcaactcatccatgagcttgaacccgacccacgcggcccctactccggtgtttatggatcggtcgatctggcgggagctctgaacaccgccatcaccatccgcacgatggttgtgaagcccaaccaagacggcggatggacccttgaggtgcaggccggagccggcatcgttgcagactccaaacccgaggccgaataccaggaaaccctgaataaagcccgaggcatgctgaccgcactggcctgcctcgagggcgccgggtcatga

SEQ ID NO: 76443 - protein, 510 aa, Synechococcus sp. WH 7803
MLTPDRTAFLEAVASGSTLIPVASSWPADLETPLTTWLKVGEGRPPGVLLESVEGGETLGRWSVVACNPLWTLSARKDRLQRIWRDGREETFSGNPFDTLRACLAPYKPATLSGLPPLGQLYGMWGYELIRWIEPSVPVHPNDGEGPPEGLWMLMDSILIFDQVKRLITAVAYADLSGEHNAFADPEAAWGDAIQRIQALKNSMAEPLPPVRPLDWTPSQGDTPSTSSNRTQDDFQQAVLKAREHIAAGDAFQLVISQKLSTEIDHPPLDLYRSLRMVNPSPYMAFFDFGDWQLIGSSPEVMVKAEPDQGGIRAVLRPIAGTRPRGSNELEDRSLEAELLADPKERAEHVMLVDLGRNDLGRVCVPGSVNVRELMVIERYSHVMHIVSEVEGRLAPGNDIWDLLMASFPAGTVSGAPKIKAMQLIHELEPDPRGPYSGVYGSVDLAGALNTAITIRTMVVKPNQDGGWTLEVQAGAGIVADSKPEAEYQETLNKARGMLTALACLEGAGS

SEQ ID NO: 76444 - DNA, 1599 bp, Desulfovibrio vulgaris subsp. vulgaris str. Hildenborough
  CDS (1)..(1599): transl_table=11
atggagatggacgacgcgaaaaggcccgcaggcgcgaaacggcgcacgggcggtgaagaggacgcaggtcgtgtcgccggtcacgccacgacgcaggacaatgctcatgcgatgcccagcacgcaagccggcacgcaagccgggggcgcaggtgcccatgcggatgcgaatccggctggatgcccggatgggcgcatcgtgctgcggcagtcgtgcagcctgcttgagggcgatgtggatacgcccatcagtctgtttctgggcatggtggggtcggggcagggcatcctgctcgagagtgccgaggtggacggacgctgggggcgttacagcatcatcggcttcaacttccttctgcgtctcggctgtgcggcagggcggcttgaggtggcagtacgcgacccgcgtcttgcggcactgaaggagctggaggggatgcccttcatcgagggcgtgcgtgccgtcatgcggcggctgaccatcgaaccggaccccgacttcgccaaccagccgcccatcacgcgagccctgtacgggtacatgggctacggcgtggcaggtctgctcgaacccaaactcgccccggtgctacgggcggaagcggcagaggcgtgtcttgccctgccgggcacggtggtggtcttcgaccatctctacaaccgcctgaccatgctctcgctcaccgaccgcaacggtctgcgcatcgaccgttcggtgctcgaccgtgcgccgcagacgccggaggtggggcccacccgcgcggtgcccgacgagtcagcctacaagcgcgccgtggagcgcacccgcgagatgatccggcagggcgaggccatacaggtggtgctctccacgcggttccaggcgtccttcaatggcgaccccttcacgctgtaccgcagactgcgacgcatcaacccctcgccctacatgttcttcatgcgcctgccgggtgtctcgctgctgggttcgtcgccggaggtgatggtgcgttgcagcaaggggcggttgcaggtcagccccatcgccggaacccgtccgcgcggggtcgatgacgtcgaagacgcgcgcctcgcggcggaattgctcgatgaccccaaggaacgcgccgaacatgtcatgctggtcgacctcgggcgcaacgacctcgggcgcatcgccgcccccggtacggtgcaggtcgagcggttcatggaggtggagaagttctcgcacgtcatgcacctcacctcgcgggtgaccgcagacctcgcagaggggcacgacgcactggacgtgctgacggccacgtttccggcaggcacggtgagtggtgcccccaaggtgcgcgccatggaaatcatcgccgaggccgaaggacagccgcgcggcccctatgccgggtgcataggctggttcggactcgaccgtgacagcgtgagtctcgacaccggcatcaccatccgcagcatgtgggtgcgcgaggggcaggtgcactggcaggcgggggcgggcatcgtgttcgactcgaaacccgccgcggaatggaaggagtgctgcaacaaggcggcggccatgcgtgccgcactggatggaggctgtcatgttcctgctcatcgataa

SEQ ID NO: 76445 - protein, 532 aa, Desulfovibrio vulgaris subsp. vulgaris str. Hildenborough
MEMDDAKRPAGAKRRTGGEEDAGRVAGHATTQDNAHAMPSTQAGTQAGGAGAHADANPAGCPDGRIVLRQSCSLLEGDVDTPISLFLGMVGSGQGILLESAEVDGRWGRYSIIGFNFLLRLGCAAGRLEVAVRDPRLAALKELEGMPFIEGVRAVMRRLTIEPDPDFANQPPITRALYGYMGYGVAGLLEPKLAPVLRAEAAEACLALPGTVVVFDHLYNRLTMLSLTDRNGLRIDRSVLDRAPQTPEVGPTRAVPDESAYKRAVERTREMIRQGEAIQVVLSTRFQASFNGDPFTLYRRLRRINPSPYMFFMRLPGVSLLGSSPEVMVRCSKGRLQVSPIAGTRPRGVDDVEDARLAAELLDDPKERAEHVMLVDLGRNDLGRIAAPGTVQVERFMEVEKFSHVMHLTSRVTADLAEGHDALDVLTATFPAGTVSGAPKVRAMEIIAEAEGQPRGPYAGCIGWFGLDRDSVSLDTGITIRSMWVREGQVHWQAGAGIVFDSKPAAEWKECCNKAAAMRAALDGGCHVPAHR

SEQ ID NO: 76446 - DNA, 1374 bp, Listeria monocytogenes str. 4b F2365
  CDS (1)..(1374): transl_table=11
atgattaagatgagaaaaacgaaaaaaatagatgctgacacactaacggctattctggcgtttcaaagaatttcaggtacagggaaaagtttgctagagggggcggcgaaagatgcggaggctggacgttattcgatcattgctattaatccagtccatgaaattaaagtatatcaacatgattattatatcgacggtatacatcaagttgtcgcagatcctttaaaagaaattgaattatttatcgaaaaagcaaaagaagatgaagcagatttaccgcttgattcaggtgcaattggttatgttggttatgatgtcattgcgctttatgagaatttaggcgaaattccagtagaaactcgggatatgccagatattcgtttttatgtatatgaaagttttgtgattatggatcatcaggcggaagaacttattttagtgcaagataattgctattcgggaagaagtgaggcggaactagataaggcgcttgaattaatgtttactgaacttacaacgccgaaaaaggaagagcacaaggctgtccatgttcccaaaatgacatacaagagtaactacacgaaagaggagtacatggggttagtgaaaaaagcaaaaacctatatccaagagggtgacttctttcaaattgttctctcgcaacgactagaagcagatttcaccgtgacaccatttgattattatcggaaattacgtttattaaatccttctccttatctttatttcattgattttggggatacagtgctaattggctcttcgccagaaagtttgattaaaacgaaagggcggacggtaattacgaatcctattgcaggaacaagacggcgcggggcaacgaaacaagaagatgaattacttgcttcggaattgttagcggatgaaaaagaattggcagagcaccggatgttagtagatcttgggcgaaatgatattgggaaaatcgccgaaactggatcggtgcatgtgcctgtttaccttactattgaaagataccgtttcttaatgcatttagtttcagtagtagaaggaaccttaaaacccggacttactgcaatggatgctcttcggtcgacgcttccggctggtacagttagcggagcaccgaaaataagagccatggagcgaatctatgaatgggaaaatgtaaaacgtggcccatatgctggtgcggttggttatttaactaaaaatggtgattcggatttcgcgctttcgattagaacaatggtacttcataacggaaaagcttatgttcaagctggtgcaggaattgtctatgattccgatccagaaagcgaatacttagaaacattacaaaaagcaaaggcacttttggaggtgggagaatga

SEQ ID NO: 76447 - protein, 457 aa, Listeria monocytogenes str. 4b F2365
MIKMRKTKKIDADTLTAILAFQRISGTGKSLLEGAAKDAEAGRYSIIAINPVHEIKVYQHDYYIDGIHQVVADPLKEIELFIEKAKEDEADLPLDSGAIGYVGYDVIALYENLGEIPVETRDMPDIRFYVYESFVIMDHQAEELILVQDNCYSGRSEAELDKALELMFTELTTPKKEEHKAVHVPKMTYKSNYTKEEYMGLVKKAKTYIQEGDFFQIVLSQRLEADFTVTPFDYYRKLRLLNPSPYLYFIDFGDTVLIGSSPESLIKTKGRTVITNPIAGTRRRGATKQEDELLASELLADEKELAEHRMLVDLGRNDIGKIAETGSVHVPVYLTIERYRFLMHLVSVVEGTLKPGLTAMDALRSTLPAGTVSGAPKIRAMERIYEWENVKRGPYAGAVGYLTKNGDSDFALSIRTMVLHNGKAYVQAGAGIVYDSDPESEYLETLQKAKALLEVGE

SEQ ID NO: 76448 - DNA, 1428 bp, Bacillus anthracis str. Sterne
  CDS (1)..(1428): transl_table=11
gtgaaaggcatgatgacaaaagaggaatttataaaacagaaagaacaaagaaaaacatttttggtaatcgctgaagaagaaggagatagcattacgccaatttctttatatagacgtatgaaaggtaaaaagaaatttttattagaaagctcacagcttcatcaagataaagggcgttattcttacttaggttgtaatccatatggtgaagtgaaaagcgttggtacggaagtggaacgaacgatttacggcagggcagaaaagttgcaaagtaacgtactacaagtgttagaagaaataatcgcaccatcacaagtagacagtccatttccattttgcggaggagcagttggatacattggctatgacgtcattcggcaatatgaaaacattggagcagatttacatgatccattgaatattccagaagtacaccttttactgtaccgtgagtttatcgtgtatgaccacttacgccaaaagttgtcgtttgtatatgtatgcagggaagatgattcagcagattatgaagaagtatacgaaaggctgcgagtatacaaagaggaagtgctacagggagaagaagcggaagtaactgaaataagatcaacattatcattcacttcttctataacggaaagagaattttgcgtgatggtagaaacggcgaaagaacacatcggggccggggacatatttcaagttgtattatctcagcgtttgcaaagcgaatgtattggagatccattcgcgttatatcgaaaacttcgaattgccaatccatcaccatatatgttttatatcgattttcaagattatgttgtactcggttcttcgccagaaagtttgttatcagtaagggaggataaagtgatgacgaatccaattgctggtacgaggccgagagggaaaacgaaggaggaagatacggagattgaaaaagaactgttagaaaatgagaaagagcgagcggagcatatgatgcttgtagatcttgggcgaaatgatattggtagagtgagtgaaatcggctcagttacgatagataaatatatgaaagtagaaaaatattctcacgttatgcacattgtatctgaagtttacggaacattgcgaaaacaaatgagcggatttgatgcattagcgtactgtttaccagcggggacggtatcaggtgctccgaaaattagagcgatggaaattataaatgagctagagaatgaaaaaagaaatgtgtacgccggtgcagttggatacgttagtttttcagggaatcttgatatggcgctcgccattcgaacaatggttgtaaaggatgaaaaagcatacgttcaggcaggagcgggtattgtttacgattcagatccagtagctgaatatgaagaaacattaaataaagcgagagcgctattggaggtaatgaaatga

SEQ ID NO: 76449 - protein, 475 aa, Bacillus anthracis str. Sterne
MKGMMTKEEFIKQKEQRKTFLVIAEEEGDSITPISLYRRMKGKKKFLLESSQLHQDKGRYSYLGCNPYGEVKSVGTEVERTIYGRAEKLQSNVLQVLEEIIAPSQVDSPFPFCGGAVGYIGYDVIRQYENIGADLHDPLNIPEVHLLLYREFIVYDHLRQKLSFVYVCREDDSADYEEVYERLRVYKEEVLQGEEAEVTEIRSTLSFTSSITEREFCVMVETAKEHIGAGDIFQVVLSQRLQSECIGDPFALYRKLRIANPSPYMFYIDFQDYVVLGSSPESLLSVREDKVMTNPIAGTRPRGKTKEEDTEIEKELLENEKERAEHMMLVDLGRNDIGRVSEIGSVTIDKYMKVEKYSHVMHIVSEVYGTLRKQMSGFDALAYCLPAGTVSGAPKIRAMEIINELENEKRNVYAGAVGYVSFSGNLDMALAIRTMVVKDEKAYVQAGAGIVYDSDPVAEYEETLNKARALLEVMK

SEQ ID NO: 76450 - DNA, 1428 bp, Bacillus thuringiensis serovar konkukian str. 97-27
  CDS (1)..(1428): transl_table=11
gtgaaaggcatgatgacaaaagaggaatttataaaacagaaagaacaaagaaaaacatttttagtaatcgctgaagaagaaggagatagcattacgccaatttctttatatagacgtatgaaaggtaaaaagaaatttttattagaaagctcacagcttcatcaagataaaggacgctattcttacttaggttgtaatccatatggtgaagtgaaaagcgctggtacggaagtggaacgaaccatttacggcagagcagaaaagttgcaaagtaacgtactacaagtgttagaagaaataatcgcgcccgctcaagtagatagtccttttccattttgcggaggagcagttggatacattggctatgacgtcattcggcaatatgaaaacattggagcagatttacatgatccattgaatattccagaagtacaccttttactgtaccgtgagtttatcgtgtatgaccacttacgccaaaagttgtcgtttgtatatgtatgcagggaagatgattcagcagattatgaagaagtatacgaaaggctgcgagtatacaaagaggaagtgctacagggagaagaagcggaagtagctgaaataagatcaacattatcattcacttcttctataacggaaagagaattttgcgtgatggtagaaacggcgaaagaacacatcggggccggggatatatttcaagttgtattatctcagcgtttgcaaagcgaatgtattggagatccattcgcgttatatcgaaaacttcgaattgccaatccatcaccatatatgttttatatcgattttcaagattatgttgtactcggttcttcgccagaaagtttgttatcagtaagagaagataaagtgatgacgaatccaattgccggtacgagaccgagagggaaaacaaagcaggaggatacggaaattgaaaaagaactgttagaaaatgagaaagagcgagcggagcatatgatgcttgtagatcttgggcgaaatgatattggtagagtgagtgaaatcggctcagttacgatagataaatatatgaaagtagaaaagtattctcacgttatgcacattgtatctgaagtttacggaacattgcgaaaacggatgaacggatttgatgcattagcgtactgtttaccagcggggacggtatcaggtgctccgaaaattagagcgatggaaattataaatgagctagagaatgaaaaaagaaatgtgtacgccggtgcagttggatacgttagtttttcagggaatcttgatatggcgctcgccattcgaacaatggttgtaaaggatgaaaaagcatacgttcaggcaggagcgggtattgtttacgattcagatccagtagctgaatatgaagaaacattaaataaagcgagagcgctattggaggtaatgaaatga

SEQ ID NO: 76451 - protein, 475 aa, Bacillus thuringiensis serovar konkukian str. 97-27
MKGMMTKEEFIKQKEQRKTFLVIAEEEGDSITPISLYRRMKGKKKFLLESSQLHQDKGRYSYLGCNPYGEVKSAGTEVERTIYGRAEKLQSNVLQVLEEIIAPAQVDSPFPFCGGAVGYIGYDVIRQYENIGADLHDPLNIPEVHLLLYREFIVYDHLRQKLSFVYVCREDDSADYEEVYERLRVYKEEVLQGEEAEVAEIRSTLSFTSSITEREFCVMVETAKEHIGAGDIFQVVLSQRLQSECIGDPFALYRKLRIANPSPYMFYIDFQDYVVLGSSPESLLSVREDKVMTNPIAGTRPRGKTKQEDTEIEKELLENEKERAEHMMLVDLGRNDIGRVSEIGSVTIDKYMKVEKYSHVMHIVSEVYGTLRKRMNGFDALAYCLPAGTVSGAPKIRAMEIINELENEKRNVYAGAVGYVSFSGNLDMALAIRTMVVKDEKAYVQAGAGIVYDSDPVAEYEETLNKARALLEVMK

SEQ ID NO: 76452 - DNA, 1494 bp, Acinetobacter sp. ADP1
  CDS (1)..(1494): transl_table=11
atgacatcactaactcaatttgaacagcttaaaacagcaggctataacaccattcctgtttatcgtcagcgtcttgctgataccgatacaccattgtccgtctttgctcgactcaaggactatacacaagcctatttgtttgagtcggttgagggtggagagaactgggcgcgctattccattattggcttgggtgagtctaccgttttttcttgtaatgcggggcagctcacgatcaaaaatgcacaagggaacattacaacacaatcttgtgcagatccatttcagtatattcgtgattatcaaagccagtttaaagttccaccgcatgcgcttataccagacttgcctcaatttactggggggctggtcggttattttggctacgatgcggtgcgttatatcgaaccgcgtttgagtaacgttccagaggcagatccagtcggtttacctgacatctggatgatgctctctaagaccgtgattatttttgataatctcaaagacacgctgtttttgattgtgcatgccaataccactgatgaagaagcctatcaagctgcgcagaatcaactggattatctggaacgattgctggcaacaccagtgagcttgcaggccaaaaaacataaagcaccacattttgaatcccttacagggaaagaaaaattcttagaatcggttgaaaccgtcaaggaatatattcgtgcgggcgatgtcatgcaagtggttccagggcaccgtatggtctctgattttgatggcgatcctttacaggtctatcgtgcattgcgccatttaaacccttcgccttatctgtttttagtgcagggacacacactcacggataacacgccttttcacattgttggctcatcaccagaaatcctgtcacgcttggaagatggtattgccacagttagacctcttgcgggaactcgccctcgtggtaagaccaaagaggaagatttggcgctcgaacaagagctgctcgctgatgaaaaagaaattgcagagcatttaatgctgatcgatcttggacgtaacgatgtggggcgtgtctcaaaaattggaaaggtgcaggtgaccgatcgaatggtgatcgaacgttattcacatgtcatgcatattgtctccaatgtacaaggcgaagtgcgggatgatattgatgcattggacgtatttaaagcaacctttcctgcgggtacgctttctggggcacccaaaattcgtgccatggaaatcattgatgaagttgaaccagtcaagcgtggaatttttggtggtgctgtcggatatttaggctggcatggcgaaatggatatgtcgattgccattcgtacttgtgtgattcgtgaaaataaagtctatgtccaggcaggagcagggctggtggcggactcaaatccagaatctgaatggaatgaaacccaaataaaagctcgcgcagtgatcaaagcggttgaattatcatcaaatggattgattttatga

SEQ ID NO: 76453 - protein, 497 aa, Acinetobacter sp. ADP1
MTSLTQFEQLKTAGYNTIPVYRQRLADTDTPLSVFARLKDYTQAYLFESVEGGENWARYSIIGLGESTVFSCNAGQLTIKNAQGNITTQSCADPFQYIRDYQSQFKVPPHALIPDLPQFTGGLVGYFGYDAVRYIEPRLSNVPEADPVGLPDIWMMLSKTVIIFDNLKDTLFLIVHANTTDEEAYQAAQNQLDYLERLLATPVSLQAKKHKAPHFESLTGKEKFLESVETVKEYIRAGDVMQVVPGHRMVSDFDGDPLQVYRALRHLNPSPYLFLVQGHTLTDNTPFHIVGSSPEILSRLEDGIATVRPLAGTRPRGKTKEEDLALEQELLADEKEIAEHLMLIDLGRNDVGRVSKIGKVQVTDRMVIERYSHVMHIVSNVQGEVRDDIDALDVFKATFPAGTLSGAPKIRAMEIIDEVEPVKRGIFGGAVGYLGWHGEMDMSIAIRTCVIRENKVYVQAGAGLVADSNPESEWNETQIKARAVIKAVELSSNGLIL

SEQ ID NO: 76454 - DNA, 1563 bp, Erwinia carotovora subsp. atroseptica SCRI1043
  CDS (1)..(1563): transl_table=11
atgcaaacaacacaacctaaactggaactgctgcgtattgaggccgtttaccgtaacgaccccagcgccatcttccatcagctctgcggtgccagaccggcaacgttgctgttagagtcggctgaaatcgacagcaaggaaaacctgaaaagcctgttgatcgtagatagcgcactacgcatcaccgcactgggtcagcacgtttccattcaggcactcacggcaaacggcgccagccttctgccgcttctggatgccgcgctgccagtggagattatcaatcagccgcgtccgaacggtcgtgaactcacgttcccactggcagacgccatgcaggacgaagatgctcgcctgcgttcgctgtccgtgtttgacgccttacgtcagattctgacgctggtcgcctgcccgatagatgagcgtgaagctatgtttctcggcggcctgttcgcctacgatctggtcgccgggtttgaagaattacctgcgctgaaccagcagcagcgttgcccggatttttgcttctatctggcagaaacgctgctggtgcttgaccaccaaaaacgtgtgaccgctctgcaagccagcctgtttacaccgaaccatagcgaaaagcagcgtctgcaacagcgtctggaacagctgcaacttcagctcactcagcccgcgcccgcgctgccgcgtcagtccatcgaagacatgacgctgagctgcaaccagagcgatgaggctttcggggaagtcgtcagccagatgcaggaagctatccgcatcggtgaaattttccaggtcgtgccgtcacgtcgtttctctctgccgtgtccttcaccgctggccgcctaccaaacgctgaaggatagcaatcccagcccttacatgttttacatgcaggatcaagacttcacgttgttcggtgcctcgccggaaagctcgctgaaatacgatgcagacagccgtcaaatcgaaatctatccgattgccggtactcgcccgcgcggtcgccgtgccgatggctcgctggatcgcgatctcgatagccgtattgaactggaaatgcgtaccgaccataaagagctggctgagcatttgatgctggtagatttagcccgtaacgatctggcgcgcatctgtcagccgggtagccgttacgttgctgacttgaccaaagtggaccgctattcctttgtcatgcatctggtctcccgcgttgtggggacattgcgtgaagatttagatgtgctgcacgcctaccgcgcctgcatgaatatgggcacgctaagcggcgcgccgaaagttcgggccatgcagctgattgccgaaagtgagaaaacccgacgcggcagctacggcggcgcggtgggctacttcaccgctcacggcgacctggacacctgcatcgtcattcgctccgcctatgtcgaagacggtattgccactgttcaggccggtgcgggcgtggtgctggattctaaccctcaagccgaagccgacgaaacacgcaataaagcccgggccgtactgcgagccattgccagcgcgcaccatgcaaaggagattttctga

SEQ ID NO: 76455 - protein, 520 aa, Erwinia carotovora subsp. atroseptica SCRI1043
MQTTQPKLELLRIEAVYRNDPSAIFHQLCGARPATLLLESAEIDSKENLKSLLIVDSALRITALGQHVSIQALTANGASLLPLLDAALPVEIINQPRPNGRELTFPLADAMQDEDARLRSLSVFDALRQILTLVACPIDEREAMFLGGLFAYDLVAGFEELPALNQQQRCPDFCFYLAETLLVLDHQKRVTALQASLFTPNHSEKQRLQQRLEQLQLQLTQPAPALPRQSIEDMTLSCNQSDEAFGEVVSQMQEAIRIGEIFQVVPSRRFSLPCPSPLAAYQTLKDSNPSPYMFYMQDQDFTLFGASPESSLKYDADSRQIEIYPIAGTRPRGRRADGSLDRDLDSRIELEMRTDHKELAEHLMLVDLARNDLARICQPGSRYVADLTKVDRYSFVMHLVSRVVGTLREDLDVLHAYRACMNMGTLSGAPKVRAMQLIAESEKTRRGSYGGAVGYFTAHGDLDTCIVIRSAYVEDGIATVQAGAGVVLDSNPQAEADETRNKARAVLRAIASAHHAKEIF

SEQ ID NO: 76456 - DNA, 1455 bp, Erwinia carotovora subsp. atroseptica SCRI1043
  CDS (1)..(1455): transl_table=11
atgactgccgccaatacgactcacgtcactcatacaagagattctgcaaacgattcggccaccgcgacaggctccgccgttctctatcacgcgctgccttactacccgaacgtattgctcgatcgctttgcgcccttttctcaacagccgtgggctatgttgctgcattcggggtttgccgatcatccgcacaatcgcttcgatgtcatggtcgctgacccgcgagtcacgctatgcacgcgggggggcaagacggaaatcacaagtgacggcgtaacgaatacagtagagagcgatccatttactctgctgcagcaacagttggatgcattggcgctacccaccgaaacccaccttgatttcccttttcaggggggcgcacttggcctgttcggctacgatttggggcgtcagattgaaacgttgcccacacaggcagaacaggatatcgacctgccagacatggcgattggattatacgactgggcgctgattgccgatcatcaccggcaaacactaacgctgatcgtacatcattctcttcaggcgcgacttgactggttagccaacccgcccgttaacacgacgaaagtcggtttcaacctcaccagcgactggcaaccgaatatgtcacgcgacgcatacggtgaaaaattctgcaaaatacaggactatcttctggcgggcgattgctatcaggtcaatctggcgcagcgtttttctgccgcttatgcgggcgatgaatggcaggcgtttgtacaactgtccgcaggaaataaagcgcccttttctgccttcctgcgcctgccggaaaatacggtaatcagcgtgtcgccggaacgctttctctggctggaaaacaatcacattcaaacgcgcccgattaaagggacattaccgcgcctcgcagacccggatgctgataaacagcaggcagtacggctcgcaagttccgagaaagatcgctctgaaaacctgatgattgtcgatctactgcgcaacgatattggccgcgtcgcggttccgggcagcgttcgtgtacctgagttgttcgtcgtcgaaccttttcccgcggtacatcatctagtcagtacgattgaagcacagctaccggaagattgccctgccaccacactgctacgcgcctgtttccccggaggatcgattaccggcgcaccaaaaatccgtgctatgcagattattgaagaactagagcctcagcgccgcaatgcttactgcggcagcctcggttacattagcctgtgtggaaccatggacactaacatcaccatcaggacgttattaaccgaacacggcagaatttactgctgggcgggtggcggcatcgtcgccgatagccaggaacaggctgaatatcaggaaacgtttgataaagtgggccgcattctccccctactggaggattcccaaataactcaggtaccgagtaaatga

SEQ ID NO: 76457 - protein, 484 aa, Erwinia carotovora subsp. atroseptica SCRI1043
MTAANTTHVTHTRDSANDSATATGSAVLYHALPYYPNVLLDRFAPFSQQPWAMLLHSGFADHPHNRFDVMVADPRVTLCTRGGKTEITSDGVTNTVESDPFTLLQQQLDALALPTETHLDFPFQGGALGLFGYDLGRQIETLPTQAEQDIDLPDMAIGLYDWALIADHHRQTLTLIVHHSLQARLDWLANPPVNTTKVGFNLTSDWQPNMSRDAYGEKFCKIQDYLLAGDCYQVNLAQRFSAAYAGDEWQAFVQLSAGNKAPFSAFLRLPENTVISVSPERFLWLENNHIQTRPIKGTLPRLADPDADKQQAVRLASSEKDRSENLMIVDLLRNDIGRVAVPGSVRVPELFVVEPFPAVHHLVSTIEAQLPEDCPATTLLRACFPGGSITGAPKIRAMQIIEELEPQRRNAYCGSLGYISLCGTMDTNITIRTLLTEHGRIYCWAGGGIVADSQEQAEYQETFDKVGRILPLLEDSQITQVPSK

SEQ ID NO: 76458 - DNA, 1560 bp, Leifsonia xyli subsp. xyli str. CTCB07
  CDS (1)..(1560): transl_table=11
gtgatcgccacatccagcggtacaaccagccgcgagaagttcgacgcactgaccggcgcacaccgggtgatccccgtcgtgcgcgaactgttcgcagacggggagacgccggtcggcatctaccgcaagctcgccgccggccggccgggcaccttcctgctggaatccgccgagcagggcggtatctggtcgcaattctcgttcgtcggagccgcctcgttcggcgttctgacccagcaaggggaggaggtccgctggctcgactacggactctccgccgagcgcgcgctcggccccgacgcggctggccccgatgcgtctggccgtccactcgacgctctcgcggcgctgcaccggcgctggcagtcgccgcgcatccccggcctgcccccgctgaccggggggctcgtgggcttcatcggctgggaggcgatccgccagatcgagcggctgcccgaccagccgccagcggactacgatatcccgggccaggccctcgctttcgcggccgacctcgtggcgatcgaccatcgctccggcacagtgctgctgatcgcgaacgtgctggccgatggtgtcgacgacgccgacgcgctctgggcggatgcgcagtcccggctcgatcggatgcagggcgagctggcgcagccggcggaggcgtggctcgccgaggtggatctcgctgtgcctgtgcatccccctgtctctcgcacggccaagccagacttcctcgcggcggtcgaggccgccaaggagaggatcgtcgccggggacatcttccaggtcgtcatctcgcagcgcttcgaggtggcctgcgaggccggcgcactcgatgtctaccgtgtgctccgggcgctcaaccccagcccgtacatgtacctgctggcgctggagcggcccgatggcggcgtctacgagatcgtcggatcgtccccggaggcgctggtcaaggtgcgggagggacgcgcgttcacgcaccccatcgccggttcccgcccgcgcggggccacgccggaggaggatctcgacctcgaggcttcgctcctcgccgacgacaaggagcgcgccgagcacctcatgctcgtcgatctggcccgtaacgacctgttgaaggtctgcgcggccggcagcgtcgaggtgacggagttcatgcgcgtcgagcggttcagccacatcatgcacattgtctcctccgtcgagggcgatctcctgccggacgccagtgcgctcgacgtcttccgtgccaccttcccggcggggacgctctccggcgcgcccaagccgatggcgctgtggatcatcgacgagctggagcccgcgcagcgcggcgtttacgggggagtggtcggctacttcgacttcgccgccgacgccgatctcgcgatcgcgatccgcacggcgacgatcatggacggtgtggcgcgtgtgcaggccggcggcgggctggtcgccgactccgttcccgagtcggagttcgaggagtcgcagaacaaagcggcggcgccgttgcgggcggtggccgtcgccaatgcactgagacgggtgcagggtgcggactga

SEQ ID NO: 76459 - protein, 519 aa, Leifsonia xyli subsp. xyli str. CTCB07
MIATSSGTTSREKFDALTGAHRVIPVVRELFADGETPVGIYRKLAAGRPGTFLLESAEQGGIWSQFSFVGAASFGVLTQQGEEVRWLDYGLSAERALGPDAAGPDASGRPLDALAALHRRWQSPRIPGLPPLTGGLVGFIGWEAIRQIERLPDQPPADYDIPGQALAFAADLVAIDHRSGTVLLIANVLADGVDDADALWADAQSRLDRMQGELAQPAEAWLAEVDLAVPVHPPVSRTAKPDFLAAVEAAKERIVAGDIFQVVISQRFEVACEAGALDVYRVLRALNPSPYMYLLALERPDGGVYEIVGSSPEALVKVREGRAFTHPIAGSRPRGATPEEDLDLEASLLADDKERAEHLMLVDLARNDLLKVCAAGSVEVTEFMRVERFSHIMHIVSSVEGDLLPDASALDVFRATFPAGTLSGAPKPMALWIIDELEPAQRGVYGGVVGYFDFAADADLAIAIRTATIMDGVARVQAGGGLVADSVPESEFEESQNKAAAPLRAVAVANALRRVQGAD

SEQ ID NO: 76460 - DNA, 1497 bp, Desulfotalea psychrophila LSv54
  CDS (1)..(1497): transl_table=11
atgagaacgttttttcccgattatacgggctttaaggatttgctggccacatcgaagttgttgccggtatgctgtgaggtggtggctgatttggatactcccctaaccctttttgccaaggttgttggggagcaagaccatctctttctctttgagagtatggagggcggggagaagtgggggcgttattcttttatcggttatgatcccctgatgacctttcagtcgaagggggaggatatctctattgttgatcatcgtagcggtgatgccattcctctcaccagttctggaaatccgctcatggccattaagcatatgcttcactctcttcaggcagcatctcctgtcgggcttcctccctttagtggcggtgccgttggctttatgggctatgagatggtgcgctttatggagaatcttcccgatgagagggaggcggtggcaaccccagattcgtcgcttatggtgccccgtattgttctggcccatgatagccttcgccagacggtgaccattgtctcctgggttgtggtggatgactccggtcgggcaggagaaaaatatgagcaggcctgtcaggatctggaagagatagcagggaaaattcaaggctctgtgcccgctgatttttttgcggcaacggacacaggctgtcagccccatgagtttcagtctaatgtgagcagggatgcgttttgtcagatggttgagagagcaaaggaatatatttactcaggtgatattattcagatagttctttcacaacgttttgaaacgcatactgttatcgatcccctggtgctctatcgcgctctacgccatatcaatcccagcccctatctcttttatcttcagctcggagatgttgtccagataggttcctccccggaaattttggtgaaaaaacatgggcagaccgtcgatcttcgccccattgccggtacccgaaaacgtggcgggacggttacggaggatcaggcccttgagcgggaacttctagccgatcctaaggagagggcggagcatctgatgttggtggatctgggccgtaatgatctgggccgtattgccaaagccggtactgtttctgttgatgacctattgctggtggagcgctatagccatgtgatgcatcttgtctccagtgttcagggaaaaattgccgaggataaggatcagtttgacctgctctccgcctgctttcctgccggcaccgtttccggtgcccctaagatcagggcaatggagattatagatgagctggagtcggaaaaacggggcgcctatgcaggttccgtcggttattttggcttttccggtaatatggatttttgtattaccattcgcacctttgtcctgcatggtggggtgctgtggattcaggcgggggcgggtattgttgccgattctgtgccggagttggagtatgaagagacgattaataaatccatggccctgcgtcgggccattgagcttgttgaagagggcttctag

SEQ ID NO: 76461 - protein, 498 aa, Desulfotalea psychrophila LSv54
MRTFFPDYTGFKDLLATSKLLPVCCEVVADLDTPLTLFAKVVGEQDHLFLFESMEGGEKWGRYSFIGYDPLMTFQSKGEDISIVDHRSGDAIPLTSSGNPLMAIKHMLHSLQAASPVGLPPFSGGAVGFMGYEMVRFMENLPDEREAVATPDSSLMVPRIVLAHDSLRQTVTIVSWVVVDDSGRAGEKYEQACQDLEEIAGKIQGSVPADFFAATDTGCQPHEFQSNVSRDAFCQMVERAKEYIYSGDIIQIVLSQRFETHTVIDPLVLYRALRHINPSPYLFYLQLGDVVQIGSSPEILVKKHGQTVDLRPIAGTRKRGGTVTEDQALERELLADPKERAEHLMLVDLGRNDLGRIAKAGTVSVDDLLLVERYSHVMHLVSSVQGKIAEDKDQFDLLSACFPAGTVSGAPKIRAMEIIDELESEKRGAYAGSVGYFGFSGNMDFCITIRTFVLHGGVLWIQAGAGIVADSVPELEYEETINKSMALRRAIELVEEGF

SEQ ID NO: 76462 - DNA, 1518 bp, Symbiobacterium thermophilum IAM 14863
  CDS (1)..(1518): transl_table=11
atgtaccaccccagcctggggacctacctgagcctggccagggagtacgacctggtccccgtccaccgggaggtcctggcggacctggagacgccgatctcggtcttcatgaagctctgcctcgacgagccgtgcgccttcctgttcgaatccgtggaaggcggggagaaggtggcccgctactccttcctcggctgccggccgctcctcaccctggcccacaaggcgggcgtgagccggctgctccggggcgaggaggccgcggagtaccgcacggtgggcatggtgaccgagggcgaacggggcgagcggatggagggcgacccgctgggccacctgcggcaggtgctgcgccgctatgccgtgtatcagcccccggggctgccccggttcgcgggcgggctggtgggctacgtggcctacgacgccgtccgggcgtacgagcgcctgccgccggggccgccggacgagctgaatctgcccgattcgctgttcatggcgccggagctggtggtggtgttcgaccacctgaagcacaagctgctgctcgtcgccaacaccatgccgggcggcgagcccgacgtggcctaccgccgggcgcaggccctcctggaccgggcggtcgagcggctgcggggtccggtgcccctgccgccgggactcccgtggacccggtcccgccccctggaggtgcgggcctgccagacgccggaggacttcacggcggcggtcgagcgggccaaggcctacatccgggcgggcgacgctttccaggtggtgctctcgcagcggtgggagacccgggtgcgcagccggccgctggacatctaccgggcgctgcgcatgctcaacccgagcccctacatgttctacctgagcttcggcgacctgaaggtgatcggcgcctcgccggagctgctggtgcgggtggaggacggcgtggccaccacccggccgctggcggggacccggccccggggcgccaccgaggaggaggaccggcggctggaggcggagctgctcgccgacgaaaaggagcgggccgagcacgtgatgctggtcgacctgggccgcaacgacctgggccgggtctgtaactacgggacggtgcacgtgcaccagctcatgcacgtggagcggtactcccacgtgatgcacatcgtcagcgacatccggggcgaggtggccgaggagaaggacgcctgcgacgtgctggccgcctgtttcccggccgggaccctcaccggggcgccgaaggtgcgggcgatggagatcatcgacgagctggaaccggtgcgcaggggcatctacggtggggccgtgggctacttctcctggagcggcgccatggacacctgcatcgccatccggaccctgatcatgaagggcgaccgggtcttcatccaggccggggccggcatcgtggccgactcggacgcggaagcggagctgaacgagtcccggaacaaggcccgggcgctgatccgggccctggagctggcggaggaggggctgtga

SEQ ID NO: 76463 - protein, 505 aa, Symbiobacterium thermophilum IAM 14863
MYHPSLGTYLSLAREYDLVPVHREVLADLETPISVFMKLCLDEPCAFLFESVEGGEKVARYSFLGCRPLLTLAHKAGVSRLLRGEEAAEYRTVGMVTEGERGERMEGDPLGHLRQVLRRYAVYQPPGLPRFAGGLVGYVAYDAVRAYERLPPGPPDELNLPDSLFMAPELVVVFDHLKHKLLLVANTMPGGEPDVAYRRAQALLDRAVERLRGPVPLPPGLPWTRSRPLEVRACQTPEDFTAAVERAKAYIRAGDAFQVVLSQRWETRVRSRPLDIYRALRMLNPSPYMFYLSFGDLKVIGASPELLVRVEDGVATTRPLAGTRPRGATEEEDRRLEAELLADEKERAEHVMLVDLGRNDLGRVCNYGTVHVHQLMHVERYSHVMHIVSDIRGEVAEEKDACDVLAACFPAGTLTGAPKVRAMEIIDELEPVRRGIYGGAVGYFSWSGAMDTCIAIRTLIMKGDRVFIQAGAGIVADSDAEAELNESRNKARALIRALELAEEGL

SEQ ID NO: 76464 - DNA, 1431 bp, Bacillus licheniformis ATCC 14580
  CDS (1)..(1431): transl_table=11
atgagacaacgaaggcctgtagccagagcgttcccattttccaatcaacagtttttgcagcaatatgaaagcctatcgaaaggaaaagaataccacgttctgctggaaagcgcgagaggcggagaatacagcatagccggactcgaccctgtcgcaatagcgaaagggaaagacggtatcacgacgattcaatataaaggggacgtcatattcaaagagggggatccgtttctgcagttttctcaatggtttgaaacgctgaaaacggagacagttgcagattttcccgactttcagggcggggctgtcggttttcttagctatgactatgcccggtatattgagaaattcaaaatcctgtctattgatgatctgcaaacgccggatttattctttctcgtatttgatgatatagccgtctatgaccatgagcagcagcagctttgggtgattacccacactgatgaagaaacgccggccgctgcggaagagaaattggacaggcttgagcaaatgtggaagacggaacatccgaaggccgctggaggtcatcagccgaatgataacaaaggcccggcattcgcggcctcatttacagaagccggcttttctcaggctgttgagaaagtgaagcaatacatcgcaagcggtgacgtatttcaggtgaatctttctgttcgccagtcggagcgcctttctgcgcctccttatgaggtgtataagatgttaagagaaatcaacccttcgccgtacatggcctacttggaaaccccggattttcaaatcatctgcgggtcgcctgaactgctcattaagaaaaagggcaccaggcttgaaacaaggccgattgccggaacgcgatcccgcggggcggatgaagcggaggatgaagcgctcgcgaacgaattgatcatgaatgaaaaagagcgcgccgaacatgtgatgctcgttgatttagagcgtaatgacctcggcagggtctccaagtacggttcggtccgggtcgatgaattcatggtgattgagaagtattcccacgtcatgcatattgtctcaaatgtgtgcggtgaactaagggatgaatgcgatgccgttgatgtcatccatgccgtgtttcccggaggtacgatcaccggagcgccgaaagtcagaacgatggaaattattgaggagcttgagccaacgagacgggggctttatactggttctatagggtggttcggatataatcaggatatgcactttaatatcgtcatccgaacgatttatgtgaaagcgggccaggcgttcatgcagtcgggagcgggaatcgtcatcgattcaaatcctaggcatgaatataaagagtcaattaaaaaggccctggcgatgaaaaaggcgctgcagttgagtgaagaagagaaaaaagagcagaggagagctgagatatga

SEQ ID NO: 76465 - protein, 476 aa, Bacillus licheniformis ATCC 14580
MRQRRPVARAFPFSNQQFLQQYESLSKGKEYHVLLESARGGEYSIAGLDPVAIAKGKDGITTIQYKGDVIFKEGDPFLQFSQWFETLKTETVADFPDFQGGAVGFLSYDYARYIEKFKILSIDDLQTPDLFFLVFDDIAVYDHEQQQLWVITHTDEETPAAAEEKLDRLEQMWKTEHPKAAGGHQPNDNKGPAFAASFTEAGFSQAVEKVKQYIASGDVFQVNLSVRQSERLSAPPYEVYKMLREINPSPYMAYLETPDFQIICGSPELLIKKKGTRLETRPIAGTRSRGADEAEDEALANELIMNEKERAEHVMLVDLERNDLGRVSKYGSVRVDEFMVIEKYSHVMHIVSNVCGELRDECDAVDVIHAVFPGGTITGAPKVRTMEIIEELEPTRRGLYTGSIGWFGYNQDMHFNIVIRTIYVKAGQAFMQSGAGIVIDSNPRHEYKESIKKALAMKKALQLSEEEKKEQRRAEI

SEQ ID NO: 76466 - DNA, 1398 bp, Bacillus cereus E33L
  CDS (1)..(1398): transl_table=11
atgcaacgaagaaaatctttagcgctttctattccatatcagttagatttctttaagcaatataaatttctttctaaggataaaccgcaacacattttgttagagagtggacgtggcggtcgttataacatcgtgggattaaacccagtagcggtaatccgagggaagggtgaaacgttacatataagtgaaagtggtaaggaaacaataaagcaaggaaacccattggatttaatgcaggaatatatggagcgatggaaaacggattataatccggaatacccgccttttcaaggtggtgcaattggttactttagttatgattgcatccgttatattgaaaaacttccttctcttgcggaggatgatattaatatacctgatatattctttttattatttgatgatgtgtttgtgtatgatcaaaaagaaaaagtattatggattattacacattatgtagataagcatgaagaggcaaaagagcgattaaatgaatggaagattctttgggcgacagaagcgccggaagtgactataccgtttgcgtgccctgaaaagaaaaatgaagcagttgcttttactgaagaaagctttatgaaggcggttgaatgtattcaagaatatattggggctggtgatgtgttccaagtaaacttgtcgacaagacaagaaagaacgttacaaacacacccgctagaaatatatacaagtcttcgtgaaattaatccatctccatatatgggttacttggagctcggggattttcaaattgtaagtggatcgccagagttgctaattaagaaacagggaactgaagtaagtacaagaccaattgctggaacgagatctagaggggcaaatgagcaagaggatgaagaattggcaagggaattaattgagaatgaaaaagaaagagcagagcacgtcatgcttgtggatttagaacgaaatgatttaggacgtgtttgtaaatatggcactgtagaagtagacgagtttatggtaattgagaaatactcacatgttatgcatattgtttctaatgtgcgtggtgaggtggaggaagataaagatgctttcgatttagtgaaggctgtattccctggaggaacaattacgggtgctccgaaaatacgtacgatggaaattattgaagaattagaacctgttcgccgagggatttatacaggttcaatcggttggatcggttattctggagatacagaattgaatattgtaattaggacacttcttgctaaagacggaaaagcgcatgtacaagcaggggcgggaattgtaattgattcaaatccggaaaatgaatataaagagtcgttaaaaaaggcgattgctttatggcgtgcaaaagaacgtagtgaagaaacggttaggtga

SEQ ID NO: 76467 - protein, 465 aa, Bacillus cereus E33L
MQRRKSLALSIPYQLDFFKQYKFLSKDKPQHILLESGRGGRYNIVGLNPVAVIRGKGETLHISESGKETIKQGNPLDLMQEYMERWKTDYNPEYPPFQGGAIGYFSYDCIRYIEKLPSLAEDDINIPDIFFLLFDDVFVYDQKEKVLWIITHYVDKHEEAKERLNEWKILWATEAPEVTIPFACPEKKNEAVAFTEESFMKAVECIQEYIGAGDVFQVNLSTRQERTLQTHPLEIYTSLREINPSPYMGYLELGDFQIVSGSPELLIKKQGTEVSTRPIAGTRSRGANEQEDEELARELIENEKERAEHVMLVDLERNDLGRVCKYGTVEVDEFMVIEKYSHVMHIVSNVRGEVEEDKDAFDLVKAVFPGGTITGAPKIRTMEIIEELEPVRRGIYTGSIGWIGYSGDTELNIVIRTLLAKDGKAHVQAGAGIVIDSNPENEYKESLKKAIALWRAKERSEETVR

SEQ ID NO: 76468 - DNA, 1428 bp, Bacillus cereus E33L
  CDS (1)..(1428): transl_table=11
gtgaaaggcatgatgacaaaagaggaatttataaaacagaaggaacaaagaaaaccatttttagtaattattgaagaagaaggagatagcattacgccaatttctttatatagacgtatgaaagggaagaagaaatttttattagaaagttcacagcttcatcaagataaagggcgttattcttacttaggatgtaatccttatggagaagtgaaaagcgttggtacggaagtggaacgaaccatttacggcagatcagaaaagttgcaaagtaacgtactacaagtgttagaagaaataatcgcgtcagctcaagtagatagtccttttccattttgcgggggagcagttggatatattggctatgatgtcattcggcaatatgaaaacattggagcagatttacatgatccattgaatattccagaagtacaccttttattgtaccgtgagtttatcgtgtatgaccacttacgccaaaggttgtcgtttgtatatgtatgcagggaagatgattcagcagattatgaagaagtatacgaaaggctgcaagtatacaaagaggaagtgctacagggagaagaagcggaagtagctgaaataagatcaacattatcattcacttcttctataacggaaagagaattttgcgtgatggtagaaacggcgaaagaacacatcggggccggggacatctttcaagttgtattatctcagcgtttgcaaagcgaatgtattggagatccattcacgttatatcgaaaacttcgaattgccaatccatcaccatatatgttctatatcgattttcaagattatgttgtactcggttcttcgccagaaagtttgttatcagtaagagaggataaagtgatgacgaatccaattgccggtacgagaccgagagggaaaacgaaggaggaagatacggagattgaaaaagaactgttagaaaatgagaaagagcgagcggagcatatgatgcttgtagatcttgggcgaaatgatattggtagggtgagtgaaatcggctcagttacgatagataaatatatgaaagtagaaaaatattctcacgttatgcacattgtatctgaagtttacggaacattgcgaaaacgaatgagcggatttgatgcattagcgtattgtttaccagcggggacggtatcaggtgctccgaaaattagagcgatggaaattataaatgagctagagaatgaaaaaagaaatgtgtacgccggtgcagttggatacgttagtttttcagggaatcttgatatggcgcttgccattcgaacaatggttgtaaaggatgaaaaagcatacgttcaggcaggagcgggaatcgtttacgattcagatccagtagctgaatatgaagaaacattaaataaagcgagagcgctattggaggtaatgaaatga

SEQ ID NO: 76469 - protein, 475 aa, Bacillus cereus E33L
MKGMMTKEEFIKQKEQRKPFLVIIEEEGDSITPISLYRRMKGKKKFLLESSQLHQDKGRYSYLGCNPYGEVKSVGTEVERTIYGRSEKLQSNVLQVLEEIIASAQVDSPFPFCGGAVGYIGYDVIRQYENIGADLHDPLNIPEVHLLLYREFIVYDHLRQRLSFVYVCREDDSADYEEVYERLQVYKEEVLQGEEAEVAEIRSTLSFTSSITEREFCVMVETAKEHIGAGDIFQVVLSQRLQSECIGDPFTLYRKLRIANPSPYMFYIDFQDYVVLGSSPESLLSVREDKVMTNPIAGTRPRGKTKEEDTEIEKELLENEKERAEHMMLVDLGRNDIGRVSEIGSVTIDKYMKVEKYSHVMHIVSEVYGTLRKRMSGFDALAYCLPAGTVSGAPKIRAMEIINELENEKRNVYAGAVGYVSFSGNLDMALAIRTMVVKDEKAYVQAGAGIVYDSDPVAEYEETLNKARALLEVMK

SEQ ID NO: 76470 - DNA, 1539 bp, Mannheimia succiniciproducens MBEL55E
  CDS (1)..(1539): transl_table=11
atgccaaacgcttatattcaaactctaagcaatccggttcaatatcaacaagatctcaccgccgtatttgccacagtcgggaaaacaaacagcttattattggaatccgccgaaatcagtagcaaaaacagtttacaaagtttattaattattaatgcggcgttaaaagtatcctgcttgggtcaaattgtcacatttactgcattaacagcaaacggaagtcatgttttaccattaattaaagaaaagttacagggtaaaacaaaatccctttccgttcagcaaaataaactgattgcggaattttttccaattgatcaaaatctggatgaggacagtaaattacaatccttaactgttttcgacggtttacgcgtaatcaatcagctttatcagcatagcaagcagcctgtttttctcggcggtttatttgcttacgatttagtcgctaactttattccgatgaataacattactttgcaggacgacggtttaagctgcccggattatgtgttctatcttgcggaacaattgcttcgtttggatcatccaagccaacaagccactttacaaaccttctgttttaatgattcggaactgcagaatttgcagcaaagtgcggtcgaaattgacaaagatttacggaatttaaaacctctttccgctattcaacaaggttctacggatatttcgaccaatcacgaagacgaaaaatttaagcaaattattaccgcacttaaacatcatatttacatcggtgatgttttccagattgtgccgtcccgtcgctttatcctgcaatgcccgaatactttagccacttatcgtcagctgaaggaaaataatccaagcccttatatgttctttatgcaagatgaggaattcactttgttcggcgcctcgcctgaaagcgcattgaaatattccgccgataaccgtcagttggaaatctaccctatcgccggttcccgtccgcgcggatttgatgccaaaggtaaaattgatcccgaattggacgcgcgcctggaacttgaaatgcgtttagatcataaagaacaagcggaacatttaatgttggttgacttagcccgtaatgatgtggcgcgcgtatgcgaaagcggaacccgtcatgttaaagagctaatgcaggtggatcgctattcgcatattatgcacttggtttcccgcgtagtcggcaaactacgccccgaactggatgcgctgcatgcttatcaggcttgtatgaatatggggacgctcacgggcgcacctaaaattaaagctatgcaattaatttatcagtttgaaaaacaaaaacgtcatagttacggcggtgcggtgggttatctgtcttccgacggcaatttagacacttgcatcgttatccgttccgcatttgtgcaaaacggcattgcttatgtgcaagccggttgcggcgaagtactggattccgatccgcaaatggaagcggatgaaacccgccataaagcgcaggcggtcattaaagctattctgcaaacaaacgcccaagcgaattaa

SEQ ID NO: 76471 - protein, 512 aa, Mannheimia succiniciproducens MBEL55E
MPNAYIQTLSNPVQYQQDLTAVFATVGKTNSLLLESAEISSKNSLQSLLIINAALKVSCLGQIVTFTALTANGSHVLPLIKEKLQGKTKSLSVQQNKLIAEFFPIDQNLDEDSKLQSLTVFDGLRVINQLYQHSKQPVFLGGLFAYDLVANFIPMNNITLQDDGLSCPDYVFYLAEQLLRLDHPSQQATLQTFCFNDSELQNLQQSAVEIDKDLRNLKPLSAIQQGSTDISTNHEDEKFKQIITALKHHIYIGDVFQIVPSRRFILQCPNTLATYRQLKENNPSPYMFFMQDEEFTLFGASPESALKYSADNRQLEIYPIAGSRPRGFDAKGKIDPELDARLELEMRLDHKEQAEHLMLVDLARNDVARVCESGTRHVKELMQVDRYSHIMHLVSRVVGKLRPELDALHAYQACMNMGTLTGAPKIKAMQLIYQFEKQKRHSYGGAVGYLSSDGNLDTCIVIRSAFVQNGIAYVQAGCGEVLDSDPQMEADETRHKAQAVIKAILQTNAQAN

SEQ ID NO: 76472 - DNA, 1434 bp, Bacillus licheniformis ATCC 14580
  CDS (1)..(1434): transl_table=11
atgatgagacaacgaaggcctgtagccagagcgttcccattttccaatcaacagtttttgcagcaatatgaaagcctatcgaaaggaaaagaataccacgttctgctggaaagcgcgagaggcggagaatacagcatagccggactcgaccctgtcgcaatagcgaaagggaaagacggtatcacgacgattcaatataaaggggacgtcatattcaaagagggggatccgtttctgcagttttctcaatggtttgaaacgctgaaaacggagacagttgcagattttcccgactttcagggcggggctgtcggttttcttagctatgactatgcccggtatattgagaaattcaaaatcctgtctattgatgatctgcaaacgccggatttattctttctcgtatttgatgatatagccgtctatgaccatgagcagcagcagctttgggtgattacccacactgatgaagaaacgccggccgctgcggaagagaaattggacaggcttgagcaaatgtggaagacggaacatccgaaggccgctggaggtcatcagccgaatgataacaaaggcccggcattcgcggcctcatttacagaagccggcttttctcaggctgttgagaaagtgaagcaatacatcgcaagcggtgacgtatttcaggtgaatctttctgttcgccagtcggagcgcctttctgcgcctccttatgaggtgtataagatgttaagagaaatcaacccttcgccgtacatggcctacttggaaaccccggattttcaaatcatctgcgggtcgcctgaactgctcattaagaaaaagggcaccaggcttgaaacaaggccgattgccggaacgcgatcccgcggggcggatgaagcggaggatgaagcgctcgcgaacgaattgatcatgaatgaaaaagagcgcgccgaacatgtgatgctcgttgatttagagcgtaatgacctcggcagggtctccaagtacggttcggtccgggtcgatgaattcatggtgattgagaagtattcccacgtcatgcatattgtctcaaatgtgtgcggtgaactaagggatgaatgcgatgccgttgatgtcatccatgccgtgtttcccggaggtacgatcaccggagcgccgaaagtcagaacgatggaaattattgaggagcttgagccaacgagacgggggctttatactggttctatagggtggttcggatataatcaggatatgcactttaatatcgtcatccgaacgatttatgtgaaagcgggccaggcgttcatgcagtcgggagcgggaatcgtcatcgattcaaatcctaggcatgaatataaagagtcaattaaaaaggccctggcgatgaaaaaggcgctgcagttgagtgaagaagagaaaaaagagcagaggagagctgagatatga

SEQ ID NO: 76473 - protein, 477 aa, Bacillus licheniformis ATCC 14580
MMRQRRPVARAFPFSNQQFLQQYESLSKGKEYHVLLESARGGEYSIAGLDPVAIAKGKDGITTIQYKGDVIFKEGDPFLQFSQWFETLKTETVADFPDFQGGAVGFLSYDYARYIEKFKILSIDDLQTPDLFFLVFDDIAVYDHEQQQLWVITHTDEETPAAAEEKLDRLEQMWKTEHPKAAGGHQPNDNKGPAFAASFTEAGFSQAVEKVKQYIASGDVFQVNLSVRQSERLSAPPYEVYKMLREINPSPYMAYLETPDFQIICGSPELLIKKKGTRLETRPIAGTRSRGADEAEDEALANELIMNEKERAEHVMLVDLERNDLGRVSKYGSVRVDEFMVIEKYSHVMHIVSNVCGELRDECDAVDVIHAVFPGGTITGAPKVRTMEIIEELEPTRRGLYTGSIGWFGYNQDMHFNIVIRTIYVKAGQAFMQSGAGIVIDSNPRHEYKESIKKALAMKKALQLSEEEKKEQRRAEI

SEQ ID NO: 76474 - DNA, 1548 bp, Bacillus licheniformis ATCC 14580
  CDS (1)..(1548): transl_table=11
ttgagtctgcaaaccgattttgcctctttttcagaggattcttcacactttaaaacgataccgattattgagagtttttccgtcgatacgctgacgcccgttcaattggtcgagaagctgcaggaagacatcgtctatttgctggaaagccaggatgaaacctctgcatggtcaagatattctttcatcggccttgacccctttttgacgatcaaagaagaacgcggccggtttcacgcctgcgatcaaaagcagaagaagctttattcggcttcacagttaaaagacgttctcgaatggatgtcggagacgtattcgatcaaagcgcctgagctcgacatcccgtttacaggaggagcggtcggctatttaagctacgatttaatgccgctcattgaaccgtccatcaaagggcacagcaaagaaacggaaatggcaaaatgcctcctgtttgtctgccggacgatgatcgcttatgatcacgaactgaaaaagctgcatttcatccactatacaaggcttgaaggcagtgaaaatagggaggaaaagcgccgcattttcaaaaaggggaaagaagagctcaagcagcttacacacaggctgtcagaccggaaaacgccgaaagagctgtttcttccgcaaggacggcacacggcccccagctttgaagggattcaatcaacatatgagaaatcccggtttttggccgatgtcgatcgcttgaaagaatacattaaagcgggagacatttttcaaggcgtcctttcgcaaaggttcgacattccggtgaaggtcggttcttttgagttatacagagtgctgagaatgatcaacccgtccccgtacatgtactacatgaggcttcctgaccgcgatctcgtcggaagctcgcccgaacgtctgatccatgttcaaaacggccatcttgaaatccatccgatcgccggcacaaggaaaaggggcggtgatcaggctgaggataagcggcttgaaaaagaactattggctgatgagaaagaaaaagcggagcattacatgcttgtcgatttggcgagaaatgatatcggcagagtagctgagtacgggtctgtccaagtgcccgagtttacgaaaatcgtttccttttcgcacgtcatgcacatcatttcgatcgtaaccggcactttaaaagcgggtgtccacccggttgacgctttaatgagcgcatttccggccggaactttgaccggcgctccgaaaatccgcgcgattcagcttttaaatgagcttgagcccgaaccgagggaaacatacggaggatgcattgcttacatcggatttgacggaaatatcgattcgtgcatcacgatccggacgatgagcgtgaaaaacggagtggcgtccattcaggccggggcgggcatcgtagccgactccgtgcctgaaaaagaatgggaagagacctgcaataaagcaggggctctgttaaaaacgattcaaatcgcagaagaaacgtttctcgaaaagggggaggacggcaatgaacgaactgctgaaatcatgcgttaa

SEQ ID NO: 76475 - protein, 515 aa, Bacillus licheniformis ATCC 14580
MSLQTDFASFSEDSSHFKTIPIIESFSVDTLTPVQLVEKLQEDIVYLLESQDETSAWSRYSFIGLDPFLTIKEERGRFHACDQKQKKLYSASQLKDVLEWMSETYSIKAPELDIPFTGGAVGYLSYDLMPLIEPSIKGHSKETEMAKCLLFVCRTMIAYDHELKKLHFIHYTRLEGSENREEKRRIFKKGKEELKQLTHRLSDRKTPKELFLPQGRHTAPSFEGIQSTYEKSRFLADVDRLKEYIKAGDIFQGVLSQRFDIPVKVGSFELYRVLRMINPSPYMYYMRLPDRDLVGSSPERLIHVQNGHLEIHPIAGTRKRGGDQAEDKRLEKELLADEKEKAEHYMLVDLARNDIGRVAEYGSVQVPEFTKIVSFSHVMHIISIVTGTLKAGVHPVDALMSAFPAGTLTGAPKIRAIQLLNELEPEPRETYGGCIAYIGFDGNIDSCITIRTMSVKNGVASIQAGAGIVADSVPEKEWEETCNKAGALLKTIQIAEETFLEKGEDGNERTAEIMR

SEQ ID NO: 76476 - DNA, 2157 bp, Legionella pneumophila subsp. pneumophila str. Philadelphia 1
  CDS (1)..(2157): transl_table=11
atggtattcatgttacagcaatataaaactctcggtggtgttcatgttgagttttctcaacaagagttggattatcaacaaggcatagattttttgcttgagagccttgattctcaacgtggggcagtatttgcttcgagctttgaatatccaggacgctatacttgttgggacatgggtttttataatcccccattagttatcatctgccaaagtaataccatctgctttgaggcattaaatcaacgaggcgagatattattatcttttctctatccgttattaaaaacaacagatctctgggaggtaattagccaaacgacctcattttgtcagttaaaaattaaatcatcagacaaagtatttagtgaggaggagcggagccatcaaccgtcagtattcagtacaattcgcctcttattgaatttttttaaaacagatgaagattcatacttgggtttatatggtgcttttgggtttgacctgatttatcaatttgaacagttggagcggtgtaaatcaagaaatgaaacacagagagatatggtcctctatctacctgatgaaatttatatagtaaatcatcgtaaggaagaagcctttgttagacgatatgattttcaatatcaggggcgatcaactcaatctttatccagagaaggaaagtattcaccatatcaacctatccataaaccggaaaaaaactgtgatcacgagccaggtgaatatgcccaagtggtcaaaaaagctaaagaaaaattttcctgtggtgatttatttgaagtggttcctagccaaactttctatactcactttgctgaaaagccgtcaattttatttcgccaaatgcgagaaataaatccatcgccatatggattttttgttaatttgggtgacgaagaatatctggtaggtgcttcacctgaaatgtatgttcgtgtccaaggtaaaagagtagaaacttgccctatctcaggcactatcaaacggggagcagatgctattgaggatgctcacaatattcagacacttctagattcagagaaagaagaatcagaactaaccatgtgtaccgatgtggatagaaatgataagtcaagaatatgcgaagcagggagtgtgaaagtcattgggcgtcgccaaattgaaatgtattctcgattgattcatacagttgatcatgttgagggtgttttaagagatggatttgatgcagtagatgcttttttaactcatatgtgggttgttactgtgactggtgcgcctaaaatttgggctatgaatttcattgaacaacatgagaaatccccgcgcaaatggtatgcaggagccgtaggatggtttggttttgatggaaatttaaatactggattggtcttaagaacagtgcgaatagaaaagggaactgcagaaattagagtaggcgcaacgttactttatgactctattcctgaagctgaggaagaggagacgagattaaaggcttctgcatttttagacattttacaaaaaccatggcaaaaggcaaaaaagaagatagagaatatccccctggtaggggaaaataaaaaagttttacttatcgatcatcaagattcctttgttcatactttggcaaactatttaaggcaaacgggagctgcggttacaacagttcgctatgacaaggcgattggctatttacaaaataatcattttgatttgatcgtattatcacctggccctggaaaaccggttgattttaagctttcagaaacaattgatatgatactctcaaagaacataccaatattcggtgtttgtctggggctgcaaggaattgttgagtattttggaggggttttggatgttcttgaataccctatgcatggaaaatcttcagtaattagggtattagataacaaggggttgttctccggtttaggcgattgttttaaagcgggaagataccattcactctatgccagagcagagaccttacccagtgaattattagttaccgctgtaagtgaagatgatgtgattatggcagtttctcatgagcatttacctgtgcatgcggttcaatttcatccagagacaattttgtctttatcggatcaagtgggtttaagaataatcaccaatttgatgaatatggtgaaggacaatgggtaa

SEQ ID NO: 76477 - protein, 718 aa, Legionella pneumophila subsp. pneumophila str. Philadelphia 1
MVFMLQQYKTLGGVHVEFSQQELDYQQGIDFLLESLDSQRGAVFASSFEYPGRYTCWDMGFYNPPLVIICQSNTICFEALNQRGEILLSFLYPLLKTTDLWEVISQTTSFCQLKIKSSDKVFSEEERSHQPSVFSTIRLLLNFFKTDEDSYLGLYGAFGFDLIYQFEQLERCKSRNETQRDMVLYLPDEIYIVNHRKEEAFVRRYDFQYQGRSTQSLSREGKYSPYQPIHKPEKNCDHEPGEYAQVVKKAKEKFSCGDLFEVVPSQTFYTHFAEKPSILFRQMREINPSPYGFFVNLGDEEYLVGASPEMYVRVQGKRVETCPISGTIKRGADAIEDAHNIQTLLDSEKEESELTMCTDVDRNDKSRICEAGSVKVIGRRQIEMYSRLIHTVDHVEGVLRDGFDAVDAFLTHMWVVTVTGAPKIWAMNFIEQHEKSPRKWYAGAVGWFGFDGNLNTGLVLRTVRIEKGTAEIRVGATLLYDSIPEAEEEETRLKASAFLDILQKPWQKAKKKIENIPLVGENKKVLLIDHQDSFVHTLANYLRQTGAAVTTVRYDKAIGYLQNNHFDLIVLSPGPGKPVDFKLSETIDMILSKNIPIFGVCLGLQGIVEYFGGVLDVLEYPMHGKSSVIRVLDNKGLFSGLGDCFKAGRYHSLYARAETLPSELLVTAVSEDDVIMAVSHEHLPVHAVQFHPETILSLSDQVGLRIITNLMNMVKDNG

SEQ ID NO: 76478 - DNA, 1494 bp, Burkholderia pseudomallei K96243
  CDS (1)..(1494): transl_table=11
atgactgaactcgaattccaatcgcttgccaacgagggctacaaccgcattccgctcatcgccgaagcgctggccgacctcgaaacgccgctttcactgtatctgaagctcgcgcagcccgaacgcggcggcgccaactcgttcctgctcgaatcggtggtgggcggcgagcgcttcggacgctattcgttcatcggcctgcccgcgcatacgctggtgcgcacgaagaacggcgtgtcggaggtcgtgacggacggccaggtcaccgagacccacgacggcgacccgttcgcgttcatcgcgacattccagagccgcttcaaggtcgcgcagcgccccggcctgccgcgcttctgcggcggcctcgccggctatttcggctacgacgcggtgcgctacatcgagaagaagctcgcgcacaccgcgccgcgcgacgatctcggcctgcccgacatccagttgctgctgaccgaggaagtcgccgtgatcgacaacctcgccggcaagctctacctgatcgtctatgccgatccgacgaagcccgaggcgtacacgaaagccaagcaacggctgcgcgagctcaagcagcggctgcgcgcgagcgtcgtgccgcccgtcacgtcggcgagcgtgcgcaccgagatctatcgcgaattcaagaaggatgactatctggccgccgtgcgcacggcgaaggaatacatcgcggcgggcgagctgatgcagatccaggtcggccagcgcctgacgaagccgtatcgcgacaatccgctgtcgctgtaccgcgcgctgcgctcgctgaacccgtcgccatacatgtattactacaatttcggcgaattccatgtcgtcggcgcttcgccggagattctcgtgcgtcaggagaagcgcggcgacgaccagatcgtgacgatccgcccgcttgccggcacgcggccgcggggcaacacgcccgagcgcgacgccgagctcgcgaccgaactgctcaacgatccgaaggaaatcgccgagcacgtgatgctgatcgacctcgcgcgcaacgacgtcggccgcatcgcggaaatcggctcggtccacgtgaccgacaagatggtgatcgagaaatactcgcacgtgcagcacatcgtgagttcggtcgagggcaagctgaagcccggcgtgacgaactacgacgtgctgcgcgcgacgttcccggcgggcacgctgtccggcgcgccgaaagtccgcgcgatggagctgatcgacgagctcgagccgatcaagcgcgggctgtacggcggcgcggtcggctacctgtcgttctcgggcgagatggatctcgcgatcgcgatccgcacgggcctcatccacaacggcaatctgtacgtgcaggcggcggcgggcatcgtcgccgactcggtgcccgaatccgaatggcaggagaccgagaacaaggcgcgcgcggtgctgcgcgcggccgaacaggtgcaagacggcctcgattccgatttctga

SEQ ID NO: 76479 - protein, 497 aa, Burkholderia pseudomallei K96243
MTELEFQSLANEGYNRIPLIAEALADLETPLSLYLKLAQPERGGANSFLLESVVGGERFGRYSFIGLPAHTLVRTKNGVSEVVTDGQVTETHDGDPFAFIATFQSRFKVAQRPGLPRFCGGLAGYFGYDAVRYIEKKLAHTAPRDDLGLPDIQLLLTEEVAVIDNLAGKLYLIVYADPTKPEAYTKAKQRLRELKQRLRASVVPPVTSASVRTEIYREFKKDDYLAAVRTAKEYIAAGELMQIQVGQRLTKPYRDNPLSLYRALRSLNPSPYMYYYNFGEFHVVGASPEILVRQEKRGDDQIVTIRPLAGTRPRGNTPERDAELATELLNDPKEIAEHVMLIDLARNDVGRIAEIGSVHVTDKMVIEKYSHVQHIVSSVEGKLKPGVTNYDVLRATFPAGTLSGAPKVRAMELIDELEPIKRGLYGGAVGYLSFSGEMDLAIAIRTGLIHNGNLYVQAAAGIVADSVPESEWQETENKARAVLRAAEQVQDGLDSDF

SEQ ID NO: 76480 - DNA, 1488 bp, Methylococcus capsulatus str. Bath
  CDS (1)..(1488): transl_table=11
atgacccccgaacgattccaggccttcgccgcccaaggctacaaccgcgtcccgctggcgcggcgcgtcctcgccgacctcgacacccctttgagcgcctatctcaagctcgccgatgggccgtattcctacctgttcgaatccgtccacggcggcgagcagtggggccgctattccatcatcggcctgccctgccggacctgcatcgaagtccgcggccatgaggtcatcgtgctgagggatggcgcccgcgccgagaccctgacggtcgaaaacccgctggcatggatcaaggctttcggcagccgtttcaaggtcccggacctcgaaggtctgccgcgcttcaccgggggcctggtcggctatttcggctacgagaccatgggctacatcgagccgcgcctggccaagaccaaaccggacccgatcggctcgcccgatatcctgttgatggtgtcggaagaagtgctggtgttcgacaaactcaccggcaagctgctggtcgtcgtccacgccgatcccaacgaagccggcgcctacgccaaggcccagacccggctggacgagctggtgcgtgaactgcgcagccgccagctcccgcccgcgccgccgcgctcaccgcgcacggtggacgaggccgatttcatctccggcttcacgcgggaaggcttcgaggacgcggtgcggcgggtcaaggagtacatcgtcgagggcgacgtgatgcaggtggtgctgtcgcagcggctgagcattccctacgccgcctcgcccctggacctctaccgcgccctgcgctgcctcaacccctcgccttacatgtaccagctcaacctgggggatttccacgtggtcggctcgtcgccggaaatcctggtgcggctggaggacggcaccgtgacggtccgccccatcgccggcacccgccgccgcggccgcagccccgaagaggatcaggcgctggagcgggagctcctggccgaccccaaggaactcgccgagcatctgatgctgatcgacctgggccgcaacgacaccggccggatttccgagaccggcagcgtgcggctcaccgagaagatggtggtggagcgctattcccacgtcatgcacatcgtctccaacgtgaccggcaaactccaggccggcaaggacgcctacgacgtactggcggcgaccttccccgccggcaccgtcagcggggcaccgaagatccgggccatggagatcatcgccgagctggagccggtgaaacgtggggtctattccggcgcggtgggctacatcggctggtccggcaacatggacacggcgatcgccatccgcaccgccgtcatcaaggacgggcggctccacatccaggccggcgccggcgtcgtctacgactcggtaccgcgcagcgagtgggaggaaacgatgaacaaggcacgggccattttccgggcggtcgccatggccgaagccggcgtcgaaggaggcgagaacgcatga

SEQ ID NO: 76481 - protein, 495 aa, Methylococcus capsulatus str. Bath
MTPERFQAFAAQGYNRVPLARRVLADLDTPLSAYLKLADGPYSYLFESVHGGEQWGRYSIIGLPCRTCIEVRGHEVIVLRDGARAETLTVENPLAWIKAFGSRFKVPDLEGLPRFTGGLVGYFGYETMGYIEPRLAKTKPDPIGSPDILLMVSEEVLVFDKLTGKLLVVVHADPNEAGAYAKAQTRLDELVRELRSRQLPPAPPRSPRTVDEADFISGFTREGFEDAVRRVKEYIVEGDVMQVVLSQRLSIPYAASPLDLYRALRCLNPSPYMYQLNLGDFHVVGSSPEILVRLEDGTVTVRPIAGTRRRGRSPEEDQALERELLADPKELAEHLMLIDLGRNDTGRISETGSVRLTEKMVVERYSHVMHIVSNVTGKLQAGKDAYDVLAATFPAGTVSGAPKIRAMEIIAELEPVKRGVYSGAVGYIGWSGNMDTAIAIRTAVIKDGRLHIQAGAGVVYDSVPRSEWEETMNKARAIFRAVAMAEAGVEGGENA

SEQ ID NO: 76482 - DNA, 1407 bp, Methylococcus capsulatus str. Bath
  CDS (1)..(1407): transl_table=11
atgaccccccggatcaccgaactcccctatttccgagacagcgccgccttgttcggaccgtgggcggaccggcgctgggcggtattcctcgacagcggctttccgcactgcagacatggccgttacgacatcatcgccgccgacccgctcgccacgctggtgacccgtggccacatcagcgagatccgccggcgggggggcgaggtcgctctgtcgccggaagatcccttctcccttctgcggcgggaattgggcacccgcgccgatcctgtcggtgaactaccgttcagcgggggcgccgtgggctatttcggctacgacctgggcaggcgcctggagaaactgccggaacgtgcggtcgacgccgagaacatggcggacatggccgtcggcatctatgactgggcagtcatcgtggatcatctgcaaggccgcagctggctggtaagccagggccgctcgcccgccaccgccgcccgctggccgcatctggtgcggtcgttcagccagatccagacgttggggtggcagcgtaccggcttcgacgtactggcaccggtgcgggccaacatgaaccggcgcgactacgtcgccgccttcgagcgcatccagcattacatccgtgaaggcgactgctatcaggtcaacctggcgcagcgcttcgccgcaccctgccggggcagcgcttggacgctgtatcagaccctgcgccagaccaaccccgcacctttcagcgccttcatcaacggcccgcaggcacgcgttctcagctcatctccggaacgcttcctgcgggtactcgacggcagggtggaaaccaagcccatcaagggcacccgaccccgttccaccgatccgctggaggatcgccgccaagaggaaaccctgcggcacagtgaaaaggaccgggcggagaatctgatgatcgtggacctgctgcgcaatgacctgggcaaacactgccagcccggctcggtacgggtgcccaaactgttcgaaatcgagagctacaccaccgtccaccatctggtgagcaccgtcaccggtacgctggcgcgcggccacgacgccatcggcctgctgcgcgacagcttccccggcggctcgatcacgggggccccaaagatccgcgccatggaaatcatcgaggaactcgagcctcaccgccgtggcgtctactgcggcgccatcggctatgtcggctttgacggcaacatggataccaacatcgccatccgtaccctggtgcagtcggaaggcaccgtccggttctgggccggcggcggcatcgtggcggactcttcggccgcctcggagtaccaggaatgtttcgacaaggccgctgcactgctgaacctgctggagcgtttccgtatcgcccgcaccggcgaccatgtgggtcgttaa

SEQ ID NO: 76483 - protein, 468 aa, Methylococcus capsulatus str. Bath
MTPRITELPYFRDSAALFGPWADRRWAVFLDSGFPHCRHGRYDIIAADPLATLVTRGHISEIRRRGGEVALSPEDPFSLLRRELGTRADPVGELPFSGGAVGYFGYDLGRRLEKLPERAVDAENMADMAVGIYDWAVIVDHLQGRSWLVSQGRSPATAARWPHLVRSFSQIQTLGWQRTGFDVLAPVRANMNRRDYVAAFERIQHYIREGDCYQVNLAQRFAAPCRGSAWTLYQTLRQTNPAPFSAFINGPQARVLSSSPERFLRVLDGRVETKPIKGTRPRSTDPLEDRRQEETLRHSEKDRAENLMIVDLLRNDLGKHCQPGSVRVPKLFEIESYTTVHHLVSTVTGTLARGHDAIGLLRDSFPGGSITGAPKIRAMEIIEELEPHRRGVYCGAIGYVGFDGNMDTNIAIRTLVQSEGTVRFWAGGGIVADSSAASEYQECFDKAAALLNLLERFRIARTGDHVGR

SEQ ID NO: 76484 - DNA, 1488 bp, Azoarcus sp. EbN1
  CDS (1)..(1488): transl_table=11
atgctcgaacatgaattcaacgcgctggccgcgcagggctacaaccgcatcccggtcacgctcgaaaccttcgccgacctcgacacgccgctgtcgatctacctgaagctcgcgaacgaaccctacagctatctgctcgaatcggtgcagggcggcgagcgcttcggccgctactcgatgatcggtctcgcggcctcgacgcgcatcgaggtctacggccgctcggcgctgctgctgaccggcaaccgcctcgtcgagcggcgcgactacggcgatccgctgaactacgtcgccgagttcatggcgcgcatcaaggtgccgccgcgcgacggcctgccgcgtttcgccggcggcctggtcggctgtttcggctacgacacggtgcgctacatcgagccgcgcctcgcgaagaccgagaagaccgacacgatcggcacgcccgacatcctgctgctgctgtcggaggagatcgcgatcgtcgacaacctctccggcaagctgacgctggtcgtctatgcggaacccgaagtgcccggcgcgttcaagcgcgcgaagaaacgcctgcgcgacctgctcgcgcggctgcgcgcgccggcggtgattcccgaggatgtgcacgccgaatcgcagcccgccgtgtccagcttcggcgaggaagggttcaaggcggcggtgaaccgcgcgaagcagtacatcatcgacggcgacatcatgcaggtcgtgctgtcgcagcgcatgagcaagccttacgcagcgagcccgatggcgctgtaccgcgcgatccgcacgctgaacccgtcgccttacatgttctatttcaacttcgaggatttccacgtcgtcggcgcatcgcccgaaatcctcgtccggctcgaccaggacggcgacgcgaagcgcgtcacggtgcgcccgatcgcgggcacgcgcccgcgcggcgcgaccgcagcggacgaccttgcgctcgaagcggacctgctcgccgacgagaaggaacgcgccgagcacctgcagctgctcgacctcgggcgcaacgacgccggccgcgtcgccgagatcggcagcgtcaaggtcaccgagcaattcacggtcgagcgttactcgcacgtgatgcacatcgtctcgaacgtcgaaggacgcctgaaggacgggctcaacgcgctcgccgtgctgcgtgcgacgttcccggcgggcacggtgtcgggtgcgccgaagctccgcgccatggagatcatcgacgagctcgagccggtcaagcgcggcatctatgccggcgccgccggctacatcggttttcacggcgacatggatctggcgatcgcgatccgcaccgcagtcatcaaggacggccacatccacgtccaggcgggcgccggcatcgtcgctgattcgaaccccgacgccgaatggacggagacgcagaacaaggcacgtgcgatgctgcgtgcggcggagatggcggaatcgggtctggacacgcgggtcgactga

SEQ ID NO: 76485 - protein, 495 aa, Azoarcus sp. EbN1
MLEHEFNALAAQGYNRIPVTLETFADLDTPLSIYLKLANEPYSYLLESVQGGERFGRYSMIGLAASTRIEVYGRSALLLTGNRLVERRDYGDPLNYVAEFMARIKVPPRDGLPRFAGGLVGCFGYDTVRYIEPRLAKTEKTDTIGTPDILLLLSEEIAIVDNLSGKLTLVVYAEPEVPGAFKRAKKRLRDLLARLRAPAVIPEDVHAESQPAVSSFGEEGFKAAVNRAKQYIIDGDIMQVVLSQRMSKPYAASPMALYRAIRTLNPSPYMFYFNFEDFHVVGASPEILVRLDQDGDAKRVTVRPIAGTRPRGATAADDLALEADLLADEKERAEHLQLLDLGRNDAGRVAEIGSVKVTEQFTVERYSHVMHIVSNVEGRLKDGLNALAVLRATFPAGTVSGAPKLRAMEIIDELEPVKRGIYAGAAGYIGFHGDMDLAIAIRTAVIKDGHIHVQAGAGIVADSNPDAEWTETQNKARAMLRAAEMAESGLDTRVD

SEQ ID NO: 76486 - DNA, 1512 bp, Silicibacter pomeroyi DSS-3
  CDS (1)..(1512): transl_table=11
atggcgctgacccccgatttcgaaaccttcgcccgcgcctatgaggcgggcgaaaaccaggtcgttcatacccgcctggccgccgatctcgacacgccggtgtcgctgatgctgaagctgacgggcgcccagaaagacgccttcatgctcgaatcggtgaccgggggcgaggtgcgcgggcgctattcgatcatcgggatgaagccggacctgatctggcgctgccatggcgagcaatcggcgctaaaccggaaggcgcggttcgaccccgacgggttccggccgcaagagggcaatccgctcgacaacctgcgcgcgctcctggccgaaagccgcatcgccctgcccgaggacctgccgcaggcctcggccgggctgttcggctatctcggctatgacatggtgcggctggtcgaacatctgcccgatgtgaaccccgatccgctgggcctgcccgatgcggtgatgatgcgcccctcggtcgtggcggtgctcgacggggtcaagggcgaggtcaccgtggtctcgcccgcctgggtcagcgacgggcaatcggcgcgcgccgcctatgcccaggccgccgaacgggtgatggatgcggtgcgcgatctggaacgcgcgatgcccgccgaaacccgcgatctgggcgaggcgcatgaggtcgcgccgccggtgtcgaacttcacccgcgagggttacaaggcggcggtcgaaaaggccaaggattacatccgcgcgggcgacatctttcaggtggtgccggcgcagcgctggacgcaggagtttccgctgccgcccttcgcgctttaccgctcgctgcggcgcaccaacccctcacccttcatgttctatttcaacttcggcggctttcaggtggtcggcgccagccccgaaatcctggtgcgtgtctttgggcaagaggtgaccattcgccccatcgcgggcacccgcccgcgcggcgccacccccgaggaggatcgcgccaacgaggccgatctgcttgccgacaagaaggaactggccgaacatctgatgctgctcgatctgggccgcaacgatgcgggccgggtcagcaagatcggcaccgtgcgtccgaccgagaaattcatcatcgaacgctattcccacgtgatgcatatcgtgtcgaacgtggtcggagagctggacccggacaaggacgcgctggatgccttctttgccggcatgcccgccggaacggtcagcggcgctcccaaggtgcgcgcgatggagatcatcgacgagttggagccggaaaaacgcggcatctacggcggcggtgtcggctatttcagcgccgggggcgacatggacatgtgcatcgcgctgcgcaccgccatcgtcaaggatcgcaagctttacatccaggccggcggcggtgtggtctatgacagcgacccagaggcggaattcatggaaaccgtgcataaatccaacgccatccggcgcgctgcggcggatgcggcccggttcatcggatcacgcaacagctga

SEQ ID NO: 76487 - protein, 503 aa, Silicibacter pomeroyi DSS-3
MALTPDFETFARAYEAGENQVVHTRLAADLDTPVSLMLKLTGAQKDAFMLESVTGGEVRGRYSIIGMKPDLIWRCHGEQSALNRKARFDPDGFRPQEGNPLDNLRALLAESRIALPEDLPQASAGLFGYLGYDMVRLVEHLPDVNPDPLGLPDAVMMRPSVVAVLDGVKGEVTVVSPAWVSDGQSARAAYAQAAERVMDAVRDLERAMPAETRDLGEAHEVAPPVSNFTREGYKAAVEKAKDYIRAGDIFQVVPAQRWTQEFPLPPFALYRSLRRTNPSPFMFYFNFGGFQVVGASPEILVRVFGQEVTIRPIAGTRPRGATPEEDRANEADLLADKKELAEHLMLLDLGRNDAGRVSKIGTVRPTEKFIIERYSHVMHIVSNVVGELDPDKDALDAFFAGMPAGTVSGAPKVRAMEIIDELEPEKRGIYGGGVGYFSAGGDMDMCIALRTAIVKDRKLYIQAGGGVVYDSDPEAEFMETVHKSNAIRRAAADAARFIGSRNS

SEQ ID NO: 76488 - DNA, 1554 bp, Synechococcus elongatus PCC 6301
  CDS (1)..(1554): transl_table=11
atgatttacccggattttgcaacgtttgccagcttggctgagcaaggcaacttcattccggtctatcaagagtgggtcgcggatttggatacgccggtttcggcttggtaccgcatttgccgcgatcgcccctacagctttttgctggaatcagtcgaagggggtgagcacctgggtcgctatagctttttgggttgcgatccactctgggtgctagaagcgagaggcgatcgcacaactcgtcggtttcgggatggctcggaagaagtctttagcggcgatccctttgcagccctcaagcaatgtttagcgccctatcagccggtgcatttgccgcaactgccctcgggcgtcggcggactgtttggcttctggggctatgagctgatgcgctggattgagccacgcgtcccggttcacagcggcggcgaaaacgatctgcccgacggctgctggatgcaggtcgatagcctgatgattttcgatcaagtcaagcgtcggctctacgcgatcgcttatgcggatttgcaagccgaaccagatctgcatcgcgcttacgcgctggcctgcaatcgtgtgcaggaactggtcaatcgcttccaaggatcactgagcgccagcgatcgccaactgccgtggctgccgcctcaatcggcaccgtctcgtcccgtcgattaccaaagcaacaccacccaggagcaattctgcgccaacgtactgacagcacaggactatattcgcgccggcgacatcttccaagtcgtgctgtcgcaacggctaacgacgcattacagcggcgatccctttgatctctatcgatcgctgcggctgatcaatccttccccctacatggcctttttccgcttcggcgactggcagttgatcggctccagtccagaagtgatggtcaaggctgaacaggatccacaccaaagcgatcgccaagtggccactgtccgcccgatcgcggggactcgtcctcgggtgcgcactgcaccagaagatgccgcccttgcaacggatctgctggctgatcccaaggaagtggccgagcacgtcatgctggtcgatctcggtcgcaatgacctaggccgtgtctgcgagaaaggcagcgtccgcgtcgatgaattgatggtgattgagcgctactcccacgtcatgcatattgtcagcaacgtggtgggcctactcgatcgcgatcgcgacgcttgggatttgctgcgggcaactttcccagcagggacggtcagcggtgcgcccaagattcgcgctatggaaatcatccatgaattggaaggctgtcggcgcggaccctactccggcgcctatggctactacgattttgagggtcagttgaatacggcaatcacgatccgcacgatgatcgttcaggcagaagggagtggccatcgtgtcagcgtgcaagcaggggctggtgtcgtcgctgattctgtgccaatcaaggagtacgaagaaaccttgaacaaggcgcggggtttactggaagcgatccgttgtctacaaccgcctcaagtgccagttgcagcgggataa

SEQ ID NO: 76489 - protein, 517 aa, Synechococcus elongatus PCC 6301
MIYPDFATFASLAEQGNFIPVYQEWVADLDTPVSAWYRICRDRPYSFLLESVEGGEHLGRYSFLGCDPLWVLEARGDRTTRRFRDGSEEVFSGDPFAALKQCLAPYQPVHLPQLPSGVGGLFGFWGYELMRWIEPRVPVHSGGENDLPDGCWMQVDSLMIFDQVKRRLYAIAYADLQAEPDLHRAYALACNRVQELVNRFQGSLSASDRQLPWLPPQSAPSRPVDYQSNTTQEQFCANVLTAQDYIRAGDIFQVVLSQRLTTHYSGDPFDLYRSLRLINPSPYMAFFRFGDWQLIGSSPEVMVKAEQDPHQSDRQVATVRPIAGTRPRVRTAPEDAALATDLLADPKEVAEHVMLVDLGRNDLGRVCEKGSVRVDELMVIERYSHVMHIVSNVVGLLDRDRDAWDLLRATFPAGTVSGAPKIRAMEIIHELEGCRRGPYSGAYGYYDFEGQLNTAITIRTMIVQAEGSGHRVSVQAGAGVVADSVPIKEYEETLNKARGLLEAIRCLQPPQVPVAAG

SEQ ID NO: 76490 - DNA, 1434 bp, Bacillus clausii KSM-K16
  CDS (1)..(1434): transl_table=11
atggcgcaaaaagggtctgccattcgtacatcaataaataaaaaaatcgcaatgccgcaaaacgagtggtttcaccgattttccgcattggcgaaagacgagccccatcatgtactgttggaaagtggacagacaggccggtatagcataatcggcttaacgcctgttgctgtgatcgaaggcaagggccacacattaatggttagcgaccaaaacggcaaacatctttttaaaggcccgctgttatcttcgttagaaacggtacttgccccctaccaaacagaagacacgttaacaggcccaccaatgcaaggcggggcgattggatacttgtcttatgatgttgtccgagaaattgagtcgttaaaggaaaccgcggttgatgatttgcaactgcctgaagtctattttctcgtttttgaggaagtagctgtgtacgaccatgaggaagagcagttgtggctatgcgccaatggaagcgatagccaattgctgcaggagaaagtggcgctgcttgaacagcggtggctgcaagcagagtctgctccgacaccaagtagaaatccatttacttcccgttcacgcaaagaagcgacatttacgaaagagcagtttgttcgtgctgtcgaaagggtgcaggactacattcgaagcggcgatgtatttcaagtcaatttgtccgttcgccagacccggagccttcaagtagacccttttagtgtgtataaagagctaaggcagcttaatccatcaccgtatatgggttatattcatagtccaaatacacaaattgttagcgcgtcgcccgaattgttaattaaaaagcggggcaatgaactggaaacaaggccaatagctggaacacgctcaagaggtgtcaatgaggaagaagatgcctggcttgaagcagaacttttaagcaatgaaaaagagcgggctgagcacgtaatgctcgttgatctggaacgtaacgatcttggcagggtgagccaatacggcacggtagccgttgacgatttattagtggttgaacggtactcacatgttatgcaccttgtttccagtgtaaagggacaattggcagagggtttgacgctatacgattgcattcgggcaacgttcccaggggggacgataacgggagcgccaaaagtaaggacaatggagatcattgaagagttggagcccgttcgccgcggcctatatacagggtccattggttggattggttttaatggcgacatggaactaaacatagtcattcgcacgatgctgtgtcaggatgggaacgcccatgtccaggcaggcgctggaatagtgattgattccaatgccgaaaacgagtacaaagaatcaatgaaaaaggcgcaggcgctatggcgtgcgcttgaattagcagagcagagagttttaacaaaaacgagcagagcttag

SEQ ID NO: 76491 - protein, 477 aa, Bacillus clausii KSM-K16
MAQKGSAIRTSINKKIAMPQNEWFHRFSALAKDEPHHVLLESGQTGRYSIIGLTPVAVIEGKGHTLMVSDQNGKHLFKGPLLSSLETVLAPYQTEDTLTGPPMQGGAIGYLSYDVVREIESLKETAVDDLQLPEVYFLVFEEVAVYDHEEEQLWLCANGSDSQLLQEKVALLEQRWLQAESAPTPSRNPFTSRSRKEATFTKEQFVRAVERVQDYIRSGDVFQVNLSVRQTRSLQVDPFSVYKELRQLNPSPYMGYIHSPNTQIVSASPELLIKKRGNELETRPIAGTRSRGVNEEEDAWLEAELLSNEKERAEHVMLVDLERNDLGRVSQYGTVAVDDLLVVERYSHVMHLVSSVKGQLAEGLTLYDCIRATFPGGTITGAPKVRTMEIIEELEPVRRGLYTGSIGWIGFNGDMELNIVIRTMLCQDGNAHVQAGAGIVIDSNAENEYKESMKKAQALWRALELAEQRVLTKTSRA

SEQ ID NO: 76492 - DNA, 1497 bp, Bacillus clausii KSM-K16
  CDS (1)..(1497): transl_table=11
atgaagaaaaccccttttgcatcttttcagcaagcctacaaccgttacggtacatgcttttatagcgaaacggtatttgccgatggcttgacccctattcaaatgtttcaagcattgcaagaagaagcgacctatttgctcgagagcaatgacgtgcagtcggaatggtccaattactcctttattgggttgagcccaatttatgagtgtgtagaagagaacggttcatataaaaccattcacttgcagactggtaacgtagttgccagtgcggtaaatttcgaagcgtgttatcagaaaaccgtttcacatatcgacccgcaaccgagcgaaatggagattcctttccaaggaggcgccgttggctacgtcagctatgacgcggtcgaagaaatagagcctgtcatcaagcggagcgatcaacgcagctgcccgtattatcatttcattttttgtgaacagttgttaagctttcatgagcaaacaaagcaattgacgctgattcaattagtcaaaagtggcttgcagccagcagaacaagcttttgctgaagcgcaagcgaaaattcgtacactaatcggtaaattggaaagtgcgaaagcgcctgttttgccacatatggtcacgaaaaagcagctgccgatcgaggttcgctccaactattcgaaacaaggctttataaacgatgtaaaccggattaaagcttatattcaggcaggggacattttccaagctgttttgtcacaacgtctagaaatgaccgtttctgttggcgggctcgatttgtaccgtgtgttgcgctatgttaacccttcgccgtatttgtactatattaaaattggaaaaaaagaaatcattggaagttcgccagaaaagcttgtccaagtacgcggtgaccatgtcgaaatacatccaattgcaggcacgcgcaagcgtgggcaaacggcggccgaagacgaagcattagcccgcgagttgctagccgacgacaaagaacgggcggagcaccatatgcttgttgacttggcgcgcaatgatgttggcaaggtttcagtttatggaagcgtagaagttccatccttgttggaaatcgggaaattttcccatgtgatgcatctcgtctccaaagtaacaggcaaattgaagcctgaagcaacgccttatgacgcgttaaaagcggcatttcctgctgggactctttctggtgcaccgaaaattcgcgccatgcaaattttaaatgagctagaaccgactagacggggcatctacggaggcgccatttgctatatggatttcaacggcaatatcgattcttgcattgcgattcgtacgattgttctggaaggcaattgcgccaccatccaagcaggagcaggcattgtcgcagattcagacccggaaaaagaatacgaagaaacattaaacaaagcaaaggcacttattcatgcgattgaacagacagaagcattgtttgcaaaggcggtgcgtttgtcatga

SEQ ID NO: 76493 - protein, 498 aa, Bacillus clausii KSM-K16
MKKTPFASFQQAYNRYGTCFYSETVFADGLTPIQMFQALQEEATYLLESNDVQSEWSNYSFIGLSPIYECVEENGSYKTIHLQTGNVVASAVNFEACYQKTVSHIDPQPSEMEIPFQGGAVGYVSYDAVEEIEPVIKRSDQRSCPYYHFIFCEQLLSFHEQTKQLTLIQLVKSGLQPAEQAFAEAQAKIRTLIGKLESAKAPVLPHMVTKKQLPIEVRSNYSKQGFINDVNRIKAYIQAGDIFQAVLSQRLEMTVSVGGLDLYRVLRYVNPSPYLYYIKIGKKEIIGSSPEKLVQVRGDHVEIHPIAGTRKRGQTAAEDEALARELLADDKERAEHHMLVDLARNDVGKVSVYGSVEVPSLLEIGKFSHVMHLVSKVTGKLKPEATPYDALKAAFPAGTLSGAPKIRAMQILNELEPTRRGIYGGAICYMDFNGNIDSCIAIRTIVLEGNCATIQAGAGIVADSDPEKEYEETLNKAKALIHAIEQTEALFAKAVRLS

SEQ ID NO: 76494 - DNA, 1458 bp, Dehalococcoides ethenogenes 195
  CDS (1)..(1458): transl_table=11
atgtattacccatctttagccgaagtaaaaaaactggccgcacagggcaacctgatacccatctcctgtgagattatggccgaccttgaaaccccggtttccgcttttctgaaaatcaaagacagccaaaatgcttttctgctggaaagtgtggaaggcggggagcgcgtagcccgatatagtttcatcggcaccaacccccataaagtgcttacagcctatcagacagataccgttccccctctaacccaagttgaaaatgaactaaacaaataccgggtagtaccggtgggggatttgccccgtttctgcggcggggcggtgggttttctgggctacgaggcagttacccgctttgaggagttgccctcgccatcggctgaccccctaaatcttccggaagcagtcttcatgctggttgataccatgctggtttttgaccacatcagccattccataaaagtactaagctatgtccataccgaacaggatattgaaacgtcatataatcaggctatccggaatatagaaaatctggttaaccgccttagaaagccgctgcccgaaaccgccccaaaatctaccgccgcaagtatccccgaaatgaaatccaatttcaaacaggcggattttgagggcaaggtatccaaaataagagattaccttaactcaggcgaagctattcaggtagttttgtcacagcgtctgtccagacccacctccgcccatccctttgacatctaccgtgccttgcgttcggtaaacccttcaccatacatgtactatctggatttcggtgatttccagattgtgggcgcctcgccggaggtactggtacgggtggaagacggcgaggttatgacccgccctctggcaggcaccagaaaacggggcaaaacccagaaagaagacaccagtcttgagcaggaactccgccatgacgaaaaagagtgtgccgaacatatcatgctggtggatttgggacgaaacgatatcgggcgtataagccagccgggcacagtccgcataaccgacgtcatggatgtggaacgctattcccacgtaatgcatctggtttcccacgtacagggcaaattaaaaccaaacattactccgtttgaggctttgcaatcctgcttcccggcaggcacagtctcaggcgcacctaaaatacgagctatggaaataatagctgaaatggaaaccgaaaagagaggcatttatgccggggcagtcggatatttttcttattcgggcaatatggacatggctatagccatacgcaccatggttgtcaagggaggcattgcccatatccaggcaggctgcggcatagtaagtgacagcgtacccgaacatgagtatcaggaaacattaaacaaagctcaggctttgctgaaagctctggacagggcagaaaatcaggcatcggagaaaccgcatgttattactaattga

SEQ ID NO: 76495 - protein, 485 aa, Dehalococcoides ethenogenes 195
MYYPSLAEVKKLAAQGNLIPISCEIMADLETPVSAFLKIKDSQNAFLLESVEGGERVARYSFIGTNPHKVLTAYQTDTVPPLTQVENELNKYRVVPVGDLPRFCGGAVGFLGYEAVTRFEELPSPSADPLNLPEAVFMLVDTMLVFDHISHSIKVLSYVHTEQDIETSYNQAIRNIENLVNRLRKPLPETAPKSTAASIPEMKSNFKQADFEGKVSKIRDYLNSGEAIQVVLSQRLSRPTSAHPFDIYRALRSVNPSPYMYYLDFGDFQIVGASPEVLVRVEDGEVMTRPLAGTRKRGKTQKEDTSLEQELRHDEKECAEHIMLVDLGRNDIGRISQPGTVRITDVMDVERYSHVMHLVSHVQGKLKPNITPFEALQSCFPAGTVSGAPKIRAMEIIAEMETEKRGIYAGAVGYFSYSGNMDMAIAIRTMVVKGGIAHIQAGCGIVSDSVPEHEYQETLNKAQALLKALDRAENQASEKPHVITN

SEQ ID NO: 76496 - DNA, 1407 bp, Staphylococcus epidermidis RP62A
  CDS (1)..(1407): transl_table=11
atggatattgtatacaaaaaggtgaatgctcaaattacgccagaagctttagcaaaattaaaacaaaaaaagatcatttttgaaagtacaaatcaacagaaacttaaaggtaggtactcgatagtagtattcgatcattatggcaaaattacattagataattctcaacttttaattaagttagacaatcattgtgaaatagttaagaatcaaccgtatcaacgacttaaggaatttgtagataaatattattttgaaatcaaagataaatatttaaaagatttaccttttatttcgggctttatagggacatgtagctttgatttagtacgacatgaatttaaaaaattacaagatattaaattagaagatcatcaaactcatgatgtccaattttatctagtggaagatgtatttgtttttgatcattataaagatgaattatatattatcgcaagtaacttattttctgatagaacaaaagagagattaaaggaatctattgaacgtaaaattgaagatttaaaaaacatacatttttcggttgaggatataaattataaatccatccctcgacatataaccaccaatatatcagagcaacaatttgttcaaactattagaattttaaaaaagaaaattactgaaggagatatgtttcaagtagttccttcaagaatttatagttataaacaccattttcaacacaatttacatcaattaacttttcagttatatcaaaatttaaagcgacaaaatcctagtccatatatgtattatattaataaagatgtaccgattgtaataggaagttctcctgaaagttttgtaaaggtaaaagatggaaaagtttatacgaatcctatagctggaacaattaaaagaggtcaaaataaaaaagaagatgaaaataatgaaaagacattaatgaaagatgaaaaggaattgagtgaacatcgtatgctcgtagatttaggaagaaatgatattcatcgaataagtaaaacaggcacttcacaaattaccaaactaatgacaatagaacgttatgaacatgtcatgcatatcgttagtgaagttattggagaattaaaaccccatctatctcctatgagcgtcatcgcaagtttgctaccaacgggtactgtctcaggtgcacctaaacttagagctatacagagaatatacgaatcttatccttataaaagaggtatctatagcggtggtgttgggtatatcaactgtaatcatcatttagattttgcattggctatacgtaccatgattatcgatgaggaaaaagtcagtgtcgaggcaggatgtggagtagtatatgattctattccagagaaagaacttgaagaaacaaaacttaaagctaaaagtttattggaggtaactccatga

SEQ ID NO: 76497 - protein, 468 aa, Staphylococcus epidermidis RP62A
MDIVYKKVNAQITPEALAKLKQKKIIFESTNQQKLKGRYSIVVFDHYGKITLDNSQLLIKLDNHCEIVKNQPYQRLKEFVDKYYFEIKDKYLKDLPFISGFIGTCSFDLVRHEFKKLQDIKLEDHQTHDVQFYLVEDVFVFDHYKDELYIIASNLFSDRTKERLKESIERKIEDLKNIHFSVEDINYKSIPRHITTNISEQQFVQTIRILKKKITEGDMFQVVPSRIYSYKHHFQHNLHQLTFQLYQNLKRQNPSPYMYYINKDVPIVIGSSPESFVKVKDGKVYTNPIAGTIKRGQNKKEDENNEKTLMKDEKELSEHRMLVDLGRNDIHRISKTGTSQITKLMTIERYEHVMHIVSEVIGELKPHLSPMSVIASLLPTGTVSGAPKLRAIQRIYESYPYKRGIYSGGVGYINCNHHLDFALAIRTMIIDEEKVSVEAGCGVVYDSIPEKELEETKLKAKSLLEVTP

SEQ ID NO: 76498 - DNA, 1482 bp, Pseudomonas syringae pv. syringae B728a
  CDS (1)..(1482): transl_table=11
atgaaccgtgaagaattcctgcgtttggccgccgaaggctacaaccgcatcccgcttgcccgcgaaaccctggccgacttcgacacgccgctgtcgatctacctcaagcttgccgatcagcccaactcctatctgctggagtcggtgcagggcggcgagaagtgggggcgttattcgatcatcggcctgccgtgccgcaccgtgatgcgcgtgcatggtcatcacgtcagcgtgacccatgatggcgtcgagatcgaaagcctggatgtcgaagacccgctggacttcgtcgagaccttcaaggcgcgttacaacgtgccgaccattgccgggctgccacgcttcaacggcgggctggtgggctactttggctacgactgtgtgcgctatgtcgagaagcgtctggccaactgcccgaaccctgacccgctgggcgtgccggatatcctgttgatggtgtctgacgcggtcgtggtgttcgacaacctggcgggcaagatgcacgccatcgtgctgatcgatccagcgcagcaggacgcctacgcaagtggtgtggcgcagctcgatgaactgatgcacaagctgcgtcagccgatcacgccgcgccgtggccttgatctggaccggccgccggctgccgacccggtgtttcgttccagctttacccaggacgattacgaggcagcggtcgatacgatcaagcagtacatcctcgccggcgacgtgatgcaggttgtaccgtcgcagcgcatgtccatcgatttcagcgccgcgccgatcgatctgtatcgggcgctgcgctgcttcaacccgacgccttatatgtatttcttcaacttcggcgacttccatgtcgtcggcagttcgccggaagtgctggtgcgggtcgaagacaacctgatcaccgtgcgtccaattgccggtactcgccctcgcggcgccaccgaagaggcggatcgcgcgctggaagaagacctgctctccgatcacaaggaaatcgccgagcacctgatgctcatcgatcttggccgcaacgataccggtcgggtgtccgagattggcacggtcaaactgaccgagaaaatggtcatcgagcgttattccaacgtcatgcacatcgtatccaacgtcacaggccagttgaaaagcgggttgagcgcgatggacgcgctgcgcgcgattctgccggcgggcaccctgtccggggcgccgaagatccgcgccatggaaatcatcgacgagttggagccggtcaaacgcggcgtctacggcggcgcagtcggttacctggcctggaacggcaacatggacacggcgattgcgattcggactgcggtgatcaaggatggtgagctgcatgtacaggccggtggcggcattgtcgccgactccgtgccagtgctggaatgggaagaaaccctgaacaaacgccgcgccatgttccgcgccgtagccctggcctcgcagcctgccgagggttga

SEQ ID NO: 76499 - protein, 493 aa, Pseudomonas syringae pv. syringae B728a
MNREEFLRLAAEGYNRIPLARETLADFDTPLSIYLKLADQPNSYLLESVQGGEKWGRYSIIGLPCRTVMRVHGHHVSVTHDGVEIESLDVEDPLDFVETFKARYNVPTIAGLPRFNGGLVGYFGYDCVRYVEKRLANCPNPDPLGVPDILLMVSDAVVVFDNLAGKMHAIVLIDPAQQDAYASGVAQLDELMHKLRQPITPRRGLDLDRPPAADPVFRSSFTQDDYEAAVDTIKQYILAGDVMQVVPSQRMSIDFSAAPIDLYRALRCFNPTPYMYFFNFGDFHVVGSSPEVLVRVEDNLITVRPIAGTRPRGATEEADRALEEDLLSDHKEIAEHLMLIDLGRNDTGRVSEIGTVKLTEKMVIERYSNVMHIVSNVTGQLKSGLSAMDALRAILPAGTLSGAPKIRAMEIIDELEPVKRGVYGGAVGYLAWNGNMDTAIAIRTAVIKDGELHVQAGGGIVADSVPVLEWEETLNKRRAMFRAVALASQPAEG

SEQ ID NO: 76500 - DNA, 1557 bp, Haemophilus influenzae 86-028NP
  CDS (1)..(1557): transl_table=11
atgaacattcaaactcaagcctttattgcggtgacagctcaatcaattccctattatgctgataccaccgctatttttaatacactttgccaacctaattcaaattctcttctactcgactctgccgaaatagggagtaaaaatagtttacaaagtcttattttagttaatgctgcggttaaaataacgtgcttaggtcacaacgtcacatttaaagctttaaataagaatggaaaacaagttttaaaagaaattcatccaaaattaaccgcacttggaaaaataagtgcggtcaattttgaagacgaattttctgtacaattttcgccacttgataatcaactcgatgaagataataaattacagtctgctactatttttgatgggttgcgtgttgtttctactctttatcaacatagccaaacgcctatttttttaggcggattatttgcttacgatctcgtcgcaaatttcattccaatggatggcattacattaaaaaatgatggtatcaactgccctgattacagtttctatcttgccgaacacttaattactatcgaccatcaaaatcaacaagcgacacttaaaagtttctgttttgctcaagaagaacaagtcaatattgcgaaaacctcgctttctatcgcacaaaaactaaaaaatattgatcacgttctttctattaaatcggcaagtgatgaagttaaaacaaactttgacgatcctgaatttactggtatcgtaaaagccttaaaacaccatattaatattggagatgttttccaaattgtgccttctcgtcgtttttcccttgcttgccctaatacattagccagttatgctcaactcaaacaaaataatccaagcccttatatgttctatatgaatgatgaagactttattttgtttggtgcatcgccagaaagtgcgctgaaatatgcgccagaaaatcgtcagttagaaatttacccaatcgcaggttcacgccctcgtggttttgatgctcacggcaacattgatcctgaattagatgcacgtttagaactggaacttcgtcttgatcataaagaacaagcggaacatttaatgttagttgatttagcgcgtaacgacattgctcgagtttgccaaaatggtacccgtaaagtggcagaattaatgcaagtggatcgctattctcacattatgcatttagtgtctcgtgtggtgggtaaattacgccctgaattagatgcacttcacgcctatcaagcctgtatgaatatgggcacattaactggtgcaccaaaaattaaagcgatgcagcttatttatcaatttgagcaacaaaaacgccatagttacggtggtgcggtgggttatctcacgtctgatggacattttgatacctgtatcgtgattcgttctgctttcgtacaaaatgggatagcccatgtacaagcaggttgcggtgaagtattggattctgatccacaaatggaagccgatgaaacacgccataaagcagcggctgtcttaaaagcaattcgtcaagttaatacacaagcaaaataa

SEQ ID NO: 76501 - protein, 518 aa, Haemophilus influenzae 86-028NP
MNIQTQAFIAVTAQSIPYYADTTAIFNTLCQPNSNSLLLDSAEIGSKNSLQSLILVNAAVKITCLGHNVTFKALNKNGKQVLKEIHPKLTALGKISAVNFEDEFSVQFSPLDNQLDEDNKLQSATIFDGLRVVSTLYQHSQTPIFLGGLFAYDLVANFIPMDGITLKNDGINCPDYSFYLAEHLITIDHQNQQATLKSFCFAQEEQVNIAKTSLSIAQKLKNIDHVLSIKSASDEVKTNFDDPEFTGIVKALKHHINIGDVFQIVPSRRFSLACPNTLASYAQLKQNNPSPYMFYMNDEDFILFGASPESALKYAPENRQLEIYPIAGSRPRGFDAHGNIDPELDARLELELRLDHKEQAEHLMLVDLARNDIARVCQNGTRKVAELMQVDRYSHIMHLVSRVVGKLRPELDALHAYQACMNMGTLTGAPKIKAMQLIYQFEQQKRHSYGGAVGYLTSDGHFDTCIVIRSAFVQNGIAHVQAGCGEVLDSDPQMEADETRHKAAAVLKAIRQVNTQAK

SEQ ID NO: 76502 - DNA, 1488 bp, Pseudomonas fluorescens Pf-5
  CDS (1)..(1488): transl_table=11
atgattcgcgaagaattcctgcgtttggccgcagccggttacaaccgtatcccgctggcctgcgaaacccttgccgacttcgacaccccgctgtcgatctacctgaaactggccgaccagcccaactcctatctgctggagtcggtgcagggcggtgagaagtgggggcgttactcgatcatcggcctgccgtgccgcactgtgctgcgggtgcacggcttccaggtcagcgtgacccatgatggcgtggagatcgaaagtcacgaagtggccgacccgctggccttcgtcgaggaattcaaagctcgctacaacgtcccgaccattgccggcctgccgcgtttcaacggtggcctggtgggctatttcggctatgactgcgtgcgttatgtcgagccgcgcttgggcccgtgcccgaacccggatccgatcggtgtgccggatatcctgttgatggtctccgacgcggtagtggtgttcgacaacctggcgggcaaggtgcacgccatcgtgctggccgaccctggccaggacaacgccttcgaagccggccaggcacgtttacaggaattgctggcgcaactgcgccagccgatcactccgcgtccgggcctggatttcagcaagcagctggccgccgatccgctgttccgctccagctttacccaggctgactatgagcgggccgtggacactatcaaggaatacatcctggccggtgactgcatgcaggtggtgccgtcccagcgcatgtccatcgatttttcggcggcgcccatcgacctgtaccgggcgctgcgctgcttcaacccgaccccttacatgtacttcttcaacttcggtgatttccacgtagtgggcagctcgccggaagtgctggtgcgggtcgaagacaacctgatcactgtgcggccgatcgccggtacccgcccgcggggcgcctccgaggaggccgacctggccctggagcaggacctgctgtcggacgccaaggagatcgccgagcacctgatgctgatcgacctggggcgcaacgacaccggtcgggtctcggaaatcggttcggtgaaactcaccgaaaagatggtcatcgagcgctattccaacgtaatgcacatcgtttccaacgtcaccggccagctcaaggccgggctgacggccatggatgcgctgcgggcgatcctgccggcgggcactctgtccggcgcaccgaaaatccgtgcgatggaaatcatcgacgagctggaaccggtcaagcgtgggatctatggcggcgccgtgggttacttcgcctggaacggcaacatggacaccgccattgccattcgcacggcggtgatcaagaacggcgagctgcatgtacaggccggcggcgggattgttgccgactcggtgccgaccctggagtgggaagagacgctgaacaagcgtcgcgcaatgttccgtgccgtggcactggcggaacagacccctgcatccaaggcttga

SEQ ID NO: 76503 - protein, 495 aa, Pseudomonas fluorescens Pf-5
MIREEFLRLAAAGYNRIPLACETLADFDTPLSIYLKLADQPNSYLLESVQGGEKWGRYSIIGLPCRTVLRVHGFQVSVTHDGVEIESHEVADPLAFVEEFKARYNVPTIAGLPRFNGGLVGYFGYDCVRYVEPRLGPCPNPDPIGVPDILLMVSDAVVVFDNLAGKVHAIVLADPGQDNAFEAGQARLQELLAQLRQPITPRPGLDFSKQLAADPLFRSSFTQADYERAVDTIKEYILAGDCMQVVPSQRMSIDFSAAPIDLYRALRCFNPTPYMYFFNFGDFHVVGSSPEVLVRVEDNLITVRPIAGTRPRGASEEADLALEQDLLSDAKEIAEHLMLIDLGRNDTGRVSEIGSVKLTEKMVIERYSNVMHIVSNVTGQLKAGLTAMDALRAILPAGTLSGAPKIRAMEIIDELEPVKRGIYGGAVGYFAWNGNMDTAIAIRTAVIKNGELHVQAGGGIVADSVPTLEWEETLNKRRAMFRAVALAEQTPASKA

SEQ ID NO: 76504 - DNA, 1644 bp, Colwellia psychrerythraea 34H
  CDS (1)..(1644): transl_table=11
atgactcaaaatttaccaagtaaaatcaagggtgaagtaatcaccatacaagatagtacttactatcaaaatgatccgttaagtgtttaccaattattatgtcaccaacaacaacataatatattactagaatctgccgagattgataaaaagcatttattaaaaagcctattattaactgacgcggcagtaaagattgtatgtaatggcaatactgtcactttctctgcattatccttaaatggcgaaagtgctatcgattacgcggcgactcaactagagtcacatgctcaagtaagttttgctgatgatggaaaatcatttcaagcaacatttagcgaggttgctaaagaccttgatgaaaaagcgcgattaagtgcaaccaatcaatttcacagtttacgattattcaatcaactcaccgatgataaaagtcaccctttctccgtatttttagggggtgtttttgcttttgatcttatggcaatagcagaggaattacccactgttgctcaaggtgataatacttgccctgattttgtttattacttagctgaaacgttagtaattattgaccatgaattacaaagcaccgaaattataggtaatattttcaactgcaatgattctgaaaaaaccaaacaaagccaagtagtgatttccaatcgtgttgctcagattaaagaaacgcttgctaagtctattgatgccgaacaggtattgcaattaagcccttcatttaccgatatagccgataaagataaactcaatgaacaattgcaagttgatattagtgacgaacgtttttgtgaaatagttgatcaattaaaagaaaatattcgagcaggtgatatttttcaagtagtgccatcacgtacttttagcttaccttgttttgattctattgctgcttataaagccctcaagattagtaaccctagtccttatatgttttatttaaaagatagtgatttttgtatttttggcgcatcgccagaatcgtcattaaaatatcaagcgagtaatcgtcatgttgagatttacccaatagcggggactcgccctcgcggtttcgatcaacagggtaatatttcactcgacttagacagtcgaatagaattagaactgaggcaagataaaaaagaatctgccgaacatatcatgttggttgatttagcacgaaatgatgttgctagagtttcacaacccggtactcgttatgttgccgacttactcaaagttgatcgatactctcacgtaatgcacttagtttcacgagtatgcggtaccttacaaaccgatttagatgcgttacatgcctatcaggcttgcatgaatatgggcacgttatctggtgcccctaaagtaaaagcaacctcccttattagggcagttgaaggtaaacgacgtggtagttatggcggtgcggttggttacttaactggtactggtgaaatggatacttgtattgttatacgctccgcctttgttaaagataatattgctcaagtacaagcgggtgctggtgtggtctatgattcagacccaataagtgaagcaaatgaaacaaggcaaaaagcccaagcggttattagtgccattatcacggctaatacgtcggcaaaggagcaagctcatgactaa

SEQ ID NO: 76505 - protein, 547 aa, Colwellia psychrerythraea 34H
MTQNLPSKIKGEVITIQDSTYYQNDPLSVYQLLCHQQQHNILLESAEIDKKHLLKSLLLTDAAVKIVCNGNTVTFSALSLNGESAIDYAATQLESHAQVSFADDGKSFQATFSEVAKDLDEKARLSATNQFHSLRLFNQLTDDKSHPFSVFLGGVFAFDLMAIAEELPTVAQGDNTCPDFVYYLAETLVIIDHELQSTEIIGNIFNCNDSEKTKQSQVVISNRVAQIKETLAKSIDAEQVLQLSPSFTDIADKDKLNEQLQVDISDERFCEIVDQLKENIRAGDIFQVVPSRTFSLPCFDSIAAYKALKISNPSPYMFYLKDSDFCIFGASPESSLKYQASNRHVEIYPIAGTRPRGFDQQGNISLDLDSRIELELRQDKKESAEHIMLVDLARNDVARVSQPGTRYVADLLKVDRYSHVMHLVSRVCGTLQTDLDALHAYQACMNMGTLSGAPKVKATSLIRAVEGKRRGSYGGAVGYLTGTGEMDTCIVIRSAFVKDNIAQVQAGAGVVYDSDPISEANETRQKAQAVISAIITANTSAKEQAHD

SEQ ID NO: 76506 - DNA, 1476 bp, Dechloromonas aromatica RCB
  CDS (1)..(1476): transl_table=11
atgactgaaaccgaattcaattcgcttgccgcgcaaggctacaaccgtattcccgtcacgctggaaacgtttgccgatctcgacacgccgctctccatctacctgaagctggccaatgcgccctacacctacttgctcgaatcggtgcagggcggtgagcgcttcggtcgctactcgatcatcggtctggctgcccagacgcgtatcgtcgtcaatggccaccaggtgctggtgctgaccggcaaccgtatcgccgagcgtgaaaacgacaccaacccgctggaattcatcggcaagttcatgcagcgcttccgggcgccgccggcgaacggcctgccacgcttctgcggcggcctggtcggttgcttcggctacgacaccgtgcgttacgtcgaaacccgcctgacccgcaccaacaagccggacgaaatcggcacgccggacatcggcctattgctttccgaagaaatcgctgtcgtcgacaacctgtccggcaagctgacgctgatcgtctatgccgagcccggcttccccggtgcctatcagaaggcccgcgcccgtctcaaggaattgctgcagaaactgcgcacgccggtctccctgcccagcgagcagccggtccattcggaagcggccgtttccgtctttggcgaagcggccttcaagcaggctgtgctcaaggccaaggcctacatcaccgaaggtgacatcatgcaggtcgtgctgtcgcagcgcatgaccaagcccttcctggcgagccctctggcgctctatcgcaccctgcgcagcctgaatccgtcgccctacatgttctacttcgacttcgaggatttccacgtggtcggcgcctcgccggagattctggttcgcctcgaaggcgagcgcgtcacggttcggccgattgccggcacccgcaagcgcggtgcttcgccggaagaggatgcagctctggccgtcgaactgctggccgatgaaaaagaacgggccgaacatacccagttgctcgacctcggccgcaacgactgcgggcgtgtcgcgcgtgtcggttcggtcaagctgaccgaaaacatgatcgtcgagcgttattcgcacgtgatgcatatcgtttccaatgtcgagggcaagctgcagccgggtctggatgcacttgacgtgctgcgcgccaccttcccggccggcaccgtctccggtgcgcccaaggtgcgggcgatggaaatcatcgacgaactggaaccggtcaagcgtggcatctacgccggttcggtcggctatctcggtttcaacggcgacatggatgtggccattgccatccgcacggctgtgctcaaggacaagaagctctatgtgcaggccggtgccgggatcgtcgccgattccgatccgaattcggaatggaccgaaaccctgaacaaggcgcgtgccgtgctgcgtgcggccgaactggccgagcagggtctggatacaaggatcgactga

SEQ ID NO: 76507 - protein, 491 aa, Dechloromonas aromatica RCB
MTETEFNSLAAQGYNRIPVTLETFADLDTPLSIYLKLANAPYTYLLESVQGGERFGRYSIIGLAAQTRIVVNGHQVLVLTGNRIAERENDTNPLEFIGKFMQRFRAPPANGLPRFCGGLVGCFGYDTVRYVETRLTRTNKPDEIGTPDIGLLLSEEIAVVDNLSGKLTLIVYAEPGFPGAYQKARARLKELLQKLRTPVSLPSEQPVHSEAAVSVFGEAAFKQAVLKAKAYITEGDIMQVVLSQRMTKPFLASPLALYRTLRSLNPSPYMFYFDFEDFHVVGASPEILVRLEGERVTVRPIAGTRKRGASPEEDAALAVELLADEKERAEHTQLLDLGRNDCGRVARVGSVKLTENMIVERYSHVMHIVSNVEGKLQPGLDALDVLRATFPAGTVSGAPKVRAMEIIDELEPVKRGIYAGSVGYLGFNGDMDVAIAIRTAVLKDKKLYVQAGAGIVADSDPNSEWTETLNKARAVLRAAELAEQGLDTRID

SEQ ID NO: 76508 - DNA, 2181 bp, Thermobifida fusca YX
  CDS (1)..(2181): transl_table=11
gtggacgacaactcctacaccaccagtggtggtatcaccgtgcaccgcacggcagtgccgtgcgatccccgtgcgctcgccgatctgacggtcaacgtggaacagcgccgaggcggcgtgctctcctccgggatggagtatcccggccgctacagccgttggcatttgggatacgtggacccgtgcctggaagttgtcgcgcgcggccgcacgatcggggcgacggccctcaacgaccgcggccgtgtcctgctgcccgcggtagcccgggcgctcaccgcgcacggcgcggtggtggagcacaccgacgacacggtcgctgtcacggtccctgaaccggatcccaccgagttcttcactgaggaagagcgcagccgccggctcagtgttttttctgcgctccgcgccctcgtgggcgtgttcttccacgcggaagaaccccacctggggttgtacggggcgttcggctacgatctggcgttccagttcgaaccgatcgagcaggtgctgccgcgcgacccggaggaccgggacctggtgttgcacctgcccgacgagatcatcgtccacgaccggaaacgggagatctgccagcgctactcctacgacttcacgctgccggaggagttgcgcggcccggcaggggcgaccacgcggggcctgccacgccacaccgagcccacacccccggtgaccccggctgccgaggtgccgccgcagccggaacccgggtcgtatgcgcggatcgtggctgaggccaaggagcggttccgccgcggcgacttgttcgaagtggtgcccagccaccgcttgtacgcgccgtgtgcgtcgcctgcgcggttctacgagcggctgcgggaacgcaaccctgccccgtacgagttcttcctcaacctgggggagggcgagtacctggtcggcgcgtccccggaaatgtttgtgcgggtcacgggccgtcccggagaggggcagcgggtggagacctgcccgatctccggcacgatcaagcgtggcgcggacgcggtcggcgacgcggagaacatcaaggagctgctgtcgtccgcgaaggaagagtcggagctgaccatgtgcaccgacgtggaccgcaacgacaagtcccgggtgtgcgtgccaggcagtgtgcgggtgatcggccgccggcagatcgaaatgtacagtcggctcatccacacggtcgaccacattgaggggattctgcgccccgagttggacgctattgacgcgttcctcacccacatgtgggcggtgaccgtgacgggggcgccgaagacgtgggcgatgcggttcatcgaacagcatgagagttcgccgcgccgctggtatgggggcgcggtcggtgtcatcaattttgatggttcgatgaacaccgggttgacgttgcggaccgcgcacatccgggacggggtggcgacggtgcgggcgggcgccacactgctgtacgactctgatccggaagctgaagagcgggagactttcctcaaagcccgtgccctgttggagaccctcaccgacgagggtgaggaaacctccaaggctgcgcctgcggtggagcaggtgggggcggggatgcgggtgctgctcgtcgaccacgaagactcgttcgtcaacacgctcgcggactacgtccggcggcacggcgccgaggtcaccacggtgcgctacgggttcgacccggccctgctcgaccagatgcgtcccgacctggtggtgctctccccggggccggggctgcccgccgatttcgcgatgagcgcgctgttgaaggagttggacgcgcgcggcctgcctgtgttcggggtgtgcctggggctgcaggcgatggtggagtacgcgggcggggagctgctcactttggacacgccggtgcacggtaaacccggccgggttcgggtcaccgggggcgcgctgctggctgggctgggagaggacggggagttcaccgcggcccgctaccactccgtgtacgcgaccccggaccgggtgaaagggttcgaggtgacggcggtgacggaggacgacggtttccccgtggtcatggcgatcgagaatgctgaggcgcggcggtgggcggtccagttccaccccgagtcgatcctcaccggccgggtgggggagcagatcgtggcgaacgtgctgcgcttggccagggagagcagctga

SEQ ID NO: 76509 - protein, 726 aa, Thermobifida fusca YX
MDDNSYTTSGGITVHRTAVPCDPRALADLTVNVEQRRGGVLSSGMEYPGRYSRWHLGYVDPCLEVVARGRTIGATALNDRGRVLLPAVARALTAHGAVVEHTDDTVAVTVPEPDPTEFFTEEERSRRLSVFSALRALVGVFFHAEEPHLGLYGAFGYDLAFQFEPIEQVLPRDPEDRDLVLHLPDEIIVHDRKREICQRYSYDFTLPEELRGPAGATTRGLPRHTEPTPPVTPAAEVPPQPEPGSYARIVAEAKERFRRGDLFEVVPSHRLYAPCASPARFYERLRERNPAPYEFFLNLGEGEYLVGASPEMFVRVTGRPGEGQRVETCPISGTIKRGADAVGDAENIKELLSSAKEESELTMCTDVDRNDKSRVCVPGSVRVIGRRQIEMYSRLIHTVDHIEGILRPELDAIDAFLTHMWAVTVTGAPKTWAMRFIEQHESSPRRWYGGAVGVINFDGSMNTGLTLRTAHIRDGVATVRAGATLLYDSDPEAEERETFLKARALLETLTDEGEETSKAAPAVEQVGAGMRVLLVDHEDSFVNTLADYVRRHGAEVTTVRYGFDPALLDQMRPDLVVLSPGPGLPADFAMSALLKELDARGLPVFGVCLGLQAMVEYAGGELLTLDTPVHGKPGRVRVTGGALLAGLGEDGEFTAARYHSVYATPDRVKGFEVTAVTEDDGFPVVMAIENAEARRWAVQFHPESILTGRVGEQIVANVLRLARESS

SEQ ID NO: 76510 - DNA, 1521 bp, Prochlorococcus marinus str. NATL2A
  CDS (1)..(1521): transl_table=11
atgcttaatttagataaggaagaatttattttgtcagtgtccagcggggctaattatattccgttggcaaaaagttggccggcagatttagaaactcctcttacaacctggcttaaagttggtaatgatgctccttcaggagtattgcttgaatcagtagagggtggagaaactatcggtaggtggagtgtggttgcatcagatcccctttggaaagtagtagtaaggggcgatgaattaactagatgctggagggatggaaaacaagaaaagtttcatggaaatccagtggaaatcctcaggaaaatgcttgagccttataaatctgtttctttgcctggcttgccacaactgggacaactttttggcatgtggggatatgaattaattcaatggatagagccctcagtgcctacttatgaattatcagatcaagacttacctgatggtatttggatgtttatggataaagttctgatttttgatcaagtcaaacgcctaataacagctgttgcatatgggaatttaagtgatggagtttcttctcaaaaagcttatgaaattgcctgtgaacaaatcaatgaactgcaagatttaatggcttctcctttaaagccaataaagtctttaaagtggaatcaaagatcgaatagatctattgatatggctgctaatacctcaaaaagtgaatttgaacatagtgttgaagcggcaaaagaatttattaaacaaggcgatatttttcagttagttcttagtcaaaaattggagtcgactgttacgcaaaaaccctttgaactatatcgaagcctgaggatggtaaatccctctccatttatggcgttttttgactttggtgactggcaacttattggttctagcccggaggtaatggttaaggcccaaaaaacagaaaagggtattcagacaagtttgagaccaattgcaggtacacgacctagaggtaaaaatgatttggaagatgcagccttagaaaaagatcttttaaaagatcccaaagaacgagcagaacatgtgatgttggtagatttgggtcgaaatgatttaggtcgagtttgtaccccaggtagtgttgttgtgaaagaattaatggttattgaaaaatattcgcatgtaatgcatatcgtaagtgaggttgaaggcactttaaaaaaagaacaggatgtttgggacttattaattgcttctttcccagctgggactgtaagtggagccccaaaaataagagcaatgcaactaattaatcaattagaaaatcaacgtagagggccttattcaggcgtttatgggtctatagatttaaatggagcattaaatacagctattactattagaacgatgattgtacgtaaaaaaaacaaaaatggttttactgttgaagtgcaagcaggggcaggggttgttgcagattccattccttctaatgagtatcaagaaactttaaataaagctaaagggatgtttactgctttagcttgcttagacccccaagatttatga

SEQ ID NO: 76511 - protein, 506 aa, Prochlorococcus marinus str. NATL2A
MLNLDKEEFILSVSSGANYIPLAKSWPADLETPLTTWLKVGNDAPSGVLLESVEGGETIGRWSVVASDPLWKVVVRGDELTRCWRDGKQEKFHGNPVEILRKMLEPYKSVSLPGLPQLGQLFGMWGYELIQWIEPSVPTYELSDQDLPDGIWMFMDKVLIFDQVKRLITAVAYGNLSDGVSSQKAYEIACEQINELQDLMASPLKPIKSLKWNQRSNRSIDMAANTSKSEFEHSVEAAKEFIKQGDIFQLVLSQKLESTVTQKPFELYRSLRMVNPSPFMAFFDFGDWQLIGSSPEVMVKAQKTEKGIQTSLRPIAGTRPRGKNDLEDAALEKDLLKDPKERAEHVMLVDLGRNDLGRVCTPGSVVVKELMVIEKYSHVMHIVSEVEGTLKKEQDVWDLLIASFPAGTVSGAPKIRAMQLINQLENQRRGPYSGVYGSIDLNGALNTAITIRTMIVRKKNKNGFTVEVQAGAGVVADSIPSNEYQETLNKAKGMFTALACLDPQDL

SEQ ID NO: 76512 - DNA, 1518 bp, Ralstonia eutropha JMP134
  CDS (1)..(1518): transl_table=11
atgaccgaactggaattcaaatcgctggccgaccagggctacaaccgcatcccgctgatcgccgaggccttcgccgatctggaaacgccgctgtcgctgtacctgaagctggcccagtcgcagacgcgcggcgtcaataccttcctgctggaatcggtggtgggcggcgaacgcttcggccgctactcgtttatcggcctgcatgcgcgcaccctgctgcgctcctacggcaaccgtgctgaagttgtcaccgacggcaaggtggtcgagacccacgaaggcaacccgcttgatttcatcgccgagttcgagaagcgcttcaaagtcgcgctgcgcccgggcctgccgcgcttctgcggcggtctggccggctatttcggctatgacgcggtgcgctatatcgagaagaagctggccaacacgcagaagcccgacgacctcggcctgcccgatatccagctgctgctgtgcgaagagctggccgtgatcgacaacttgtccggcaagctctacctcatcgtctacgccgacccgaccacaccggaagcctattcccgcgctcgccagcgcctgcgtgagctgcgcatgaagctgcgccagcccgtggatgtgccggtaacgagcccgtcggtgcagaccgacgtctaccgcgagttcgacaaggccgattacctggccgccgtgcacaaggccaaggaatacatcatggccggcgacatgatgcaggtacaaatcggccagcgcctgatgaagccgtaccgcgacgcgccgctgtcgctgtaccgtgcgctgcgctcgctgaacccgtcgccgtacatgtacttctacaacttcggcgatttccagatcgtcggggcctcgcccgagatcctggtgcgccaggaatcgcgcaaggtcggcaccaatggcgattcgcgcgacgagcacatcgtcacgatccgtccgctggccggcacgcgtccgcgcggcaatacgcccgagaaggacgcgcagctcgccaccgaactgctcaacgacccgaaggagatcgccgagcatgtgatgctgatcgacctggcgcgcaacgatatcggccgcatcgccgagaccggctcggtcaaggtcaccgacaagatggtgatcgaaaagtactcgcacgtgcagcacatcgtcagctcggtcgagggcaccctgcgcccgggcatgagcaacctcgacgtcctgcgcgccaccttcccggccggcacgctgtcgggcgcgcccaaggtgcacgcgatggagatcatcgacgaactggagccgcgcaagcgcggcatctacggcggcgccgtgggctacctgtcgttcggcggcgagatggacctggcgattgcgatccgcaccggcatcatcaaggacggcaatctctacgtgcaggccgcggccggcatcgttgcggactcggaccccgaagccgaatggagggaaaccgaagccaaggcgcgcgccgtgatccgcgcggccgagcaggtccaggatggcctggactccgacatctga

SEQ ID NO: 76513 - protein, 505 aa, Ralstonia eutropha JMP134
MTELEFKSLADQGYNRIPLIAEAFADLETPLSLYLKLAQSQTRGVNTFLLESVVGGERFGRYSFIGLHARTLLRSYGNRAEVVTDGKVVETHEGNPLDFIAEFEKRFKVALRPGLPRFCGGLAGYFGYDAVRYIEKKLANTQKPDDLGLPDIQLLLCEELAVIDNLSGKLYLIVYADPTTPEAYSRARQRLRELRMKLRQPVDVPVTSPSVQTDVYREFDKADYLAAVHKAKEYIMAGDMMQVQIGQRLMKPYRDAPLSLYRALRSLNPSPYMYFYNFGDFQIVGASPEILVRQESRKVGTNGDSRDEHIVTIRPLAGTRPRGNTPEKDAQLATELLNDPKEIAEHVMLIDLARNDIGRIAETGSVKVTDKMVIEKYSHVQHIVSSVEGTLRPGMSNLDVLRATFPAGTLSGAPKVHAMEIIDELEPRKRGIYGGAVGYLSFGGEMDLAIAIRTGIIKDGNLYVQAAAGIVADSDPEAEWRETEAKARAVIRAAEQVQDGLDSDI

SEQ ID NO: 76514 - DNA, 1644 bp, Methanosarcina barkeri str. Fusaro
  CDS (1)..(1644): transl_table=11
atgctttcctttgaccttggaaaagaagaattcaaaaaacttgcttcaggagtaagccagccaggctttatccagctccttgcaagaatcgataatttaacatgttctcctcttgaactttaccacgccctgagggcatcagggacctcaggttattcgtacctgctggaatcagtggaaaaacaggaaactaaggcaaggtactcttttgttggaaatgatcctgatgccgtagttaagataggtgacaggaaaatctctcttgaactccttaacccaaatgcttcgcctttttttgaagaaattcagtcgaaaaccaaagatgcctgtgggtgtgaaaccatagaggaggagaatccggagaaagaaaactcagaactgggaaatttaaaattcacggctccaattcctaagggaaaagatggtttcgatgcccttcgcctggtttttccttctgcaaacgggatgggtctcctgaacacaaaacgttttgacagacagactttcctgggcggggccataggctatacagcttatgatgctatttacgatagctggttaggggtcaaaaaaggctttgagtccgaaattccggaactccagtacctgctggtttcgaaaacttttgttttcgaccatatgactgaagagatatatatcgtagtcactcctttcataattccgggtgcaaatgtaggagaaatatatgaaaaagctctcctggaagccgaaaagctctataccacacttaaggaagctgcactctcaggagactcagtagaaatcgcaataccaggcggatcaatctttccaggcttacctgtttcggactgcaatgccggaaaaaagaagtttgaggactcggtagtccaggcgaaagagcatatttttgcaggagatatttttcaggtagttctttccaggaaatgtgagtttacactcgaacagtcaccttttgaactttatatgcagcttcgggcaattaatccaagtccttatatgtacatctttgagtttggagacctggcaattgtcggggcaagccctgaaactctgctgactgtccatgaaaggactctaattacaaatccgattgcaggcacttgtccccgtggaaaaaccgaagccgaagatgaagcctttgctgcacacatgatgcatgatgaaaaagaaagggctgaacacgtgatgcttgtcgatcttgggagaaacgatgtaagaatggttacggaaagcggctcggtgaaggtttccgaattcatgaaagtcctgaaatattcccatgtccagcatatcgaaagtaaggttataggtaccctgagaccggaatgtgaccagtttgatgctttcagggcaatatttccggcaggaactctctcaggagctccgaaaatccgcgccatggaaattatttccgaacttgaaacttccccgagagggatctacggaggaggggtcggatattacagctggaacggagacgccgattttgcaatcgtaattcggaccattattgtccagggcaagaaagcatcagtgcaggctggagcaggaatcgtagctgattctgatcctggttatgaattcagggaaaccgaacgtaagatgggagcaatgcttgcggcaattggcgaagaacattaa

SEQ ID NO: 76515 - protein, 547 aa, Methanosarcina barkeri str. Fusaro
MLSFDLGKEEFKKLASGVSQPGFIQLLARIDNLTCSPLELYHALRASGTSGYSYLLESVEKQETKARYSFVGNDPDAVVKIGDRKISLELLNPNASPFFEEIQSKTKDACGCETIEEENPEKENSELGNLKFTAPIPKGKDGFDALRLVFPSANGMGLLNTKRFDRQTFLGGAIGYTAYDAIYDSWLGVKKGFESEIPELQYLLVSKTFVFDHMTEEIYIVVTPFIIPGANVGEIYEKALLEAEKLYTTLKEAALSGDSVEIAIPGGSIFPGLPVSDCNAGKKKFEDSVVQAKEHIFAGDIFQVVLSRKCEFTLEQSPFELYMQLRAINPSPYMYIFEFGDLAIVGASPETLLTVHERTLITNPIAGTCPRGKTEAEDEAFAAHMMHDEKERAEHVMLVDLGRNDVRMVTESGSVKVSEFMKVLKYSHVQHIESKVIGTLRPECDQFDAFRAIFPAGTLSGAPKIRAMEIISELETSPRGIYGGGVGYYSWNGDADFAIVIRTIIVQGKKASVQAGAGIVADSDPGYEFRETERKMGAMLAAIGEEH

SEQ ID NO: 76516 - DNA, 1458 bp, Dehalococcoides sp. CBDB1
  CDS (1)..(1458): transl_table=11
atgtattacccatctttagccgaagtaaaaaaactggccgcacagggcaacctgatacccatctcctgtgagattatggccgaccttgaaaccccggtttccgcttttctgaaaatcaaagacagccaaaatgcttttctgctggaaagtgtggaaggcggggagcgcgtagcccgatatagtttcatcggcaccaacccccataaagtgcttacagcctatcagacagataccgttccccctctaacccaagttgaaaatgaactaaacaaataccgggtagtaccggtgggggatttgccccgtttctgcggcggggcggtgggttttctgggctacgaggcagttacccgctttgaggagttgccctcgccatcggctgaccccctaaatcttccggaagcagtcttcatgctggttgataccatgctggtttttgaccacatcagccattccataaaagtactaagctatgtccataccgaacaggatattgaaacgtcatataatcaggctatccggaatatagaaaatctggttaaccgccttagaaagccgctgcccgaaaccgccccaaaatctaccgccgcaagtatccccgaaatgaaatccaatttcaaacaggcggattttgagggcaaggtatccaaaataagagattaccttaactcaggcgaagctattcaggtagttttgtcacagcgtctgtccagacccacctccgcccatccctttgacatctaccgtgccttgcgttcagtaaacccttcaccatacatgtactatctggatttcggtgatttccagattgtgggcgcctcgccggaggtactggtacgggtggaagacggcgaggttatgacccgccctctggcaggcaccagaaaacggggcaaaacccagaaagaagacgccaggcttgagcaggaactccgccatgacgaaaaagagtgtgccgaacatatcatgctggtggatttgggacgaaacgatatcgggcgcataagccagccgggcacagtccgcataaccgacgtcatggatgtggaacgctattcccacgtaatgcatctggtttcccacattcagggcaaattaaaaccaaacattactccgtttgaggctttgcaatcctgcttcccggcaggcacagtctcaggcgcacctaaaatacgggctatggaaataatagctgaaatggaaaccgaaaagagaggcatttatgccggggcagtcggatatttttcttattcgggcaatatggacatggctatagccatacgcaccatggttgtcaagggaggcattgcccatgtccaggcaggctgcggcatagtaagtgacagcgtacccgaacatgagtatcaggaaacattaaacaaagctcaggctttgctgaaagctctggacagggcagaaaatcaggcatcggagaaaccgcatgttattactaattga

SEQ ID NO: 76517 - protein, 485 aa, Dehalococcoides sp. CBDB1
MYYPSLAEVKKLAAQGNLIPISCEIMADLETPVSAFLKIKDSQNAFLLESVEGGERVARYSFIGTNPHKVLTAYQTDTVPPLTQVENELNKYRVVPVGDLPRFCGGAVGFLGYEAVTRFEELPSPSADPLNLPEAVFMLVDTMLVFDHISHSIKVLSYVHTEQDIETSYNQAIRNIENLVNRLRKPLPETAPKSTAASIPEMKSNFKQADFEGKVSKIRDYLNSGEAIQVVLSQRLSRPTSAHPFDIYRALRSVNPSPYMYYLDFGDFQIVGASPEVLVRVEDGEVMTRPLAGTRKRGKTQKEDARLEQELRHDEKECAEHIMLVDLGRNDIGRISQPGTVRITDVMDVERYSHVMHLVSHIQGKLKPNITPFEALQSCFPAGTVSGAPKIRAMEIIAEMETEKRGIYAGAVGYFSYSGNMDMAIAIRTMVVKGGIAHVQAGCGIVSDSVPEHEYQETLNKAQALLKALDRAENQASEKPHVITN

SEQ ID NO: 76518 - DNA, 1566 bp, Thiobacillus denitrificans ATCC 25259
  CDS (1)..(1566): transl_table=11
atggcggcgctcgtcctgacaagacgcgcagcacattccctgacccctgaatcccggatcccgacccctgccatgaccgaacaagaattcttcgaccttgcccgccagggcttcaaccgtatcccgctggtgcgcgaactgcccggcgacctcgagacgccgctgtcggtctatctcaagctcgccaacgcgccctatacctatctcctcgaatcggtcgtcggcggcgaacgcttcggacgctattccttcatcggcctgccggcgcgcaccgtgctcagggtgcgcgcccacctcctgacggtcgaaaccgacggccaggtcgtcgaggaatgcagcacgcccgatccgctcgctttcatcgccgagtatcagacccgcttcaaggccgcgccggtcctgggcttgccgcgcttcaccggcggcctggccggctacttcggctacgacacgatccgttacatcgagaagcgactgacgccggaattcaacaagaacctcgtgcgcaaggacgacgtcctgcacacgcccgacatcctgctgatgctgaccgaggaactcgccgtcttcgacaacctcgccggcaagctctatctcgtcacccacgccgacccgatgcaggcggacgcctatgcgcaggggcacttgcggctcgcggagcttgccgagaagctgcacgcgccggtcacgctgccgagcgagccgcgcccggtcgtcgccgaagcgagctccgaattcggcgaagccgagttcaaggccgcggttgccaaggccaaggagtacatcgcggccggcgacgtcatgcaggtcgtgctgtcgcagcggatggcgcggccgttcgaggcctcgccgctgtcgctctaccgtgcgctgcgcagcctcaacccgtcgccctacatgtatttctacgaccttggcggcttccacatcgtcggctcgtcgcccgagatcctggtccggctcgagggcgacacggtcacgctgcggccgatcgccggcacgcggccgcgcgggctcacgcgcgaggacgatcagcgcctcgcggccgaattgatggccgacccgaaggaatgcgccgaacatctgcagctcctcgacctcgggcgcaacgacacggggcgggtcgccgtgaccggcagcgtcaaggtcacggaacacatgcagatcgagcgctattcgcacgtcatgcacatcgtctcgaacgtcgaaggcaagctcaagcccggactctccgcgctcgacgtcctgcgcgcgagctttccggcaggtacggtctcgggggcgcccaaggtgcgggcgatggagatcatcgacgagctcgaaccgagcaagcgcggggtctacgccggcgccgtcggctacctcggcttcagcggcgacatggatctcgcgatcgcgatccgcacggccgtcgtcaaggatggaatgctctacgcccaggccggcgccggcatcgtcgccgactcggtccccgacaacgagtggaccgagacgctcaacaaggcgcgggcggtcgtgcgtgcggccgagctcgcctacgcgcgcttcggcgacgtcgtcgaataa

SEQ ID NO: 76519 - protein, 521 aa, Thiobacillus denitrificans ATCC 25259
MAALVLTRRAAHSLTPESRIPTPAMTEQEFFDLARQGFNRIPLVRELPGDLETPLSVYLKLANAPYTYLLESVVGGERFGRYSFIGLPARTVLRVRAHLLTVETDGQVVEECSTPDPLAFIAEYQTRFKAAPVLGLPRFTGGLAGYFGYDTIRYIEKRLTPEFNKNLVRKDDVLHTPDILLMLTEELAVFDNLAGKLYLVTHADPMQADAYAQGHLRLAELAEKLHAPVTLPSEPRPVVAEASSEFGEAEFKAAVAKAKEYIAAGDVMQVVLSQRMARPFEASPLSLYRALRSLNPSPYMYFYDLGGFHIVGSSPEILVRLEGDTVTLRPIAGTRPRGLTREDDQRLAAELMADPKECAEHLQLLDLGRNDTGRVAVTGSVKVTEHMQIERYSHVMHIVSNVEGKLKPGLSALDVLRASFPAGTVSGAPKVRAMEIIDELEPSKRGVYAGAVGYLGFSGDMDLAIAIRTAVVKDGMLYAQAGAGIVADSVPDNEWTETLNKARAVVRAAELAYARFGDVVE

SEQ ID NO: 76520 - DNA, 1515 bp, Anabaena variabilis ATCC 29413
  CDS (1)..(1515): transl_table=11
atgattttccccaatttctccgaattttctcagctagctttgcaaggtaattttgtgccggtgtatcaggaatgggtggcagacctagatacaccagtttccgcttggtacaaagtttgcgctggagagccttatagctttttgctggaatcggtagaaggtggggaaaagattgggcgttatagtctgctggggtgtgatcctttatggattttggaagctaggggtgagacgaccactcagacaaaccgtgatgcttctcaggttgtgtttacaggtgatccatttacagctttagccgattgtctagcaccatataaaccagtcaagttaccccaactaccaccaggaattggcggtttgttcggtttttggggttatgaattaattcgttggattgaaccgcgtgtaccagtgcattcccaagatgagcgcaacattcctgatggattgtggatgcaggtagaccatttgttaatatttgaccaggtaaagcggaaaatatgggcgatcgcctatgctgatttacgtgatccaaatgtagatttaaaagcagcgtatcagcaagcgtgcgatcgcgtcacccaaatggtgagcaaactatctttgcccgtatcgccacaaaaaaccatattagaatggacacccccaggcagccaaaacgtgggggaaacacaagaatataccagcaacttcactcgaccggaattttgcgccagcgtccaaaaagccaaagagtacatcaaagcgggtgatatctttcaagtagtcatttctcaacgcctttccacccaatacaccggcgatcccttctctctgtaccgttccctgcgtcagatcaatccctcgccctacatggcgtactttaacttccaagactggcaaatcatcggttccagccccgaagtgatggtaaaagcggaactggatggagatggtgaagcagtagccacagttcgccccattgcggggactcgtccacggggtaagacaaccaaagaagatgcagaattagccgcagatttactccaagaccccaaagaaatcgccgaacacgtcatgctggtggatttaggacgcaacgatttagggcgtgtttgtgccagtgggactgtaaaagttgatgaattaatggtggtggaacgttactctcatgtaatgcacattgtgagtaatgttgtagggaaattagccgcaaataaaaacgcctgggatttattaaaagcctgttttcccgccggcacagttagcggcgcaccaaaaattagggcgatggaaatcattaatgagttagaacccagtcggcggggtgtgtattctggggtgtatggctattacgattttgaagggcaattaaatagtgcgatcgctattcggacaatggtagtcagagatcacactgtaacggtacaagctggtgcaggtttggtggctgattctgacccagaaaaagaatatgaggaaactttaaataaagctaggggacttctcttggcaattcgctgcttacgctag

SEQ ID NO: 76521 - protein, 504 aa, Anabaena variabilis ATCC 29413
MIFPNFSEFSQLALQGNFVPVYQEWVADLDTPVSAWYKVCAGEPYSFLLESVEGGEKIGRYSLLGCDPLWILEARGETTTQTNRDASQVVFTGDPFTALADCLAPYKPVKLPQLPPGIGGLFGFWGYELIRWIEPRVPVHSQDERNIPDGLWMQVDHLLIFDQVKRKIWAIAYADLRDPNVDLKAAYQQACDRVTQMVSKLSLPVSPQKTILEWTPPGSQNVGETQEYTSNFTRPEFCASVQKAKEYIKAGDIFQVVISQRLSTQYTGDPFSLYRSLRQINPSPYMAYFNFQDWQIIGSSPEVMVKAELDGDGEAVATVRPIAGTRPRGKTTKEDAELAADLLQDPKEIAEHVMLVDLGRNDLGRVCASGTVKVDELMVVERYSHVMHIVSNVVGKLAANKNAWDLLKACFPAGTVSGAPKIRAMEIINELEPSRRGVYSGVYGYYDFEGQLNSAIAIRTMVVRDHTVTVQAGAGLVADSDPEKEYEETLNKARGLLLAIRCLR

SEQ ID NO: 76522 - DNA, 2187 bp, Anabaena variabilis ATCC 29413
  CDS (1)..(2187): transl_table=11
atgaattactatacacttgcttacacaacccttggtaacgtgcgcgtatctcgcagcacaaccgaggtgaagatggacactgcactagatgaaattctctttcacctaaatcaagtacgtggaggtttgttaaccagtagttacgaatatccagggcgatacaaaagatgggcaattggatttatcaatcccccattacaactgacaacaagagaaaacgcatttaccatctcttcactcaatcctcgcggacaggtgctactaccaaccttgttccagcatctatcagcccagtcgcaactacaacaaatcagcctcaatcatgactacatcacaggtgaaattcgacccacaaaacagttattcacagaagaacaacgcagtaaacaaccgtcagcttttacagtcatccgcgaaattctccagatttttgcgagtgatgaagatgagcatttagggttatatggtgcatttggttacgacttagtatttcaatttgaaccaattccccaaaaaattgctcgtcccgcagaccaacgggatttagtgctgtatctacccgatgaactcatagttgtagattactatctgcaaaaggcatatcgtcaccagtatgaatttgccacagaacatggcaacaccgagcatcttccacggacaggccagtccatcgactaccagggtaaacgtcttctaccaaaccaaactgctgaccatcaaccaggagaatatgccaacctagttgagcaagcactcgactacttccgccggggtgacttatttgaagtagttcctagtcaaaacttttttaccgcctgtgaacaatcacccagtcaactattccagaccttaaggcaaattaatcctagtccttatggatttctgttgaatttggggggggaatatctcataggtgcatcaccagaaatgtttgtgcgagttgatggtaggcgagtggaaacctgtcccattagtggcactattagacggggagaagatgctttaggcgacgctgtacaaattcgtcagctgcttaactcccataaagatgaagccgagttaaccatgtgtactgacgtcgaccgcaacgataaatcgcggatttgtgaacccggttcagtcagggtgattggtcgtcgccagattgaactgtacagccacctcattcatacagtagaccatgtagaagggatactcagaccggaatttgacgctttagatgccttcttgagccatacttgggcagttacagtcacaggcgcacccaaacgagccgccatgcagttcatcgaacagcatgaacgcagcgcccgtcgttggtatgggggggcagttggttatttaggctttaatggtaacttgaataccggattaaccttacggacaattcgtttacaagactccatcgccgaagtgcgagttggtgcaacagtcctttatgattccgttccgtcagccgaagaagaggaaacaattactaaagcgactgcattatttgagaccattcgccgtcataccactgcgaataaaaccaaaggaagcgatagtcatcgccctggggatatcgtcaaaaataaacgtatcctcctcatcgactacgaagattcatttgttcacacattagccaattacatccgcaccactggcgcaaccgtcaccaccctacgtcatggttttgctgaatcatattttgatacagaacgcccagacttagtggtgttatctcccggccctggtagacccagtgacttccgcgttccccaaacggttgcagctttggtaggtcgagaaatccccatttttggcgtttgtctgggattacaaggcatagtggaggcttttggcggagaattaggtgtgcttgattatccccaacacggtaaacccgcacggatttcagtgactgcacctgattctgtgctgtttcaacatttaccagcatccttcattgtgggtagataccattccttatttgcccaaccccaaactatacccagtgaactcaaagtcatagcgatttctgaggacaatgtaattatggcaattgaacatcaaacactacctatagccgccgtccaatttcacccagagtcaatcatgaccctagcaggagaagttggtcagacaatcattaaaaatgtggtgcagacatatacccaaactttaggaacatcaatttgctcatag

SEQ ID NO: 76523 - protein, 728 aa, Anabaena variabilis ATCC 29413
MNYYTLAYTTLGNVRVSRSTTEVKMDTALDEILFHLNQVRGGLLTSSYEYPGRYKRWAIGFINPPLQLTTRENAFTISSLNPRGQVLLPTLFQHLSAQSQLQQISLNHDYITGEIRPTKQLFTEEQRSKQPSAFTVIREILQIFASDEDEHLGLYGAFGYDLVFQFEPIPQKIARPADQRDLVLYLPDELIVVDYYLQKAYRHQYEFATEHGNTEHLPRTGQSIDYQGKRLLPNQTADHQPGEYANLVEQALDYFRRGDLFEVVPSQNFFTACEQSPSQLFQTLRQINPSPYGFLLNLGGEYLIGASPEMFVRVDGRRVETCPISGTIRRGEDALGDAVQIRQLLNSHKDEAELTMCTDVDRNDKSRICEPGSVRVIGRRQIELYSHLIHTVDHVEGILRPEFDALDAFLSHTWAVTVTGAPKRAAMQFIEQHERSARRWYGGAVGYLGFNGNLNTGLTLRTIRLQDSIAEVRVGATVLYDSVPSAEEEETITKATALFETIRRHTTANKTKGSDSHRPGDIVKNKRILLIDYEDSFVHTLANYIRTTGATVTTLRHGFAESYFDTERPDLVVLSPGPGRPSDFRVPQTVAALVGREIPIFGVCLGLQGIVEAFGGELGVLDYPQHGKPARISVTAPDSVLFQHLPASFIVGRYHSLFAQPQTIPSELKVIAISEDNVIMAIEHQTLPIAAVQFHPESIMTLAGEVGQTIIKNVVQTYTQTLGTSICS

SEQ ID NO: 76524 - DNA, 1344 bp, Pseudomonas fluorescens PfO-1
  CDS (1)..(1344): transl_table=11
atgttgacctgttccgtacacccgctgccctaccgcgccaaccccgccgactattttgcggccgtccgccatgcgcccggcgccgtgctgctcgacagtggccggccgagtgccgatcgtggccgttatgacttgctcagcgcctggccgctggaacaactggcggtgttgccggacgagcgcggagaagatttcctgcaacgcctacggaccaatctgacccggttgggcgacgcgcaattgcccgacgactacgaattgcctttcgctggtggcctgattggttacctgagctacgacttcggccgtcatctggaaaacctgccgagtcaggccctggatgacctgcaattgcccgatgcgcgatttggtctgtacgactgggccttgatcagcgatcaccaatcggccaccagccaacttgtgttccacccctcagtcagcgccagcgagaaacagcggttgatcgatgtattcagccaaccggtgggcacggaactgaccccattcaaactgaacagcccgatggcagccgatctctcggccaatgaataccgtcaggcgttcgaacgtatccagcattacattcaggccggcgactgctatcaggtcaatttcgcccagcgtttccgcgcgccgtgccagggcgatccatggctggcctactgcaaattgcgcgaggcctgcccgacaccgttttccgggttccagagcctgcccgacggcaacgcagtgctgagcgtgtcgcccgagcgtttcgtcaaagtcagccagcgtcaggtggaaacccgcccgatcaagggcacccgtccccgtggcgcgaacccgaccgaggacgcggcgaacgccgccgaattgctggccagccccaaggatcgcgcggaaaacctgatgatcgtcgacctgctgcgcaatgatctgggccgcacctgccgtatcggctcggtgcgagtgccagagctgttcagcctggaaagctatccgaacgtgcatcacctggtcagcagcgtgaccggcgaactggcgcaggatcgcgacgccctggacctgattgccggcagcttccccggcggctcgatcaccggcgcaccgaaaatccgtgcgatgcagatcatcgatgagctggagccgacccggcgtggtttgtattgcggttcgttgctgtatctggacgtgcgcggcgagatggacagctccatcgccattcgcagtctgctggtgaaggatggacaagtgtgttgctggggcggtggcggaatcgtcgccgattctgactgggaagcggagtatcaggaatcgatcaccaaggtcagagtcctgctcgaaaccctgcagaacctctga

SEQ ID NO: 76525 - protein, 447 aa, Pseudomonas fluorescens PfO-1
MLTCSVHPLPYRANPADYFAAVRHAPGAVLLDSGRPSADRGRYDLLSAWPLEQLAVLPDERGEDFLQRLRTNLTRLGDAQLPDDYELPFAGGLIGYLSYDFGRHLENLPSQALDDLQLPDARFGLYDWALISDHQSATSQLVFHPSVSASEKQRLIDVFSQPVGTELTPFKLNSPMAADLSANEYRQAFERIQHYIQAGDCYQVNFAQRFRAPCQGDPWLAYCKLREACPTPFSGFQSLPDGNAVLSVSPERFVKVSQRQVETRPIKGTRPRGANPTEDAANAAELLASPKDRAENLMIVDLLRNDLGRTCRIGSVRVPELFSLESYPNVHHLVSSVTGELAQDRDALDLIAGSFPGGSITGAPKIRAMQIIDELEPTRRGLYCGSLLYLDVRGEMDSSIAIRSLLVKDGQVCCWGGGGIVADSDWEAEYQESITKVRVLLETLQNL

SEQ ID NO: 76526 - DNA, 1479 bp, Pseudomonas fluorescens PfO-1
  CDS (1)..(1479): transl_table=11
atgatccgcgaagaattcctgcgtctggccgctgacggctacaaccgcatcccgctggcctgcgaaaccctggccgacttcgacaccccgctgtcgatctacctgaaactggccgaccagcccaactcctacctgctcgaatcggtgcagggcggcgagaaatggggccgttactcgatcatcggcctgccgtgccgcaccgtgctgcgggttcacgatcatcacgtgagcatcaccgtcgatggcgtcgagaccgaaagccacgacgtcgaagacccgctggccttcgtcgaaactttcaaggcccgctacaacgtgccgaccatcgccggtctgccgcgcttcaacggcggtctggtgggttacttcggttacgactgtgtgcgttatgtagagaagcgcctcggcaaatgcccgaatccggatccgctgggcgtgccggacattctgctgatggtctccgatgcggtggtggtgttcgacaacctcgccggcaagatgcacgcgattgtgctggccgatccggcgcaggccgatgcctacgaacagggccaggcgcaattgcagcaactgctggaaaaactgcgtcagccgatcaccccgcgccgtggcctggatttcagcaagcagcaggcggccgagccggtgttccgctccagtttcacccaggacgactacgaaaaagccgtcgacaccatcaaggaatacatcctcgccggtgactgcatgcaggtcgtgccgtcccagcgcatgtcgatcgacttcaaggcggcgccgatcgatctgtaccgcgcgctgcgttgcttcaacccgacgccgtacatgtacttcttcaacttcggcgacttccacgtcgtcggcagttcgccggaagtgctggtgcgggtcgaagacaacctgatcaccgtgcgcccgattgccggcacccgtcctcgcggggctaccgaagaagcggacgtggcgctggaagaagacctgctgtccgacgacaaggagatcgccgagcacctgatgctgatcgacctcggtcgcaacgacaccgggcgcgtatcggaaatcggctcggtgaaacttaccgagaagatggtcatcgagcgttattccaacgtgatgcacatcgtgtccaacgtcaccggccagttgaaggccgggctgacggcgatggacgcactgcgggcgatcctgccggccggcaccttgtccggcgcaccgaagatccgcgcgatggaaatcatcgacgagctggagccggtcaagcgtggtgtgtacggcggcgcggtcggatacttcgcctggaacggcaacatggacaccgcgattgcgatccgtaccgcagtgatcaagaacggcgagttgcatgtgcaggccggtggcggcatcgtcgccgattcggtgccggcgctggagtgggaagaaaccatcaacaagcgccgggcgatgttccgcgctgttgcgctggccgagcaaaccccggactga

SEQ ID NO: 76527 - protein, 492 aa, Pseudomonas fluorescens PfO-1
MIREEFLRLAADGYNRIPLACETLADFDTPLSIYLKLADQPNSYLLESVQGGEKWGRYSIIGLPCRTVLRVHDHHVSITVDGVETESHDVEDPLAFVETFKARYNVPTIAGLPRFNGGLVGYFGYDCVRYVEKRLGKCPNPDPLGVPDILLMVSDAVVVFDNLAGKMHAIVLADPAQADAYEQGQAQLQQLLEKLRQPITPRRGLDFSKQQAAEPVFRSSFTQDDYEKAVDTIKEYILAGDCMQVVPSQRMSIDFKAAPIDLYRALRCFNPTPYMYFFNFGDFHVVGSSPEVLVRVEDNLITVRPIAGTRPRGATEEADVALEEDLLSDDKEIAEHLMLIDLGRNDTGRVSEIGSVKLTEKMVIERYSNVMHIVSNVTGQLKAGLTAMDALRAILPAGTLSGAPKIRAMEIIDELEPVKRGVYGGAVGYFAWNGNMDTAIAIRTAVIKNGELHVQAGGGIVADSVPALEWEETINKRRAMFRAVALAEQTPD

SEQ ID NO: 76528 - DNA, 1512 bp, Rhodobacter sphaeroides 2.4.1
  CDS (1)..(1512): transl_table=11
gtgtcgctcgtgacctccttcgaaagcttcgagcgcggctggaaggccgggcagaaccagatcgtctatgcccggctgaccgcggatctcgacacgccggtgtcgctgatgctgaagctcgccgaggcgcgcaccgacacgttcatgctggaatcggtgacgggcggcgagatccgcggccgctattcggtcgtgggcatgaagcccgacctgatctggcagtgccacgggcaggacagccgcatcaaccgcgaggcgcgcttcgaccggcaggccttccagccgctggaaggccacccgctcgagacgctgcgggcgctgatcgccgagagccggatcgagatgccggccgacctgcccccgatcgcggcgggcctcttcggctatctcggctatgacatgatccggctggtcgagcatctgccggggatcaaccccgatccgctcggtctgcccgatgcggtgctgatgcggccctcggtcgtggcggtgctcgacggggtgaagggcgaggtcaccgtggtggcgcccgcatgggtctcgtcgggcctctcggcgcgggccgcctatgcgcaggcggccgagcgggtgatggatgcgctgcgcgatctcgaccgcgcgccgcccgcgcagcgcgacttcggcgaggtggcgcaggtgggcgagatgcgctcgaacttcacccacgagggctacaaggccgcggtcgagaaggccaaggactacatccgcgcgggcgacatcttccaggtggtgccgtcgcaacgctgggcgcaggacttccgtctgccgcccttcgcgctctaccgctccttgcgcaagacgaacccctcgcccttcatgttcttcttcaacttcggcggcttccaggttgtgggggccagccccgagatcctcgtgcggctgcgcgaccgcgaggtgacggtgcgtcccatcgccggcacccgcaagcgcggcgcgacacccgaggaggaccgcgcgctggaggccgaccttctgtccgacaagaaggaactggccgagcatctgatgctgctcgatctcgggcgaaacgacgtgggccgggtggcgaagatcggcaccgtgcgcccgaccgagaagttcatcatcgagcgctattcccacgtcatgcatatcgtctcgaacgtggtgggcgagatcgcggagggcgaggatgcgctctcggcgctgctggcgggcctgccggcgggcaccgtctcgggcgcgcccaaggtgcgggcgatggagatcatcgacgagctcgagccggaaaagcgcggcgtctatggcggcggcgtgggctatttcgcggccaacggcgagatggatttctgcattgcgctgcggaccgcggtcctgaaggacgagacgctctacatccagtcgggcggcggcgtcgtctatgacagcgaccccgaggccgaatatcaggagacggtcaacaaggccagggcgctccgccgggccgccgaggatgcgggcctcttcgcccgccgcgccgggaacggctga

SEQ ID NO: 76529 - protein, 503 aa, Rhodobacter sphaeroides 2.4.1
MSLVTSFESFERGWKAGQNQIVYARLTADLDTPVSLMLKLAEARTDTFMLESVTGGEIRGRYSVVGMKPDLIWQCHGQDSRINREARFDRQAFQPLEGHPLETLRALIAESRIEMPADLPPIAAGLFGYLGYDMIRLVEHLPGINPDPLGLPDAVLMRPSVVAVLDGVKGEVTVVAPAWVSSGLSARAAYAQAAERVMDALRDLDRAPPAQRDFGEVAQVGEMRSNFTHEGYKAAVEKAKDYIRAGDIFQVVPSQRWAQDFRLPPFALYRSLRKTNPSPFMFFFNFGGFQVVGASPEILVRLRDREVTVRPIAGTRKRGATPEEDRALEADLLSDKKELAEHLMLLDLGRNDVGRVAKIGTVRPTEKFIIERYSHVMHIVSNVVGEIAEGEDALSALLAGLPAGTVSGAPKVRAMEIIDELEPEKRGVYGGGVGYFAANGEMDFCIALRTAVLKDETLYIQSGGGVVYDSDPEAEYQETVNKARALRRAAEDAGLFARRAGNG

SEQ ID NO: 76530 - DNA, 1464 bp, Carboxydothermus hydrogenoformans Z-2901
  CDS (1)..(1464): transl_table=11
atgagcaaagtttattcggagttagatttaactcctaattgggaagagtattgcgcttacgcaaaacattaccaggttgtgccggttatggttgaacttttagccgacacttttacccctattaccttatatcaacatttggcactggataaaggaatttcctttttactggaaagtgcaccggggaatgaaaaaatggcccgtttttcctttattggttatgatccgtttaaagtgttaaccggtcgcaatctggaggttgtttcgtcacagctttttaacttaaaaggaccgcctatagccgggttacctttttacggaggagctgtagggtattttagttacggccttgtatatgaactggaaaatttgcggagttgccgacatgcccgggatgatgaagagctttttcgtttaatgtttccggagaaagttttggtatttgaccaccgttatcataccctgaaaatcgtgataaatacccttcctcaaaaagaaggtgaaaaaaccgcataccggcgggcacaggattcaattaaagagataatcggtaagttaactaatctaacaacttctgaaaattgggcattaactattaagccagaacgaagtatttgtaatgcgactatgactaaaagggatttttgcacgatggtggaaaaggccaaggattatattaaagcgggagatatttttcaggtagttttatcccagcgtttttccttcccttgcctggaagcgccttttaatatttaccggcgtttgcggcggcttaacccttctccctacatgtttttcttggattttggcgagctcaaacttataggggcttcaccggaaatgctggtgcggctggaaggggggatagtagagaccaggccaattgccggcaccagaccaagaaccggtcagccggaggaagatttacgccttgcgcgggaacttctggccgatgaaaaagaacgggcagaacatttgatgttggtagatttgggacgaaacgacctgggcaaagtttgtcgaccgggcagcgttaaagtaactgagttttttaaagttgaggagttttctcacgtaatgcaccttgtttccaccgttcaaggagaagtagaaaagaaatttaatcccgttgatgcactaaaagcggtgtttcctgcaggaaccgtttccggagcacctaagattagggcaatggaaattattgatgagttagaaccggtacctcgagggccttatgcgggagcggtaggatatataagctttacaggggaaatgaatacgtgcattaccattcgaaccctctggataaaagatgaaatggtttattttcaagccggggccgggattgtttgggattcggatcccgagcgagaataccaagaaacaataaataaggcccaggcaatggtggaagcgataacgggtgcagctgaatttcgttgtaacgggggggttaataagtga

SEQ ID NO: 76531 - protein, 487 aa, Carboxydothermus hydrogenoformans Z-2901
MSKVYSELDLTPNWEEYCAYAKHYQVVPVMVELLADTFTPITLYQHLALDKGISFLLESAPGNEKMARFSFIGYDPFKVLTGRNLEVVSSQLFNLKGPPIAGLPFYGGAVGYFSYGLVYELENLRSCRHARDDEELFRLMFPEKVLVFDHRYHTLKIVINTLPQKEGEKTAYRRAQDSIKEIIGKLTNLTTSENWALTIKPERSICNATMTKRDFCTMVEKAKDYIKAGDIFQVVLSQRFSFPCLEAPFNIYRRLRRLNPSPYMFFLDFGELKLIGASPEMLVRLEGGIVETRPIAGTRPRTGQPEEDLRLARELLADEKERAEHLMLVDLGRNDLGKVCRPGSVKVTEFFKVEEFSHVMHLVSTVQGEVEKKFNPVDALKAVFPAGTVSGAPKIRAMEIIDELEPVPRGPYAGAVGYISFTGEMNTCITIRTLWIKDEMVYFQAGAGIVWDSDPEREYQETINKAQAMVEAITGAAEFRCNGGVNK

SEQ ID NO: 76532 - DNA, 1494 bp, Burkholderia sp. 383
  CDS (1)..(1494): transl_table=11
atgaccgaactcgaatttcaatcgctcgcgaacgaaggctacaaccgcatcccgctgatcgcggaagccctcgccgatctcgaaacgccgctgtccctctacctgaagctggcccagcccgaacgctcgggcgccaactcgttcctgctcgaatcggtggtcggcggcgaacgcttcggccgctattcgttcatcggcctgcccgcccgtacgctcgtgcgtacccgcaacggcgtgtcggaagtcgtgcgcgacggccaggtcgtcgagacgcatgacggtgacccgttccagttcatcgaatcgttccaggcgcgcttcaaggtggcgcagcgcccgggcctgccgcgcttctgcggcggtctcgccggctatttcggctacgacgcggtgcgttacatcgagaagaagctcgcgaacaccacgccgcgcgacgatctcggcctgcccgatatccagttgctgctgaccgaggaagtggcggtcatcgacaacctcgccggcaagctgtacctgatcatctacgccgacccgagccaggccgaagcctatacgaaggcgaagcagcgcctgcgcgaactgaagcagcgcctgcgcacgaccgtgcagccgccggtcacgtcggcgagcgtgcgcaccgagacgttccgcgagttcaagaaggacgactatctggccgccgtgcgccaggcgaaagaatacatcgcggccggcgagctgatgcagatccaggtcggccagcgcctgacgaagccgtatcgcgacaatccgctgtcgctgtatcgcgcactgcgttcgctgaacccgtcgccgtacatgtactactacaacttcggcgatttccacgtggtcggcgcatcgccggaaatcctcgtgcgccaggaaaagcgtggcgaagaccagatcgtcacgatccgcccgctggccggcacgcgcccgcgcggcaacacgcccgagcgcgacgcggaactcgcgaccgagctgctcaacgatccgaaggagatcgccgagcacgtgatgctgatcgacctcgcgcgcaacgacgtcggccgcatcgcggaaatcggctcggtgcacgtgaccgaccagatggtcatcgagaaatactcgcacgtgcagcacatcgtcagctcggtcgaaggcaagctgaagcccggcatgacgaactacgacgtgctgcgcgcgacgttcccggccggcacgctgtccggtgcgccgaaggtccgtgcgatggaactgatcgacgaactcgagccggtcaagcgcgggttgtacggcggcgccgtcggctacctgtcgttctcgggcgagatggatctcgcgatcgcgatccgcacgggcctgatccacaacggcaacctgtacgtgcaagcggcggccggcgtcgtcgcggattcggtgcccgaatccgaatggcaagagaccgagaacaaggcgcgcgcagtgctgcgtgcggccgaacaggtccaggacggcctcgatagcgacttctga

SEQ ID NO: 76533 - protein, 497 aa, Burkholderia sp. 383
MTELEFQSLANEGYNRIPLIAEALADLETPLSLYLKLAQPERSGANSFLLESVVGGERFGRYSFIGLPARTLVRTRNGVSEVVRDGQVVETHDGDPFQFIESFQARFKVAQRPGLPRFCGGLAGYFGYDAVRYIEKKLANTTPRDDLGLPDIQLLLTEEVAVIDNLAGKLYLIIYADPSQAEAYTKAKQRLRELKQRLRTTVQPPVTSASVRTETFREFKKDDYLAAVRQAKEYIAAGELMQIQVGQRLTKPYRDNPLSLYRALRSLNPSPYMYYYNFGDFHVVGASPEILVRQEKRGEDQIVTIRPLAGTRPRGNTPERDAELATELLNDPKEIAEHVMLIDLARNDVGRIAEIGSVHVTDQMVIEKYSHVQHIVSSVEGKLKPGMTNYDVLRATFPAGTLSGAPKVRAMELIDELEPVKRGLYGGAVGYLSFSGEMDLAIAIRTGLIHNGNLYVQAAAGVVADSVPESEWQETENKARAVLRAAEQVQDGLDSDF

SEQ ID NO: 76534 - DNA, 1518 bp, Synechococcus sp. CC9605
  CDS (1)..(1518): transl_table=11
atgttcagtcccgatcgcgacgcctttcatcaggctgtttgcagtggtgccaacctgattcctctggctcagagttggcctgcagatcttgaaacacccctcaccacctggatcaaggtgggcgacggaaggcctccaggcgtgctgctggaatctgtcgaaggtggtgaaaccctcgggcgttggagtgtgatcgcctgcgatcctctctggacggcatcggcgcggaacgattgtctgacgcgcacctggcgtgacggtcgtgaagagcagttcagcggtaacccgttcgaatccctgcgcgactgcctcgcgccgtactcctgcgtcaacctgccgggcctccctcccctgggacagctgtacggcgtttggggctacgaactgatccagtggatcgaacccaccgtcgcagtccacccccgtgttgcggccgatcccccggatgggatctggatgttgatggacgcgatcctgatctttgatcaggtgaaacgacagatcaccgccgtcgccttcggcgacctctccaacagggtggatgaggagcaggcctgggagaccgccatcggacggatcgaggccttgcgccaacggatgaacgcacctctgcccgccgtcaaaccactgacctgggacgcgagaagcaaagagcttcccgctgtgcgctccaaccgcagccgcgatgaattcgaagccgccgtagacaccgccaaggaacacatcgcagccggcgatgtgttccaactggtgatcagtcagcgcctggagacggaggtccctcaatcacccctagagctgtaccgcagtctgcggatggtgaatccatcgccatacatggcgttcttcgatttcggggactggcaactgattggctccagtccggaagtgatggttcaagccgaaccggctgctgatggcatccacgccagcctgcgacccatcgccggaacacgccctcgcggcgccacgcccctggaggaccgcgagctggaagctgacctgctggccgatcccaaggaacgggctgagcacgtgatgctggtggatctaggccgcaatgacctcggcagggtctgtcagcccggaagcgtggcagtgcaggacctgatggtgatcgagcgctactcccacgtgatgcacatcgtcagccaagtcgaaggacgtctgggcccggcacacgatgtgtgggatctgctgatggcggcgttccccgccggcaccgtcagcggtgcaccaaaaatccgagcgatgcaactcatccacgagcttgaacccgatgcgcgtggcccctattccggggtgtatggatccgttgatctggccggggccctcaacacagcaatcaccatccgcaccatggtggtgcaaccccgtgatggcggaggatgccgggtcaaagtgcaggctggggccggtgttgtggccgattcacagccaacggcggagtttgaggagaccctcaacaaagcccgtggaatgctgaccgcactggcatgcctgaatccgccggaatga

SEQ ID NO: 76535 - protein, 505 aa, Synechococcus sp. CC9605
MFSPDRDAFHQAVCSGANLIPLAQSWPADLETPLTTWIKVGDGRPPGVLLESVEGGETLGRWSVIACDPLWTASARNDCLTRTWRDGREEQFSGNPFESLRDCLAPYSCVNLPGLPPLGQLYGVWGYELIQWIEPTVAVHPRVAADPPDGIWMLMDAILIFDQVKRQITAVAFGDLSNRVDEEQAWETAIGRIEALRQRMNAPLPAVKPLTWDARSKELPAVRSNRSRDEFEAAVDTAKEHIAAGDVFQLVISQRLETEVPQSPLELYRSLRMVNPSPYMAFFDFGDWQLIGSSPEVMVQAEPAADGIHASLRPIAGTRPRGATPLEDRELEADLLADPKERAEHVMLVDLGRNDLGRVCQPGSVAVQDLMVIERYSHVMHIVSQVEGRLGPAHDVWDLLMAAFPAGTVSGAPKIRAMQLIHELEPDARGPYSGVYGSVDLAGALNTAITIRTMVVQPRDGGGCRVKVQAGAGVVADSQPTAEFEETLNKARGMLTALACLNPPE

SEQ ID NO: 76536 - DNA, 1476 bp, Geobacter metallireducens GS-15
  CDS (1)..(1476): transl_table=11
gtgtattttcccgatttcgagaccttccggtccctggcctcccaaggcaacctgattcccgtctgccgcgagatcatggccgatatggacacgccggtcagcgccttccgcaagatcgacgacggttcctactccttcctcctggaaagtatcgaggggggtgagaagtggggccgctattcctttctcggctccaaccctgccaccgtcatccggacccgcggcaccaccgtggagatcgtcaccaacggcgagacccgcgccgttaccagcgacgaccccctgggctttgtgcgggagtatctgagccggttccaccccgtggagatccccgggctccctcgcttcttcggcggcgccgtgggatacctggggtacgacatggtgcgccacttcgagcggcttcccacggagaagccggccgtcatcggggcctgggattcctgcttcgtcatcaccgacacgatcctgatcttcgacaccatgcggcagaaaatcaccgtggtctccaacgcccatctggaggatggacaggctcctgaggccgcctatgccgaggccattgcccgggtggacgccctcatcgccaagctccgagcccccctgccggcaatgccggcgacgcctgctgtgcgcacggtctccttctcgtccaacgttccccgcgaaaacttcgaggcggcggtggagaaatgcaaggagtacgtccgggccggggacatcatccaggtggtcctctcccagcgcttctccggcgcgctcaccgtggagcccctcgccatctaccgcgtgctgcggaccctgaacccttccccctacatgttcttcctccgcatggacgacaccctggtggtgggggcctcccccgaggtcatggtccgcaaggagggagaccgggtggagctgcgccccatcgccggcacccgcccccggggcgcgaccccggaggaggaccaacaactggcggaagaactcctggccgatcccaaggagcgggccgagcacgtgatgctcgtggacctggggcgcaacgacctggggcgggtctgccggaccggcaccgtgaaggtgtcggagctcatggtcatcgagcgctattcccacgtgatgcacatcgtctccaacgtggagggggaactggtcgaggggaaggacgccttcgacgtggtgcgggctaccttcccggcgggtaccctctccggcgcccccaaggtgcgggccatggagatcatcgacgagctggagccggtccgccgcgaggtctacggcggcgccgtggggtacttctccttctccggcaacatggacctggccatcgccatccgcaccctcgtcatccgcgacggcatggtgcacctccaggcaggcgccggcatcgtggccgactcggacccggccgcggaataccaggagaccgtcaacaaggccatggctgcggttaaggccatcgagaccgcggaaaagggattggactga

SEQ ID NO: 76537 - protein, 491 aa, Geobacter metallireducens GS-15
MYFPDFETFRSLASQGNLIPVCREIMADMDTPVSAFRKIDDGSYSFLLESIEGGEKWGRYSFLGSNPATVIRTRGTTVEIVTNGETRAVTSDDPLGFVREYLSRFHPVEIPGLPRFFGGAVGYLGYDMVRHFERLPTEKPAVIGAWDSCFVITDTILIFDTMRQKITVVSNAHLEDGQAPEAAYAEAIARVDALIAKLRAPLPAMPATPAVRTVSFSSNVPRENFEAAVEKCKEYVRAGDIIQVVLSQRFSGALTVEPLAIYRVLRTLNPSPYMFFLRMDDTLVVGASPEVMVRKEGDRVELRPIAGTRPRGATPEEDQQLAEELLADPKERAEHVMLVDLGRNDLGRVCRTGTVKVSELMVIERYSHVMHIVSNVEGELVEGKDAFDVVRATFPAGTLSGAPKVRAMEIIDELEPVRREVYGGAVGYFSFSGNMDLAIAIRTLVIRDGMVHLQAGAGIVADSDPAAEYQETVNKAMAAVKAIETAEKGLD

SEQ ID NO: 76538 - DNA, 1434 bp, Desulfovibrio desulfuricans G20
  CDS (1)..(1434): transl_table=11
atgaacgtgaatctcaggcaatcggcccgctggatagccgccgacgtgcagacccccatcagcctttttctggggctggtgggcaacgggcagggcattctgctggaaagtgccgaggtggacgggcgctggggccgttacagtgtcatcggtttcaactttctgctgcggctcgggtgcagggacggcaagctgacagtggcttcgcgcgatgcccgtcttgactgcctgaaagagctggaaggcatggattttacggatggtgtgcgtgccgtgcaggccgccgtcgacattacaccggcaagcggatttgaagacctgccgcccattacccgcgggctgtacggatacttcgggtacggggtggcaggcatgttcgaaccgcatttgcagcgggttctgccggtgcagagcgcggaagcatgtctggtgctgcccggcaccgtggtgctggtggaccacctgtacaacaggttgtgcctgctgaatctggcagaagggtttgtcatccgcatggacagggatgccgtggacagaaaaccggagaatcccgatgtgggtcccgttgtcatggtgccggacaaggcgacgttcatccgcaatgtggagcgggtgaaggagctcatacggcagggcgaggccattcaggtggtgctttccacgcgttttcaggcttcgttcaagggcgatccttttgtgctgtaccgccggctgcgccagatcaatccttctccgtacatgtttttcatgcgtctgcccggcgtcagtgtgctggggtcgtctccggaggtgctggtccgctgcaggggcggcgaagtgcaggtctgccccatagccggtaccagaccgcggggcagcgatgaggcggaagacatacggctggccgaagagctgcgcaacgactccaaggagcaggcggagcatgtgatgctggtcgatctgggacgtaatgacctgggccgcattgcagaggcaggcaccgtaagtgttgaaaagtacatgcaggtcgaacggttttcccacgtcatgcaccttacttcctatgtcagggcgcggctggccgcaggcagggacgctctggatgtgctggcggccacgtttccggcgggaacggtgagcggtgcgcccaaggtgcgtgccatggagatcatagcggacatggaagggctggcccgcggtccttacgccggtgccataggctggctgggactggacagcggcagtgtggacatggacacgggcattctcatccgttccatgtgggtgcgcgacggcatggtcagctggcaggcgggagcaggcatcgtctacgactcggtgcccgaaaaagaatgggaagagtgctgcaacaaggccagagtggtgcgttcggccatcacgggtacgcatggcggcggatcaacgggagactgcgatgtttttgcttatcgataa

SEQ ID NO: 76539 - protein, 477 aa, Desulfovibrio desulfuricans G20
MNVNLRQSARWIAADVQTPISLFLGLVGNGQGILLESAEVDGRWGRYSVIGFNFLLRLGCRDGKLTVASRDARLDCLKELEGMDFTDGVRAVQAAVDITPASGFEDLPPITRGLYGYFGYGVAGMFEPHLQRVLPVQSAEACLVLPGTVVLVDHLYNRLCLLNLAEGFVIRMDRDAVDRKPENPDVGPVVMVPDKATFIRNVERVKELIRQGEAIQVVLSTRFQASFKGDPFVLYRRLRQINPSPYMFFMRLPGVSVLGSSPEVLVRCRGGEVQVCPIAGTRPRGSDEAEDIRLAEELRNDSKEQAEHVMLVDLGRNDLGRIAEAGTVSVEKYMQVERFSHVMHLTSYVRARLAAGRDALDVLAATFPAGTVSGAPKVRAMEIIADMEGLARGPYAGAIGWLGLDSGSVDMDTGILIRSMWVRDGMVSWQAGAGIVYDSVPEKEWEECCNKARVVRSAITGTHGGGSTGDCDVFAYR

SEQ ID NO: 76540 - DNA, 1521 bp, Prochlorococcus marinus str. MIT 9312
  CDS (1)..(1521): transl_table=11
atgatcagctcaaataaagatagttttttaaaagcttacaaagaaggtaaaaattttatacctatcactcaaacttggccagcagatttagagactccattatctacttggttaaaattatccgaaaaagattcacatggagtttttcttgagtctgttgaaggaggagagagtttgggaaggtggagtatcgtagctactaaacctctttgggaagccgtttgttatggagaagaaatagttaaaacctggaataatgggaaaacggaaatgtataagggcgatccctttaatattttaagaacttggacaaaggaatataaatcatctatgcttgatggcttaccatcaattgggcaattatatgggtcttggggttatgaattaattaatcgaatagaaccaagtgttccaataaataaaatacaagaaaacaatataccttatggttcttggatgttttttgatcagttagttgtttttgatcaaattaaaagatgtataaccgcagtagtttatgcagatataacttcttcaaaagagtcttctgttgaagaagtttatctaaactcaatttctaaaattcagaaaactagagatttaatgaaagtccctctaaaagaatacgagtttttagattggaatgaaaatgagaatttcaatttagatcttaaaagtaattggaagaaaaaagattttgaggatgcagttctttctgcaaaaaaatacataagaaaaggggatatcttccaaattgttataagtcagagatttcaaactcaagtcaataatgatccctttaatttatacagaagtttgaggatggttaatccttccccatatatgtcattttttgattttggctcatggtatctgataggttccagtcctgaagtcatggttaaagctgaaaaaaataaaaatagtcagatagttgcaagcttaagaccaatagctgggacaagacctaggggaattgataataaacaagatctggaatttgaaaaagatttattaaaagatccaaaagagatagctgagcatgtaatgctaatagatcttggaagaaatgaccttggaagagtttgtgaaattggtactgtggaggtaaaagatttaatggttattgagaaatattcacatgttatgcatatagtgagtgaagttgagggaatcttaaaagaaaatactgatgtatgggatttgctaaaggcatgttttccagccgggacagtaactggtgcgccaaaaataagagctatgcaattgattaaacactttgaaaaagatgctagaggaccttatgctggtgtttatggatctattgatattaatggagcattaaatacggcaattacaataagaactatgatagtcaaaccctcagaagatggaaaatttgatgtctcagtgcaggcaggagctggaatagttgctgattcttctcctgaaaatgaatatcaagagacaataaataaagctaaggggatactgaaatcattagcctgtttggataattaa

SEQ ID NO: 76541 - protein, 506 aa, Prochlorococcus marinus str. MIT 9312
MISSNKDSFLKAYKEGKNFIPITQTWPADLETPLSTWLKLSEKDSHGVFLESVEGGESLGRWSIVATKPLWEAVCYGEEIVKTWNNGKTEMYKGDPFNILRTWTKEYKSSMLDGLPSIGQLYGSWGYELINRIEPSVPINKIQENNIPYGSWMFFDQLVVFDQIKRCITAVVYADITSSKESSVEEVYLNSISKIQKTRDLMKVPLKEYEFLDWNENENFNLDLKSNWKKKDFEDAVLSAKKYIRKGDIFQIVISQRFQTQVNNDPFNLYRSLRMVNPSPYMSFFDFGSWYLIGSSPEVMVKAEKNKNSQIVASLRPIAGTRPRGIDNKQDLEFEKDLLKDPKEIAEHVMLIDLGRNDLGRVCEIGTVEVKDLMVIEKYSHVMHIVSEVEGILKENTDVWDLLKACFPAGTVTGAPKIRAMQLIKHFEKDARGPYAGVYGSIDINGALNTAITIRTMIVKPSEDGKFDVSVQAGAGIVADSSPENEYQETINKAKGILKSLACLDN

SEQ ID NO: 76542 - DNA, 1554 bp, Synechococcus elongatus PCC 7942
  CDS (1)..(1554): transl_table=11
atgatttacccggattttgcaacgtttgccagcttggctgagcaaggcaacttcattccggtctatcaagagtgggtcgcggatttggatacgccggtttcggcttggtaccgcatttgccgcgatcgcccctacagctttttgctggaatcagtcgaagggggtgagcacctgggtcgctatagctttttgggttgcgatccactctgggtgctagaagcgagaggcgatcgcacaactcgtcggtttcgggatggctcggaagaagtctttagcggcgatccctttgcagccctcaagcaatgtttagcgccctatcagccggtgcatttgccgcaactgccctcgggcgtcggcggactgtttggcttctggggctatgagctgatgcgctggattgagccacgcgtcccggttcacagcggcggcgaaaacgatctgcccgacggctgctggatgcaggtcgatagcctgatgattttcgatcaagtcaagcgtcggctctacgcgatcgcttatgcggatttgcaagccgaaccagatctgcatcgcgcttacgcgctggcctgcaatcgtgtgcaggaactggtcaatcgcttccaaggatcactgagcgccagcgatcgccaactgccgtggctgccgcctcaatcggcaccgtctcgtcccgtcgattaccaaagcaacaccacccaggagcaattctgcgccaacgtactgacagcacaggactatattcgcgccggcgacatcttccaagtcgtgctgtcgcaacggctaacgacgcattacagcggcgatccctttgatctctatcgatcgctgcggctgatcaatccttccccctacatggcctttttccgcttcggcgactggcagttgatcggctccagtccagaagtgatggtcaaggctgaacaggatccacaccaaagcgatcgccaagtggccactgtccgcccgatcgcggggactcgtcctcgggggcgcactgcaccagaagatgccgcccttgcaacggatctgctggctgatcccaaggaagtggccgagcacgtcatgctggtcgatctcggtcgcaatgacctaggccgtgtctgcgagaaaggcagcgtccgcgtcgatgaattgatggtgattgagcgctactcccacgtcatgcatattgtcagcaacgtggtgggcctactcgatcgcgatcgcgacgcttgggatttgctgcgggcaactttcccagcagggacggtcagcggtgcgcccaagattcgcgctatggaaatcatccatgaattggaaggctgtcggcgcggaccctactccggcgcctatggctactacgattttgagggtcagttgaatacggcaatcacgatccgcacgatgatcgttcaggcagaagggagtggccatcgtgtcagcgtgcaagcaggggctggtgtcgtcgctgattctgtgccaatcaaggagtacgaagaaaccttgaacaaggcgcggggtttactggaagcgatccgttgtctacaaccgcctcaagtgccagttgcagcgggataa

SEQ ID NO: 76543 - protein, 517 aa, Synechococcus elongatus PCC 7942
MIYPDFATFASLAEQGNFIPVYQEWVADLDTPVSAWYRICRDRPYSFLLESVEGGEHLGRYSFLGCDPLWVLEARGDRTTRRFRDGSEEVFSGDPFAALKQCLAPYQPVHLPQLPSGVGGLFGFWGYELMRWIEPRVPVHSGGENDLPDGCWMQVDSLMIFDQVKRRLYAIAYADLQAEPDLHRAYALACNRVQELVNRFQGSLSASDRQLPWLPPQSAPSRPVDYQSNTTQEQFCANVLTAQDYIRAGDIFQVVLSQRLTTHYSGDPFDLYRSLRLINPSPYMAFFRFGDWQLIGSSPEVMVKAEQDPHQSDRQVATVRPIAGTRPRGRTAPEDAALATDLLADPKEVAEHVMLVDLGRNDLGRVCEKGSVRVDELMVIERYSHVMHIVSNVVGLLDRDRDAWDLLRATFPAGTVSGAPKIRAMEIIHELEGCRRGPYSGAYGYYDFEGQLNTAITIRTMIVQAEGSGHRVSVQAGAGVVADSVPIKEYEETLNKARGLLEAIRCLQPPQVPVAAG

SEQ ID NO: 76544 - DNA, 1515 bp, Rhodospirillum rubrum ATCC 11170
  CDS (1)..(1515): transl_table=11
atgccgaccaccctgcccgtcctggatcgcgctttcgtcaccgcctatgacgccggcacgccccaggtcgtctggacccgtctggtcgccgatctcgaaacgcccgtatcggcgatgctgaaactggccgatggccggccctattccttcctgctcgattcggtggaaggcggggcggtgcgcggacgctattcgatcatcggcctcaagcccgatgtgctgtggcgggcgcggtccggtcaggccgagatcaaccggtcggtccgccacgatcccacggccttcgtcgccgatggcccggcgctcgattccttgcgccgcctagtcgaggaaagccgcatcgacctgcccgccggcttgccgccgatggcggcgatggtcgcgggctatcttggctatgacgtggtgcgtctggtcgaaccccagatcgccgataccaaccccgatcccatcgacgttcccgacggcatcttcctgcgcccgacgctgatggcgattttcgacaatgtcgagcatatggtgaccctggtcacccccgtgcgccgcgaagacggcgtgagcgcggcggcggcttataccctggcccaggagcgtctggccgacgccgtcaccgatttccagcgcaccctgccctatcgccgcgaggccttcgacaccttgtcgacgccgccggcgccgatgggcaccatggccccggcgacctattgcgagatggtgaagaaggccaaggagtacatcctggccggcgacatcttccaggtggtgctgtcccagcgcttcaccgtgcccttccgcctgccgccgttctcgctctatcgctcgctgcgccgcaccaacccctcgcccttcatgttctatctcgatatgggggcgttccatatcgtcggggcgagcccggagattctggtccgcctgcgcgatggtcaggtcaccatccggccgatcgccggcacccgcaagcgcggcgccacccccgacgaggacaaggccctggccgccgatttgctggccgatcccaaggaactggccgagcatctgatgctgctggatctggggcgcaacgatgtcggccgggtggccaaggtcggcacggtcggcgtgcgggccgacgaaaagatgtttgtcgaatactacagccacgtcatgcatatcgtgtcgaacgtcaccggcgagatcgcgcccggccacgatgcccttgacgccctgttcgccgggtttcccgccgggacggtctcgggcgcgcccaaggtgcgggcgatggaaatcatcgacgagctcgagccggtgcggcgcggcttctacgccggaaccgtcggctatttcgccgccaacgggtcgatggacacctgtatttcgctgcgcacctgtctggtcaaggacggggtcatgcatgtccaggccggggccggcatcgtcgccgacagcgatccgatggccgaatacgaggaatgcctgaacaaggccaaggccctggtccgcgccgccgaggaagccgtgcgctacgccgccggctaa

SEQ ID NO: 76545 - protein, 504 aa, Rhodospirillum rubrum ATCC 11170
MPTTLPVLDRAFVTAYDAGTPQVVWTRLVADLETPVSAMLKLADGRPYSFLLDSVEGGAVRGRYSIIGLKPDVLWRARSGQAEINRSVRHDPTAFVADGPALDSLRRLVEESRIDLPAGLPPMAAMVAGYLGYDVVRLVEPQIADTNPDPIDVPDGIFLRPTLMAIFDNVEHMVTLVTPVRREDGVSAAAAYTLAQERLADAVTDFQRTLPYRREAFDTLSTPPAPMGTMAPATYCEMVKKAKEYILAGDIFQVVLSQRFTVPFRLPPFSLYRSLRRTNPSPFMFYLDMGAFHIVGASPEILVRLRDGQVTIRPIAGTRKRGATPDEDKALAADLLADPKELAEHLMLLDLGRNDVGRVAKVGTVGVRADEKMFVEYYSHVMHIVSNVTGEIAPGHDALDALFAGFPAGTVSGAPKVRAMEIIDELEPVRRGFYAGTVGYFAANGSMDTCISLRTCLVKDGVMHVQAGAGIVADSDPMAEYEECLNKAKALVRAAEEAVRYAAG

SEQ ID NO: 76546 - DNA, 2187 bp, Rhodospirillum rubrum ATCC 11170
  CDS (1)..(2187): transl_table=11
atgcaaacatcgaccttcaccaccgccggcggttttaccatcagcagttgcctacgcccgcttgccggggcggatggcgccttcgaggcgctgatcgaccgactcgatcgccatcgcggcatggtgatcgcctcgacctatgagtatcccggccgctatcgccgccacgccctggggttttgcgatccgccgctggtgctggagggcaaggggcgcgaggcccatctgctggcgctcaatcgccgggggcgggccctgctgccggccctggccgttggcttggagggggcggccgggctggagggcctgcgccgcgaggccgaccggctggtcttgcgtgtcaaggccatggcgccctggttccccgaggaggagcgctcgcgccaaccctcgctgatgtcggtggtgcgcgccctcgccgggctgttcgccgccgaaaacgacccgtttttcgggcttgtcggcgcctttggctatgacctgggcttggctttcgagcgcctgccccatgcccggccgcgatcggccgatcaccgcgatctggtgctttacctgcccgaccgtctgctgatcgacgatcccgaagccggcggccttgccgaacgcctttacgacatcaccgcggccgatggggcaagcaccgccggcttggcgcgggaaaccgccgcttacaccgccgaccaccccgccggcggcgtgccgatcgaggatgatatgcccccgggcgcttacggggcgatcgtccgtgggctgaaggaggccttcgccgccggggatctgttcgaggcggtgccctcgcgcgccctgcgccggccttgcgccgaggcgccgagccgtttgtaccggcggctgcgcgcggccaatccggcgccctatctgttcctggccaatctgggggcgggcgaacatctgatcggcgcctcgcccgaaatgttcgtgcgcgtcggtggagcgccgggggcgcggcgggtggaaacctgcccgatctcgggcaccatcgcccgggggcccgacgccctgggcgatgccgaggccatccgcaccctgctcaattcgaccaaggacgaggccgaattgaccatgtgcaccgatgtcgaccgcaacgacaaggcgcgggtctgcgtggccggcagcgttaccgtcatcggtcgccgccagatcgagctatattcccggctgatccacacggtcgaccatgtggagggccggctgcgccccgagcttgacgcccttgacgcctttctcagccactgctgggcggtgacggtgaccggagcgcccaagcgcgccgccatggccgccgtcgaagccgtggagcgggcgccgcgcgcctggtatggcggcgccatcggccgcctgggcttcgacggtaccctcgacaccggactggtgctgcgcaccatccgcctgcgtcacggcgtcgccgaggtgcgggtgggggcgacgctgctccaccgttccgatcccgaggaggaggaggccgaaaccctgctcaaggcctcggccctgctcgccctgctcgatgccaccaccccggccaagccgaatgccccgcatcttccgttgcgcggccgggcgccgcgcgtgctggtcatcgaccacgaggacagcttcgtccataccctggcgtcttatctgcgcaatgccggggccgagaccaccgtgctgcgctgggacgtgccggcggcggtgcgcgccggcgtcgaggccgatctgctggtgctgtcgccgggaccgggcacgccgtcgcgcttcgccctgggggccagcctggactgggcggtggcgcgcggcttgccggtcttcggcgtctgcctggggctgcagggcatcgtcgaacaggccgggggccgccttgcccggctggcggttcccgcccatggcatggcctcgacgctgcggctggtcgcccccggggacccgctgttcgccggcctgcccacgaccatgagagtgggccgctaccacagcctgcacgccgagcgcgccagcctgcccgacagcctggagatcctggccgaaagcgacgacggggtgatcatggcgctgcgccaccgcctgctgcccttcagcgccgtgcaattccaccccgaaagcctgatgaccctggacggcggcgccggaccccgattgatcgccaatcttctggaaaccctaagcgtcccgcgaacgcgccacgccgcctaa

SEQ ID NO: 76547 - protein, 728 aa, Rhodospirillum rubrum ATCC 11170
MQTSTFTTAGGFTISSCLRPLAGADGAFEALIDRLDRHRGMVIASTYEYPGRYRRHALGFCDPPLVLEGKGREAHLLALNRRGRALLPALAVGLEGAAGLEGLRREADRLVLRVKAMAPWFPEEERSRQPSLMSVVRALAGLFAAENDPFFGLVGAFGYDLGLAFERLPHARPRSADHRDLVLYLPDRLLIDDPEAGGLAERLYDITAADGASTAGLARETAAYTADHPAGGVPIEDDMPPGAYGAIVRGLKEAFAAGDLFEAVPSRALRRPCAEAPSRLYRRLRAANPAPYLFLANLGAGEHLIGASPEMFVRVGGAPGARRVETCPISGTIARGPDALGDAEAIRTLLNSTKDEAELTMCTDVDRNDKARVCVAGSVTVIGRRQIELYSRLIHTVDHVEGRLRPELDALDAFLSHCWAVTVTGAPKRAAMAAVEAVERAPRAWYGGAIGRLGFDGTLDTGLVLRTIRLRHGVAEVRVGATLLHRSDPEEEEAETLLKASALLALLDATTPAKPNAPHLPLRGRAPRVLVIDHEDSFVHTLASYLRNAGAETTVLRWDVPAAVRAGVEADLLVLSPGPGTPSRFALGASLDWAVARGLPVFGVCLGLQGIVEQAGGRLARLAVPAHGMASTLRLVAPGDPLFAGLPTTMRVGRYHSLHAERASLPDSLEILAESDDGVIMALRHRLLPFSAVQFHPESLMTLDGGAGPRLIANLLETLSVPRTRHAA

SEQ ID NO: 76548 - DNA, 1500 bp, Moorella thermoacetica ATCC 39073
  CDS (1)..(1500): transl_table=11
gtgtttcaccctgaccgggcaacctacctggacctggcccggaaggccccttatattcctgtctggacagagattcttgccgatacagaaactcccatttccctgtacttaaaattcgccggcggtccggacagcttcttactggagagtgtcgaaggcggggaaaacctgggccgctattccctcattggcttcgatcccctgctgaccttcaccgccaggagtggtaaggcttatttaagcacgaataacgccactgccaggttgctggaagaaaaacccttcaaggctttaaacaatttaatggccagcctgtccctaccacctagtgagggaccacgctttcagggcggcctggtaggctacctgggatatgatatggtccgggaactggaggctttgcccccggggcccggtaatgacctgcaaataccagatacccacctgaccctccaccgttgttacctggtttacgaccatatcctgcggacagtgaggataacctgcctggggcgaggcggggagaatgcccttgccgggtatgaagaagctgtagccggggtcaagggaattctggaaaaactcgggcgatcttctggcgggtaccggaatgggtatccgccggcagcagggcaactggtcccggaaggggtctcctggcaggccagcgtgacccgacaggaatttaccgggatggttacaaaagctaaggagtatatcgccgccggcgatatcttccaggtggtcctctcccagagattgagcctgcccttcagggaggacgccctggtcgtttaccggcacttgcgagcccttaacccttcgccgtatatgttttaccttaacttcccggaggtgcaactggtaggcgcatcgccggaaatgctggtgcgggtggaaaggggaacaatcgattatcgccccatcgccggtaccaggcgccggggacggactgctgccgaggacagggccctggccgcggaactcctggccagcgagaaggagcgtgccgaacacctgatgctcctggacctggggcggaacgacgtgggaaggatagccgtcccgggcagcctgcaggtgacccggcagatggtggtggagtattattcccacgtcatgcacctggtttccagcattaccgcccgcctggctcctggcaggagtgccctggacgcccttctggcctgtttccccgccggtacggtgaccggggctcccaaggtacgggccatggagatcatcaccgaactggagccggtcaaccggggaccctatgccggcgccgtaggttacctgggtctccatggcaacctggatacctgcattgccatccgcaccatagtttttgcccggggtcgggccttcatccaggccggggcgggcattgtcgccgactccgacccggaagccgaatatgaagagaccctgaacaaagcccgggcgctgttgcaggtattaaaaaagccggaggtgggcacccgtgctgctaatgattga

SEQ ID NO: 76549 - protein, 499 aa, Moorella thermoacetica ATCC 39073
MFHPDRATYLDLARKAPYIPVWTEILADTETPISLYLKFAGGPDSFLLESVEGGENLGRYSLIGFDPLLTFTARSGKAYLSTNNATARLLEEKPFKALNNLMASLSLPPSEGPRFQGGLVGYLGYDMVRELEALPPGPGNDLQIPDTHLTLHRCYLVYDHILRTVRITCLGRGGENALAGYEEAVAGVKGILEKLGRSSGGYRNGYPPAAGQLVPEGVSWQASVTRQEFTGMVTKAKEYIAAGDIFQVVLSQRLSLPFREDALVVYRHLRALNPSPYMFYLNFPEVQLVGASPEMLVRVERGTIDYRPIAGTRRRGRTAAEDRALAAELLASEKERAEHLMLLDLGRNDVGRIAVPGSLQVTRQMVVEYYSHVMHLVSSITARLAPGRSALDALLACFPAGTVTGAPKVRAMEIITELEPVNRGPYAGAVGYLGLHGNLDTCIAIRTIVFARGRAFIQAGAGIVADSDPEAEYEETLNKARALLQVLKKPEVGTRAAND

SEQ ID NO: 76550 - DNA, 1401 bp, Moorella thermoacetica ATCC 39073
  CDS (1)..(1401): transl_table=11
ttgctgcccgttgttatcgaggtcaaagcgcctgccgacccggaggccctctatgctgccctcgctggcggccgggaaaatagcttcctattggaaagcgccctctttcacccccgcctgggtcgctattctttccttggtagcgcaccgttcctggtcctaaaaaccaggggcaacgaggcccggcttttccggcccggcgcaatggttgaaaggattcccggcaatccctgggagatcatccgctccctcctgtcccgttaccggttaccgcggcacgatcaacctgtaccttttaccggtggggctgtaggttacctggcctacgacctgggccgttacatcgaaaagctgccgtctctggccgccgatgacctgcccttcccggagggttacctggccttctatgacaccatcgtggccattgaccaccaggaagggagggtctatgtcgctgccagcggtttcccggcatccagcccggccgctgaaaaggaagccctggcccgggcaagggaaacagccgccctcctggcaaaggctcgccccctgccgcccccttcccccgccagcggcggacgggcgcccatcagctccctgtttacccgggaagcctactgccgggccgtcgacagggccagggagtatattgccgccggggatatctttgaagtcaacctgtcccagcgcctgcaggcgcccccgggcctggagccctgggagctgtaccgccgcctgcggcgggtcaacccggctccctttgccgcttacctgccgctcagggaagggaccattgttagtgcctcaccggaaaggtttttgcgggtcagccggggccaggtggagacccggccgattaagggtacccggcgccgggggcataccccggcagaggatgacgccctgcgccgggaattgtggcagagcgccaaggaccgggcggaactggtgatgatcatcgacctggaaaggaacgacctgggccgggtctgccgggccgggtcggtacgggtgccggaactctttgttctggaggagtatgccaccgtctttcacctggtcagcaccgtaaccggcaccttggaaccgggaaaggatatggtggatctctggcgggccacctttcccggcggctccatcaccggcgcccccaaggtccgctccatggagatcatcgaagaactggagccggtgcggcgtagcgtctataccggcgccatcggctacctgggttttgacggcgaagccgactggaatatcgttatccgcacctttctcctggcaaacaaccaggcctatttccaggtcgggggcgccgtcacagccgactccgatcccgggggagagtacgaggaaaccctggacaaagcccggggcctcatccaggcgctggagttataa

SEQ ID NO: 76551 - protein, 466 aa, Moorella thermoacetica ATCC 39073
MLPVVIEVKAPADPEALYAALAGGRENSFLLESALFHPRLGRYSFLGSAPFLVLKTRGNEARLFRPGAMVERIPGNPWEIIRSLLSRYRLPRHDQPVPFTGGAVGYLAYDLGRYIEKLPSLAADDLPFPEGYLAFYDTIVAIDHQEGRVYVAASGFPASSPAAEKEALARARETAALLAKARPLPPPSPASGGRAPISSLFTREAYCRAVDRAREYIAAGDIFEVNLSQRLQAPPGLEPWELYRRLRRVNPAPFAAYLPLREGTIVSASPERFLRVSRGQVETRPIKGTRRRGHTPAEDDALRRELWQSAKDRAELVMIIDLERNDLGRVCRAGSVRVPELFVLEEYATVFHLVSTVTGTLEPGKDMVDLWRATFPGGSITGAPKVRSMEIIEELEPVRRSVYTGAIGYLGFDGEADWNIVIRTFLLANNQAYFQVGGAVTADSDPGGEYEETLDKARGLIQALEL

SEQ ID NO: 76552 - DNA, 1569 bp, Burkholderia thailandensis E264
  CDS (1)..(1569): transl_table=11
gtgctccgggcgcgagcgcagcgccacgcgatccccggcgcgccgcgccgatcgtcccgacgacaggaccggaacatgactgaactcgaattccaatcgctcgccaacgagggctacaaccgcattccgctcatcgccgaagcgctggccgacctcgaaacgccgctttcgctgtatctgaagctcgcgcagcccgaacgcggcggcgccaactcgttcctgctcgaatcggtggtgggcggcgagcgcttcgggcgctactcgttcatcggcctgcccgcgcacacgctcgtgcgcacgaagaacggcgtgtcggaagtcgtgacggacggccgggtcgtcgaaacccacgacggcgatccgttcgcgttcatcgcgaaattccagagccgcttcaaggtcgcgcagcgtcccggcctgccgcgcttctgcggcggcctcgccggctacttcggctacgacgcggtgcgctacatcgagaaaaagctcgcgcacaccgcgccgcgcgacgatctcggcctgcccgacatccagttgctgctcaccgaggaagtcgccgtcatcgacaatctcgccggcaagctctacctgatcgtctacgccgatccgacgaagcccgaggcgtacacgaaagccaagcagcggctgcgcgagctgaagcaccggctgcgcgcgagcgtcgtgccgcccgtcacgtcggcgagcgtgcgcaccgaaatctatcgcgagttcaagaaggaagactatctggccgccgtgcgccaggcgaaggaatacatcgcggcgggcgagctgatgcagatccaggtcggccagcgcctcgcgaagccgtatcgcgacaatccgctgtcgctgtaccgcgcgctgcgttcgctgaatccgtcgccgtatatgtattactacaacttcggcgaattccatgtcgtcggcgcatcgccggagattctcgtgcgccaggagaagcgcggcgacgaccagatcgtgacaatccgcccgctcgccggcacgcgtgcgcgcggcaacacgcccgagcgcgatgccgagctcgcgaccgagctgctcaacgatccgaaggagatcgccgagcacgtgatgctgatcgacctcgcgcgcaacgacgtcggccgcatcgcgcagatcggctcggttcaagtgaccgacaagatggtgatcgagaaatactcgcacgtgcagcatatcgtgagctcggtcgaaggcaagctgaagcccggcatgacgaattacgacgtgctgcgcgcgacgttcccggccggcacgctctccggcgcgccgaaggtccgcgcgatggagctgatcgacgagctcgagccggtgaagcgcgggctctacggcggcgcggtcggctacctgtcgttctcgggcgagatggatctcgcgatcgcgatccgcacgggcctcatccacaacggcaatctgtacgtgcaggcggcggcgggcatcgtcgccgactcggtgcccgaatccgaatggcaggaaaccgagaacaaggcgcgtgcggtgctgcgcgcggccgaacaggtgcaagacggcctcgattccgatttctga

SEQ ID NO: 76553 - protein, 522 aa, Burkholderia thailandensis E264
MLRARAQRHAIPGAPRRSSRRQDRNMTELEFQSLANEGYNRIPLIAEALADLETPLSLYLKLAQPERGGANSFLLESVVGGERFGRYSFIGLPAHTLVRTKNGVSEVVTDGRVVETHDGDPFAFIAKFQSRFKVAQRPGLPRFCGGLAGYFGYDAVRYIEKKLAHTAPRDDLGLPDIQLLLTEEVAVIDNLAGKLYLIVYADPTKPEAYTKAKQRLRELKHRLRASVVPPVTSASVRTEIYREFKKEDYLAAVRQAKEYIAAGELMQIQVGQRLAKPYRDNPLSLYRALRSLNPSPYMYYYNFGEFHVVGASPEILVRQEKRGDDQIVTIRPLAGTRARGNTPERDAELATELLNDPKEIAEHVMLIDLARNDVGRIAQIGSVQVTDKMVIEKYSHVQHIVSSVEGKLKPGMTNYDVLRATFPAGTLSGAPKVRAMELIDELEPVKRGLYGGAVGYLSFSGEMDLAIAIRTGLIHNGNLYVQAAAGIVADSVPESEWQETENKARAVLRAAEQVQDGLDSDF

SEQ ID NO: 76554 - DNA, 1485 bp, Syntrophus aciditrophicus SB
  CDS (1)..(1485): transl_table=11
atgcatacacctgattatgaaacatttaagaaacttaccagagaaggaaatcttattcccctttatcgggaaatcctggcagatattgaaaccccggtttccgttttcatgaagcttcgtgaacagccttatgcctttctactggagagtgtggaaggaggagaaaaatggggacgttatacttttctaggtgctgacccccgtcttgttttccgggttcgaggggcagaggtcctcattgaagagcagaacagaacgattcgtcatgatcatcagggcaatccgcttcagtatctcaaagaactgctgaaacaatattcccccgtttccgtcgagggtctgccaagattttatggcggagcggtcggatttctggggtatgagatggtcaactttttcgaacgccttcctgcttccacgaaggatgatctgcacaccgacgaggctgtttttcttctgacggacacgctgatcatttttgatcgggttcgacacacgataaaagtggtggcctgtgtgcatgtcgatggggagcagaaccttcaggacctttacggggaggccatcgggaaaatcgacgccatggcggctctgctgcagatcccgtcaagcggagcctgtcgtgaatctacgcggccgtcccccgtggattttaccgtgaacatgacatccgaggcatttcggaacagcgtggagcgtgccaaggaatacatccgggccggggatatcattcaagttgtgctttcccagcgtttcgaaggggaaacgtccctggatccccttgatctgtatcgggcggtccggtttatcaatccctcgccttatctgttcttcctgaaaatgaaagatatggtcctgatcggttcctcgccggaagtcatggtccgcctggaagagggtattgtcgagctaaagcccattgccggaacgcgcccgagaggcagaacggaacaggaagaccggcggctggccgatgaactcctggatgatccgaaggaacgggcggagcatgtcatgctggtggatctgggtcggaacgacctgggtcggatcgcccgcaccggaagcgtccagatcacacagttgatggttatcgagcgatactctcatgtcatgcatatcgtttcctccattcagggccagctggacgacagccgggatgcctttgacgtcctgaaggctgcctttcccgccggaacgctgacgggagctcccaagatccgggccatggaaatcatcgatgaactggaaccggtccgacggggaccttatggtggagcggtcgggtatttcagcttttcaggaaatatggatttctgcattaccatccggacgatgctgctgaaaaacgggaaaatgtacattcaggcgggcgccggcattgttgccgattccgatccgcaggcggaataccaggaaacggagaacaaggctgcagcgatgcgccgagccgtggaactggcggtgtcgggttttgaaatctaa

SEQ ID NO: 76555 - protein, 494 aa, Syntrophus aciditrophicus SB
MHTPDYETFKKLTREGNLIPLYREILADIETPVSVFMKLREQPYAFLLESVEGGEKWGRYTFLGADPRLVFRVRGAEVLIEEQNRTIRHDHQGNPLQYLKELLKQYSPVSVEGLPRFYGGAVGFLGYEMVNFFERLPASTKDDLHTDEAVFLLTDTLIIFDRVRHTIKVVACVHVDGEQNLQDLYGEAIGKIDAMAALLQIPSSGACRESTRPSPVDFTVNMTSEAFRNSVERAKEYIRAGDIIQVVLSQRFEGETSLDPLDLYRAVRFINPSPYLFFLKMKDMVLIGSSPEVMVRLEEGIVELKPIAGTRPRGRTEQEDRRLADELLDDPKERAEHVMLVDLGRNDLGRIARTGSVQITQLMVIERYSHVMHIVSSIQGQLDDSRDAFDVLKAAFPAGTLTGAPKIRAMEIIDELEPVRRGPYGGAVGYFSFSGNMDFCITIRTMLLKNGKMYIQAGAGIVADSDPQAEYQETENKAAAMRRAVELAVSGFEI

SEQ ID NO: 76556 - DNA, 1578 bp, Frankia sp. CcI3
  CDS (1)..(1578): transl_table=11
atgacgaccgggcagatcatccccggccgggaggagttccgggccgcggcggcggcgcatccggtcgtcgccgtcacccgtcggctgctcgccgacggggagacacccgtcggcgtctaccgcaagctcgccggcggccccgggacgttcctgctggaatcggcggagcatggcggggtgtggtcgcggtattcgttcatcggtgtgcgggccgcggcgacgctgaccgagcgcgacgggcaggcggtgtgggtggacggtgcgccgcctcccggagtgccggtcgacggtgacccgctcgacatcctgcgtgcggtggagagcactctgcaggcctcgaacagcccacaggcccctccgctcatgggtggtctggtcggctatctcggctacgacatcgtgcgccgcatcgagcggctccccgcgcacgccgtcgacgacctcggccttcccgagttgcgcatgctgctcaccaccgatctcgccgtgctggaccatcgggatggttcctgcctgctggtggccaacgtcttcaccggccgcgggaatggtgccggtgacgcaggcgccaccggcaccaccggtggggacgcggacgccgccgcacacccggccgggatcgacctggacgccgcctacgacgacgcggtggcccggctggaggccatgaccagcgatctcgcgaagtggaacgagccgaccgtggcgaccacggcgggcaccgccgcgggggtcggcgacttcgtctccgccacgcctcccggtgccttccagaccgcggtcgagcgggccatcgaggagatccgcgccggcgagtgcttccagatcgtcgtctcgcagcgcttcgaacggcggacgaccgcggatgcgctcgacgtctaccgggtgctgcggacctcgaatccgagtccctatatgtacctgctgcgtttcgccgaccacgacgtcgtcggatcctccccggaggcgcacgtcaaggtcaccggccgccgggcgttgctgcaccccatcgcgggcagccggccccggggaggcactcccgaacaggacgccgagcttgcggcggagcttctcgcggatccgaaggaacgctccgagcacgtgatgctggtcgacctggtccgcaacgacctcgggcgggtctgcaaccccggttcggtccgggtcgtcgagttcgcggccatcgaacggttctcgcacatcatgcacattgtctccacggtgatcggtgaggtggctccggaccgcagcgccgtggacgtgctggccgcgacgtttccggcggggacgctctcgggggcgcccaaggtgcgggcgatggaggtcatcgacgagctggagccgacccggcggggcctgtacgggggcgtggtcggctacctggacttcggcggtgatctggacaccgcgatcgcgatccgcaccacagtgatgcgcgacggtatggcctacgttcaggccggagccggcatcgtcgcggattccgatcccgacaccgaggatctggaaagccgcgcgaaggccgccgccgtcctgcgcgccgtcgaggtcgccgagtcgttgcgaccgccgtcatga

SEQ ID NO: 76557 - protein, 525 aa, Frankia sp. CcI3
MTTGQIIPGREEFRAAAAAHPVVAVTRRLLADGETPVGVYRKLAGGPGTFLLESAEHGGVWSRYSFIGVRAAATLTERDGQAVWVDGAPPPGVPVDGDPLDILRAVESTLQASNSPQAPPLMGGLVGYLGYDIVRRIERLPAHAVDDLGLPELRMLLTTDLAVLDHRDGSCLLVANVFTGRGNGAGDAGATGTTGGDADAAAHPAGIDLDAAYDDAVARLEAMTSDLAKWNEPTVATTAGTAAGVGDFVSATPPGAFQTAVERAIEEIRAGECFQIVVSQRFERRTTADALDVYRVLRTSNPSPYMYLLRFADHDVVGSSPEAHVKVTGRRALLHPIAGSRPRGGTPEQDAELAAELLADPKERSEHVMLVDLVRNDLGRVCNPGSVRVVEFAAIERFSHIMHIVSTVIGEVAPDRSAVDVLAATFPAGTLSGAPKVRAMEVIDELEPTRRGLYGGVVGYLDFGGDLDTAIAIRTTVMRDGMAYVQAGAGIVADSDPDTEDLESRAKAAAVLRAVEVAESLRPPS

SEQ ID NO: 76558 - DNA, 1536 bp, Novosphingobium aromaticivorans DSM 12444
  CDS (1)..(1536): transl_table=11
atgaccacgatcgacgcatccgccgtctcgctgccggaaaaccaccgcgccgcgctttcccagctttccgccggaaagccggcgctggtctggcgcaagctgatcgtcgataccgagactcccgtcggcgccgcgctcaagctgatggaaagcggtcgcggcgatttcctgctcgaatccgtgcagggcggcgaagtacgcgggcgctacagcctgctcgggctcgatcccgatctcgtcttccgcgccaccggctcgtcggcagagatcaaccgcatctggcggcacgacaaggcagccttcgcaccgctacccggcgatgccctcgccgaactgcgcgcgctcgtcgcctcctgccgcatcgacgtcccggccgagctgccctcggcgctcgcctgcctcgtcggctacttcggctacgagaccatcggcctggtcgagaagctgccccgcgcaccgcagagcgagcttgtcctgcccgacatgctgttcacccgcccgaccgtggtgctggtgttcgaccgcctgtccgacgaactcttcgccatcgccccggtctgggccgaaggcggcgatccggcgcgcctgctcgaagccgcggcggagcgcatcgacaatgccctgcgccggctgtccgatccggtccccgccgatgcgcgccttgccgaagcggtcgacgtcacgccgcagccagtcatggccgcacccgactatgcgcgtatggtgactgccgccaaggactacatcgaggcgggcgacatcttccaggtcgtcctcgcccagcgcttcaccgcgcccttcccgctgccgcccatcgcgctctaccgttcgctgcgccgcatcaatccctcgccgttcctctacttcctcgacatgccgggctttgcgctcaccggctcctcgccggaaatcctggtccgcatccgcgacggcgaagtcacgatccgcccgattgccggcacccgcccgcgcgggcgcaccgccgaggaagaccgggccaacgaagagagcctgctggccgatcccaaggaacgcgccgaacacctcatgctgctcgacctcggccgcaacgacgtcggccgcgtggccagggccggcaccgtgaaagtcaccgaaagctacacggtcgaacgctacagccacgtgatgcacatcgtctcgaacgtggtcggccagctcgacacgaaccgcgccgacagcgtcgacgccctcttcgccgggttccccgccggcacagtctcgggcgcacccaaagtccgcgcctgcgagatcatcgccgaactcgaacccgagacgcgcggcgcctacgctggcggtgtcggctatttcgcgcccgacggctctgtcgatagctgcatcgtcctcaggaccggcatcctcaaggacggcgtcctccatgtccaggctggcgccggcatcgtcgccgacagcgaccccgcctacgaacagcgcgaatgcgaagccaagagcggcgccctcttcgccgccgcgcgcgaagccgtccgtgtcgccacagaaccgaagtttggccaatga

SEQ ID NO: 76559 - protein, 511 aa, Novosphingobium aromaticivorans DSM 12444
MTTIDASAVSLPENHRAALSQLSAGKPALVWRKLIVDTETPVGAALKLMESGRGDFLLESVQGGEVRGRYSLLGLDPDLVFRATGSSAEINRIWRHDKAAFAPLPGDALAELRALVASCRIDVPAELPSALACLVGYFGYETIGLVEKLPRAPQSELVLPDMLFTRPTVVLVFDRLSDELFAIAPVWAEGGDPARLLEAAAERIDNALRRLSDPVPADARLAEAVDVTPQPVMAAPDYARMVTAAKDYIEAGDIFQVVLAQRFTAPFPLPPIALYRSLRRINPSPFLYFLDMPGFALTGSSPEILVRIRDGEVTIRPIAGTRPRGRTAEEDRANEESLLADPKERAEHLMLLDLGRNDVGRVARAGTVKVTESYTVERYSHVMHIVSNVVGQLDTNRADSVDALFAGFPAGTVSGAPKVRACEIIAELEPETRGAYAGGVGYFAPDGSVDSCIVLRTGILKDGVLHVQAGAGIVADSDPAYEQRECEAKSGALFAAAREAVRVATEPKFGQ

SEQ ID NO: 76560 - DNA, 1545 bp, Francisella tularensis subsp. holarctica
  CDS (1)..(1545): transl_table=11
atgtcagttaaagaaccagaaaaatttttagcatcacatatttataatatagattatcaagaagatttaaataaatgctttgctaatttatgtacaaataaaaaaaatactattttattagaatcagcagaaatagatacaaaagataaactcaaaagtatcttagtgcttaatagtgctttaagaatagcttgtattgaaaataaagtctttataaaaccattatctgaaaatggtaaatatgctctaaaggctatacaggaaaatataaaaaaagatgttgattataaatatgataataaccaattagttttaacatttgagttcatcaaagattatcaacttagtgaatctcaaaaattaaaaaaaccatctgtatttgatgctttgagaattataaaagatagttttgaaatatataatgaatttagtattttcttagcaggattatttgcttatgatgttgttgttagctttgaaaatataggcaaaattaatcgtaaaaataaatgtccagattatgtattttaccttgctgatacaatacttgtaagtgattatcaagagcagaaaacgtttattcaagttaatagttttggtcatcaaacaataacagatttagaggatagtgttgctgcaattaagcaaaatataaataatgatatagagttaaaagttgaaaagtttaaaaatatagaacctaaagaatcaataaatgatagagatttttgtattgttgtagataaacttaaatcacatattatagatggtgatatatttcaagtagtgccttcaagaagtttctttttgccatgtcaaaattctttagaagtatataaagaacttaaacgtactaatcctagtccttatatgttttatatgcaagatgaggattttattctttttggagcatcaccagagagtgcattaaaatatcaaaagtcaaccaatcaagtagaaatatatcctatagctggcacacgtagaagagctaaaaattctgatggaagtatcaacgcagatttagatagtagaattgaactagagcttagattagatgctaaagaaaatgcggaacacatgatgctagtagatttggcacgtaatgatgttgcaagaatatcaaaaacaggtacacgctatgtagcagatcttctaaaggttgatagatatagccatgtgatgcatttagtatctagagttgtgggtcaacttgctgatgatttggatgctttgcatgcttatcaagcttctatgaatatgggcacactaacaggggctccaaaaataaaagcgatgcaactaatatctgaagttgaaaagcaaacaagaggtgtttatggcggagctataggttatttcaatggttatggtgatttggatagttgtatagttattcgttctgcttatgttgaaaatggtgttgctgaaattcaagctggcgcaggcgtggttttagattctataccaatagcagaagctgatgagactaggacaaaagcacaagctgtaatatcagctattaaaaacgtacatggagtgtaa

SEQ ID NO: 76561 - protein, 514 aa, Francisella tularensis subsp. holarctica
MSVKEPEKFLASHIYNIDYQEDLNKCFANLCTNKKNTILLESAEIDTKDKLKSILVLNSALRIACIENKVFIKPLSENGKYALKAIQENIKKDVDYKYDNNQLVLTFEFIKDYQLSESQKLKKPSVFDALRIIKDSFEIYNEFSIFLAGLFAYDVVVSFENIGKINRKNKCPDYVFYLADTILVSDYQEQKTFIQVNSFGHQTITDLEDSVAAIKQNINNDIELKVEKFKNIEPKESINDRDFCIVVDKLKSHIIDGDIFQVVPSRSFFLPCQNSLEVYKELKRTNPSPYMFYMQDEDFILFGASPESALKYQKSTNQVEIYPIAGTRRRAKNSDGSINADLDSRIELELRLDAKENAEHMMLVDLARNDVARISKTGTRYVADLLKVDRYSHVMHLVSRVVGQLADDLDALHAYQASMNMGTLTGAPKIKAMQLISEVEKQTRGVYGGAIGYFNGYGDLDSCIVIRSAYVENGVAEIQAGAGVVLDSIPIAEADETRTKAQAVISAIKNVHGV

SEQ ID NO: 76562 - DNA, 1482 bp, Saccharophagus degradans 2-40
  CDS (1)..(1482): transl_table=11
atgactcctgaactatttgctcaatattgcgacgagggttacaaccgtattccggtaacccgtgaagtgctcgcagacacagaaacaccgctttccgcgtaccttaaattggcccatggcccatacacctacttgtttgaatctgtgcaaggcggtgaaaaatgggggcgttattccattattggtttaccagctaaatatcggcttgaggtgcgcggtcgcactgttactgaattcagtggtaatgaggttgttgctactgcagaagctgccgacccgctcgattatgtatcggcattccaaaagcgatttaatgtccccgagcttgagggcttaccggtattttctggcgggcttgtaggttattttgcttacgactgcgtgcgctacatagagcccaagctgtaccccagtgtgccacacgatgaaataggtactcccgatgtactgcttatggtgtcggacgaactactggtttttgataacctgcgcggtaagttgcatttaattgtgcacgcaaacccagaaaacggtgaaacctttgcgagcgcgcaggcgcggctagatgcattggaagccggtttacaaaaaagtttacccgccttggctagtcatgtaactactgagcaggcgatgggcaaaacccgctgcgaggcagactttgtgtccagttacggcgaagaaaactttaagcgcgatgtcgataaaattaaagactacgtattagctggcgatacgatgcaggttgtggtgtcgcagcgtatgagcctgccttttacttccgagccgcttaatttataccgcgcattgcgctgtttaaatccgtcaccttatatgtactttctaaatttgggtgaccaccatattgtgggctccagcccagaaattttggctcgcttgcaaaataacgaagtgacggtacggcctattgcaggtacacgtcggcgcggttacagcgatgcagaagacaaagccttagaaaaagaattggttaacgaccccaaagagatcgccgagcatcttatgcttatcgatttggggcgcaacgatgtaggtcgtgttgctcaagtaggaacagtcgacctcaccgagaagatggtcgttgagcgcttttcgcatgttatgcacattacttctaatgtaaccggccagctaaaagagggcttggatgcaatggatgtgctgcgcgcgactttgccagcgggtaccttgtctggcgcgcctaaaatccgagcaatggagattattgacgagctagagccggttaagcgcggtatttatggcggggcagtaggttatttatcatggaaaggagatatggatactgccattgctattcgcaccgctgttattaaagatgaaaagctttatgtgcaggctggcgccggtgtggtggccgattctcagccagcactagagtggaaagaaaccatgaacaaggcgcgggcaatatttagcgcagtagattgggtacagaagtag

SEQ ID NO: 76563 - protein, 493 aa, Saccharophagus degradans 2-40
MTPELFAQYCDEGYNRIPVTREVLADTETPLSAYLKLAHGPYTYLFESVQGGEKWGRYSIIGLPAKYRLEVRGRTVTEFSGNEVVATAEAADPLDYVSAFQKRFNVPELEGLPVFSGGLVGYFAYDCVRYIEPKLYPSVPHDEIGTPDVLLMVSDELLVFDNLRGKLHLIVHANPENGETFASAQARLDALEAGLQKSLPALASHVTTEQAMGKTRCEADFVSSYGEENFKRDVDKIKDYVLAGDTMQVVVSQRMSLPFTSEPLNLYRALRCLNPSPYMYFLNLGDHHIVGSSPEILARLQNNEVTVRPIAGTRRRGYSDAEDKALEKELVNDPKEIAEHLMLIDLGRNDVGRVAQVGTVDLTEKMVVERFSHVMHITSNVTGQLKEGLDAMDVLRATLPAGTLSGAPKIRAMEIIDELEPVKRGIYGGAVGYLSWKGDMDTAIAIRTAVIKDEKLYVQAGAGVVADSQPALEWKETMNKARAIFSAVDWVQK

SEQ ID NO: 76564 - DNA, 1485 bp, Methylobacillus flagellatus KT
  CDS (1)..(1485): transl_table=11
atgctgcaaaccatcagtcaacacgaatttgatgccctggccagccagggctataaccgcattcctctggtcgtcgagacatttgccgatctcgataccccgctctcgctctacctgaagctggctaaccagccttattcctacctgctcgaatcggtgcagggcggggagcgctttggtcgttattccatcataggtctgcctgcccgcgtccgtatagaggtgcaaggccagacggtcagggtgctcgacggcgatcaggtgctggaacagacgaatcatgtaaatccgctggacttcatccaggcctaccaggccaggtttcgcattccaccgtatcagggcttgccacgcttcaccggaggcttggccggttatttcggctatgacaccattcgctatatcgagcgccggttggcgggtaatgccaaacaggatgcgctcggcgtgcctgatgttctgctcatggtgtcggaagaaattgccgtggtggacaatctctcaggcaagctgtatttcatcgtgtatgccgatccggcaagtggaaatgcctatacccagggcatccagcgcctgaacgcattggtacaacgcctgcgccagccggtggatattccgtatgccgtcgccatgccggtcaccgaggcgcagtcggagtttggtgaggagagcttcaaggaagcagtggccaagtccaagcagtacatcttcgatggtgacatcatgcaggtggtgctgtcgcaacgcatggccaagcctttcacagcgccgccgttgtcgctctaccgtgccttgcgcagcctcaacccctcgccctacatgttttattacgacatgggggaccatcatgtcgttggtgcttccccggaaattctcgtgcgcctggaggatgagacggtaacctcacggccgattgctggcacgcggccccgcggcaagacccgagaggaagatatcgccttggcggaagagctgctggccgaccccaaggaaattgccgagcacgtgcagttgatggacctggggcgcaacgatgtcggccgtgttgcgcaggtaggcagtgtggcggtgacggagaagatggtgatcgagcgttattcgcacgtcatgcatatcgtctctaatgtcgaaggcaggctcaagtccggtttgcacgcgatcgatgtgctcaaggcgactttccctgccggcaccctgagcggtgcacccaaggtgcgcgcgatggaaatcattgatgagctggagccaagcaagcgaggcatctacggcggcgctgtcggttatctcggcttcaatggcgacatggatctcgcaattgccatccgcactggcgtgatcaaggatggtatgttgtattcccaggccggggccggcatcgtcgccgactcaataccggaaaacgagtggatagaaacccagaacaaggcgcgcgcggtattgcgcgccgcggagatcgtacaggcaggactcgataacaaggagtag

SEQ ID NO: 76565 - protein, 494 aa, Methylobacillus flagellatus KT
MLQTISQHEFDALASQGYNRIPLVVETFADLDTPLSLYLKLANQPYSYLLESVQGGERFGRYSIIGLPARVRIEVQGQTVRVLDGDQVLEQTNHVNPLDFIQAYQARFRIPPYQGLPRFTGGLAGYFGYDTIRYIERRLAGNAKQDALGVPDVLLMVSEEIAVVDNLSGKLYFIVYADPASGNAYTQGIQRLNALVQRLRQPVDIPYAVAMPVTEAQSEFGEESFKEAVAKSKQYIFDGDIMQVVLSQRMAKPFTAPPLSLYRALRSLNPSPYMFYYDMGDHHVVGASPEILVRLEDETVTSRPIAGTRPRGKTREEDIALAEELLADPKEIAEHVQLMDLGRNDVGRVAQVGSVAVTEKMVIERYSHVMHIVSNVEGRLKSGLHAIDVLKATFPAGTLSGAPKVRAMEIIDELEPSKRGIYGGAVGYLGFNGDMDLAIAIRTGVIKDGMLYSQAGAGIVADSIPENEWIETQNKARAVLRAAEIVQAGLDNKE

SEQ ID NO: 76566 - DNA, 1494 bp, Burkholderia xenovorans LB400
  CDS (1)..(1494): transl_table=11
atgaccgaactcgaattccagtccctcgccaacgagggtttcaaccgcatcccgctgatcgccgaagcgctcgccgacctcgaaacgccgctctcgctgtacctgaagctcgcgcagagcgagcgcaacggcgccaactcgttcctgctggaatcggtggtgggcggcgaacgtttcggccgctactcgttcatcggactgccggcgcgcacgctgctgcgcacccgcaacggcgtgtcggaagtggtgcgcgacggcaaggtcgtcgaaacgcacgagggcgacccgctcgaattcatccagcagttccaggggcgtttcaaagtggcgcaacgccccggcttgccgcgtttcgcgggcggtctggccggctatttcggctacgacgcggtgcgctacatcgagaaaaagcttgcgcacacggcgccgaaagacgatctgaatctgcccgacatccagttgctgctgaccgaagaagtcgcggtgatcgacaatctcgcgggcaagctctatctggtgatctacgccgacccgacgcagcccgaggcgtacaccaaagccagacagcgtctgcgtgaattgcgccagcgtttgcgcactaccgtgcagccgccggtcacttcggccagcgtgcgcaccgagacctaccgcgagttcgcgaaagacgattacctggcggccgtgcgcaaggcaaaggaatacatcgcggccggcgaactgatgcaggtgcaggtcggccagcgcctgaccaagccgtatcgcgacaatccgctctcgctgtaccgcgcgctgcgctcgctgaatccgtcgccgtatatgtatttctacaacttcggcgacttccacgtggtgggcgcatcgccggaaattctggtgcgccaggaaaagcgcggcgaggatcgcatcgtcacgatccgtccgctcgccggcacgcgtccgcgcggcaacacgccggaacgcgacgccgaactcgcaaccgaactgctgaacgacccgaaggaaatcgccgaacacgtcatgctgatcgaccttgcgcgtaacgacgtgggccgcatcgcgcaaatcggctcggtggtcgtcaccgacaagatggtgatcgaaaagtactcgcacgtgcagcacatcgtgagttcggtcgaaggtaagctgaaacccggcaccaccaatttcgacgtgctgcgcgccactttcccggccggcacgctgtctggcgcgccgaaggttcgcgcgatggaactgatcgacgaactcgaacccgtgaaacgtggcctgtacggcggtgcggtcggctatctgtcgttcaccggcgaaatggatctggccatcaccattcgcaccggcgtgatcgcgaacggcaatctgtacgtgcaggcggcagcgggtgtagtcgcggattcggtgccggaatccgaatggcaggagaccgagaacaaggcgcgcgccgtactgcgcgccgcggaacaagtgcaagacggcctcgatagcgacttctga

SEQ ID NO: 76567 - protein, 497 aa, Burkholderia xenovorans LB400
MTELEFQSLANEGFNRIPLIAEALADLETPLSLYLKLAQSERNGANSFLLESVVGGERFGRYSFIGLPARTLLRTRNGVSEVVRDGKVVETHEGDPLEFIQQFQGRFKVAQRPGLPRFAGGLAGYFGYDAVRYIEKKLAHTAPKDDLNLPDIQLLLTEEVAVIDNLAGKLYLVIYADPTQPEAYTKARQRLRELRQRLRTTVQPPVTSASVRTETYREFAKDDYLAAVRKAKEYIAAGELMQVQVGQRLTKPYRDNPLSLYRALRSLNPSPYMYFYNFGDFHVVGASPEILVRQEKRGEDRIVTIRPLAGTRPRGNTPERDAELATELLNDPKEIAEHVMLIDLARNDVGRIAQIGSVVVTDKMVIEKYSHVQHIVSSVEGKLKPGTTNFDVLRATFPAGTLSGAPKVRAMELIDELEPVKRGLYGGAVGYLSFTGEMDLAITIRTGVIANGNLYVQAAAGVVADSVPESEWQETENKARAVLRAAEQVQDGLDSDF

SEQ ID NO: 76568 - DNA, 1572 bp, Methanococcoides burtonii DSM 6242
  CDS (1)..(1572): transl_table=11
atgatctcgttcgatcttacaaaagaggaatttacggatattgtatatggtgtaggaaaacctgctattgttcagcttatggctaaagtgaggtcagactgctctccacttcagctttacactacattacaaaaggacagatattcctacctgctggaatcagtggaaaaggaaaaacgtcatgctcgcttttcatttgtaggtgcttaccctgatggtgttgttaagataagtggtcgcaccctcgtactggaatgcacgacagattcaccattgatcagtaatgtacggcagaatatagcttctgaatgtgacattattgaagatactgatggtttgttaaaagcggtcatacgtgatggtcatgatgtgcttgatgcattgagggccgtgttccctactgcgaacgggactgtcttgcttaacggcgaaaggtttgacagacagactttccttggcggtgctattggttacaatggttacgacattgtgtatgactgttggttagatgctgaaagaagtcataattcagatattcctgatatgcagttcattctcacaacgaagacattcgttttcgatcatctcacagaggaaacgtatattgtactgactccgttcatggatatcgggtgtgatgctggtgctatatatgctggtgctttgcatgacgcagagagaatgcataaatacctctgtctggcaggcgatgtcgaacaagatatcttgccaccggtaatggatgcaggcgaaccagtgtgtaatatgggcaagggtgttttcgagaaagcagtgatgactgcaaagcagcatatcatcgatggtgatattttccaggtggtcttatccagaagatattctgtcagactgcaacagtcccctcttgaactttatcgtactttaagggaaataaatccaagtccgtatatgtaccttttcagtttcgatgatcttagtatcgtgggtgcaagtcctgagacgcttatgaccgtacataagaaaaatgttattacgaatcctattgctgggacatgtcctcgtgggaaggacaaggctgaggacgcgaaatatgctgctcatatgatggcggatgagaaagagcgtgcagaacatgttatgcttgtggaccttgggaggaacgatgtccgtatggtctctcagtccgggtcggtgaaagtaaaggacctgatgagtgtcgtgaagtattctcatgtacagcatatcgaaagtactgtttgcggggtgttaaggccagagtgtgatcagttcgatgcgacccgtgccatctttccggcaggtacactttcaggtgcacctaagataagggcaatggaaattatcgatgagttcgaaacatccgcacgtggtgtctatggtggcggtgtcggctactattcgtggaacggtgatgtggatactgctatcgtgatcaggaccgttgttattaatggtgatactgcttatattcaggcgggtgcgggaattgtggcggattccgatccgacatatgaatatgaggaaacagagcgtaagatggctgctatgcttactgccatgggggtcaaaaaatga

SEQ ID NO: 76569 - protein, 523 aa, Methanococcoides burtonii DSM 6242
MISFDLTKEEFTDIVYGVGKPAIVQLMAKVRSDCSPLQLYTTLQKDRYSYLLESVEKEKRHARFSFVGAYPDGVVKISGRTLVLECTTDSPLISNVRQNIASECDIIEDTDGLLKAVIRDGHDVLDALRAVFPTANGTVLLNGERFDRQTFLGGAIGYNGYDIVYDCWLDAERSHNSDIPDMQFILTTKTFVFDHLTEETYIVLTPFMDIGCDAGAIYAGALHDAERMHKYLCLAGDVEQDILPPVMDAGEPVCNMGKGVFEKAVMTAKQHIIDGDIFQVVLSRRYSVRLQQSPLELYRTLREINPSPYMYLFSFDDLSIVGASPETLMTVHKKNVITNPIAGTCPRGKDKAEDAKYAAHMMADEKERAEHVMLVDLGRNDVRMVSQSGSVKVKDLMSVVKYSHVQHIESTVCGVLRPECDQFDATRAIFPAGTLSGAPKIRAMEIIDEFETSARGVYGGGVGYYSWNGDVDTAIVIRTVVINGDTAYIQAGAGIVADSDPTYEYEETERKMAAMLTAMGVKK

SEQ ID NO: 76570 - DNA, 1527 bp, Ralstonia metallidurans CH34
  CDS (1)..(1527): transl_table=11
atgaccgaactggaattcaaatcgctggccgaccagggatacaaccgcattcccatcatcgccgaggcgctggccgacctggaaaccccgctgtcgctgtacctgaagctggcccagtcgcaaacgcgtggcgtgaacacattcctgctggaatcggtggtcgggggcgagcgtttcggccgctactcgttcatcggcctgcatgcccgcacgctgttgcgcgcctacgggcaccgtgccgaagtggtcaccgacggcaaggtcgtggagacgcacgaaggcaacccgctcgatttcatcgccgagttcgaaagccgcttcaaggtggcgctgcgccccggattgccgcgattctgcggcggtctggccggctacttcggctatgacgcggtccgctatatcgaaaagaagctggccgacacccagatgccggacgacctcggcctgcccgatatccagttgctgctgtgcgaggaactggcggtcatcgacaacctgtccggcaagctctacctgatcgtctacgccgacccgaccacgccggaagcctattcccgcgcccgccagcgcctgcgcgaactgcgcatgaagctgcgccagcccgtggatgtgccggtgacgagcccctccgtgctgaccgaggtctatcgcgaattcgccaagcccgactacctggccgccgtgcacaaggccaaggaatacatcatggccggcgacatgatgcaggtgcaggtgggccagcgcctgatgaagccgtatcgggactcgccgctgtcgctctaccgcgcgctgcgttcgctgaatccgtcgccgtacatgtacttctacaacttcggcgatttccaggtggtgggcgcctcgcccgaaatcctggtacgccaggagacccgcaaggtcggcggcgcccaggccaacggcgacacgcagaatgcccgcatcgtcacgatccgcccgctggccggcacccgcccgcgcggcagcacccccgagcgcgatgcccaactggccacggaactgctcaacgatccgaaggagatcgccgagcacgtgatgctgatcgacctggctcgcaacgacatcggccgcatcgcggaaacgggttcggtcaaggtcaccgacaagatggtgatcgagaagtactcgcacgtgcagcacattgtcagttccgtggaaggcacgctgcgcgacggcatcagcaacctcgacgtgctgcgcgccacgttcccggccggcacactgtccggcgcgccgaaggtgcgcgcgatggaaatcatcgatgaactggaaccgcgcaagcgcggcatctacggcggcgccgtgggctacctgtcgttcggcggcgagatggatctggccattgccatccgcaccggtgtgatcaaggacggcaatctctatgtgcaggccgcggccggcatcgtggcggattcggaccccgaagccgaatggagggaaaccgaagcgaaggcacgcgccgtgatccgcgccgccgaacaggtccaggacggtctggacgccgacctctga

SEQ ID NO: 76571 - protein, 508 aa, Ralstonia metallidurans CH34
MTELEFKSLADQGYNRIPIIAEALADLETPLSLYLKLAQSQTRGVNTFLLESVVGGERFGRYSFIGLHARTLLRAYGHRAEVVTDGKVVETHEGNPLDFIAEFESRFKVALRPGLPRFCGGLAGYFGYDAVRYIEKKLADTQMPDDLGLPDIQLLLCEELAVIDNLSGKLYLIVYADPTTPEAYSRARQRLRELRMKLRQPVDVPVTSPSVLTEVYREFAKPDYLAAVHKAKEYIMAGDMMQVQVGQRLMKPYRDSPLSLYRALRSLNPSPYMYFYNFGDFQVVGASPEILVRQETRKVGGAQANGDTQNARIVTIRPLAGTRPRGSTPERDAQLATELLNDPKEIAEHVMLIDLARNDIGRIAETGSVKVTDKMVIEKYSHVQHIVSSVEGTLRDGISNLDVLRATFPAGTLSGAPKVRAMEIIDELEPRKRGIYGGAVGYLSFGGEMDLAIAIRTGVIKDGNLYVQAAAGIVADSDPEAEWRETEAKARAVIRAAEQVQDGLDADL

SEQ ID NO: 76572 - DNA, 1470 bp, Acidobacteria bacterium Ellin345
  CDS (1)..(1470): transl_table=11
atggactcgccagatttcaagtccttctcgcagctagcacgcgaagcctcgctcgtccccgtcacgcgcacgatttcggccgacctcctcactccggtttccgccttccttgctctggccgacaaagagccttacgccttcctgctggaatccgtcgaaggcggcgagcgtattggacgctacacctttctcggcatccggccctacatggtcgtcaccggccgcggcagcgaagttacgatacgccgcggtaagaagaccgaaaagtcgtcttccgatctacttggaaccctgcgggccgcgttacgcgagcacaagcccgccaccgtccccggattgccgcccttcaccgcgggcgctgtcggctactttgcttacgatgccgtgcgccacttcgagcgcctgcccgacatcgccaaagacgacctccaccttcccgacggcgtcttcatgttctacgaccgcctgctggccttcgatcacctgcgccaccagttgcacctcatcgccgccgccgacgtccgcaccgagaagccgcgcgccgcctacgatcgcgctatcgccgatctcgatgcgctggagaaaaagctcgtatcgggactgaagattcgtcgcctgcgtcccgaaaagaaaaccgcgaagatcaagctgcacgcccgcacaaagcccgccgactacatgaacgccgtgaagcgcggcaaggaatatatcgcggcaggagatgtcttccaggtcgtgctctcccagcgcctcgacttcgcactgcccgcgcctcccttcgacatctaccgctctctgcgcacggtgaatccgtcgccctacatgtactttctgcgcatggacgacctccacgtcctcggctcgtcgcccgagatgctggtgaaagccaacaaccgcacgctggagtaccgcccgatcgccgggacctacaagcgcggcgcgaccgccgaagaagatgcgcgtctcgaagagcaccttcgcaccaacgaaaaagagcgcgccgagcatgtgatgctcgtagatcttggacggaacgatctcggccgcgtgagcgaatacggctctgtcaaagtaaaaggcctgatgtacgtagagcgctactcgcacgtgatgcatctcgtctccgcgctcgaaggcaaactgcgcggcgacctcgacgcgctcgacgccttcgccgcctgcttccccgccggcaccctcagcggcgcgcccaaagtccgcgccatggaaatcatcgaagaactggaacccacccgtcgcggcgtctacggaggttcggttttgtatgccgacttcgccggcaatctcgactcctgtatcgccatccgcaccatggtcgtgaaaaacaaccgcgcgtatgtccaagccggcgccggcatcgtagccgacagcgatcccgaaagcgaattccaggagtgccgcaacaaagcgcaagcggtcgtccgcgccgccgaactggcgggacgatag

SEQ ID NO: 76573 - protein, 489 aa, Acidobacteria bacterium Ellin345
MDSPDFKSFSQLAREASLVPVTRTISADLLTPVSAFLALADKEPYAFLLESVEGGERIGRYTFLGIRPYMVVTGRGSEVTIRRGKKTEKSSSDLLGTLRAALREHKPATVPGLPPFTAGAVGYFAYDAVRHFERLPDIAKDDLHLPDGVFMFYDRLLAFDHLRHQLHLIAAADVRTEKPRAAYDRAIADLDALEKKLVSGLKIRRLRPEKKTAKIKLHARTKPADYMNAVKRGKEYIAAGDVFQVVLSQRLDFALPAPPFDIYRSLRTVNPSPYMYFLRMDDLHVLGSSPEMLVKANNRTLEYRPIAGTYKRGATAEEDARLEEHLRTNEKERAEHVMLVDLGRNDLGRVSEYGSVKVKGLMYVERYSHVMHLVSALEGKLRGDLDALDAFAACFPAGTLSGAPKVRAMEIIEELEPTRRGVYGGSVLYADFAGNLDSCIAIRTMVVKNNRAYVQAGAGIVADSDPESEFQECRNKAQAVVRAAELAGR

SEQ ID NO: 76574 - DNA, 1512 bp, Silicibacter sp. TM1040
  CDS (1)..(1512): transl_table=11
atggccctgatccccgatttcgacagtttcgccaaagcctatgaggcgggcgaaaaccaggtggtctacacacggcttgccgccgatctggatacgcccgtctccttgatgctgaagctcaccggcgcgcagaaggatgccttcatgctggaatcggtgaccggcggcgaggtccgcgggcgctattccatcatcggcatgaagcctgacctgatctggcgtgcgcggggcgaacaggccgaaatcaaccgcgccgcgcggttcgatcccgagggctttgccccgctcgacggcaacccacttgatacactgcgcgcgctactggccgagagccgcatcgacctgccggatgatctgccacaggcggcggcggggctgtttggctatctgggctatgacatgatccgccatgtggagcatctgccggatgtgaaccccgacccgcttggcctgccggacgcggtgatgatccgcccctccgtggtggccgtgctggacggtgtcaaaggcgaggtcacagtggtctctcccgcctgggtcagcgaaggccagtcggcgcgcgcggcctatgctcaggctgccgaacgcgtgatggatgcggtgcgtgatcttgaacgtgccatgcccgccgagacccgcgatctgggcgaggcgcgcgaggtcgcgcccccggtctccaacttcaccaaggacggctacatggccgccgtggagaaggccaaggactacatccgtgccggcgacatctttcaggtagtgcccgcacagcgctggacgcaggagttcccgcagccgcccttcgcgctctatcgttcgctgcgacgcaccaacccctcgccgttcatgttctacttcaacttcggcggttttcaggtgatcggcgccagccccgagatcctcgttcgggtctttggcaacgaggtcaccattcgccccattgctggcacccgtccgcgcggcgcaacccccgaagaagacaaagcgctggaacaggatctgcttgccgacaagaaagagttggccgagcacctgatgctcttggatctgggccgtaacgacgtgggccgcgttgccaagatcggcaccgtgaaacccaccgaggaattcatcatcgagcgctacagccacgtgatgcatatcgtttcgaatgttgttggcgaactccacgaggacaaagacgcgctcgatgcattttttgcaggcatgcctgcgggtacggtttccggagcgcccaaggtgcgtgcgatggagatcatcgacgagctcgaacccgaaaagcgcggcatctatggcggtggcgtcggctatttcagcgctggcggcgacatggacatgtgtatcgcgctgcgcacagccatcgtgaaggatcagaacctctatattcaggccgggggcggcgtcgtctatgacagcgacccggaggccgaatatatggagaccgtgcataaatcgaacgcgatccgccgtgcggctgcagatgcggcgcgctttaccggcaacggcaaccgctga

SEQ ID NO: 76575 - protein, 503 aa, Silicibacter sp. TM1040
MALIPDFDSFAKAYEAGENQVVYTRLAADLDTPVSLMLKLTGAQKDAFMLESVTGGEVRGRYSIIGMKPDLIWRARGEQAEINRAARFDPEGFAPLDGNPLDTLRALLAESRIDLPDDLPQAAAGLFGYLGYDMIRHVEHLPDVNPDPLGLPDAVMIRPSVVAVLDGVKGEVTVVSPAWVSEGQSARAAYAQAAERVMDAVRDLERAMPAETRDLGEAREVAPPVSNFTKDGYMAAVEKAKDYIRAGDIFQVVPAQRWTQEFPQPPFALYRSLRRTNPSPFMFYFNFGGFQVIGASPEILVRVFGNEVTIRPIAGTRPRGATPEEDKALEQDLLADKKELAEHLMLLDLGRNDVGRVAKIGTVKPTEEFIIERYSHVMHIVSNVVGELHEDKDALDAFFAGMPAGTVSGAPKVRAMEIIDELEPEKRGIYGGGVGYFSAGGDMDMCIALRTAIVKDQNLYIQAGGGVVYDSDPEAEYMETVHKSNAIRRAAADAARFTGNGNR

SEQ ID NO: 76576 - DNA, 1455 bp, Myxococcus xanthus DK 1622
  CDS (1)..(1455): transl_table=11
atgagccgcccgccctcccccacgcgcttcccggaccggacgtccttcgagacgttcgtggcccagggctacaaccaggtgcccgtggtgcggcggctcccgctcggggcgctgcgtcccgtggacctcctgcgagccctcccagcggaaagccggttcctgctggagagcacccgggtcagcgccgaggggcgctattcgttcctcggcgcgaagcccttcctgcgtttcaccgcgaaagagggacagtgcttcattgatggcgcgctccagcagggtacgccgcaggaggtgctgcgctcgctgctgcgccggtggcgtggcgtgcgtcatcccggaatgccgctcttctgcggcggcgcggtgggcttcttcggctacgaggccgcgcactgtttcgagtccctgccccggcacccacgggacgacctgcacctgcccgaaatcgacctgtcattcatcgacaccttcctgacggtggaccaccacgagggccaattgctcctggtggccacgggctcggactgggaggactgtgagcgcaggttggacgcgttggaggtccacgtccgcaccgcgacgcccacggcgccacgcgtgccacccgcgatggatgggcccacctcggcgtatcgctccaacttcaccctcgatgcttacctggacgcagtcgagcgcgtgcgcgagtacatccgcgccggtgacacgtatcaggtcaatctctcgcagcggctggaggtggactttcccggtgagccgctcgcgctctacgagacgctgtccgccatcaaccccgtccacttcgccagctatctcgaaggtgacggcttccacgtcgtcagcgcctcaccggagcggctggtgcgtgtggagaacggccgagccaccacgcggcccatcgccggaacgcgccgacggggcacgcccgaagaggaagcgcgcttcgtccacgagctgcgcaccaacgagaaggagcgcgccgagcacgccatgctggtggacctggagcgcaacgacctgggccgggtgtgcacctatggctcggtcgaggtgacgaagctgatggacatcgtcgagtacgcccacgtcctccacattgaatcggaggtcgtcggccagctcgcgccgggcgtggagccgctggacgtggtgggcgcgctcttcccaggcgggacgattacgggcgtgccgaagatacgcacgatgcaaatcatcaccgagctggagccacatgcgcgcgggctctatacgggctcgctggggtacctgtccttcacgggtgatttggatttgaacatcgtcatccgcacgctggtggtgaaggacggccaggcctacgcgcaggtgggaggcggcatcgtccacgactcgcagccccgacaggaatacaaggagacgctcaacaaggcgcgctcgcagctcctggccctggcatcggtggggaggccgggatga

SEQ ID NO: 76577 - protein, 484 aa, Myxococcus xanthus DK 1622
MSRPPSPTRFPDRTSFETFVAQGYNQVPVVRRLPLGALRPVDLLRALPAESRFLLESTRVSAEGRYSFLGAKPFLRFTAKEGQCFIDGALQQGTPQEVLRSLLRRWRGVRHPGMPLFCGGAVGFFGYEAAHCFESLPRHPRDDLHLPEIDLSFIDTFLTVDHHEGQLLLVATGSDWEDCERRLDALEVHVRTATPTAPRVPPAMDGPTSAYRSNFTLDAYLDAVERVREYIRAGDTYQVNLSQRLEVDFPGEPLALYETLSAINPVHFASYLEGDGFHVVSASPERLVRVENGRATTRPIAGTRRRGTPEEEARFVHELRTNEKERAEHAMLVDLERNDLGRVCTYGSVEVTKLMDIVEYAHVLHIESEVVGQLAPGVEPLDVVGALFPGGTITGVPKIRTMQIITELEPHARGLYTGSLGYLSFTGDLDLNIVIRTLVVKDGQAYAQVGGGIVHDSQPRQEYKETLNKARSQLLALASVGRPG

SEQ ID NO: 76578 - DNA, 1494 bp, Myxococcus xanthus DK 1622
  CDS (1)..(1494): transl_table=11
atggatgcacaggagcggaagtcagcctatcggcagcgcgcggagcagggtgaggcggtgccggtgtcggtggagctgccggcggacctcgatacgccgctgtcggcctatctgaagctgggcggtggttcgcgcggcttcatcctcgagtcgtgttacggcggcgagcggttcggccgctacagccacatcggcgcggagcccgcgggccgcgtgcgcttggaccggaacggtgccaccttgtggcgcggctcgcgcgaggagcgccgggacggcaatcccctggatgtgctccgccagctctggcgcgagctggccgtggcccggctccctggagaggcccccttcctcggcgggctcgtggggtacatgggctacaactgcttctcgtggctggagccctcggtgccggaccggcaccccagcgacatctccttcccggactcggaatggctggtgtgcgaggacttcgtcacgcacgacacccgcaccgggacgctcaaggccaccgccattgcccgtccgtcgctgcacggcagcgtggccgccgcgctgaaggacgcggaggggcgcgcgcaggccatggcggatcggttgttgaaaccactgccaccagaggcctatgcgcccgagccgcgcatgcgtggggacgcggcgcctaccgcgtgctgggaccgcgcggggtatgagtcggcggtggctcaggcgcaggagtacatccgcgccggagacatcttccaggtcgtgctcgcgcgccgcttcgaatcccggggcgcgccgccgccgctgtcgctctaccgcgcgctgcggcgggtgaatccatcgccgtaccttttcctcgtggagctgggcgaggcccgcgcgctggtgggcgcgtcgccggagttgctggtgcaggtgcgcgacggggacgtggtggtgcggcccatcgccggcacccggcgccgtggtgcgtccgaggccgaggacctggcgctggagaaggagctgctcgcggacgagaaggagctcgccgagcacatcatgctggtggacctggggcgcaacgacgtgggccgcgtggcggcgcctggctcggtgcgcgtcgaggacatgatgctcatcgagcgctacagccacgtgatgcacatcgtgtcgcaggtgcgcggcaagctcgacgcgaagtacgacgcgctggatgcgctggccagcaccttccccgcgggcacggtgtcgggcgcgcccaagattcgcgcgatgcaaatcatcgacgagttggaggtccagcggcgcgggccctattcgggcgcggtgggctacctgtccttctgcggcacgctggacgtggcgattgcgctgcgcaccttcttcgtggacggagaccggacgatgtggacctcgggcgcgggagtggtcgcggactcggtgccgtcgaaggaagcggacgagacggaagccaaggcgggcgccatggccgccgcgctgcggctggcgcgcgagggaggtggccggtga

SEQ ID NO: 76579 - protein, 497 aa, Myxococcus xanthus DK 1622
MDAQERKSAYRQRAEQGEAVPVSVELPADLDTPLSAYLKLGGGSRGFILESCYGGERFGRYSHIGAEPAGRVRLDRNGATLWRGSREERRDGNPLDVLRQLWRELAVARLPGEAPFLGGLVGYMGYNCFSWLEPSVPDRHPSDISFPDSEWLVCEDFVTHDTRTGTLKATAIARPSLHGSVAAALKDAEGRAQAMADRLLKPLPPEAYAPEPRMRGDAAPTACWDRAGYESAVAQAQEYIRAGDIFQVVLARRFESRGAPPPLSLYRALRRVNPSPYLFLVELGEARALVGASPELLVQVRDGDVVVRPIAGTRRRGASEAEDLALEKELLADEKELAEHIMLVDLGRNDVGRVAAPGSVRVEDMMLIERYSHVMHIVSQVRGKLDAKYDALDALASTFPAGTVSGAPKIRAMQIIDELEVQRRGPYSGAVGYLSFCGTLDVAIALRTFFVDGDRTMWTSGAGVVADSVPSKEADETEAKAGAMAAALRLAREGGGR

SEQ ID NO: 76580 - DNA, 1530 bp, Rubrobacter xylanophilus DSM 9941
  CDS (1)..(1530): transl_table=11
gtgacaggcaccgctaggctggagctggtcccctctttgggcgaggcgcggaggctcgcccgcgcccacgacgtggtccccgtgtacgccgagttcatcggggacctggagacccccatctccgcggtgttgcggttcgccggcgaggagcacgtctttttgctggagagcgccgaggcggccgagcgcttcgggcgctactcctttctcggcttcgacccaaagcgcaccctctcctaccggcgggggacctacaccgtggtggacgccgacggggtgcgggagctccccgcgaaggaccccttccgggggctcgccgccatcgtggggcgaaagagcgtcgccccgctgccccaccttccggccttcgtcgggggggcggtgggctacttcgcctacgacgctgtgcgctacctggagcggctgccggaggcccccccggacgacctcggcgtcccggaggcgtacttcgccatcaccgacacgctggtggtcttcgaccacctcaggcacaaggtgctggtgatctcgctggtcgacgcctccaggctgcgcgacgtgcagggcgaggggttcgccgcggcctaccgccgggccgccgacgacatccggcgggttgccgagcagctcgcggccccgctcgagcgcgggaggggcctctcctccggcccgccggggaggctcgagatctcctccaacttcacccgcggggcctacgaggcggccgtcgagcgggccaaggagtacatccgggcgggggacgccttccagatagtgccctcccagcgctttgcggccgaggtgggcgacctggacccgctgctgctctaccgggggctcaggacggtgaacccctccccctatatgacctacctgaagttcggtgacctggcgctggtgggggcctccccggagccgctggtgcgggtcgaggggcggcgggtgatgacccgccccatagcgggcacccggcggcgcggggagagcccggaggaggacgcggcgctggccggggagctgctcgccgacgccaaggagcgggcggagcacgtgatgctcgtggacctcgggcgcaacgatctggggcgggtctgcgaggtcggaagcgtggaggtcacgagctttatggagatagagcgctactcgcacgtgatgcacatcgtctccacggtggagggaaacctgcgggagaacctcacggcgctcgacgccctcgccgcggccttccccgcggggaccgtctcgggggccccgaaggtgcgggcgatggagatcatcgacgagctcgagccaacccgccgcgggccctacgcgggggccaccggctactacggggtggacgggcggctggacacctgcatcaccctgcgcacggcgctgctgaagggcggccgcgcctacttccaggccggcggcggggtggtcgccgactcggtcccgaagctggagtacgaggagacccgcaacaaggcgcgggcgatggagcgggcgctggaggtggccaggagcccgcggctctggctgggctga

SEQ ID NO: 76581 - protein, 509 aa, Rubrobacter xylanophilus DSM 9941
MTGTARLELVPSLGEARRLARAHDVVPVYAEFIGDLETPISAVLRFAGEEHVFLLESAEAAERFGRYSFLGFDPKRTLSYRRGTYTVVDADGVRELPAKDPFRGLAAIVGRKSVAPLPHLPAFVGGAVGYFAYDAVRYLERLPEAPPDDLGVPEAYFAITDTLVVFDHLRHKVLVISLVDASRLRDVQGEGFAAAYRRAADDIRRVAEQLAAPLERGRGLSSGPPGRLEISSNFTRGAYEAAVERAKEYIRAGDAFQIVPSQRFAAEVGDLDPLLLYRGLRTVNPSPYMTYLKFGDLALVGASPEPLVRVEGRRVMTRPIAGTRRRGESPEEDAALAGELLADAKERAEHVMLVDLGRNDLGRVCEVGSVEVTSFMEIERYSHVMHIVSTVEGNLRENLTALDALAAAFPAGTVSGAPKVRAMEIIDELEPTRRGPYAGATGYYGVDGRLDTCITLRTALLKGGRAYFQAGGGVVADSVPKLEYEETRNKARAMERALEVARSPRLWLG

SEQ ID NO: 76582 - DNA, 2190 bp, Mesorhizobium sp. BNC1
  CDS (1)..(2190): transl_table=11
atgagcttggaagtcttggaagacggcagcgagcgcttcgtcacggcgggcggtatcgcgattacccgttcgcgcatggaggtgccttacggcggcgcaatcgacgcctatatcgacgcgctcgacagccgccgaggggcggtgttttcctccaattacgagtatccaggccgctatacgcgctgggatacggccattgtcgatcctccacttgtgatttccgcgcgtggccgcgccatgaagatcgaggcgctgaacaggcgcggtgaagcgatgctgcctgccatcgccggcgtcgtcgaggcgctgccggaggtaaccatggccctcgcgcagccgcggctgatcacggtcgatgtgtccgagccgacggaggtctttgcggaggaggagcgctcccgcgttccttccgtcttcaccgtgcttcgcgccatcaccaatctcttccacacggacaacgacagcaatctcggactctacggcgcgttcggctacgatcttgccttccagtttgacccggtgaagctgcggctcgaccggccggagagccagcgcgatctggtgctgttcctgcccgacgagatcctcgtggtcgatcactacacggccaaggcatggcatgaccgctacgactatgcgggcgagggcttttccaccgagggcctgccgcgggagggccgtgaggagccgttccagaagccgttgaaagtgccgccgcgctgcgatcatgagcctggcgaatatgcgagcctcgtcgagaaggcgaaagagagttttcggcgcggcgacctcttcgaggtggtgccggggcagatgtttttcgagcaatgccagaacccgccctcggccatctgccgcaggctgaagcagatcaatccatcgccctattccttcttcatcaatctcggtgagggggaatatctcgtcggcgcctcgccggagatgttcgtgcgtgtgtcgggccggcgcgttgagacctgcccgatctccggcaccatcaagcgcggcgacgacgcgatctccgattcggagcagatcctgaagctcttgaactccaagaaggacgagtcggagctgacaatgtgctcggatgtcgaccgcaacgataagagccgcgtgtgcgagccgggctcggtgcgcgtgatcgggcggcggcagatcgaaatgtactcgcgcctgatccacacggtggaccatatcgaaggccggctgcgcgagggcatggacgcctatgatgcgttcctcagccatgcctgggcagtcaccgttactggcgcgccgaagctctgggccatgcgtttcatcgaggagaacgagaagagcccgcgcgcctggtatggcggggcggtcggcatggtccatttcaacggcgacatgaacacgggcctgacgctgcgcaccatacgcatcaaggacggcatcgccgaagtgcgggcaggggcgacgcttctcttcgattccaatggagaggaagaggaggccgaaacggaactcaaggcttctgcaatgctttcggccattcgcgacgcggggaagacgaatatggccaatgaagaacgagagacagcgcgcgtgggcgagggcgtgaaaatcctcctggtggatcacgaggactccttcgtgcacacgctcgcaaactatttccggcagacgggcgcggaggtgacgaccgtgcgcacgccggttgccgaaagcgtgttcgagcgcgtgaaaccggatcttgtggtgctttcgccggggccgggcacgccggaggacttcgactgcacggctacgatcaaaaaggcgcgcgggcgggaactcccgattttcggcgtctgtctcggcctgcaggcgctggtggttgcctatggcggcgagctgcgccacctgcacgagccgatgcacggcaagccctcgcgcatccgcgccggccacaacagccttatcttctcgggtctgccgcaggaggtgacggtggggcgctatcactcgatcttcgccgatccggtgcgcctgccgaagcccttcgtcgtcacggcagagacggaggacggcgtggtgatggcgatcgagcatgagagcgagccggtggcggctgtgcagtttcaccccgaatccatcatgacgctcggccacaatgccggcatgcgcatgatcgagaacgttgtggcgcatctgccgcggaaatccaaggtgaaggcggcgtga

SEQ ID NO: 76583 - protein, 729 aa, Mesorhizobium sp. BNC1
MSLEVLEDGSERFVTAGGIAITRSRMEVPYGGAIDAYIDALDSRRGAVFSSNYEYPGRYTRWDTAIVDPPLVISARGRAMKIEALNRRGEAMLPAIAGVVEALPEVTMALAQPRLITVDVSEPTEVFAEEERSRVPSVFTVLRAITNLFHTDNDSNLGLYGAFGYDLAFQFDPVKLRLDRPESQRDLVLFLPDEILVVDHYTAKAWHDRYDYAGEGFSTEGLPREGREEPFQKPLKVPPRCDHEPGEYASLVEKAKESFRRGDLFEVVPGQMFFEQCQNPPSAICRRLKQINPSPYSFFINLGEGEYLVGASPEMFVRVSGRRVETCPISGTIKRGDDAISDSEQILKLLNSKKDESELTMCSDVDRNDKSRVCEPGSVRVIGRRQIEMYSRLIHTVDHIEGRLREGMDAYDAFLSHAWAVTVTGAPKLWAMRFIEENEKSPRAWYGGAVGMVHFNGDMNTGLTLRTIRIKDGIAEVRAGATLLFDSNGEEEEAETELKASAMLSAIRDAGKTNMANEERETARVGEGVKILLVDHEDSFVHTLANYFRQTGAEVTTVRTPVAESVFERVKPDLVVLSPGPGTPEDFDCTATIKKARGRELPIFGVCLGLQALVVAYGGELRHLHEPMHGKPSRIRAGHNSLIFSGLPQEVTVGRYHSIFADPVRLPKPFVVTAETEDGVVMAIEHESEPVAAVQFHPESIMTLGHNAGMRMIENVVAHLPRKSKVKAA

SEQ ID NO: 76584 - DNA, 1416 bp, Cytophaga hutchinsonii ATCC 33406
  CDS (1)..(1416): transl_table=11
atgaaaacatatacattaaagcttacctataaaaaaatacttgccgatactactacaccggtaagcatgtatttaaaattgcgcgacaagtttccgcaaaccatgctgctggaaagttccgattaccatggcaaccaggatatttattcctatatctgctgcaatcccattgcagggataaaaattgacaaaggatattttacagaatattatccggatggcacattgaataatctggatattgaagaaacaaacgttcctgaacagattaccaaatttgtaaaacgatttaaggtagatgaaaagaagtttccatttaccagcagcggaattttcggttacacggcatacgacgccgttcgttatttcgaggatattaaaatcaaaacgtttgaaaccgattaccgcaaaatacccgatctgcaataccacatctaccgctttatattagtattcaaccattttaacaatgaattaaccattgttgaaaattacccggaaggcgttgaatacacggacaacagctccatcgaacagattgaatcttatttaaacagccgtaatttcgcttcatacgaattccgtctggcagatcgggaagagtcgaattttacggatgaagaatttttaaaagtattacaaaaaggtaaagatcattgcagaagaggcgatgtgttccagatcgtactttcgcgcagattctccagacaatatatcggcgatgattttaacgtgtacagaagtttgcgttcaataaatccttccccgtatttattttatttcgattacggcagtttccgtttattcgggtcttctcctgaggcgcagattgtggtaaaagaagataaagcaagcatctacccgatcgccggtacattcagacgcacaggagacgacataaaagattatgatcttgccatgcagttgttaaacgatccgaaagaaaattcggaacacatcatgctggtagatctggcacggaatgacctgagcagacattgccacgatgtggaagttgaaacattaaaagaagttcaatactattcgcacgttattcacctggtttcaaaagtaacaggcaagatggataataaagatgcattcatgaatattgttggtgataccttcccggcaggtaccttatcaggcgccccaaaacataatgccatgcagatcattgaccgcaatgaacacggcaaccgtggtttctatggcggtgcaatcggtttcatcggtttcaatggtgaattcaatcacgccattatgatccggaccattatgagtaaagacaatattttattctaccaggcgggtgccggtgttgtagacttatcagacattaacagtgaactgcaggaagtaaacaacaagctggccgctcttaaaaaagccattgaaatggctgaaaaaatttaa

SEQ ID NO: 76585 - protein, 471 aa, Cytophaga hutchinsonii ATCC 33406
MKTYTLKLTYKKILADTTTPVSMYLKLRDKFPQTMLLESSDYHGNQDIYSYICCNPIAGIKIDKGYFTEYYPDGTLNNLDIEETNVPEQITKFVKRFKVDEKKFPFTSSGIFGYTAYDAVRYFEDIKIKTFETDYRKIPDLQYHIYRFILVFNHFNNELTIVENYPEGVEYTDNSSIEQIESYLNSRNFASYEFRLADREESNFTDEEFLKVLQKGKDHCRRGDVFQIVLSRRFSRQYIGDDFNVYRSLRSINPSPYLFYFDYGSFRLFGSSPEAQIVVKEDKASIYPIAGTFRRTGDDIKDYDLAMQLLNDPKENSEHIMLVDLARNDLSRHCHDVEVETLKEVQYYSHVIHLVSKVTGKMDNKDAFMNIVGDTFPAGTLSGAPKHNAMQIIDRNEHGNRGFYGGAIGFIGFNGEFNHAIMIRTIMSKDNILFYQAGAGVVDLSDINSELQEVNNKLAALKKAIEMAEKI

SEQ ID NO: 76586 - DNA, 1347 bp, Clostridium perfringens ATCC 13124
  CDS (1)..(1347): transl_table=11
ttgaattttgaaattaaggaaatagaaaataagcttaagccacatgaagtatattctttatttaaagatgaaataaacagtatatttttagatagttcaaaggaagatagcgaattttctttatattcatttataggattaaatccttttaaaaagtttagctctaagggaaatgagatttttatagatgaaaaactagtcttaggagatccttttaaaaaattagaagagcttattttagaatataaaataaattataatagtgagataccttttttaggaggtgctatgggctatttttcttatgatataggaagagttattgaagatatgcctaaaagtgctaaagatgatgtgtgtattccagatagttattttttattttatgataatgtaataatatttgatttgagaaatcaaaaaacatatataacagccctaggaattaaggaagagtcagaaaaaagtatatctaagatttatgaaagaataaaagataagtatataaatttaaatatcagcttagataaaaatactgagtttacttcaaatttttcaagagaagaatatataaattcagtaaaaaaggttaaagagtacataaaagaagggcatacatatattgcaaacctaacacagagattttcctgtgattttaattctgatccttttgatacatatataagtttaagaagtataaataaagcccctttttcctgttatttaaatttagaaggttttcaaattataagttcttctcctgaaaggtttttaaaggtgtttaataataaggttgaaacaagaccaattaaaggcacaagaccaagaggaaaagataaattagaagatgaaaagaataaaaaagaacttttaaatagtgaaaaggataagtcagagcttttaatgattgttgatttagagagaaatgacttaagtaaggtatgcaaacctttttctgttaaggttacagaattatttaaattagaggaatatgctacagtatttcacttagtttctacagttataggagaactaaaggaagatgttagttctgtaaaatgtataagagaatgttttccaggaggttctataacaggcgctcctaaaataagaagtatggagataatagaggaactagaaggccttagaagagggatttatactggggccataggttattttgatttaagaggaaattgtgattttaatatagtaataagaactatattaacaaaagataataaggcctattttggagtaggtggaggcataactattgaatcagaagaagagatggaatatgaggaaactttagataaggcaaaggctttaatgagagtattataa

SEQ ID NO: 76587 - protein, 448 aa, Clostridium perfringens ATCC 13124
MNFEIKEIENKLKPHEVYSLFKDEINSIFLDSSKEDSEFSLYSFIGLNPFKKFSSKGNEIFIDEKLVLGDPFKKLEELILEYKINYNSEIPFLGGAMGYFSYDIGRVIEDMPKSAKDDVCIPDSYFLFYDNVIIFDLRNQKTYITALGIKEESEKSISKIYERIKDKYINLNISLDKNTEFTSNFSREEYINSVKKVKEYIKEGHTYIANLTQRFSCDFNSDPFDTYISLRSINKAPFSCYLNLEGFQIISSSPERFLKVFNNKVETRPIKGTRPRGKDKLEDEKNKKELLNSEKDKSELLMIVDLERNDLSKVCKPFSVKVTELFKLEEYATVFHLVSTVIGELKEDVSSVKCIRECFPGGSITGAPKIRSMEIIEELEGLRRGIYTGAIGYFDLRGNCDFNIVIRTILTKDNKAYFGVGGGITIESEEEMEYEETLDKAKALMRVL

SEQ ID NO: 76588 - DNA, 1587 bp, Rhodococcus sp. RHA1
  CDS (1)..(1587): transl_table=11
atgcacggcgagcccaccacgattcccgcacccgagtccgccgccaccccggccgacgacgggtccgactcgactacgacgcgcgagcagttccacgctctcgccgccgaacaccgggtggtcccggtgacgcgcaaggtgttggcagacgcggaaactccgctgtcggcgtacaccaagctggcggcgaaccggccggggaccttcctgctcgagtcggcggagaacggccgatcgtggtcgcgatggtcgttcatcggcgcgggcagtcccgccgcgctcaccgtcgtcgacggtgaagccgcctggtacggcaacgtcccggcgggcgtcccgtccggcggcgatccgatcgcggccctcggccggacgctggaactgctccgcaccgagcggctgcccgacctgccgccgctgaccggcggcatggtgggcttcctcggctacgacgcggtgcgccggatcgagcgcatcggcgagcacaccaccgacgatctgcagatccccgagatggtcatgttgctggcgacggatctcgcggccgtcgaccaccacgagggcgccatcaccctgatcgccaacgcggtcaactgggacggcaccgacgaacgtgtcgacgaggcctacgactccgcagtggagcggctggaccggatgacgcacgccctgtcggcgccggcgtcgtccaccgtgtccacgttcgcgaagcccgcccccgactaccggcgtcagcgcaccaccgaaggattcggcgccgacgtgcagaaactcgtgggagacatcgaggcgggcgaggcatttcaggtggtgctgtcgcagcgcttcgagatcgactgcaccgcggacccgatcgacgtctaccggatgctgcgcgcctccaacccgagcccgtacatgtacctgctcaacgtgccgaacggcgacggcgagaccgcgttctcgatcgtcggttcgagcccggaggccctggtgaccgtgtcggaaggcgtcgccaccacgcacccgatcgcgggaacccggtggcgcgggcacaccgaggaggaggacatcctgctcgagaaggacctgctcgccgacgagaaggagaacgcggagcacctcatgctcgtggacctgggccgcaacgacctcgggcgcgtgtgcgaaccgggcacggtgaaggtccacgactaccgccacatcgagcggtacagccacgtgatgcatctcgtctccaccgtcacgggtcacctcgcggacggtaagcatgccttggacgccgtcaccgcgtgtttcccggcgggcacgctgtcgggtgcgccgaaggtccgggcgatgcagctgatcgaggaactcgaacccacgcgccggggcatctacggcggcatcatcgggtacctcgacttcgccggcgacgccgacacggccatcgcgatccggaccgcgctgatcaaggacggcatcgggtacgtccaggcgggtgcgggcgtcgtcgccgactcgaaccccgagtacgaggacacggaggcgcggaacaaggcgatggcggtgttgagcgcgatcgcggcggcgcacacgctgaagaccctgggaggcgacacgcagtga

SEQ ID NO: 76589 - protein, 528 aa, Rhodococcus sp. RHA1
MHGEPTTIPAPESAATPADDGSDSTTTREQFHALAAEHRVVPVTRKVLADAETPLSAYTKLAANRPGTFLLESAENGRSWSRWSFIGAGSPAALTVVDGEAAWYGNVPAGVPSGGDPIAALGRTLELLRTERLPDLPPLTGGMVGFLGYDAVRRIERIGEHTTDDLQIPEMVMLLATDLAAVDHHEGAITLIANAVNWDGTDERVDEAYDSAVERLDRMTHALSAPASSTVSTFAKPAPDYRRQRTTEGFGADVQKLVGDIEAGEAFQVVLSQRFEIDCTADPIDVYRMLRASNPSPYMYLLNVPNGDGETAFSIVGSSPEALVTVSEGVATTHPIAGTRWRGHTEEEDILLEKDLLADEKENAEHLMLVDLGRNDLGRVCEPGTVKVHDYRHIERYSHVMHLVSTVTGHLADGKHALDAVTACFPAGTLSGAPKVRAMQLIEELEPTRRGIYGGIIGYLDFAGDADTAIAIRTALIKDGIGYVQAGAGVVADSNPEYEDTEARNKAMAVLSAIAAAHTLKTLGGDTQ

SEQ ID NO: 76590 - DNA, 1536 bp, Trichodesmium erythraeum IMS101
  CDS (1)..(1536): transl_table=11
atgatttttccagacttctctgaattttcccgactagcaaaacaaggtaactttgtccctgtctaccaagaatggatagcagaccttgatactcctgtttcttcttggtatcgggtgtgtaaggatcaaccctacagttttttactagaatcagttgaaggtggggaaaaaatcggacgttatagttttctaggttgtgatccattgtggatcttagaagctaggggcgatcatactacccaaacttatcgggatggcaaagttaaaacttttgaggggaatccctttgatgttctaaataactgtctccaagactataaacctgtaaagttacctcaattgccttctggtattggggggttatttggtttctggggttatgagttaattcggtggatcgaacctcgtgttggggtttatcctgctactgaaaatgatttgcctgatggtttgtggatgcaggtggataatttgttggtttttgaccaggtaaagcggaagattttggcgatcgcttacgcggatatacgttctccagaggcaaacttagaattagcttatcaacaaacttgcgatcgcgtttctgagttagtagataaattacgatctcccctatcacgacaaaatactttactagaatggcaaccgcctgaaggaaaagacaaagaatttacagatatacataccagcaacacaccccgtgcaaaattttgtgctaatgtggaaaaagcgaaagaatacatcaaagcaggagatatttttcaggtagttatttcccaacaactttctaccgaatatacaggagaaccttttgctttgtatcgttccctgcgactaataaacccttccccatatatggcttattttaattttggtaattggcaagttattggttcaagtccagaagttatggtgaaagcggaaaaaacccctgatggcaaacgccttgcaactgttagacctattgctggtactcgtcgtcgtggtaaaacttacgcagaagataatgctttagctgaggagttgttgcaagatccgaaggaaagagcagaacatattatgttagttgatctaggtcggaatgatttggggcgggtttgtcaagtgggaacagtaaaggttgatcagttaatggtaattgaacgttattctcatgtgatgcatattgtgagtaatgtagtgggagaattggcagatgatcgaactgcttgggatttattgaaagcttgttttcctgcgggaactgtgagtggtgcgccgaaaattcgagcgatggaaataattaatgaattggaaccttgtcggcggggtgtttattctggagtttatggctattatgattttgagggtcagttgaatagtgctattactattagaactatggttgtgaggccgaaaaataatggaacgcacactgtaactgtgcaagcgggagctggtttagttgcagattctgtagcggaaacagagtacgaagaaactattaataaagctagaggtttgttagaggcaattaggtgtttgaatagtaattaa

SEQ ID NO: 76591 - protein, 511 aa, Trichodesmium erythraeum IMS101
MIFPDFSEFSRLAKQGNFVPVYQEWIADLDTPVSSWYRVCKDQPYSFLLESVEGGEKIGRYSFLGCDPLWILEARGDHTTQTYRDGKVKTFEGNPFDVLNNCLQDYKPVKLPQLPSGIGGLFGFWGYELIRWIEPRVGVYPATENDLPDGLWMQVDNLLVFDQVKRKILAIAYADIRSPEANLELAYQQTCDRVSELVDKLRSPLSRQNTLLEWQPPEGKDKEFTDIHTSNTPRAKFCANVEKAKEYIKAGDIFQVVISQQLSTEYTGEPFALYRSLRLINPSPYMAYFNFGNWQVIGSSPEVMVKAEKTPDGKRLATVRPIAGTRRRGKTYAEDNALAEELLQDPKERAEHIMLVDLGRNDLGRVCQVGTVKVDQLMVIERYSHVMHIVSNVVGELADDRTAWDLLKACFPAGTVSGAPKIRAMEIINELEPCRRGVYSGVYGYYDFEGQLNSAITIRTMVVRPKNNGTHTVTVQAGAGLVADSVAETEYEETINKARGLLEAIRCLNSN

SEQ ID NO: 76592 - DNA, 1533 bp, Synechococcus sp. CC9311
  CDS (1)..(1533): transl_table=11
atgctcagccccgaccgctccgcctttcttgaagcagctcgctgcggggcaacgtttatccccgtagcccatagctggcccgctgacctagaaacccctctcactacttggctcaaggtcggtgaaggccacccacctggggtcttactcgaatccgtcgaaggtggcgagaaccttggacgttggagtgtgattgcctgtgatcccttgtggacactctcagccagaggagacgttctgacccgccgctggcgagatggctacgaagagagctttcaaggcaatcccctagaggttcttcgtgaatgcacgaatgcctacagacccgtctctcttccaggccttccacccctagggcagttgtatgggatgtgggggtatgagctcatccgttggatagaacccagcgttcccgtgcacaaagcagacgagaacgctccgcctgatggcgtttggatgttgatggacagcatcttgatcatcgatcaagtgaagcgtttgatcacggcagtggcttacggagatttgagcaataccagggccgcggccaaaagcgcagatcaagcctgggacggtgccatggggcgaatccttgggcttgaaaatcgcatggcatcacctctgccccaggtgcgtcctctgcgctggaagcctgctgcgaggcctacaccagaaacagaaagcaatcgatctcctgagaactaccaagaagccgttgccacggcccaagaacacatcgccgcaggagacgctttccagctcgtgatcagccaaaggctggaaactcgcgtctcgcagccccccttagaggtctaccggagcttgaggatggtcaatccatccccttacatggctttttttgatttcggagactggtacctgatcggttcaagccctgaagtcatggtcaaggcagaaccagaccagggaggcatacgtgccagcctgagacccatcgccggcacgcgcccacgcgggcgcaatgagctggaagatcgaaattttgaagtcgatctgcttgctgatccaaaagaacgggctgaacacgtgatgttggttgaccttggccgcaatgacttaggcagggtttgcaccgctggcacggtggatgtcaaagagctgatggtgatcgagcgctactcccatgtcatgcacatcgtgagccaagttgaaggacgactggctcaaggacgagacatctgggacttgctgatggcctcgttcccggcgggaacggtgagcggcgctccaaaaatcagggccatgcagctgattcatcagctggagcccgatgctcgagggccttactccggcgtctacggttctgtggatctagcaggcgctctcaacacggcaatcaccattcgcacgatggtggttcgtcctcaccctgagggggggtggaacattcaagtacaagccggtgctggcgttgtcgccgattccgacccagcgtccgagtatcaagaaacgctgaacaaggcccgcgccatgttgaccgctctcgcttgcctcgaggatccgaagtcatga

SEQ ID NO: 76593 - protein, 510 aa, Synechococcus sp. CC9311
MLSPDRSAFLEAARCGATFIPVAHSWPADLETPLTTWLKVGEGHPPGVLLESVEGGENLGRWSVIACDPLWTLSARGDVLTRRWRDGYEESFQGNPLEVLRECTNAYRPVSLPGLPPLGQLYGMWGYELIRWIEPSVPVHKADENAPPDGVWMLMDSILIIDQVKRLITAVAYGDLSNTRAAAKSADQAWDGAMGRILGLENRMASPLPQVRPLRWKPAARPTPETESNRSPENYQEAVATAQEHIAAGDAFQLVISQRLETRVSQPPLEVYRSLRMVNPSPYMAFFDFGDWYLIGSSPEVMVKAEPDQGGIRASLRPIAGTRPRGRNELEDRNFEVDLLADPKERAEHVMLVDLGRNDLGRVCTAGTVDVKELMVIERYSHVMHIVSQVEGRLAQGRDIWDLLMASFPAGTVSGAPKIRAMQLIHQLEPDARGPYSGVYGSVDLAGALNTAITIRTMVVRPHPEGGWNIQVQAGAGVVADSDPASEYQETLNKARAMLTALACLEDPKS

SEQ ID NO: 76594 - DNA, 1710 bp, Shewanella sp. MR-4
  CDS (1)..(1710): transl_table=11
atgaccctaaagacatttaatcaggttaaccaagttgatggcgaaaatgttgcctcgtctcaacagacattcgcacgttcacatacgctcaaggctgcgctggcataccatagcgacccactgcgtctgtaccagcacatcactcaagatgcgccccataccatgttgttagaatcggcggaaatcgacagcaaggaaaatcttaagagcatggtgatgacccatgcggcgctgatgatccgctgcgacggttatcgtttacgctttagcgcactgagtgacaatggcatcagtttactctcccccatcgagcaattttttactgctcgcgcaagccaaactctatgccaacgcgatggccacaacttagtggtcacgctgcaaaaggataccgagcttaaggatgaagatgcgcgcttaaaatccacctcacccctcgatggtttgcgcttgtttgtaaagcatatcgactgcggcgctcatactgacagccaatccaagccagcattcgaagacttatttttaggtggcgtgctcgcctacgatttgattgataccgtcgagccactgcctgaagcaccaaatggtgcaaatgattgtcctgattatttattttatctcgccgaaaccttaattcttatcgatcacaagcaaaagcacgccgagctaatcacccaccacttcagtgaaggcacagaaaagcattccgttgtgacccaagccttagccgagcgagcagagaatatccgcgcccaatgtgaagccttagccaagagtgcaacacctgcacccgccctcgttggcataacggccacagagcaagtgaatgtcagtgatgaggacttcaagcaaactgttatcgatttgaaagaacacattattgccggcgacatcttccaagtcgtgccttcacgcagctttagcctgccctgccccaataccttaggcgcttaccgcgcgctgcgattaaccaaccccagcccctatatgttttatttcaggggccatgacttcacccttttgggcgcctcgcccgagagcgcgctgaaatatgaagccagcaacaatcaagtcgaagtctacccgattgcaggcacccgtaagcgcggcaaaaccgccagcggcgagattgatttcgacctcgatagccgtatcgaactcgaattgcgtttggataaaaaagagctttccgaacacttaatgttggtcgatttagcccgtaacgatattgcccgaatcagccaaagcggcagtcgcaaagtggccgagttacttaaagtcgaccgttattcccacgtgatgcacttagtcagccgcgtcacaggtcaactacgccaagacttagatgcactccacgcctaccaagcctgcatgaatatgggcacgctagttggcgccccgaaagtgcgcgcctcgcaactcgtacgtcaggcagaaaagacccgccgaggcagctatggtggcgcagtgggttacctcaacgcccttggggatatggacacctgtattgttatccgctccgcctttgtgaaaaacggcgtggcccatatccaagcgggtgctggcgtagtgtttgattccgatccccagagtgaagccgatgaaacgcgccaaaaggcgcaggcggtgatttctgccatcaagatgggcgctggcttagataaaagccatcaagcaactgcgactacgacgactgaacaaccaagataa

SEQ ID NO: 76595 - protein, 569 aa, Shewanella sp. MR-4
MTLKTFNQVNQVDGENVASSQQTFARSHTLKAALAYHSDPLRLYQHITQDAPHTMLLESAEIDSKENLKSMVMTHAALMIRCDGYRLRFSALSDNGISLLSPIEQFFTARASQTLCQRDGHNLVVTLQKDTELKDEDARLKSTSPLDGLRLFVKHIDCGAHTDSQSKPAFEDLFLGGVLAYDLIDTVEPLPEAPNGANDCPDYLFYLAETLILIDHKQKHAELITHHFSEGTEKHSVVTQALAERAENIRAQCEALAKSATPAPALVGITATEQVNVSDEDFKQTVIDLKEHIIAGDIFQVVPSRSFSLPCPNTLGAYRALRLTNPSPYMFYFRGHDFTLLGASPESALKYEASNNQVEVYPIAGTRKRGKTASGEIDFDLDSRIELELRLDKKELSEHLMLVDLARNDIARISQSGSRKVAELLKVDRYSHVMHLVSRVTGQLRQDLDALHAYQACMNMGTLVGAPKVRASQLVRQAEKTRRGSYGGAVGYLNALGDMDTCIVIRSAFVKNGVAHIQAGAGVVFDSDPQSEADETRQKAQAVISAIKMGAGLDKSHQATATTTTEQPR

SEQ ID NO: 76596 - DNA, 1710 bp, Shewanella sp. MR-7
  CDS (1)..(1710): transl_table=11
atgaccctaaagacatttaatcaggttaaccaagttgatggcgaaaatgttgcctcgtctcaacagacattcgcacgttcacatacgctcaaggcgacgatggcataccatagcgacccactgcgtctgtaccagcacatcaatcaagatgcgccccataccatgttgttagaatcggcggaaatcgacagcaaggaaaatcttaagagcatggtaatgacccatgcggcgctgatgatccgctgcgacggttatcgtttacgctttagcgcactgagtgacaatggcatcagtttactcgcccccatcgagcaattttttagtgctcgcgcaagccaaactcaatgccaacgcgatggccaaaatctaatagtcacactgcaaaaagatactgagcttaaggatgaagatgcgcgcttaaaatccacctcgcccctcgatggtttgcgcttgtttgtaaagcatatcgactgcggcgctcatactgacagccaatccaagcccgcgttcgaagacttatttttaggtggcgtgcttgcctacgatttgattgataccgtcgagccactgcctgaagcaccaaatggtgcaaatgattgtcctgattatttattttatctcgccgaaaccttaattcttatcgatcacaagcaaaagcacgccgagctaatcacccacaacttcagtgaaggcactgaaaagcattccgttgtgacccaagccttagccgagcgagcagagaacatccgcgcccaatgtgaagccttagccaaaagtgcaacgcctgcgcccgccctcgttggcataacggccacagagcaagtgaatgtcagtgatgaggacttcaagcaaactgttatcgatttaaaagaacacattattgccggcgacatctttcaagtcgtgccttcacgcagctttagcctaccctgccccaataccttaggcgcttaccgcgcgctgcgattaaccaaccccagcccctacatgttttatttcaggggccatgacttcaccctgtttggcgcctcgcccgagagcgcgttgaaatatgaagccagcaacaatcaagtcgaagtctacccgattgcaggcacccgtaagcgcggcaaaaccgccagcggcgagattgatttcgacctcgatagccgtatcgaactcgaattgcgtttggataaaaaagaactctccgagcacttaatgttggtcgatttagcccgtaacgatattgcccgaatcagccaaagcggcagtcgcaaagtggccgagttacttaaagtcgaccgttattcccacgtgatgcacttagtcagccgcgtcacgggtcaactacgccaagacttagatgcactccacgcctaccaagcctgtatgaatatgggcactctggttggcgccccgaaagtgcgcgcctcgcaattggtacgtcaggcggaaaagacccgccgaggcagctatggcggcgcagtgggttacctcaatgcccttggtgatatggacacttgtattgttatccgctccgcctttgtgaaaaacggcgtggcccatatccaagcgggtgctggcgtggtgtttgattccgatccacagagtgaagccgatgaaacgcgccaaaaggcgcaagcggtgatttctgccatcaagatgggcgctggcttggatgaaagccatcaaacaactgcgaccacgtcgactgaacaaccaagataa

SEQ ID NO: 76597 - protein, 569 aa, Shewanella sp. MR-7
MTLKTFNQVNQVDGENVASSQQTFARSHTLKATMAYHSDPLRLYQHINQDAPHTMLLESAEIDSKENLKSMVMTHAALMIRCDGYRLRFSALSDNGISLLAPIEQFFSARASQTQCQRDGQNLIVTLQKDTELKDEDARLKSTSPLDGLRLFVKHIDCGAHTDSQSKPAFEDLFLGGVLAYDLIDTVEPLPEAPNGANDCPDYLFYLAETLILIDHKQKHAELITHNFSEGTEKHSVVTQALAERAENIRAQCEALAKSATPAPALVGITATEQVNVSDEDFKQTVIDLKEHIIAGDIFQVVPSRSFSLPCPNTLGAYRALRLTNPSPYMFYFRGHDFTLFGASPESALKYEASNNQVEVYPIAGTRKRGKTASGEIDFDLDSRIELELRLDKKELSEHLMLVDLARNDIARISQSGSRKVAELLKVDRYSHVMHLVSRVTGQLRQDLDALHAYQACMNMGTLVGAPKVRASQLVRQAEKTRRGSYGGAVGYLNALGDMDTCIVIRSAFVKNGVAHIQAGAGVVFDSDPQSEADETRQKAQAVISAIKMGAGLDESHQTTATTSTEQPR

SEQ ID NO: 76598 - DNA, 1509 bp, Alkalilimnicola ehrlichei MLHE-1
  CDS (1)..(1509): transl_table=11
atgcaaccggaacaactgcgtgaactggccgaggccggctacaaccgcgtcccgctggtgcgggagatcctcgccgatctggacaccccgctgtccacctacctgaagctggcccaggggccctattcctatttgttcgagtcggtccagggcggtgagaagtggggccgttattccatcatcggcctgccttgccgcacggtgctgcgggtatggggccaggaggtggaggtcagcgaggatgaccgggtggtggaacgcatcccggtggacgatccgctggcctggatcgaggcctaccaggcccgcttcaaggcggccgatccgcccggctttccgcagatgccccgctttctcggcgggctggtgggctacttcggctacgagaccgtggggtatatcgagccgcgcctggccggccgggccaaccgcgacgagctggaggtgcccgacatcctgttgatggtcagcgaggaggtgctggtcttcgacaacctggccggccgcctctacctggtggtgcaggtggacccggccgccgagggggcgctgacacgcgggcaggcgcgcctggaggagctggccgagcggctgcgccgcgccgactcggtctaccagcggcgccgtcctccacggcgggtgctggagtcggactttcgctcgaacttcacccagccggagtttgaggcggtggtggagcgtatccgcgagtacatcctggccggcgactgcatgcaggtggtgccctcccagcgcatgtcggtgccctaccgggcggagccgctggacctctaccgggcgctgcgctgcaccaatccctccccctatatgtattacctggacctgggcgatttccacgtggccggctcgtcgccggagatcctggtgcggctggaggacgaccaggtgacggtgcggcccatcgccggtacccgacgccgtggccacgacgaggccgaggacctggccctggaggccgatctggtcagtgaccccaaggagctggctgagcacctgatgctcatcgacctggggcgcaacgacgtgggccgggtggcggacaccggcagcgtgcgggtcaccgagcggatggtggtggagcgctactcccacgtcatgcatatcgtctccaacgtcaccgggcggctgcgccccgggcaggggcccatggaggtgctgcgcgctaccttcccggcgggtacggtgagcggggcgccgaagatacgggccatggagatcatcgccgaggtggagccggtcaagcggggggtgtactcgggggcggtggggtacctgtcctggtccggcaacctggataccgccatcgccatccgcaccgcggtgatcaaggacggccgggtgtacgtgcaggcgggcgctggggtggtggccgactcggtgccgcggctggagtggaaggagacgctgaacaagggccgcgccctgttccgcgccgtggagatggccgagcacggcctggataacccaccggcggtggaggcgcactga

SEQ ID NO: 76599 - protein, 502 aa, Alkalilimnicola ehrlichei MLHE-1
MQPEQLRELAEAGYNRVPLVREILADLDTPLSTYLKLAQGPYSYLFESVQGGEKWGRYSIIGLPCRTVLRVWGQEVEVSEDDRVVERIPVDDPLAWIEAYQARFKAADPPGFPQMPRFLGGLVGYFGYETVGYIEPRLAGRANRDELEVPDILLMVSEEVLVFDNLAGRLYLVVQVDPAAEGALTRGQARLEELAERLRRADSVYQRRRPPRRVLESDFRSNFTQPEFEAVVERIREYILAGDCMQVVPSQRMSVPYRAEPLDLYRALRCTNPSPYMYYLDLGDFHVAGSSPEILVRLEDDQVTVRPIAGTRRRGHDEAEDLALEADLVSDPKELAEHLMLIDLGRNDVGRVADTGSVRVTERMVVERYSHVMHIVSNVTGRLRPGQGPMEVLRATFPAGTVSGAPKIRAMEIIAEVEPVKRGVYSGAVGYLSWSGNLDTAIAIRTAVIKDGRVYVQAGAGVVADSVPRLEWKETLNKGRALFRAVEMAEHGLDNPPAVEAH

SEQ ID NO: 76600 - DNA, 1425 bp, Hyphomonas neptunium ATCC 15444
  CDS (1)..(1425): transl_table=11
atgacggcgcgactgatcgtaagacggtgcatcggcgatattgaaacgccggttggcgccatgatgaagctcggagcagacgagccgggcagttttctgtttgagtcgattgccggtggcgagcgccttgggcggtattcgtttatcgggctcaagccagaaatctggttccgcatcaaggatggcgtcgccgagacgagccggtccgctgacttttcggacgctcatcagctggcggagcgtcccgtagacgccctgcgcagttttgctgaagcggcacgcgccgagaccagtgatcccctgccccccatggcgtccggcgcattcggctatgtcgggtacgacatgatccagcatgtcgagccggtgtcgatcacgaaaccagatcagctggacgtgcccgaagcgctgttagttgtcccgcgggtgatggtgatctttgatcacatctatcaggagctgcttctgattggccgggtgaatggcgccgatgagacagagatcgatgcgctcctcgatgaggtggaggcgcggctggaaagcctgccctcgctgcctccgaaaaacggcactgcccaacaagtagacctggtgtcgaacacatcccaagaacgctatttcgagattgtagagacctgccgtgagtacatcaaagctggcgatatattccaggtcgtgcctagccagcgtttctctgccgtgttcaagcagaagtcgataagcctctatcgcgcccttcggcggctgaacccctccgctttcatgttccatatcaatctgggtgatgtacggcttgttgggtcaagcccggaaattctcgtccgcctgcgcgaaggccgggtcgcaatccgtcctattgccggaacccgtccgcgcagcggcaatccggcggaagatgctctgcgtgcagaagaccttctgaacgatcccaaggaacgcgccgagcacctcatgctacttgatctggggcgcaacgatgtgggccgggttgcggcctatggttctgtggaggtcacagaacagttcatcgtcgaacgctacagccatgtgatgcacatcgtcagccatgtcgaaggcaatctgagacccggccttgatgctgtagacgcattattcgcaggatttccggccggaacagtctctggcgccccaaagattcgcgccatgcagatcatcaatgaagtcgaaacacacagccggggtatctacggtggcgccgtgggttatttcggctggaacggcgacctcgacacctgcatcgcgctgcgcaccgccgtgctgaaagacggtatggtgcacatacaggcagggggcggtgtcgtgctcgattccaatgctcagtatgaatatgatgaaacggttcacaaatccggcgccctgaagcgtgctgccgaattggccgcagcttatgagcacgaccaatga

SEQ ID NO: 76601 - protein, 474 aa, Hyphomonas neptunium ATCC 15444
MTARLIVRRCIGDIETPVGAMMKLGADEPGSFLFESIAGGERLGRYSFIGLKPEIWFRIKDGVAETSRSADFSDAHQLAERPVDALRSFAEAARAETSDPLPPMASGAFGYVGYDMIQHVEPVSITKPDQLDVPEALLVVPRVMVIFDHIYQELLLIGRVNGADETEIDALLDEVEARLESLPSLPPKNGTAQQVDLVSNTSQERYFEIVETCREYIKAGDIFQVVPSQRFSAVFKQKSISLYRALRRLNPSAFMFHINLGDVRLVGSSPEILVRLREGRVAIRPIAGTRPRSGNPAEDALRAEDLLNDPKERAEHLMLLDLGRNDVGRVAAYGSVEVTEQFIVERYSHVMHIVSHVEGNLRPGLDAVDALFAGFPAGTVSGAPKIRAMQIINEVETHSRGIYGGAVGYFGWNGDLDTCIALRTAVLKDGMVHIQAGGGVVLDSNAQYEYDETVHKSGALKRAAELAAAYEHDQ

SEQ ID NO: 76602 - DNA, 2190 bp, Rhizobium leguminosarum bv. viciae 3841
  CDS (1)..(2190): transl_table=11
atggtaacgatcctgcgggatgatggtgcggaaatctacgagaccaagggcggcatatcagtcacgcggcagcggcgggcgatcccctacggcgatgcggtctcttcctatgttgacaagctcgacgagcgccgtggcgcagtgttttcgtcgaactacgaatatccgggccgctatacgcgctgggataccgctgtcgtcgatccgccgctcggcatctcttcctttgggcgcgacgtctggatcgaggcctataatgaacgcggcgaggtgatcctcggcttcgtgaccgaacggctgaagacagtgtccgacatcgtgctcggcgcttcctcggcccgccgcctcgacctcgccgtcaagacgccggaccgggtgttcaccgaggaagaacgctcgaagatgccgacggtcttcaccgtgctgcgcgccgtcaccgacctgttttattcgcaggcggatgcgagcctcgggttctacggcgcctttggatacgacatcgccttccagttcgacgcgatcgatctgaagctgacgcgaccctccgaccagcgcgacatggtgctctacctgccggacgagatcctcgtcgtcgacaattacgccgccaaggcttgggtcgaccgttacgacttcgaaaaagacggcgtgacgaccgagggcaaagcgggcgatatcgctgccgagccgttcgtacgcaccgatgctattccgccgaagagcgatcaccggccgggcgaatatgccgagctcgtcaccaaggcaaaggaaagtttccgcaagggcgaccttttcgaagtcgtgcccgggcagaaattcatggagcgctgcgacagcaagccgtccgacatttcaaagcggctgaaggcgatcaatccgtcgccttattccttcttcatcaatctcggccatcaggaatatctggtcggcgcctcgcccgaaatgttcgtgcgcgtttccggccgtcgcatcgagacctgcccgatttcgggcacgatcaagcgcggcgacgacccgatcgccgacagcgagcagatcctgaagctgttgaattccaagaaggacgagtccgagctcaccatgtgctcggatgtcgaccgcaacgacaaaagccgggtctgcgagccgggttcggtcaaggtgatcggccgccggcagatcgagatgtattcgcgcctcatccacacggtcgaccatatcgaagggcggctgcgcgacgacatggacgctttcgacggtttcctcagccacgcctgggccgtcaccgtcaccggcgccccgaagctctgggcgatgcgtttcatcgagagccatgaaaagagcccacgcgcatggtatggtggggcgatcggcatggtcggcttcaacggcgacatgaacactggcctgacgctgcgcaccgtgcgcatcaaggatggtatcgccgaggtgcgcgccggcgcgacgctgctcaacgattccattcctgacgaagaagaagccgaaacagaactgaaggcctctgccatgctttccgccatccgagacgccaagacgggcaattccggcagggtccagcgcgacgtcgcaagcgtcggcaagggcgtcagcatcttgctcgtcgatcacgaggacagcttcgtccacacgctcgccaattacttccgccagacaggggcgacggtttcgaccgtgcgcacgccggtgccggaggaaatcttcgaccggctgaacccggatcttgtcgtgctgtcgcccggacccggaacgccgaaggatttcgactgcaaggcgacgatcaagaaggcgcgggcgcgcaacctgccgatcttcggcgtctgccttggactgcaggcgctcgccgaagcctatggcggggaactgcgccatctggcgctgccgatgcacggcaagccctcgcgcatccgcgtgctggagcctggcatcgtcttctccggccttgccaaggaggtgacggtcggccgctaccactcgatcttcgccgatccctcgacgctgccgcgtgagttcatcatcacggcggaaagcgacgacggcacgatcatgggtatcgaacacgccaaggaaccgatcgccgcggtgcagttccatccggagtcgatcatgacgctcggcggcgatgccgggatgcggatgatcgaaaatgtcgtggcgcatctggcgcgcaaggtgaagacgaaagctgcctga

SEQ ID NO: 76603 - protein, 729 aa, Rhizobium leguminosarum bv. viciae 3841
MVTILRDDGAEIYETKGGISVTRQRRAIPYGDAVSSYVDKLDERRGAVFSSNYEYPGRYTRWDTAVVDPPLGISSFGRDVWIEAYNERGEVILGFVTERLKTVSDIVLGASSARRLDLAVKTPDRVFTEEERSKMPTVFTVLRAVTDLFYSQADASLGFYGAFGYDIAFQFDAIDLKLTRPSDQRDMVLYLPDEILVVDNYAAKAWVDRYDFEKDGVTTEGKAGDIAAEPFVRTDAIPPKSDHRPGEYAELVTKAKESFRKGDLFEVVPGQKFMERCDSKPSDISKRLKAINPSPYSFFINLGHQEYLVGASPEMFVRVSGRRIETCPISGTIKRGDDPIADSEQILKLLNSKKDESELTMCSDVDRNDKSRVCEPGSVKVIGRRQIEMYSRLIHTVDHIEGRLRDDMDAFDGFLSHAWAVTVTGAPKLWAMRFIESHEKSPRAWYGGAIGMVGFNGDMNTGLTLRTVRIKDGIAEVRAGATLLNDSIPDEEEAETELKASAMLSAIRDAKTGNSGRVQRDVASVGKGVSILLVDHEDSFVHTLANYFRQTGATVSTVRTPVPEEIFDRLNPDLVVLSPGPGTPKDFDCKATIKKARARNLPIFGVCLGLQALAEAYGGELRHLALPMHGKPSRIRVLEPGIVFSGLAKEVTVGRYHSIFADPSTLPREFIITAESDDGTIMGIEHAKEPIAAVQFHPESIMTLGGDAGMRMIENVVAHLARKVKTKAA

SEQ ID NO: 76604 - DNA, 1479 bp, Pseudomonas aeruginosa UCBPP-PA14
  CDS (1)..(1479): transl_table=11
atgaatcgcgaagaattcctgcggctggccgccgatggctacaaccgcatcccgctgtccttcgagacccttgccgacttcgacacgccgctgtcgatctacctgaagctggccgacgcgccgaactcctacctgctggagtcggtgcagggcggcgagaaatgggggcgctattcgatcatcggcctgccgtgtcgcacggtgctgcgggtctacgaccatcaagtgcggatcagcatcgatggcatggaaaccgagcgcttcgattgcgccgacccgctggctttcgtcgaggagttcaaggcgcgctaccaggtgcccaccgtgcccggcttgccacgtttcgatggaggcctggtcggctatttcggttacgactgcgtgcgctacgtggaaaaacgcctggccacctgtccgaacccggacccgctgggcaacccggatatcctgttgatggtgtccgatgccgtagtggtattcgacaacctggctgggaagatccacgccatcgtcctcgccgatccctccgaggaaaatgcctacgagcgcggccaggcacgtctggaggagctgctggagcgtctgcgccagccgatcaccccgcgtcgcggcctcgacctcgaggcggcccagggccgggagccggcgtttcgtgccagcttcacccgcgaggactatgaaaacgcggtaggaaggatcaaggactacatcctggccggcgactgcatgcaggtggtgccgtcgcagcgcatgtccatcgagttcaaggcggcgcccatcgacctgtaccgcgcgctgcgctgtttcaatccgacgccctacatgtacttcttcaacttcggcgacttccatgtcgtgggcagctcgccggaggtgctggtacgggtcgaggatggcctggtgacggtgcgcccgatcgccggtacccgtccgcgcgggatcaacgaagaggccgacctggcgctggagcaggatctgctgtcggacgccaaggagatcgccgagcacctgatgctgatcgacctggggcgcaacgacgtggggcgggtgtccgacatcggcgcggtgaaggtcaccgaaaaaatggtgatcgaacgttactccaacgtcatgcacatcgtgtccaacgtcaccgggcaattgcgcgaggggctcagcgcgatggacgcgctgcgggcgatcctgccggcgggtacgctgtccggcgcgccgaagatccgcgccatggagatcatcgacgagctggagccggtcaagcgtggagtctacggcggcgcggtcggctacctggcatggaacggcaacatggacaccgccattgccatccgcaccgcggtgatcaagaacggtgaactccacgtgcaggccggcggcggtatcgttgccgactcggtgccggcgctggagtgggaagaaaccatcaacaagcgccgggcgatgttccgcgccgtggcgctggccgagcagagcgtcgagtaa

SEQ ID NO: 76605 - protein, 492 aa, Pseudomonas aeruginosa UCBPP-PA14
MNREEFLRLAADGYNRIPLSFETLADFDTPLSIYLKLADAPNSYLLESVQGGEKWGRYSIIGLPCRTVLRVYDHQVRISIDGMETERFDCADPLAFVEEFKARYQVPTVPGLPRFDGGLVGYFGYDCVRYVEKRLATCPNPDPLGNPDILLMVSDAVVVFDNLAGKIHAIVLADPSEENAYERGQARLEELLERLRQPITPRRGLDLEAAQGREPAFRASFTREDYENAVGRIKDYILAGDCMQVVPSQRMSIEFKAAPIDLYRALRCFNPTPYMYFFNFGDFHVVGSSPEVLVRVEDGLVTVRPIAGTRPRGINEEADLALEQDLLSDAKEIAEHLMLIDLGRNDVGRVSDIGAVKVTEKMVIERYSNVMHIVSNVTGQLREGLSAMDALRAILPAGTLSGAPKIRAMEIIDELEPVKRGVYGGAVGYLAWNGNMDTAIAIRTAVIKNGELHVQAGGGIVADSVPALEWEETINKRRAMFRAVALAEQSVE

SEQ ID NO: 76606 - DNA, 1593 bp, Pseudomonas aeruginosa UCBPP-PA14
  CDS (1)..(1593): transl_table=11
atgggcgcggggagatggctcgtgagcggggttggctatcgactggaagaaagtctggagtaccgcacgctggtgccggaggcgctgtcgatctggcgcatggccggcgccaaccggatgctgttcgactgcttcgacgtggacagcaaggctgcgcggcgtagcgtggcgatcctttccagctgcctgcgcatcgagtgctgggggcgcgatgtagtgctgcgggcgttgaacgccaatggacgcgccttgctggcaccgttgagcgaggcctgtccggcccaggtcacctgcttgcgtgacggcgacaccctgcactggcgcttcccccaggaagagtcgcaggcggacgagtggcgacgcctgcatggcctgtccagcctggaggcgctgcgccgcgtgctcggaacgctgggcgacgcggaggagcctgcgctgctgggcggcctgttcagtttcgacctggccgagcagttcgaacccttgccggcgccggccgaacctgcgcggcattgcccggactacctgttcctggtgccggagttgctgctggatatcgatcacctggcgcgccggacttcgctgcaggcgttcgtccacgatccggccgggcacgacaggttggccgccagcctgcgccagtgtgccgacgaattccatggcgccgtggaggaggcttccgagtcgccggtggcaggcgtacgggccggcaactaccaggtcgacctggacgatgcgagctttgctcgccaggtggagcgcctgcaggcccacgtgagggccggcgacgtgttccagatcgtaccgtcgcgcagcttcagcatgccgtgcgcggacccctggcgggcctatcgccagttgtgcctgggcaaccccagcccgtaccgcttcttcctcgatgcgggggacttctgcctgtttggcgcttcgccggagtcggcattgaagtacgacggggagagtcgcgaggtggaactctaccccattgccggcactcgcccgcgcggacgcgatgcccggggcgccatcgatgcggaactggacaatcgcctggaagcggagttgcgcctggacgccaaggagatcgccgagcacatgatgctggtcgacctggcgcgcaacgatctggcgcgggtctgccgcagcggtacgcggcaggtgcgcgacatgctcaaggtggatcgctacagccacgtgatgcacctggtctcgcgcgtggctggcgaactgcatggcgaactggatgcgctgcatgcctaccgtgcctgcctgaacatgggcaccctggtcggtgcgccgaaggtccgtgccatgcagttgctgcggcagtacgaggatggctatcgcggcagctacggtggcgcgatcggcattctcgacagcgccggcaacctcgataccagcatcgtcatccgctccgccgaggtccgcgaaggtatcgcgcgggtccgggcaggcgccggcgtggtgctggattcggatccacggctggaggccgaggaaacccgcaacaaggcgctggcggtgctgaccgccgtggccgctgccgaacgcgaaaggggagagcgcgatgcgcatcacgctgttggataa

SEQ ID NO: 76607 - protein, 530 aa, Pseudomonas aeruginosa UCBPP-PA14
MGAGRWLVSGVGYRLEESLEYRTLVPEALSIWRMAGANRMLFDCFDVDSKAARRSVAILSSCLRIECWGRDVVLRALNANGRALLAPLSEACPAQVTCLRDGDTLHWRFPQEESQADEWRRLHGLSSLEALRRVLGTLGDAEEPALLGGLFSFDLAEQFEPLPAPAEPARHCPDYLFLVPELLLDIDHLARRTSLQAFVHDPAGHDRLAASLRQCADEFHGAVEEASESPVAGVRAGNYQVDLDDASFARQVERLQAHVRAGDVFQIVPSRSFSMPCADPWRAYRQLCLGNPSPYRFFLDAGDFCLFGASPESALKYDGESREVELYPIAGTRPRGRDARGAIDAELDNRLEAELRLDAKEIAEHMMLVDLARNDLARVCRSGTRQVRDMLKVDRYSHVMHLVSRVAGELHGELDALHAYRACLNMGTLVGAPKVRAMQLLRQYEDGYRGSYGGAIGILDSAGNLDTSIVIRSAEVREGIARVRAGAGVVLDSDPRLEAEETRNKALAVLTAVAAAERERGERDAHHAVG

SEQ ID NO: 76608 - DNA, 1365 bp, Leuconostoc mesenteroides subsp. mesenteroides ATCC 8293
  CDS (1)..(1365): transl_table=11
atgcgacaaattaagacaattgacgcggataccttaacagtaatcagtgcttattttcggttgcgcggagaacatagttttttattagaatcagtacctacagatagtgaaaagtcacgttattcaattatcgcacttgatcctgtccatgagtttaagaccaacggtatgttggtgacggttgatggccaaactagtgaaagcaaagatcccctgctggcattgcaaaatttagtagttgtgcaagaacagcccgtggaggagttgccttttcaaggaggtgccattggatatgtagggtttgatacggttgcttgctatgaaaaactagaaaaccaacctaaagatgagttggatatgcccgacagccatttatttttgtatgaaacttttgttattttcgaccatcgtcaagaaaaaataaaaattgtcgtggataatgtttattcgggacgtcagaacttagaacacgttgttcttgcaatcgaaaataagttgaaattacctgtggctgatgaacttgttccggtaaaactacatgaattaaatccaaaatcaaatgtgacgcctgagcaatttaaaaaaatcgttaatcatacgaaggaattaattcaagaaggcgatatgtttcaaatggttccgtcgcaacgttttagttttgaatttgaggataaaccgtttgatttttatcggcaacttcgtcgtacaaatccttcgccgtatatgtactatatggactacggtgattatcaaattattggttcatccccggaaagcttggtgacagtaagaggagaaacagtaactactaatccaattgcgggaacgcgtaaacgggggcaaacattaacagaagacgttgccattgctaaagagttgaaaacaaatgaaaaagaactagcagaacaccgtatgttagtcgatcttggacggaatgatcttggtaaagtttctgaatatggcagtgtcaaggtaacaactttgctggaaattcaaaaataccgttatattatgcatttggtttctgaagtcagtggaaaattaagggcacacacacctgctattgaagctttgaaagctacattaccagctggaactgtttctggggcacccaaggttcgtgctctgcaacgtatttacgaaatggaaccagttaaaagaggtgtttatgccggtgcaattggttatttatctcgcgataatcagatggattttgccattgcgattcgaacgatggttgttaaaagtaacaaaggatatgtgcaagcgggtgctggtattgtctatgattctatagcagaaaatgaataccaagaaacacttaacaaggctaaagcgttgttgcgagttggaggggatgtatga

SEQ ID NO: 76609 - protein, 454 aa, Leuconostoc mesenteroides subsp. mesenteroides ATCC 8293
MRQIKTIDADTLTVISAYFRLRGEHSFLLESVPTDSEKSRYSIIALDPVHEFKTNGMLVTVDGQTSESKDPLLALQNLVVVQEQPVEELPFQGGAIGYVGFDTVACYEKLENQPKDELDMPDSHLFLYETFVIFDHRQEKIKIVVDNVYSGRQNLEHVVLAIENKLKLPVADELVPVKLHELNPKSNVTPEQFKKIVNHTKELIQEGDMFQMVPSQRFSFEFEDKPFDFYRQLRRTNPSPYMYYMDYGDYQIIGSSPESLVTVRGETVTTNPIAGTRKRGQTLTEDVAIAKELKTNEKELAEHRMLVDLGRNDLGKVSEYGSVKVTTLLEIQKYRYIMHLVSEVSGKLRAHTPAIEALKATLPAGTVSGAPKVRALQRIYEMEPVKRGVYAGAIGYLSRDNQMDFAIAIRTMVVKSNKGYVQAGAGIVYDSIAENEYQETLNKAKALLRVGGDV

SEQ ID NO: 76610 - DNA, 2172 bp, Solibacter usitatus Ellin6076
  CDS (1)..(2172): transl_table=11
atgcgcgaataccgctatacgactccccacgggatccaggtcacccgcaccgtttcgaagaccaatttccggaaggggctgacgcaccttcttagcgatctggaccagcaccgtgggatttatctatcctcgggatacgagtatcccggcagatactcgcgctgggatatcgcatccacatgcccgccgctcgagatcatcgcctacgaccggcgctttgaactccgcccgctgaatcagcgcggccgggaaatcctgcggctgttccatccgctcctcgccaaacttccccactgggacgcattcgactatgaaggcgagatgctcgccggacgcctgaagccgctggcggcgctgttctccgaagaggagcgcagcaagcagccctccgcattttcgattctgcgcgctcttatcgaggaattccgcggcgaggagaactcccgtctcgggctcgtgggcgccttcggctacgatctgctgttccagttcgaacccatcgaaaggaagctgccgcgccacggccacaaagatctgcacctgttcctctgcgacgacatctggtacatggatcgcaagaaagagcaggtcgagcgcttccagtacgaattccagggggaaggcgccagcaccgtgggactgccgcgcgagggcgaactggtgccgccgcccgcgcccgctccggccggacccatcaccagcgatcacacgcccgaagagtacatggccaacgtggaaaaggtgcgcgagggcatgcgccgcggcgattattacgaagtcgtgctgcgccagaccttccgcacgcccttctccggcaaggccagcgaactcttccgccgcgtccaaactgccagcccgagcccttacgaattcctcctgcagtttggcgaggaacaactggtaggcgcgtcgcccgagatgttcgtcagggtggaaggcgcgcgcgtcgagacctgccccatctcgggcaccgcgcagcgcaccggcgaccccttgcgcgacgctgacaacatccgcgaactcctggtcagcaccaaggaagagagcgagctgaccatgtgcacggacgtggaccgcaacgataagtcgcgcgtctgcgaaccgggcacggtcaaagtcatcgggcgccgcttgatcgaaagctacgccggcgtgtttcacaccgtggatcacgtggagggaatcctccaggagggcttcgacgccctggatgcctttctcagccacatgtgggccgtgaccgtaatcggcgctcccaagaaggcggccgcacaaaccgtcgaagcgcttgaacggaacgcgcggggctggtatggcggcgcggtggggatgatctcgctcggcggcgacatcaacaccggcatcctgatccgcacgacctatctgcgtgacggcgtggccagctatcccgtcggcgccactctcctgttcgattccgtgccggtcatggaagagcgcgaaacacgcctcaaagccaccggttttttccggaccctcggcacgcccgaagccaaggccgcggccggggcgctggagcacgccgccggcggcgcgggtgcgcgcctgctgctggtggataacgacgattgcttcatccacacgcttgccaactacgcgcgccagaccggcgccgaagtggtcacgtaccgcgcgggctttccgccggagtttatcgcgcaggtggcgccgaacctgattctgatctcgcccggtccgggacgtccggccgatttcggcgtccccgatgtcgtgaagacggccgtccgcctgggcgtgccggtgttcggggtgtgcctgggcttgcaaggcatagtcgaggcctttggtggtgaactcggtgtgctcgattatccaatgcatggcaaaccttccaccgtgcgcaatcgcggcgtcggcgtgttccaagggctgcctgcggagtttcaagtgggccgctaccactcgctcttcgcgcgccgcgagaccttccccagctgcctggaaatcaccgcggaaacagaggacggcgtgatcatgggcgtccgccatcgcgaacttccggtagaggccgtgcagttccacccggaatcgattctgaccgccgggggcgatcacggtctcagactcatggccaatgccatgcgcctcgcgaaggccgccgcggccgtgcaggttcgaaacgttgaccgctga

SEQ ID NO: 76611 - protein, 723 aa, Solibacter usitatus Ellin6076
MREYRYTTPHGIQVTRTVSKTNFRKGLTHLLSDLDQHRGIYLSSGYEYPGRYSRWDIASTCPPLEIIAYDRRFELRPLNQRGREILRLFHPLLAKLPHWDAFDYEGEMLAGRLKPLAALFSEEERSKQPSAFSILRALIEEFRGEENSRLGLVGAFGYDLLFQFEPIERKLPRHGHKDLHLFLCDDIWYMDRKKEQVERFQYEFQGEGASTVGLPREGELVPPPAPAPAGPITSDHTPEEYMANVEKVREGMRRGDYYEVVLRQTFRTPFSGKASELFRRVQTASPSPYEFLLQFGEEQLVGASPEMFVRVEGARVETCPISGTAQRTGDPLRDADNIRELLVSTKEESELTMCTDVDRNDKSRVCEPGTVKVIGRRLIESYAGVFHTVDHVEGILQEGFDALDAFLSHMWAVTVIGAPKKAAAQTVEALERNARGWYGGAVGMISLGGDINTGILIRTTYLRDGVASYPVGATLLFDSVPVMEERETRLKATGFFRTLGTPEAKAAAGALEHAAGGAGARLLLVDNDDCFIHTLANYARQTGAEVVTYRAGFPPEFIAQVAPNLILISPGPGRPADFGVPDVVKTAVRLGVPVFGVCLGLQGIVEAFGGELGVLDYPMHGKPSTVRNRGVGVFQGLPAEFQVGRYHSLFARRETFPSCLEITAETEDGVIMGVRHRELPVEAVQFHPESILTAGGDHGLRLMANAMRLAKAAAAVQVRNVDR

SEQ ID NO: 76612 - DNA, 1491 bp, Magnetococcus sp. MC-1
  CDS (1)..(1491): transl_table=11
ttgattcagccctcatttgaagcgtttcaaacgctcatgacccaaggcaacctgatccccgtctaccgggaaatcatggccgacctcgacacccccgtcaccgcctacatgaaaatcgccgcgcaaagccaatacagctttttgctggaatccgtacagggcggcgaaaagtggggacgctttagccttatcggcacgcaacccaaagctctgttcgaagtcaatggcaacacaatctcctatcacgacctgcacaacggtaccgtgaccaccacccagagcgacaaccctaccttcgccctgcgagagatcatggcaacctaccaacccgtacccaccgacaacctgcccagctttggcggcgctgtgggttatctgggctacgataccgtgcgctactacgaacacctgcccgatgacaaccccgacaccctaggcaccccagacgccctctttatgctcagcgaccagctgttggtgtttgacaacctctataacaaactcaaagtggtcgtcaacgtccacctaaccgacgagagcgacccccgcgcctgctacgataaagcctgcgaacagattaatcggctcatcgctctgctgcgggcacccatgccgcccctgccggatacccgcaccaacacccccttgaccgaggccgattttacctccgaaatgagccgagaagcctttgaagaggccgtgcgcaaaggtaaagagtatatcttcgccggtgatattatgcaggtggtgctctcccaacggctctccgtaccctttaaccacgatccgctggctctctaccgggcattgcgcatgagcaacccctcgccctatctgtttttactcaatatgggacaattttccctggtcggctccagccccgaaattctggtgcgtcaagaaaaaggcattgccaccgtgcgacccattgccggcacccgcccgcgcggtaaagacgaagccgaagatctggcgctagaaaccgaattgctggccgaccccaaagaacgcgccgaacatattatgctggtagacctgggccgtaacgacattggccgcatcgccgaaatcggctccgtcaaggtcacagaacagtttattatcgaacgctactcccacgttatgcacattgtctctaacgttgaaggggttttgcgtaaggatctggacgcctacgatgtggtggccgccaccttccccgcgggcacccttagcggtgcccccaaaattcgcgcaatggagatcattgatgagctagaggtctcgcgccgtggcccttacggtggggcagtcggctattttggctataacgggtatatggatctggccattaccatccgtaccgcgatcctcaaagatggacgcctctacattcaggctggggccggtattgtcgccgattccgtgccgagtaaagagtatgaagagaccatgaataagggccgcgccatgtttcgcgcggtggaacaagtgcaaaaagggttggagtaa

SEQ ID NO: 76613 - protein, 496 aa, Magnetococcus sp. MC-1
MIQPSFEAFQTLMTQGNLIPVYREIMADLDTPVTAYMKIAAQSQYSFLLESVQGGEKWGRFSLIGTQPKALFEVNGNTISYHDLHNGTVTTTQSDNPTFALREIMATYQPVPTDNLPSFGGAVGYLGYDTVRYYEHLPDDNPDTLGTPDALFMLSDQLLVFDNLYNKLKVVVNVHLTDESDPRACYDKACEQINRLIALLRAPMPPLPDTRTNTPLTEADFTSEMSREAFEEAVRKGKEYIFAGDIMQVVLSQRLSVPFNHDPLALYRALRMSNPSPYLFLLNMGQFSLVGSSPEILVRQEKGIATVRPIAGTRPRGKDEAEDLALETELLADPKERAEHIMLVDLGRNDIGRIAEIGSVKVTEQFIIERYSHVMHIVSNVEGVLRKDLDAYDVVAATFPAGTLSGAPKIRAMEIIDELEVSRRGPYGGAVGYFGYNGYMDLAITIRTAILKDGRLYIQAGAGIVADSVPSKEYEETMNKGRAMFRAVEQVQKGLE

SEQ ID NO: 76614 - DNA, 1692 bp, Shewanella sp. ANA-3
  CDS (1)..(1692): transl_table=11
atgaccctaaagacatttaatcaggttacccaagttgatggcgcgcattttgccccgtctcaacagacattcgcacgttcgcatacgctcaaggcgacgctggcatatcatagcgacccactgcgcctgtaccagcacatcacccaagatgtaccccataccatgttgttagaatcggcagaaatcgacagcaaggaaaatcttaagagcatggtgatgacccatgcggcgctgatgatccgctgcgatggctatcgtttacgctttagcgcactgagtgacaatggcgtcagtttactcgcccccatcgagcaattttttattgctcgttcaagccaaactcaatgccaacgcgatggccacaacttagtggtcacgctgcaaaaggacactgagcttaaggatgaagatgcccgcttaaaatccacctcgcccctcgatggtttgcgcttgtttgtaaagcatatcgactgcggccagacgccagcattcgaagacttatttttaggtggcgtgctctcctacgatttgattgataccgtcgagccactgcctgaagcaccaaatggtgcaaatgattgtcctgattatttattttatctcgccgaaaccttaattcttatcgatcacaagcaaaaacacgccgagatcatcactcacaacttcagtgaaggcactgaacaacatttagaggtgacccaagccttagccgagcgagcagagaacatcagcgcccaatgtgaagccctagccaagagtgcaacacctgcacccgccctcgtcggcataacggccacagagcaagtgaatgttagtgatgatgacttcaagcaaaccgttattgatttaaaagaacacattattgccggcgacatcttccaagtcgtgccttcacgcagctttagcctgccctgccccgataccttgggagcttaccgcgcactacgtttaaccaaccccagcccctatatgttttatttcaggggctatgacttcaccctgtttggcgcctcgcccgagagcgcgctgaaatatgaagccagcaataatcaggtcgaagtctacccgattgcaggcacccgtaaacgcggcaaaaccgccagcggcgagatcgatttcgacctcgatagccgtatcgaactcgaattgcgtttggataaaaaagagctctccgaacatttaatgttggtcgatttagcccgtaacgatatcgcccgtatcagccaaagcggcagccgcaaagtggccgagttacttaaagtcgaccgttattcccacgtcatgcacttagtcagccgcgtcacaggtcaactacgccaagacttagatgcactccacgcctatcaggcctgtatgaatatgggcacgctagttggcgccccgaaagtgcgcgcctctcaattggtgcgtcaagcagaaaagacccgccgcggcagctacggcggcgctgtgggttacctcaacgcccttggggatatggacacctgtatcgttatccgctccgcctttgtgaaaaacggcgttgcccatatccaagcgggtgctggcgtggtgtttgattccgatccgcagagtgaagccgatgaaacccgccaaaaggcgcaggctgtgatttcggccatcaagatgggcgcaggcttggatgaaagccagcaagcaactgcgaccactacgactgaacaacaaagataa

SEQ ID NO: 76615 - protein, 563 aa, Shewanella sp. ANA-3
MTLKTFNQVTQVDGAHFAPSQQTFARSHTLKATLAYHSDPLRLYQHITQDVPHTMLLESAEIDSKENLKSMVMTHAALMIRCDGYRLRFSALSDNGVSLLAPIEQFFIARSSQTQCQRDGHNLVVTLQKDTELKDEDARLKSTSPLDGLRLFVKHIDCGQTPAFEDLFLGGVLSYDLIDTVEPLPEAPNGANDCPDYLFYLAETLILIDHKQKHAEIITHNFSEGTEQHLEVTQALAERAENISAQCEALAKSATPAPALVGITATEQVNVSDDDFKQTVIDLKEHIIAGDIFQVVPSRSFSLPCPDTLGAYRALRLTNPSPYMFYFRGYDFTLFGASPESALKYEASNNQVEVYPIAGTRKRGKTASGEIDFDLDSRIELELRLDKKELSEHLMLVDLARNDIARISQSGSRKVAELLKVDRYSHVMHLVSRVTGQLRQDLDALHAYQACMNMGTLVGAPKVRASQLVRQAEKTRRGSYGGAVGYLNALGDMDTCIVIRSAFVKNGVAHIQAGAGVVFDSDPQSEADETRQKAQAVISAIKMGAGLDESQQATATTTTEQQR

SEQ ID NO: 76616 - DNA, 1533 bp, Mycobacterium avium 104
  CDS (1)..(1533): transl_table=11
gtgcacgcccacctcgccgcgacgacctcacgagaggatttccgccagctggcggccgagcaccgcgtggtcccggtgacccgcaaggtgctggccgacagcgagacgccgctgtcggcctaccgcaaactcgccgccaaccgcccgggcaccttcctgctggagtcggccgagcacggccggtcctggtcgcggtggtcgttcatcggcgccgggtcgccgtcggcgctgaccgtgcgcgacggggaagccggctggctgggggtggtgccgcaggacgcaccgaccggcggcgatccgctgcaggcactgcgcgccaccctggacctgctggccaccgggccgctgagcgggctgccgccgttgtcgggcggcatggtcggcttcttcgcctacgacctggtgcggcgcctggagcggctgcccgagctggccgtcgacgacctgggcctgccggacatgctgctgctgctggccaccgatctggcggccgtcgaccaccacgagggcaccatcacgctgatcgccaacgcggtgaactggaacgggaccgacgaacgggtcgacgaggcctacgacgacgccgtcgcccggctggacgtgatgaccgcggcgctgggccagccgctggcctccaccgtagccaccttcgagcggcccgagccgcgctaccgcgcgcagcgcagcgtcgaggagtacggcaagatcgtcgactacctcgtcgagcagatcgccgccggtgaggcgtttcaggtggtgccctcgcagcggttcgaaatggacaccgacgtcgacccgatcgacgtgtaccggatgttgcgggtcaccaaccccagcccctacatgtatctgctgcatgtaccgaatgatgctgggggaacggacttttcaatcgtcgggtccagcccggaggctctggtcacggtggccgacggcgtcgcgaccacccacccgatcgccgggacccggtggcgcgggcagaccgacgaagaggaccagctgctggaaaaggagctgctggccgacgagaaggaacgcgccgagcatctgatgctggtcgatctgggccgcaacgatctgggccgggtgtgcgcgccgggcaccgtccgggtcgacgactacagccacatcgagcgctacagccacgtcatgcatctggtctcgacggtgaccggcgtgctcgacgcgggcaggaccgccctggacgcggtgacggcctgcttcccggccggcaccctatcgggtgcgccgaaggtgcgggcgatggagctgatcgaagaggtggagaagacgcgccgcggcctctacggcggcgtggtcggctacctggacttcgccggcaacgccgacttcgccatcgccatccgcacggcgctgatgcgtggcggcaccgcctacgtgcaatcgggtggcggggtggtggcggactccaacggcccctacgaatacacggaggccaccaacaaggcgcgcgcggtgctcggcgcgatcgcggccgccgagacgctgaccgaaccgggcgcgcggcgatga

SEQ ID NO: 76617 - protein, 510 aa, Mycobacterium avium 104
MHAHLAATTSREDFRQLAAEHRVVPVTRKVLADSETPLSAYRKLAANRPGTFLLESAEHGRSWSRWSFIGAGSPSALTVRDGEAGWLGVVPQDAPTGGDPLQALRATLDLLATGPLSGLPPLSGGMVGFFAYDLVRRLERLPELAVDDLGLPDMLLLLATDLAAVDHHEGTITLIANAVNWNGTDERVDEAYDDAVARLDVMTAALGQPLASTVATFERPEPRYRAQRSVEEYGKIVDYLVEQIAAGEAFQVVPSQRFEMDTDVDPIDVYRMLRVTNPSPYMYLLHVPNDAGGTDFSIVGSSPEALVTVADGVATTHPIAGTRWRGQTDEEDQLLEKELLADEKERAEHLMLVDLGRNDLGRVCAPGTVRVDDYSHIERYSHVMHLVSTVTGVLDAGRTALDAVTACFPAGTLSGAPKVRAMELIEEVEKTRRGLYGGVVGYLDFAGNADFAIAIRTALMRGGTAYVQSGGGVVADSNGPYEYTEATNKARAVLGAIAAAETLTEPGARR

SEQ ID NO: 76618 - DNA, 1575 bp, Mycobacterium smegmatis str. MC2 155
  CDS (1)..(1575): transl_table=11
gtgcagaccaccgccaaccattcctcacgctccacgcagaccggcacgcgcgcccacggcgccgcactcgccgagaccacgtcgcgcgaggacttccgggcgctggcgaccgagcaccgtgtggtccccgtcatccgcaaggtgctcgccgacagcgagacacccctgtcggcctaccgcaagctcgccgccaaccggccagggacgttcttgctggaatccgcggagaacggtcggtcgtggtcgcgatggtcgttcatcggcgcgggagcgccgtcggcgctgaccgtgcgcgacaacgcggcggcatggctgggcaccgcgcccgagggggcgccgagcggcggtgatccgctcgatgcgctgcgcgcaaccctcgatctgctcaagaccgaggccatggcgggtctgccgcccctgtcgtcgggtctggtcggcttcttcgcctatgacatggtgcgccggctcgaacggctgccggaactcgcggtcgacgatctcgggctgccggacatgctgctgctgctcgcgaccgacatcgccgcggtcgaccaccacgagggcaccatcacgctcatcgccaacgcggtgaactggaacggcaccgacgagcgggtcgactgggcctacgacgacgcggtcgcgcgtctggacgtgatgaccaaggcgctggggcagccgttgacctcggcggtggcgacgttcagcaggcccgcgcccgatcaccgggcgcagcgcacgatggaggagtacaccgagatcgtcgacaagctggtcggcgacatcgaggccggcgaggcatttcaggtggtgccctcgcaacggttcgagatggacaccgcggccgatccgttggacgtctaccgcatcctgcgggtgaccaaccccagcccgtacatgtacctgctcaacatccccgacgccgacggaggactggacttctcgatcgtcgggtcgagcccagaggcgctggtgacggtcaaggacggacgcgccaccacgcatcccatcgcgggcacgcggtggcgcggcgccaccgaggaagaggacgtgctgctcgaaaaggagctgctcgccgacgagaaggaacgcgccgagcacctcatgctcgtcgacctgggccgcaacgacctgggccgggtgtgccggcccggcaccgtgcgtgtcgacgactacagccacatcgagcgctacagccacgtcatgcatctggtgtcgacggtcaccggtgagctcgccgaggacaagaccgcccttgacgcggtgacggcgtgcttcccggcgggcacgttgtcgggtgcgccgaaggtgcgtgccatggagctcatcgaggaggtcgagaagacacgccgcggcctctacggcggtgtcgtcgggtacctcgacttcgcgggcaacgccgacttcgccatcgccatccgcaccgcactgatgcgcaacggaaccgcctacgtgcaggccggcgggggagtcgtggccgactccaacggcccgtacgagtacaccgaggccgccaacaaggcccgtgcggtgctcaacgcgatcgccgcggcagcgaccctggcggaaccatga

SEQ ID NO: 76619 - protein, 524 aa, Mycobacterium smegmatis str. MC2 155
MQTTANHSSRSTQTGTRAHGAALAETTSREDFRALATEHRVVPVIRKVLADSETPLSAYRKLAANRPGTFLLESAENGRSWSRWSFIGAGAPSALTVRDNAAAWLGTAPEGAPSGGDPLDALRATLDLLKTEAMAGLPPLSSGLVGFFAYDMVRRLERLPELAVDDLGLPDMLLLLATDIAAVDHHEGTITLIANAVNWNGTDERVDWAYDDAVARLDVMTKALGQPLTSAVATFSRPAPDHRAQRTMEEYTEIVDKLVGDIEAGEAFQVVPSQRFEMDTAADPLDVYRILRVTNPSPYMYLLNIPDADGGLDFSIVGSSPEALVTVKDGRATTHPIAGTRWRGATEEEDVLLEKELLADEKERAEHLMLVDLGRNDLGRVCRPGTVRVDDYSHIERYSHVMHLVSTVTGELAEDKTALDAVTACFPAGTLSGAPKVRAMELIEEVEKTRRGLYGGVVGYLDFAGNADFAIAIRTALMRNGTAYVQAGGGVVADSNGPYEYTEAANKARAVLNAIAAAATLAEP

SEQ ID NO: 76620 - DNA, 1473 bp, Azoarcus sp. BH72
  CDS (1)..(1473): transl_table=11
atgctcgaacaggaattcaatgccctggctgaacagggctacaaccgcatcccggtcacgctcgagaccttcgccgatctcgacacgccgctctccatctacctgaagctcgccaacgagccctacacctacctgctggaatcggtgcagggcggagagcgcttcggccgttactccttcatcggactcgcatcgccgacgcgcatcgaggtgtatggccgttcggcgctgctgctcaccggcaaccgcctcgtcgagcgccgcgactacggcgacccgctcaacttcgtcgccgagttcatgaaccgcatcaaggtgccgccgcgcgagcatctgccgcgcttcgcgggtgggttggttggttgcttcggctacgacaccgtgcgctacatcgagccccgcctcgccaagaccgacaaacccgacgcgatcggtacgccggacatcctgctgatgctgtcggaggagatcgccatcgtcgacaacctcaccggcaagctcacgctggtggtgtatgccgagcccgaggtgccgggcgccttcaagcgcgccaagaagcgcctgcaggaactgctcgcccggctgcgcgcgccggtggccatcccggaggagtcgcgcgccgagtccgcgccggcggtctccagcttcggcgaggaggccttcaaggacgcggtgcgccgcgccaagcagtacatcgtcgacggcgacatcatgcaggtggtgttgtcgcagcgcatgagcaagccgttcgccgcgcatccgatggcgctttaccgggcgatccgctcgctgaatccttcgccctacatgttctacttcaacctcgaggacttccatgtcgtcggcgcctcgccggaaatcctggtgcggctggaggacgatacggtgacagtgcggccgatcgccggcacccgcaagcggggcgccaccgtcgccgaggatgcggcgctggaagaggacctgctggccgaccagaaggagtgcgcggagcacctgcagttgctcgatctcggccgcaacgatgccggccgggtgtcggagacgggtacggtgaaggtcaccgaacgcttcaccgtcgagcgctattcccacgtgatgcatatcgtgtccaacgtcgaaggacagttgaaggaggggctggacgcgctggcggtgctgcgcgccactttcccggccggcacggtgtcgggcgcgcccaagctgcgcgcgatggagatcatcgacgagctggagccggtcaagcggggcatctacgccgggtcggtgggttatgtcggtttccacggcgacatggacctggcgatcgcgatccgcaccgcggtgctgaaggacggtcagatccacgtgcaggcgggggcgggcatcgttgccgattccgacccggacgccgaatggcaggaaacgcagaacaaggcgcgcgccatgctgcgggcggccgagatggccgagggcgggctggatacgcaggtttga

SEQ ID NO: 76621 - protein, 490 aa, Azoarcus sp. BH72
MLEQEFNALAEQGYNRIPVTLETFADLDTPLSIYLKLANEPYTYLLESVQGGERFGRYSFIGLASPTRIEVYGRSALLLTGNRLVERRDYGDPLNFVAEFMNRIKVPPREHLPRFAGGLVGCFGYDTVRYIEPRLAKTDKPDAIGTPDILLMLSEEIAIVDNLTGKLTLVVYAEPEVPGAFKRAKKRLQELLARLRAPVAIPEESRAESAPAVSSFGEEAFKDAVRRAKQYIVDGDIMQVVLSQRMSKPFAAHPMALYRAIRSLNPSPYMFYFNLEDFHVVGASPEILVRLEDDTVTVRPIAGTRKRGATVAEDAALEEDLLADQKECAEHLQLLDLGRNDAGRVSETGTVKVTERFTVERYSHVMHIVSNVEGQLKEGLDALAVLRATFPAGTVSGAPKLRAMEIIDELEPVKRGIYAGSVGYVGFHGDMDLAIAIRTAVLKDGQIHVQAGAGIVADSDPDAEWQETQNKARAMLRAAEMAEGGLDTQV

SEQ ID NO: 76622 - DNA, 1560 bp, Acidovorax sp. JS42
  CDS (1)..(1560): transl_table=11
atgatcctgcggcgcactggcgcagccagcgaccgcgccgcacgagctgggaatcttcttgtgatcactgaactggaattcaaaagcctggccagcgaaggctacaaccgcatcccgctgatggcggaagcctttgcggacctggaaacccctctctccctgtacctcaagctggcccatggcaaaggcgacggcaagcacagctttctgctggagtcggtcgtcggcggcgagcgcttcgggcgctacagcttcatcggcctgcctgcgcgcaccttgctgcggtccagcggcttcggcgatgcggcgcgcaccgaggtggtgaccgacggccaagtggtggagacgcacccgggcaacccgctggacttcattgccgcctaccaagagcgcttcaaggtggcgctgcgcccggggctgccacgcttttgtggcgggctggcgggctacttcggctacgacgcggtgcgctacatcgagaagaagctagaggccacctgcccgcccgacacgctgggctgccccgacatcctgctgctgcagtgtgaggaactggcggtcatcgacaacctctcgggcaagctgtatctcatcgtctacgccgacccggcccagcccgaggcctatgccaagggcaagaagcgcctgcgggagctgaaggaccagctcaagtattccgtgagcgcgcccgtggtgcggcccaccgagagccacaccgcacagcgcagctttgccaaggccgactacttggcggccgtggagcgcgccaaggagctcatcgccgcgggcgacttcatgcaggtgcaggtgggccagcgcatccacaagcgctacaccgaatcgccgctgtcgctgtaccgcgcgctgcgctcgctgaacccgtcgccgtacatgtactactacaatttcggcgatttccaggtggtgggctccagccccgagatcctggtgcgccaggagagcacgcccgaggggcagaaggtcaccatccgcccgctggccggcacgcgcccgcgcggcgccacgcccgaggccgacaaggccaccgaagtggagctggtgaacgaccccaaggaacgcgccgagcacgtgatgctgatcgacctggcgcgcaacgacatcggccgcatcgccaagaccggcaccgtgaaggtgaccgaggccttcgcggtcgagcgctacagccacgtgatgcacatcgtgagcaacgtggagggcatcctcaacgacggcatgaccagcatggacgtgctcaaggccaccttcccggccggcacgctcaccggcgcgcccaaggtgcacgccatggaactgatcgaccagttggagcccagcaagcggggcctttacggaggcgcctgcggctacctgagctatgcgggcgacatggatgtggccatcgccatccgcaccggcatcgtcaaggacggcacgctctacgtgcaggcggcggccggcgtggtggccgactcggtgcccgagctcgaatggaaggaaacggaacacaaggcgcgcgccctgctgcgtgcggccgaactggtggaggaggggctggaatga

SEQ ID NO: 76623 - protein, 519 aa, Acidovorax sp. JS42
MILRRTGAASDRAARAGNLLVITELEFKSLASEGYNRIPLMAEAFADLETPLSLYLKLAHGKGDGKHSFLLESVVGGERFGRYSFIGLPARTLLRSSGFGDAARTEVVTDGQVVETHPGNPLDFIAAYQERFKVALRPGLPRFCGGLAGYFGYDAVRYIEKKLEATCPPDTLGCPDILLLQCEELAVIDNLSGKLYLIVYADPAQPEAYAKGKKRLRELKDQLKYSVSAPVVRPTESHTAQRSFAKADYLAAVERAKELIAAGDFMQVQVGQRIHKRYTESPLSLYRALRSLNPSPYMYYYNFGDFQVVGSSPEILVRQESTPEGQKVTIRPLAGTRPRGATPEADKATEVELVNDPKERAEHVMLIDLARNDIGRIAKTGTVKVTEAFAVERYSHVMHIVSNVEGILNDGMTSMDVLKATFPAGTLTGAPKVHAMELIDQLEPSKRGLYGGACGYLSYAGDMDVAIAIRTGIVKDGTLYVQAAAGVVADSVPELEWKETEHKARALLRAAELVEEGLE

SEQ ID NO: 76624 - DNA, 1521 bp, Magnetospirillum magnetotacticum MS-1
  CDS (1)..(1521): transl_table=11
atgacccatcagcccgacttctccgcctttgccgaagcttatgacagcggcaggccccaggtggtctggcgggttctggtggccgatctggaaaccccggtttccgccttcatgaagctggcggggggacagcccaacgcctttctgctggaatcggtcgaaggcggcgcggtgcgtggccgctattccatccttggcatgaagcccgatctgctgtggaaatgcgtcggcaacgaggcctggatcaatcgcaacgcccgatccaagaccggggagttccagccctgccccgtcgccgccaagtcgggcgcgctcgactcacttcgcgccctggtggccgaatgcggcatcgaaacgccgccccatctgccccccatgtcggccggactgatcggctatatgagctatgacatggtgcgactggcggaaaagctgcccgacgccaatcccgatcccatcaaggtgcccgacggcatcttcatgcgccccaccatcatggcggtgttcgacaacgtcaacggcaccctgaccgccgtcgcccccgtctggccgcgcgcgggcatggatgcccaggcggcctgggatctggcctgggagcggctggagcatgtggtggaatccctggaaagccccctgccccacacctatctcggctttcccaggaacgagcatctgcccattccggttcccagcgtctcgcccgagcattactgccgcatggtggagaaggcccaggaatacatcgccgctggcgatatcttccaggtggtgctgtcccagcgcctggcggtgcccttccggctgccgcccttctcgctctaccgctcgctgcgccgcctgaaccccagcccgttcctgttcttcctggatctgggcgagtttcagctggtgggttccagtccggaaatcctggtccgtctcagggacgacaaggtcaccatccggcccatcgccggaacgcgccgccggggcaagaccgccgccgaggacgaggaactggccgccgatctgctggccgatcccaaggaactggccgagcatctgatgctgctggatctgggccgcaacgatgtgggccgggtggcctccatcggctcggtcgaggtcaccaagaagatgggtgtggaatactattcccacgtcatgcacatcgtctccaacgtggaaggcaagatccgcgagggctgcgacgccatggacgccctgatggccggtttcccggcaggcaccacttcgggcgcgcccaagatccgcgccatggagatcatcgacgagttggagaccgagcgccgctcgttctatgccggagccatcggctatttcgacggcaacggcaacatggacacctgcatcgcgctcaggaccacattggtcaaggacggcaccatgtatgtccaggccggagccggtatcgtcgccgattccgtgccgctctccgagcatgaagagtgcatgaacaaggcccgcgccctggtccgcgccgccgaggacgccatcgattatacgctggtgaagcaatag

SEQ ID NO: 76625 - protein, 506 aa, Magnetospirillum magnetotacticum MS-1
MTHQPDFSAFAEAYDSGRPQVVWRVLVADLETPVSAFMKLAGGQPNAFLLESVEGGAVRGRYSILGMKPDLLWKCVGNEAWINRNARSKTGEFQPCPVAAKSGALDSLRALVAECGIETPPHLPPMSAGLIGYMSYDMVRLAEKLPDANPDPIKVPDGIFMRPTIMAVFDNVNGTLTAVAPVWPRAGMDAQAAWDLAWERLEHVVESLESPLPHTYLGFPRNEHLPIPVPSVSPEHYCRMVEKAQEYIAAGDIFQVVLSQRLAVPFRLPPFSLYRSLRRLNPSPFLFFLDLGEFQLVGSSPEILVRLRDDKVTIRPIAGTRRRGKTAAEDEELAADLLADPKELAEHLMLLDLGRNDVGRVASIGSVEVTKKMGVEYYSHVMHIVSNVEGKIREGCDAMDALMAGFPAGTTSGAPKIRAMEIIDELETERRSFYAGAIGYFDGNGNMDTCIALRTTLVKDGTMYVQAGAGIVADSVPLSEHEECMNKARALVRAAEDAIDYTLVKQ

SEQ ID NO: 76626 - DNA, 1530 bp, Nostoc punctiforme PCC 73102
  CDS (1)..(1530): transl_table=11
atgatttttccgcatttctcccagttttccagcctagcgcaacaaggcaacttcgtccccgtatatcaagaatgggtagcggacttagatacgcccgtctctgcttggtataaagtttgtgcaggtcagccctatagctttttgttggaatcaatagaaggtggggaaaaactaggacgctatagtttagtaggctgcgatccgctttgggttttagaagcaagaggcgatcgcaccacccagttaaaccgcgatggttcgcaggttgtttttgcaggcgacccttttgcagctttagccgaatgtttagcaccttatcacccagtcaagttaccagagttaccgccagggattggcggtttgtttgggttttggggctatgaattgattaactggattgagccgcgcgtgccaatctatccaccagatgagcgaaatatccctgatggcttgtggatgcaggtagaccacctgttgatttttgaccaggtgaagcgaaaaatttgggcgatcgcttatgctgatttacgcgaccccaatgtagatttacacgcagcctatcaacaagcgtgcgatcgcgtcacccaaatgctcgaaaagctatctctccccttatccccagaaaaaactcgattggaatggaaatcgccaggaagtaggggagcagaggagcagaaaagcggcgaaacagacgagtacaacagtaattttacccgccctgatttttgcgctagtgtccaaaaggccaaagattacatcaaagcaggcgatatctttcaagtagtaatttctcagcgactatcaacaccatatacaggcgacccctttgccctttaccgctccctacgtcagataaatccttcgccttacatggcttactttaacttccaagattggcaaatcatcggttccagtcctgaagtgatggtgaaagccgaaactgctccagatgggggagttatagcaacagtacgccccattgctgggacacgtccacggggtaaaactacccagcaagatgcagcattcgctcaagatttactcgaagatcccaaggaagttgccgaacacgtgatgcttgtagatttagggcggaatgatttggggcgtgtttgtcaaaatggtagcgtcaaagttgatgaattaatggtagttgagcgctactcccatgtgatgcacattgtcagcaatgttgtaggtaaattagcactagataaaacagcatgggatttattgaaagcttgcttcccagctggtacggtaagtggcgcacccaagattcgggcaatggaaattatccacgagctagagtctagtcggcgcggtgtttattcgggtgtgtatggatattacgattttgaaggacaattaaatactgcgatcgcaattcgcacaatggtggtacatgacaagacggttagcgtacaagctggcgcaggtttagtggctgattctgagccagaaaaagaatacgaagagacgttgaataaagctagaggtctattagaagcaattcgttgtttgcgttga

SEQ ID NO: 76627 - protein, 509 aa, Nostoc punctiforme PCC 73102
MIFPHFSQFSSLAQQGNFVPVYQEWVADLDTPVSAWYKVCAGQPYSFLLESIEGGEKLGRYSLVGCDPLWVLEARGDRTTQLNRDGSQVVFAGDPFAALAECLAPYHPVKLPELPPGIGGLFGFWGYELINWIEPRVPIYPPDERNIPDGLWMQVDHLLIFDQVKRKIWAIAYADLRDPNVDLHAAYQQACDRVTQMLEKLSLPLSPEKTRLEWKSPGSRGAEEQKSGETDEYNSNFTRPDFCASVQKAKDYIKAGDIFQVVISQRLSTPYTGDPFALYRSLRQINPSPYMAYFNFQDWQIIGSSPEVMVKAETAPDGGVIATVRPIAGTRPRGKTTQQDAAFAQDLLEDPKEVAEHVMLVDLGRNDLGRVCQNGSVKVDELMVVERYSHVMHIVSNVVGKLALDKTAWDLLKACFPAGTVSGAPKIRAMEIIHELESSRRGVYSGVYGYYDFEGQLNTAIAIRTMVVHDKTVSVQAGAGLVADSEPEKEYEETLNKARGLLEAIRCLR

SEQ ID NO: 76628 - DNA, 2205 bp, Nostoc punctiforme PCC 73102
  CDS (1)..(2205): transl_table=11
atgatttttaattcccgttcctacaaaacccttggcggcgtaattgtttctcgctccatcaccgaagtgaagatggacactgccctcgaagatattctgtttcacttaaattctcagcgtggcggtttgttaagaagcagctacgaatatccagggagatataaaagatgggcgatcggatttgtcaatccaccattggaattgactacacaggaaaatgctttcaatttgatagcgctgaatgaacgcggtctagtacttttacctttactattagagtgtttatccaactcactccaacttgagaaagttaccctagacaataataatattgtcggctttgttaaatctaccaagagattattcactgaagaagaacgcagtaaacaaccttcggcatttacagttgtccgcgaaattttacatactttctctagccaagaagatgaacatttaggattgtatggggcttttggttatgacttagtttttcagtttgaaccaataacccaaagtctggaacgtcctaaagatcagcgcgatttggtgctttatttgccagatgaattgatagttgttgactactatcagcaacgcgcatttcgtctacagtatgattttgaaacagcgcacggcaatacaaagaatctgcctcgaactggtgagtctgttgattatcgaggcaaacatcttacccctaatgaaacggctgaccataaagtaggcgagtatgccaaaaaagttgagtctgcactcgattatttccgccgaggcgatttatttgaagttgttcctagccaaaacttttttgaaggctatgaagatgagcccagcaaactctttgaaactttaaaggatataaatcctagtccttatgggtttatttttaatttaggtggagaatatttaattggcgcatctccagaaatgtttgtgcgagttgaagggaaacgggtagaaacttgtcctattagtggcactattagccggggactagatgctcttgacgatgcggtgcaaattcgtcatttactcaactcccacaaagatgaagctgagttgaccatgtgtactgatgtcgatcgcaatgacaaatcccgaatctgcgaacctggttcagtacaagtgattggtcgtcgccaaattgaattatacagccatttaattcatacagtagatcatgttgaagggacactgcgatcgcaatttgatgctttagatgcctttctttcccacacttgggcggttacagtcactggcgcacccaaaaaagctgcaatagattttattgaacagcacgaacgtagcgcccgacgttggtatggtggcgcagtcggttatttaaatttcaatgggaatttaaatactggcttaattctgcggacaattcgattaaaagactgcatcgccgaagtgcgagttggggcgactgtcctttatgactccataccccaagcagaagaacaagaaacaatcaccaaagcggctgctttatttgaaacgattcgccgtgttaagcaaagcagtcacaaaattgatgaatccagttccataaaatcaactaaaatcctaccttgtgtggcaactggcaaacgcatcttactaatagactatgaagactcttttgttcatacattagctaattacattcgccaaactggtgcaagcgtcaccacattacgtcatggtttctcagaaacgctcttcgatacagaacgccctgacttagttgttttatctcctggccctggtagaccaagtgattttcgggttccccagactgtcggggcgcttcttcatcgcaaaattcccatttttggagtttgtctaggtctgcaaagcatcgtagaagcttttgatggacaattgggagttctcaactatcctcaacatgggaaatcttcacggattttcgttactgattccgattccgttaccttcaagaatttaccagaatcctttaccgtgggtagatatcactcattgtttgctctcccgcaacatttaccccaagaactgaaggtgacagcgatttctgatgacaacgtaattatgggtattgaacatcagacacttcccatcgccgccgttcagtttcatccagaatcaatcatgactttagcgggagaagtcggtctggaaatcattaaaaatgtcgtgcgtgcatatacacaggtggaagagtcattagtcattggtcattag

SEQ ID NO: 76629 - protein, 734 aa, Nostoc punctiforme PCC 73102
MIFNSRSYKTLGGVIVSRSITEVKMDTALEDILFHLNSQRGGLLRSSYEYPGRYKRWAIGFVNPPLELTTQENAFNLIALNERGLVLLPLLLECLSNSLQLEKVTLDNNNIVGFVKSTKRLFTEEERSKQPSAFTVVREILHTFSSQEDEHLGLYGAFGYDLVFQFEPITQSLERPKDQRDLVLYLPDELIVVDYYQQRAFRLQYDFETAHGNTKNLPRTGESVDYRGKHLTPNETADHKVGEYAKKVESALDYFRRGDLFEVVPSQNFFEGYEDEPSKLFETLKDINPSPYGFIFNLGGEYLIGASPEMFVRVEGKRVETCPISGTISRGLDALDDAVQIRHLLNSHKDEAELTMCTDVDRNDKSRICEPGSVQVIGRRQIELYSHLIHTVDHVEGTLRSQFDALDAFLSHTWAVTVTGAPKKAAIDFIEQHERSARRWYGGAVGYLNFNGNLNTGLILRTIRLKDCIAEVRVGATVLYDSIPQAEEQETITKAAALFETIRRVKQSSHKIDESSSIKSTKILPCVATGKRILLIDYEDSFVHTLANYIRQTGASVTTLRHGFSETLFDTERPDLVVLSPGPGRPSDFRVPQTVGALLHRKIPIFGVCLGLQSIVEAFDGQLGVLNYPQHGKSSRIFVTDSDSVTFKNLPESFTVGRYHSLFALPQHLPQELKVTAISDDNVIMGIEHQTLPIAAVQFHPESIMTLAGEVGLEIIKNVVRAYTQVEESLVIGH

SEQ ID NO: 76630 - DNA, 2226 bp, Nostoc punctiforme PCC 73102
  CDS (1)..(2226): transl_table=11
atgaaaaccctaattattgataattatgactcttatacttttaatctttaccaattaattgcagaagtcaatgcagagtatcccactgtgatttacaatgatcaatttgcatgggatgaactgcaacattgggaatttgacaacattgtgatttcaccagggccaggtcgtcctgaaaatctaaaagattttgggatctgtcgtcaagctattcaaaatacccaagtgccacttttaggtgtttgtcttggacatcaaggacttggtaatgagtatggaggaaaagttattcatgcacctgaagttcagcatggtcggctcagtgaagtttatcacagcggtactgatttgtttgcgggaattccttctcctttctctgttgtgcgctaccattctttgctggttgcaaatgatctaccagactgtttagaaaaagtagcgtggacagacgacaatctggtaatgggaatgcgccatcgatctttgccgctatggggtgtgcagtttcatccagagtcaatctgtactcaatatggacaaaccttatttgagaattttagagagattaccctaaaatttgcccaagagcgaggcaatagtccgagaaaacactattgggtaggagatagcgatgctgcttccatacctgcaagttcttcttcccaaaaacagcaacaggaatttcaactttgtacgcagaagttgaatctgtatcgcgataccgagcaaatgtttgtgcatttgtttggcaaatcaccaaataccttctggctagatagcagtctggttgaatctggtctttctcgcttttcctttatgggagatagcagtggcgaaaacagtctgctaattcgctatcagacgcgatctgccgtaggcggcagcgcttctgctgaagcagacgctccgcgaacgcgatcgcaggaactcaccattacgcagtctgataccataagctgtaagacaaaggggatttttgaatatctccaggatgaaattgaacgacgacattgcccatcagatgatttacccttcgatttcaactgtgggtttgtgggttactttggctatgaattaaaggcagagtgcggatctaaattaaatcacgcctctagcttacctgatgctatgtttctgttggccgatcgcatgattgcaatcgatcaccaggagcaaaccctctatctgctttgcctaattcagcaaggacaatacgacttagcagaagcctggtttgaatggataaaacaccaaattgaccatcttcttcccctatcgcctattgttccatcagaagttcagacacctgttattttccgattaagtcggtcagaaaaaacttatcttgataatattcagatgtgtttgcaagaaattcacgaaggagaaacttatcaagtttgtttaacaaacaagattcacacagacacaacacccgatcccctggcattctatcgttcattacgccgcatcaatcctgctccatactctgcatttttgcgctttggcgatgtcgcgatcgcttgctcatctccagagcgatttctgcacattgattgtcaaggctgggtggaaacaaaacccatcaagggaaccctaccacgaggaaaaacatccaacgaagattttatcctgcgtgaaaaattgcggaacagtgaaaaagatcgcgctgaaaatctgatgatcgtggatttgcttcgcaatgatttaggacgggtttgtgcagtcggtactgtccatgttcccaaattgatggatgtggaaacctatgctacggtacatcaactggtgacgactattcgcggtcatttacgtgctgagatgagcgccacagactgcattcgcaacgcctttccaggcggttcgatgacaggcgctcccaaactcagaacccttgagattatcgatcgattagagcaagaagcacggggagtttactcaggagcaatcggctttttgggattgaatggttcggctgatttgaatattgttattcgtactgctgtgctgactccagagcaaacctcaattggcattggcggcggcattgtggcgctttccgatcctgaaatggagtttcaagaaacactcttgaaagcaaaggcattgattcatgccatgatgatcgccacgcatggggcctttgattctaaccaatattatatccagggactagaaacagaggcttttgatagcagctataaaaaagtgcgagcagtttactag

SEQ ID NO: 76631 - protein, 741 aa, Nostoc punctiforme PCC 73102
MKTLIIDNYDSYTFNLYQLIAEVNAEYPTVIYNDQFAWDELQHWEFDNIVISPGPGRPENLKDFGICRQAIQNTQVPLLGVCLGHQGLGNEYGGKVIHAPEVQHGRLSEVYHSGTDLFAGIPSPFSVVRYHSLLVANDLPDCLEKVAWTDDNLVMGMRHRSLPLWGVQFHPESICTQYGQTLFENFREITLKFAQERGNSPRKHYWVGDSDAASIPASSSSQKQQQEFQLCTQKLNLYRDTEQMFVHLFGKSPNTFWLDSSLVESGLSRFSFMGDSSGENSLLIRYQTRSAVGGSASAEADAPRTRSQELTITQSDTISCKTKGIFEYLQDEIERRHCPSDDLPFDFNCGFVGYFGYELKAECGSKLNHASSLPDAMFLLADRMIAIDHQEQTLYLLCLIQQGQYDLAEAWFEWIKHQIDHLLPLSPIVPSEVQTPVIFRLSRSEKTYLDNIQMCLQEIHEGETYQVCLTNKIHTDTTPDPLAFYRSLRRINPAPYSAFLRFGDVAIACSSPERFLHIDCQGWVETKPIKGTLPRGKTSNEDFILREKLRNSEKDRAENLMIVDLLRNDLGRVCAVGTVHVPKLMDVETYATVHQLVTTIRGHLRAEMSATDCIRNAFPGGSMTGAPKLRTLEIIDRLEQEARGVYSGAIGFLGLNGSADLNIVIRTAVLTPEQTSIGIGGGIVALSDPEMEFQETLLKAKALIHAMMIATHGAFDSNQYYIQGLETEAFDSSYKKVRAVY

SEQ ID NO: 76632 - DNA, 1557 bp, Bifidobacterium longum DJO10A
  CDS (1)..(1557): transl_table=11
atgagcgaatgcagcgtcaaacacctgaagtggggcgccacctggcccagtcgcgaacagttccacgaactggccgacgccggataccgtgtgattccgattgtgcgccgtctgctcgccgactcgctcaccccggtcggcttctatgagcgtctcgccggcggccgatccggcaccttcatcctcgaatcggcggaatacggcggcacgtggagccgttacagttttatcggcgtcaactcgatggcccagctgcgctccaacaacggtcaggccgactggctgggcaaggtcccggtcggcgtgcccgtcaccggtgacgtagtcgaagtcgctcacgccacgttgaagactctgaaggccccgcatgtggaaggcctgccgaacctgaccagcggtctggtcggcacggtcggctgggatgccatccgccactgggaaccgaccctgcgcgccgaagctccggacgagaccggccagcctgagaccgtgcttgccctggccaccgatatcgccgtggtcgaccacgtatccggttcggtatggctcatcgccaatgcggtgaatgtggatgataaatccactcgcgccgacgctgcctacaacgaggccgtcgctcgactcgaccagatgcagcgcgatgccgccaccccggcttcggacgagtcccgcgtcaacatcctggacgaaacggtcgcccaacccgagctgcgcttccgcaccgagaagagccactacgagcaggccgtcgaacgcgccaagcagcacatcgtcgacggcgacgtgttccaggtggtcatctcccagcgcctcgacatcgattcgcctgctgacccgttcgacgtgtaccgtgtgttgcgcacgctgaacccgagcccgtacatgtatttcatggcgttgaccgacgctcagggccgcgacttcaacgtgatcggctccagcccggaaaccctcatcaaggtggacaacggccacgcgatgaccttcccgattgctggatcccgccctcgcggcgccacccctgaggaagacgagaaattcgccaaggagctgcttgccgatccgaaggaatgcagcgagcacatcatgctcgtcgacctgtctcgcaacgacctgagtaaggtgtgcgtgccgcagtccgtggaagtcgtgcagctcatggacatcaagcgtttcagccacatcatgcacatctgctcgacggtcaccggcaaggtcgacccctcgctgaccgcattcgatgtgttcaagtccgcgttcccggccggcacgctgtctggcgcgcctaagccgcgcgcagtcgaaatcatcgacgagttggaaccggccgaccgcggcatctacggcggcaccgtcggctacttcgatttctccggcaacatggacatggccatcgccatccgcaccgcgttcctgcgcgaccatgaggcgagcgtgcaggccggtgccggcattgtgctcgactccgtgcccgccaccgaatggcaggagacgcgcaacaaggccgaggccagcgtcgagtccatccagatcgccgcccagttgcgcgaactgtaa

SEQ ID NO: 76633 - protein, 518 aa, Bifidobacterium longum DJO10A
MSECSVKHLKWGATWPSREQFHELADAGYRVIPIVRRLLADSLTPVGFYERLAGGRSGTFILESAEYGGTWSRYSFIGVNSMAQLRSNNGQADWLGKVPVGVPVTGDVVEVAHATLKTLKAPHVEGLPNLTSGLVGTVGWDAIRHWEPTLRAEAPDETGQPETVLALATDIAVVDHVSGSVWLIANAVNVDDKSTRADAAYNEAVARLDQMQRDAATPASDESRVNILDETVAQPELRFRTEKSHYEQAVERAKQHIVDGDVFQVVISQRLDIDSPADPFDVYRVLRTLNPSPYMYFMALTDAQGRDFNVIGSSPETLIKVDNGHAMTFPIAGSRPRGATPEEDEKFAKELLADPKECSEHIMLVDLSRNDLSKVCVPQSVEVVQLMDIKRFSHIMHICSTVTGKVDPSLTAFDVFKSAFPAGTLSGAPKPRAVEIIDELEPADRGIYGGTVGYFDFSGNMDMAIAIRTAFLRDHEASVQAGAGIVLDSVPATEWQETRNKAEASVESIQIAAQLREL

SEQ ID NO: 76634 - DNA, 1557 bp, Haemophilus influenzae R2846
  CDS (1)..(1557): transl_table=11
atgaacattcaaactcaagcctttattgcggtgacagctcaatcaattccctattatgctgataccaccgctatttttaatacactttgccaacctaattcaaattctcttctactcgactctgccgaaatcgggagtaaaaatagtttacaaagtcttattttagttaatgctgcagttaagataacttgtttaggtcacaacgtcacatttaaagctttaaataagaatggaaaacaagttttaaaagaaattcatccaaaattaaccgcacttggaaaaataagtgcggtcaattttgaagacgaattttctgtacaattttcgccacttgataatcaactcgatgaagatagtaaattacagtctgcaactatttttgatggactgcgtgttatttctagtctttatcaacatagccaaacgcctattttcttaggcggattatttgcttacgatctcgtcgcaaatttcattccaatggatggcattacattaaaaaatgatggtatcaactgccctgattacagtttctatcttgccgaacacctcattactatcgaccatcaaaatcaacaagcaacacttaaaagtttctgttttgctcaagaagaacaagtcaatattgcgaaaacttccctttctatcgcacaaaaactaaaaaatattgatcacgttctttctattaaagcggcaagtgatgaagttaaaacaaactttgacgatcctgaatttactggcatagtgaaagccttaaaacaccatattaacattggtgatgtattccaaattgtgccttctcgtcgtttttcccttgcttgcccgaatacattagccagttatgcccaactcaaacaaaataatccaagcccttatatgttctatatgaatgatgaagactttattttgtttggtgcatcgccagaaagtgcgctgaaatatgcaccagaaaatcgtcagttagaaatttacccaatcgcaggttcacgccctcgtggttttgatgctcacggcaatatcgatcctgaattagatgcacgtttagaactagaacttcgccttgatcacaaagaacaagcggaacatttaatgttggttgatttagcacgtaacgacattgctcgagtttgccaaagcggtacgcgtaaagtagctgaattaatgcaggtggatcgctattctcacatcatgcatttggtctctcgcgtagtgggtaaattacgccctgagttagatgcgcttcacgcctatcaagcctgtatgaatatgggcacattaactggtgcgccaaaaatcaaagcaatgcagcttatttatcaatttgagcagcaaaaacgccatagttacggtggtgcggtgggttatctcacttccgatggacattttgatacctgtatcgtaattcgttctgcttttgtacaaaatggcatagctcatgtacaggcaggttgcggagaagtattggattctgatccacaaatggaagctgatgaaacacgccacaaagctgcggctgtcttaaaagcaattcgtcaagttaatacacaagcaaaataa

SEQ ID NO: 76635 - protein, 518 aa, Haemophilus influenzae R2846
MNIQTQAFIAVTAQSIPYYADTTAIFNTLCQPNSNSLLLDSAEIGSKNSLQSLILVNAAVKITCLGHNVTFKALNKNGKQVLKEIHPKLTALGKISAVNFEDEFSVQFSPLDNQLDEDSKLQSATIFDGLRVISSLYQHSQTPIFLGGLFAYDLVANFIPMDGITLKNDGINCPDYSFYLAEHLITIDHQNQQATLKSFCFAQEEQVNIAKTSLSIAQKLKNIDHVLSIKAASDEVKTNFDDPEFTGIVKALKHHINIGDVFQIVPSRRFSLACPNTLASYAQLKQNNPSPYMFYMNDEDFILFGASPESALKYAPENRQLEIYPIAGSRPRGFDAHGNIDPELDARLELELRLDHKEQAEHLMLVDLARNDIARVCQSGTRKVAELMQVDRYSHIMHLVSRVVGKLRPELDALHAYQACMNMGTLTGAPKIKAMQLIYQFEQQKRHSYGGAVGYLTSDGHFDTCIVIRSAFVQNGIAHVQAGCGEVLDSDPQMEADETRHKAAAVLKAIRQVNTQAK

SEQ ID NO: 76636 - DNA, 1347 bp, Listeria monocytogenes str. 1/2a F6854
  CDS (1)..(1347): transl_table=11
atggatgcagatacattaaccgcaattttggcgtttcaaagactttctggtacaggtaaaagcttacttgaaggtgcggcgaaagatgcggaggctggacgttattcgatcattgccattaatcctgtacatgaaattaaagtatatcaacatgattattatatagacggaacacatcaagttgtagcagatcccttaaaagaaattgaattatttattgaaaaagcaagagaagatgaacttgaattgccactggattcaggtgcaattggctatgttggatatgacgttattgcgctttatgaagatttaggcgaaattccagtagaaactagggatataccagatattcgtttttatgtatatgaaagttttgtcattatggaccatcaagcggaagaacttattttagtgcaagataattgttactcaggcagaagtgaagcagacttggataaggcgcttgagtcgatgcttaccgaacttactacaccgaaaaaagacgagcataaggctgttcatgttccaaaaatgtcatataagagcaactatacgaaagatgaatatatggggctagtgaaaaaagcaaaaacatatatccaagagggcgacttctttcaaatagttctctctcaacgattagaagcagattttactgtgaagccatttgattactatcggaaattacgattgttaaatccttctccgtatctatatttcattgattttggtgatacggtgctaattggctcttctccagaaagtttaattaaaacgaaagggcggacggtgattacaaatcctatcgcaggaactagacggcgcggggcaacgaaacaagaagatgaactacttgcttcggaattgttatcggatgaaaaagaattggcagagcaccggatgttggttgacttagggcgaaatgatattgggaaaattgcagaaactggatcagttcatgttcctgtttaccttactattgaaagataccgtttcttaatgcatttagtttcagtagtagaaggaaccttaaaaactggacttactgcaatcgatgctctccgctcgacgctacctgccgggactgttagtggagcaccgaaaataagagccatggagcgaatctatgaatgggaaaatgtaaaacgtggtccatatgctggtgcggttggttatttaactaaaaatggtgattcggatttcgcactttcgattagaacgatggtacttcataacggaaaagcttatgttcaagccggtgcgggaattgtctatgattccgatccagaaagcgaatacttagaaacattacaaaaagcgaaggcacttttggaggtgggagaatga

SEQ ID NO: 76637 - protein, 448 aa, Listeria monocytogenes str. 1/2a F6854
MDADTLTAILAFQRLSGTGKSLLEGAAKDAEAGRYSIIAINPVHEIKVYQHDYYIDGTHQVVADPLKEIELFIEKAREDELELPLDSGAIGYVGYDVIALYEDLGEIPVETRDIPDIRFYVYESFVIMDHQAEELILVQDNCYSGRSEADLDKALESMLTELTTPKKDEHKAVHVPKMSYKSNYTKDEYMGLVKKAKTYIQEGDFFQIVLSQRLEADFTVKPFDYYRKLRLLNPSPYLYFIDFGDTVLIGSSPESLIKTKGRTVITNPIAGTRRRGATKQEDELLASELLSDEKELAEHRMLVDLGRNDIGKIAETGSVHVPVYLTIERYRFLMHLVSVVEGTLKTGLTAIDALRSTLPAGTVSGAPKIRAMERIYEWENVKRGPYAGAVGYLTKNGDSDFALSIRTMVLHNGKAYVQAGAGIVYDSDPESEYLETLQKAKALLEVGE

SEQ ID NO: 76638 - DNA, 1416 bp, Bacillus cereus G9241
  CDS (1)..(1416): transl_table=11
atgacgaaagaagaatttataaaacaaaaaagagagagaaagccatttttagtaatcactgaagaagaaggagatagcattacgccaatttctttatatagacgtatgaaagggaagaagaaattcttattagaaagttcacagcttcatcaagataaaggacgctattcttacttagggtgtaatccgtatggggaagtgaaaagcgttggtatggaagtggaacgaacgattttcggcagggcagaaaagatacaaggtaacgtactacaagtgttagaagaagtaattgcaccatcacaagtagacagtccatttccattttgcggaggagcagttggttatattggatatgatgtcattcggcagtatgaaaacattggagcggatttacacgacccattaaatattccggaagtacaccttttactatatcgtgagtttatcgtttacgatcatttacgccaaaagttgtcgtttgtatatgtatgcagggaagatgattcagcagattacgaagaagtatatgaaaggttgcaaatatacaaagaggaattgctacagggagaagaagctgaagtaaacgcaatacaatccatattatcattcacttcttctataacggaaaaagagttttgtgagatggtagaaatgacgaaagaatatataagagcgggagacatattccaagtcgtactgtcacagcgtttacaaagtgaatgtattggtgatccattcgcgttataccgaaaacttcgaattgcaaatccatcaccatatatgttctatatcgattttcaagattatgttgtactcggttcttcgccggaaagtttactatcagtaagggaggataaagtgatgacgaatccaattgctggtacgagaccaagagggaaaacgaagagggaagatgaggaaatcgcaaaagaactcttagataatgagaaagagcgagcagagcatatgatgcttgtagatcttgggcgaaacgatattggtagagtgagcgaaatcggctcggttacgatagataaatatatgaaagtagaaaaatactctcacgttatgcacattgtatctgaagtttacggaacattgcgaaaacaaatgggcggatttgatgcgttagcgtattgcttaccagcaggtacggtttctggggctccaaaaattagagcgatggaaattataaatgagctagagaacgaaaaaagaaatgtatacgccggtgcagttggatacgttagtttttcaggaaatcttgatatggcgctcgccattcgaacgatggtcgtaaaggatgaaaaagcatacgttcaggcaggagcgggtatcgtctacgattcagacccagttgctgaatatgaagagacgttaaataaagcgagagcgcttttggaggtaatgaaatga

SEQ ID NO: 76639 - protein, 471 aa, Bacillus cereus G9241
MTKEEFIKQKRERKPFLVITEEEGDSITPISLYRRMKGKKKFLLESSQLHQDKGRYSYLGCNPYGEVKSVGMEVERTIFGRAEKIQGNVLQVLEEVIAPSQVDSPFPFCGGAVGYIGYDVIRQYENIGADLHDPLNIPEVHLLLYREFIVYDHLRQKLSFVYVCREDDSADYEEVYERLQIYKEELLQGEEAEVNAIQSILSFTSSITEKEFCEMVEMTKEYIRAGDIFQVVLSQRLQSECIGDPFALYRKLRIANPSPYMFYIDFQDYVVLGSSPESLLSVREDKVMTNPIAGTRPRGKTKREDEEIAKELLDNEKERAEHMMLVDLGRNDIGRVSEIGSVTIDKYMKVEKYSHVMHIVSEVYGTLRKQMGGFDALAYCLPAGTVSGAPKIRAMEIINELENEKRNVYAGAVGYVSFSGNLDMALAIRTMVVKDEKAYVQAGAGIVYDSDPVAEYEETLNKARALLEVMK

SEQ ID NO: 76640 - DNA, 1398 bp, Bacillus cereus G9241
  CDS (1)..(1398): transl_table=11
atgcaacgaagaaaatctttagcgctttctattccatatcagttagatttctttaagcaatataaatttctttctaaggataaaccgcaacatattttgttagagagtgggcgtggcggtcgttataacattgtggggttaaacccagtagcggtaatccgagggaagggtgaaatgttacatataagtgaaagtggtaaggaaacaataaagcaaggaaatccattagatttaatgcaggaatatatggagcgatggaaaacggattataatccggaatacccgccttttcaaggtggtgcaattggttattttagttatgattgcatccgttatattgaaaaacttccttctcttgctgaggatgatattaatatacctgatatattctttttattatttgatgatgtgtttgtgtatgatcaagaagaaaaagtattatggattattacacattatgttgataagcacgaagaggcaaaagagcgattaaatgaatggaaggttctttgggcgacagaggcgccggaaatgactataccgtttgcgtgccctgaaaagaaaagtgaagcagttgcttttactgaagaaagctttatgaaggcggttgaatgtattcaagaatatattggggctggtgatgtgttccaagtaaacttgtcaacaagacaagaaagaacattacaaacacacccgctagaaatttatacaagtcttcgtgaaattaatccatctccatatatgggttacttggagcttggggattttcaaattgttagtggatcgccggagttgttaattaagaaacaaggaactgaagtaagtacaagaccaattgctggaacgagatctagaggggcgaatgagcaagaggatgaagaattggcaagagaattaattgagaatgaaaaagaaagagcagagcacgtcatgcttgtggatttagaacgaaatgatttagggcgtgtttgtaaatatggcactgtagaagtagatgaatttatggtaattgagaaatactcacacgttatgcatattgtttctaatgtgcgtggtgaggtggaaaaagataaagatgcttttgatttagtgaaggctgtgttccctggggggacaattactggcgccccgaaaatacgtacgatggaaattattgaagaattagaacctgttcgccgagggatttatacaggttcaatcggttggatcggttattctggagatacagaattgaatattgtaattaggacacttcttgctaaagatggaaaagcgcatgtacaagcaggagcgggaattgtaattgattcaaacccggaaaatgaatataaagagtcgttaaaaaaggcgattgctttatggcgtgcaaaagaacgtagcgaagaaacggttaggtga

SEQ ID NO: 76641 - protein, 465 aa, Bacillus cereus G9241
MQRRKSLALSIPYQLDFFKQYKFLSKDKPQHILLESGRGGRYNIVGLNPVAVIRGKGEMLHISESGKETIKQGNPLDLMQEYMERWKTDYNPEYPPFQGGAIGYFSYDCIRYIEKLPSLAEDDINIPDIFFLLFDDVFVYDQEEKVLWIITHYVDKHEEAKERLNEWKVLWATEAPEMTIPFACPEKKSEAVAFTEESFMKAVECIQEYIGAGDVFQVNLSTRQERTLQTHPLEIYTSLREINPSPYMGYLELGDFQIVSGSPELLIKKQGTEVSTRPIAGTRSRGANEQEDEELARELIENEKERAEHVMLVDLERNDLGRVCKYGTVEVDEFMVIEKYSHVMHIVSNVRGEVEKDKDAFDLVKAVFPGGTITGAPKIRTMEIIEELEPVRRGIYTGSIGWIGYSGDTELNIVIRTLLAKDGKAHVQAGAGIVIDSNPENEYKESLKKAIALWRAKERSEETVR

SEQ ID NO: 76642 - DNA, 1524 bp, Crocosphaera watsonii WH 8501
  CDS (1)..(1524): transl_table=11
atgatttttcctgactttgagcagttttccgtattagcacaacagggtaattttgttccagtttatcaagaatgggtggcggacctagaaaccccagtttcctcttggtacaaagtttgtggcgatcgcccctacagtttcctcttagaatcggtagaaggaggagaaaacttaggccgttacagtttcttgggttgcgatcccatgtgggtgttatctactcgaggaaatatcaccacccaaacctatcgagagggtgaggtcaaaacttttacaggaaacccctttgatattttgatggaatgtttagcatccattaaaccagttactctaccggaactaccctctggtattggcggtttattcgggttttggggctatgagttgattaattggatcgagccaatagttcctatttatcctattactgacgatgatcttccagacgggatctggatgcaagtagatcatctgcttatttttgatcagattaaacgaaaaatttgggccatcgcctatgctgatctacgagatgagacgatctctttggaagaagcttatcaaaaagcttgcgatcgcatcaccaagttagtcttaaagctacaactgcccttaccaattcaaggcaaaactctagaactaaatcttaattcagaagagacacaacccttaagctacaccagcaacacagaaccctctcagtttcacaaaaacgtgggtcaggccaaagaatatatccgtgcaggggatatatttcaagtagtgctatctcaacggctacaagctcattatgacgatgatccttttaatctttatcgttccctacggttgatcaatccttccccttacatggcttattataactttggagattggcagattattggctccagccccgaggtaatggttaaagcagagcaaaccgaagacgattctttaaccgccattttacgacccatcgcaggaacaagaaaaaggggcaaaactgctagggaagatcaggctttagcagaagacttattacaagatcccaaggaaatagctgaacacgttatgttagtggacttaggccgcaacgatctgggccgtgcctgttgtcaagggagtgtgacagttaatgagttaatggtcattgaacgctattcccatgtgatgcacattgtcagtaatgtgatcggaaaattagcccccaataaaaccccgtgggatttatttaaagcttgttttcctgccggaaccgttagcggtgcgcctaaaattcgggccatggaaattatcaatgagttggaacccgaacgccgaggcccctattctggggtttacggttactatgattttgaaggacagttaaacactgcgatcgccattcggacaatggtggtgcgtcccctcgaaaacggtcaacatttggtctgtgttcaagcaggagcaggtttagtagctgattctgatcccgaaaaagaatatgaggaaaccataaataaggccagggggttattagaggccattcgttctttaagttag

SEQ ID NO: 76643 - protein, 507 aa, Crocosphaera watsonii WH 8501
MIFPDFEQFSVLAQQGNFVPVYQEWVADLETPVSSWYKVCGDRPYSFLLESVEGGENLGRYSFLGCDPMWVLSTRGNITTQTYREGEVKTFTGNPFDILMECLASIKPVTLPELPSGIGGLFGFWGYELINWIEPIVPIYPITDDDLPDGIWMQVDHLLIFDQIKRKIWAIAYADLRDETISLEEAYQKACDRITKLVLKLQLPLPIQGKTLELNLNSEETQPLSYTSNTEPSQFHKNVGQAKEYIRAGDIFQVVLSQRLQAHYDDDPFNLYRSLRLINPSPYMAYYNFGDWQIIGSSPEVMVKAEQTEDDSLTAILRPIAGTRKRGKTAREDQALAEDLLQDPKEIAEHVMLVDLGRNDLGRACCQGSVTVNELMVIERYSHVMHIVSNVIGKLAPNKTPWDLFKACFPAGTVSGAPKIRAMEIINELEPERRGPYSGVYGYYDFEGQLNTAIAIRTMVVRPLENGQHLVCVQAGAGLVADSDPEKEYEETINKARGLLEAIRSLS

SEQ ID NO: 76644 - DNA, 1395 bp, Exiguobacterium sibiricum 255-15
  CDS (1)..(1395): transl_table=11
atgatcgagacagaacaattgataatcgaacaaatcgaaatgaacggcgatgagttaacaccgatttcgatctttttacatctggaaggagaccggaaatgtctgcttgaaagttcggcgagcggtgggaacggtcgctactcgatcatcggcgttaatccggttgaactgcttcgggcggaaggcagtcaagtgacacgacatcatcttcagacggaagaaaccgtaacgatgacaggaaatccggtccaacttctgcaacagtctgtgacacggggaacaacggatttcgagtttccgtttttaagcggcgcaatcggctatgtcggctatgatgcgattcgggcctatgaaaacatcggacctgtgccggacagtgatcggaatttaccggacgcactgcttgcggtctatgacgaaatcattttatacgatcatttggaacaccgcgtgcatttgattcatacgtcactcggcgggctgaccgaccggcaggagatggtacggaagctgcatatccgtaaaacgcagctcgaacaaaccggtcaacagacgcggatcgaactgccgcttgaaaatatcgtctaccaaccgcagattgagaaagaaacgttcatctcgctcgtcgagcaggcaaaacagcatattcggcagggtgatgtcttccaactggtgctgtcacaacggttagacgcaacattcgccggtgatccgttccacttttaccggaagttgcggcaggacaatccgagcccgtacctcttttatattgatttgggagaagtcatcgtcctcggcgcatccccggaaagcctggttcaagtcaaaggtcgtcatgtcacgacgaatccgattgccgggacacgcccccgcggcaaaacaaaacaggaagacatacaactggcggatgagttactgaacgacgaaaaagagcaggctgagcaccggatgctcgttgacttgggccggaacgatctcggtcaagtctgtcagattggcagcattcatgtttcacggcaaatggaaatcgaacgctttaaaaatgtcatgcatctcgtttccgtcgtcgaagggacactggcggaaggaaagacaggggcagacgccttgatttcttgtctgccggcaggtacggtctccggagctccgaaaattcgggcgatgcaactgatcaatcaatacgagacaaaaaagcgcgaagtgtatgccggagccgtcggatattttgatgtcagcgggaatcttgattttgcgcttgcgatccggacgatggtcatccagcacggaaaagcgtatgttcaggccggagcaggtatagtgtatgactctgatccgaccttggagtatgaagagacgttgcacaaagcgaagtcactactggaggtttggaaatga

SEQ ID NO: 76645 - protein, 464 aa, Exiguobacterium sibiricum 255-15
MIETEQLIIEQIEMNGDELTPISIFLHLEGDRKCLLESSASGGNGRYSIIGVNPVELLRAEGSQVTRHHLQTEETVTMTGNPVQLLQQSVTRGTTDFEFPFLSGAIGYVGYDAIRAYENIGPVPDSDRNLPDALLAVYDEIILYDHLEHRVHLIHTSLGGLTDRQEMVRKLHIRKTQLEQTGQQTRIELPLENIVYQPQIEKETFISLVEQAKQHIRQGDVFQLVLSQRLDATFAGDPFHFYRKLRQDNPSPYLFYIDLGEVIVLGASPESLVQVKGRHVTTNPIAGTRPRGKTKQEDIQLADELLNDEKEQAEHRMLVDLGRNDLGQVCQIGSIHVSRQMEIERFKNVMHLVSVVEGTLAEGKTGADALISCLPAGTVSGAPKIRAMQLINQYETKKREVYAGAVGYFDVSGNLDFALAIRTMVIQHGKAYVQAGAGIVYDSDPTLEYEETLHKAKSLLEVWK

SEQ ID NO: 76646 - DNA, 1389 bp, Exiguobacterium sibiricum 255-15
  CDS (1)..(1389): transl_table=11
gtgcgacagacagtatacgaatcatttacatggacaaaggaacagttttataaccggtacgttgaacggacagccggacagacaggtcatatctggcttgagagtggacgaatcggatcctatacgatggcaggcgtccggccggtcggtcacatccggacaaaaaacggtagaacgatcattcaagaagccggacaagaaaaacaatataccgatgctccatttacattgctcgaagagattcgtgcgcgctatgcatcggctcgtccggaagggatgccgccattttttggaggattagccggatatgtcagttacgatgccgttcgttatcttgaacggttgccggaacaggcagaggatgatttggcaacagccgatctttcgctttactggtatgatgaggtcgccgtatttgatcatcagacagaacgattgtttatagctgtcacacgggaaacggaggcggaagcgacgcttgctttggcggcagaagtttcatcgtggcgtcagtcgagtccggctccgatgttcgcagcaccggaagaaaaaacggctgaacggggacgttcattcgaaaggtccgccttcatgcaggcagctgaccggatcaaacaatatattgaagcgggagatgtctttcaagtgaaccttgccgtccgccaacaggaaccgttgcggacaacacccgctcatatttatgatgtattgcgaacgatcaacccgtctccgtatatgggttactttgcagataaagaattggtactcgtttcagcatcgccggagttactagtcgaaaaaatcggtctgtcactcgcgacccgtccgattgccggaacccggccgcgcggacaaaatgaggaagaagacctggcgttagcgaaaacgttactcgacaatgagaaggaacgggcggagcatgtcatgctcgtcgatctcgagcgaaacgatttagggcgtgtcagccgctacggttccgtccatgttgacgaattgatggtcatcgaaaaatactcccacgtccagcacatcgtctcaaacgtccggggagagattgccgcagatgaaaccggcagcagtgtcctggctgcgatgttcccgggaggtacgattacgggagcacctaaaatccggacgatggagatcattgaagagcttgagcctgttcgccgcggcatctatacaggagccctcggttttatcagctgggcggacgatgtaattttcaatatcttgattcggacgcttgtcgcgaaagatggtatggcctatattcaggcaggtgctggcatcgtaaccgactccgactcggaaagtgaatatgaagagtcgctcagtaaagcaaaagcactctgggtcgcaaaagaaatggcggagggaacgacatga

SEQ ID NO: 76647 - protein, 462 aa, Exiguobacterium sibiricum 255-15
MRQTVYESFTWTKEQFYNRYVERTAGQTGHIWLESGRIGSYTMAGVRPVGHIRTKNGRTIIQEAGQEKQYTDAPFTLLEEIRARYASARPEGMPPFFGGLAGYVSYDAVRYLERLPEQAEDDLATADLSLYWYDEVAVFDHQTERLFIAVTRETEAEATLALAAEVSSWRQSSPAPMFAAPEEKTAERGRSFERSAFMQAADRIKQYIEAGDVFQVNLAVRQQEPLRTTPAHIYDVLRTINPSPYMGYFADKELVLVSASPELLVEKIGLSLATRPIAGTRPRGQNEEEDLALAKTLLDNEKERAEHVMLVDLERNDLGRVSRYGSVHVDELMVIEKYSHVQHIVSNVRGEIAADETGSSVLAAMFPGGTITGAPKIRTMEIIEELEPVRRGIYTGALGFISWADDVIFNILIRTLVAKDGMAYIQAGAGIVTDSDSESEYEESLSKAKALWVAKEMAEGTT

SEQ ID NO: 76648 - DNA, 1497 bp, Prosthecochloris aestuarii DSM 271
  CDS (1)..(1497): transl_table=11
atgtcgatatcaagacagagcgaaacctttacgcttcatcctcttatcagcgctgtccatgctgataccgaaacccctgtttcagtctatctcaagcttcgtgaaccctattcctgccttcttgagtcggttgaaggagaggagcagcttgcccgtttttctattattgcgatcgatcctgtcgctgttcttaaagggacggtcaatggggatgtttctatagacatccgcgataagcggtttgaacgcctggcagcgattcccggtgagtcgtccggtttgcgcgatgctgtcgaccgttgtctcgctctttttaaaagcagcgaatttacgcctgacggtcctggcgcatcacggatgattacatccggagcattcggttattttgcctacgacaccatgcatctggtagaacggattccttctgcccaactgcccgatcctgccgatcttcctgacgtatgcctcctgttatgcgataaactggttgttttcgacaatgtcaagcgcaaggtgtttatcatcgtgaattatctcgatgaggctgatcgtccgagggctgaaaaaaccatggcagatatcagggcaaggatgtttaatcccttatcagcccgggagctgatgcttgtacccgaaaagcctgagccgattgtctctaataccgagcgggaagcctatctggagaagatccgggttgccaaggagtacattatgcagggggatatttttcaggtacaggtttcgcagcgtctcaaacgccatctcaattcacgcccgtttgacgtttaccgtatgctgcgaaccatcaatccttctccatatctctattatttcgatatggaggagttcatgattgtgggttcatctcctgaacttctggtcaaggtcgccgatgatcacgacggcagaaggatcgtcgacacccgtccgatcgcaggaacccgcccgagaggtgcgacatgggaagaagaccagcgtatcgagaaagagcttttacgtgacgaaaaggagcttgccgagcacttgatgctgatcgacttgagccgtaacgatatcgggcggatagctaaaatcgggacggttgaaaccaatgagatgatgatcatcgagcgctattcgcatgtgatgcatattgtcagcaacgttcggggtgagctgcgtgacgaattgacgccgatggacgcattctgggcatgctttcctgccggaaccctgacaggtgcccctaaagtcagggctatggaaatcatctatgaactggagcaggagaaacgcgggctttatggtggagcggtcggatttatcgatttctgcgggcagcttgagaccgctattgctattcgtaccatggtggttcgtgacgatacagtctatttccaggcggccggtggtgtggttgccgattctcttgccgagaatgaattcgacgagaccatgaacaaaatgagagcggggctcagaacgctcgaagcgctcgagcatgtttcaaacgattga

SEQ ID NO: 76649 - protein, 498 aa, Prosthecochloris aestuarii DSM 271
MSISRQSETFTLHPLISAVHADTETPVSVYLKLREPYSCLLESVEGEEQLARFSIIAIDPVAVLKGTVNGDVSIDIRDKRFERLAAIPGESSGLRDAVDRCLALFKSSEFTPDGPGASRMITSGAFGYFAYDTMHLVERIPSAQLPDPADLPDVCLLLCDKLVVFDNVKRKVFIIVNYLDEADRPRAEKTMADIRARMFNPLSARELMLVPEKPEPIVSNTEREAYLEKIRVAKEYIMQGDIFQVQVSQRLKRHLNSRPFDVYRMLRTINPSPYLYYFDMEEFMIVGSSPELLVKVADDHDGRRIVDTRPIAGTRPRGATWEEDQRIEKELLRDEKELAEHLMLIDLSRNDIGRIAKIGTVETNEMMIIERYSHVMHIVSNVRGELRDELTPMDAFWACFPAGTLTGAPKVRAMEIIYELEQEKRGLYGGAVGFIDFCGQLETAIAIRTMVVRDDTVYFQAAGGVVADSLAENEFDETMNKMRAGLRTLEALEHVSND

SEQ ID NO: 76650 - DNA, 1506 bp, Xylella fastidiosa Dixon
  CDS (1)..(1506): transl_table=11
atgttatctgtgtcaggaaggaaagttgctttgatcactgcaatgcagtttcagcgtcaagttgccgaagggtgtacccgcattccagtggtgcgtgaagtccagtctgatttggatactccgctttcggtctatctaaagtttgccgatgctccatatacctatttgtttgagtcggtggaaggtggggagcattttgcgaggtattcgatcattgggttgccggcacgccgtgtctatacctttcatgggcataccctggtggtgagtgagttcggtaaggtgttggaaacgcgtcaagtcgccgatccgcttgccgaagttgagctgttgcgtgcgcagtatgtagtgccgcaattagaagggttgccaggttttacaggcggcttagtggggtggttcggctttgaatgtatccagtacatcgaacctcgcttcatgggaggtaaaaaacgtgatgaacttggtacgccagatattctgctgatgctttcggaagaattggcggtgttcgacagcctcaagggccgattatatttgatcgttcacgcggatcctgctcgaccgcattcttacgttcgtgcaatggaacgtttggatgcgttgatccaccgtctgcggcaaggtgggatggattatccgcattcacatatttcggaagtgattaacgaggaagattttcactcttctttgacgcgtgagcagtatcacgctgtggtgcgtaaggcgcaggagtatgtgcgttcgggtgatatttttcaggttgtaccaagtcagcgcctgtgtacgcagtttcatgcacgaccgattgatgtatatcgggcgttgcgcacgctgaatccgtcgccttatatgtatttcattgatattggtgctactcaggtggttggttcatcaccggagatattggcgcgattgcagggggatgtggtcacggtgcgtccgattgccggcacacgcccgcgaggtgcgactccggagcatgacaaacggttggaaatggagttgttagccgatccaaaagagcgtgctgaacacgtgatgctgattgatttgggccgcaatgatatcggacgtgttgtcgaggcagggagtgtacaagtcaaggagtcgtttgtaatcgagctttatagtcatgtcatgcatattgtcagtgaggtcaccggtatcttgaagccgggtttgaactacgttgatgtgttacgtgcaacgttccctgcgggtactgtgtccggagcgccaaagatccgtgcattggagattatccgtgagttggaaccagtgtgtcgcaacgtatattctggtgcagtgggttacattggctggcatggagatgctgatactgcaatcgcgattcgtaccgcggtgattcaaaatggttacctgtacgtgcaggctggtggtggtgtggtgtatgactcggatccagatttggagtggcaggaaaccatgaacaaggcgcgtgcattgtttagggctgtgacgcaggcggccagagggttgtga

SEQ ID NO: 76651 - protein, 501 aa, Xylella fastidiosa Dixon
MLSVSGRKVALITAMQFQRQVAEGCTRIPVVREVQSDLDTPLSVYLKFADAPYTYLFESVEGGEHFARYSIIGLPARRVYTFHGHTLVVSEFGKVLETRQVADPLAEVELLRAQYVVPQLEGLPGFTGGLVGWFGFECIQYIEPRFMGGKKRDELGTPDILLMLSEELAVFDSLKGRLYLIVHADPARPHSYVRAMERLDALIHRLRQGGMDYPHSHISEVINEEDFHSSLTREQYHAVVRKAQEYVRSGDIFQVVPSQRLCTQFHARPIDVYRALRTLNPSPYMYFIDIGATQVVGSSPEILARLQGDVVTVRPIAGTRPRGATPEHDKRLEMELLADPKERAEHVMLIDLGRNDIGRVVEAGSVQVKESFVIELYSHVMHIVSEVTGILKPGLNYVDVLRATFPAGTVSGAPKIRALEIIRELEPVCRNVYSGAVGYIGWHGDADTAIAIRTAVIQNGYLYVQAGGGVVYDSDPDLEWQETMNKARALFRAVTQAARGL

SEQ ID NO: 76652 - DNA, 1506 bp, Xylella fastidiosa Ann-1
  CDS (1)..(1506): transl_table=11
atgttatctgtgtcaggaaggaaagttgctttgatcactgcaatgcagtttcagcgtcaagttgccgaagggtgtacccgcattccagtggtgcgtgaagtccagtctgatttggatactccgctttcggtctatctaaagtttgccgatgctccatatacctatttgtttgagtcggtggaaggtggggagcattttgcgaggtattcgatcattgggttgccggcacgccgtgtctatacctttcatgggcataccctggtggtgagtgagttcggtaaggtgttggaaacgcgtcaagtcgccgatccgcttgccgaagttgagctgttgcgtgcacagtatgtagtgccgcaattagaagggttgccaggttttacaggcggcttagtggggtggttcggctttgaatgtatccagtacatcgaacctcgcttcatgggaggtaaaaaacgtgatgaacttggtacgccagatattctgctgatgctttcggaagaattggcggtgttcgacagcctcaagggccgattatatttgatcgttcacgcggatcctgctcaaccgcattcttacgttcgtgcaatggaacgtttggatgcgttgatccaccgtctgcggcaaggtgggatggattatccgcattcacatatttcggaagtgattaacgaggaagattttcactcttctttgacgcgtgagcagtatcacgctgtggtgcgtaaggcgcaggagtatgtgcgttcgggtgatatttttcaggttgtaccaagtcagcgtctgtgtacgcagtttcatgcacgtccggttgatgtatatcgggcgttgcgcacgctgaatccgtcgccttatatgtatttcattgatattggtgctactcaggtggttggttcatcaccggagatattggcgcgattgcagggggatgtggtcacggtgcgtcctattgccggcacacgcccgcgaggtgcgactccggagcatgacaaacggttggaaatggagttgttagccgatcccaaagagcgtgctgaacacgtgatgctgattgatttgggtcgcaatgatatcggacgtgttgtcgaggccgggagtgtacaagtcaaggagtcgtttgtaatcgagcgttatagtcatgtcatgcatattgtcagtgaggtcaccggtatcttgaagccgggtttgaactacgttgatgtgttacgtgcaacgttccctgcgggtactgtgtccggagcgccaaagatccgtgcattggagattatccgtgagttggaaccagtgtgtcgcaacgtatattccggtgcagtgggttacattggctggcatggagatgctgatactgcaatcgcgattcgtactgcggtgattcaaaacgattgcttgtacgtgcaggctggcggtggtgtggtgtatgactcggatccagatttggagtggcaggaaaccatgaacaaggcgcgtgcattatttagggctgtggcgcaggcggccagagggttgtga

SEQ ID NO: 76653 - protein, 501 aa, Xylella fastidiosa Ann-1
MLSVSGRKVALITAMQFQRQVAEGCTRIPVVREVQSDLDTPLSVYLKFADAPYTYLFESVEGGEHFARYSIIGLPARRVYTFHGHTLVVSEFGKVLETRQVADPLAEVELLRAQYVVPQLEGLPGFTGGLVGWFGFECIQYIEPRFMGGKKRDELGTPDILLMLSEELAVFDSLKGRLYLIVHADPAQPHSYVRAMERLDALIHRLRQGGMDYPHSHISEVINEEDFHSSLTREQYHAVVRKAQEYVRSGDIFQVVPSQRLCTQFHARPVDVYRALRTLNPSPYMYFIDIGATQVVGSSPEILARLQGDVVTVRPIAGTRPRGATPEHDKRLEMELLADPKERAEHVMLIDLGRNDIGRVVEAGSVQVKESFVIERYSHVMHIVSEVTGILKPGLNYVDVLRATFPAGTVSGAPKIRALEIIRELEPVCRNVYSGAVGYIGWHGDADTAIAIRTAVIQNDCLYVQAGGGVVYDSDPDLEWQETMNKARALFRAVAQAARGL

SEQ ID NO: 76654 - DNA, 1497 bp, Xylella fastidiosa Ann-1
  CDS (1)..(1497): transl_table=11
atgattaaaatactaacaactactacagatgtacctctagatggaagtgatctaagagaaaatgcctttttaatctatcgaaaactgttaaaaaattttgatagcgatcaattgatgcttttagagtctttggggataaattcggttgactctcgagtttcgatggtaggcataaacccgatcattactgttaatgtaaaaaataagacgatatcaatacacagcaatcatatcttactaaaagaattaaatatagctgacagtatcgcttcacttcagacaacaacattatcactgtccgtctatcaactcgtcgataaaaagatggtatggcaattcctaaaggaatttgagaaaaacttttctcaagtaccgacgcatcaatgcggaattatggctttctcctgcttttcttatgaaaccatccattacatagaaacaattccagaaactgaactcaacgatcaagatgaccatgatataactttaatactttaccaatcacaattagtaattgaacaaaacaaggctgaacttatcacctattctttccctggtgttgaggatttttacgttgcgaatattattgatgcaatcacatgcatgactgatgttgaacaagtacaagataaaagtattgattttgaagtaatacaagaaacaacacgtcatgactaccttgataaagtaagaaaagcattacaccatgttactgtcggagatatttaccaagtacaaataggacagaagatccaagtaaaagcagagaccacaccgcttgatgtctatcggcgattacggatattaaatccttcaccctacatgtatttatttagtataaacggtcagacagtcattggcgccagccctgagttatttttgcgcatcagtacggatgaagaaattctcatgcgtccgattgctggcacattaggaaaaagagagggacgcactcttcatcatgcaacacaacatttgcaagctgacaacaaggaagttgctgagcacatgatgttagttgatttatgtcgtaatgatatatatcgcgtctgtactccagaatcactcaaagtttcaggcgtattggagattgaagaatactcgcatgtatatcatatggtttcgacaaccaaagcaatgttaaaacaaggactcgacaaatgcgatgtgatgatcgcatcgtttccagcgggaaccatgactggagcaccgaaggttcgggccatggaaatcatctcagagcttgaggatagccagcgcggtaaatatgccggtgcgctcggcatcctaggcattggatccaactatatcaatactgcactttgtatccgctctactgtcttaaaaaaccaagtctataccttgcgcgcatctgcagggattgtttccgactctcaagaacagtctgagtacttagaaacacttcacaaaatgggatctatgtttaaagcaattactggggaagaaatttcatgccatatcgagtcatcgtcgtag

SEQ ID NO: 76655 - protein, 498 aa, Xylella fastidiosa Ann-1
MIKILTTTTDVPLDGSDLRENAFLIYRKLLKNFDSDQLMLLESLGINSVDSRVSMVGINPIITVNVKNKTISIHSNHILLKELNIADSIASLQTTTLSLSVYQLVDKKMVWQFLKEFEKNFSQVPTHQCGIMAFSCFSYETIHYIETIPETELNDQDDHDITLILYQSQLVIEQNKAELITYSFPGVEDFYVANIIDAITCMTDVEQVQDKSIDFEVIQETTRHDYLDKVRKALHHVTVGDIYQVQIGQKIQVKAETTPLDVYRRLRILNPSPYMYLFSINGQTVIGASPELFLRISTDEEILMRPIAGTLGKREGRTLHHATQHLQADNKEVAEHMMLVDLCRNDIYRVCTPESLKVSGVLEIEEYSHVYHMVSTTKAMLKQGLDKCDVMIASFPAGTMTGAPKVRAMEIISELEDSQRGKYAGALGILGIGSNYINTALCIRSTVLKNQVYTLRASAGIVSDSQEQSEYLETLHKMGSMFKAITGEEISCHIESSS

SEQ ID NO: 76656 - DNA, 1512 bp, Sulfitobacter sp. EE-36
  CDS (1)..(1512): transl_table=11
atgtcgttgacacccgattatgacagctttgccgcaggctatgcggcgggcaagaaccagatcgtttacacccgtctggctgccgatctggacacgcctgtttcgctgatgctcaagctcaccggtgcggcacagaacgcctttgtgctggaatctgtgaccggcggcgaggtccgcgggcgctattcgattatcgggatgaagcccgatctgatctggcgctgtcagggcaccacatcggccatcaaccgttcggcacgctatgacgtagatgccttcgacgatgttgcgggggatccgctggatactttgcgagcggtgatcgcggagtcgaagatcgacctacctgatgacctgccgcaagccgccgccgggctgttcggatatctggggtatgatatgatccggctggtggagcatcttccgaatgtgaaccccgatcccatggggctgcccgatgcgatgatggtgcgcccctcggtgattgccgtgctcgacggggtcaagggcgaggtcacgatcgtgtcgccagcttgggtgtctgacgggcaatcggccaaggccgcttatgcccaagccgccgaacgcgtgatggatgcggtgcgtgatctggaacggtcgatgcccggcaccagccgtgatctgggtgacgcccacgaagaatccgcccccgtcagcaatttcacccgcgaaggctataaatccgccgtagaaaaagcgcgcgaatatatcgtggcgggcgacatctttcaggtggtgccgtcgcaacggtgggcgcaggggttctctcagccgccctttgcgctgtatcgcagtttgcgccggaccaacccgtcgcccttcatgttctatttcaacttcggtgatttccacgtcgtcggggcctcgcccgagatccttgtgcgcgtcttcggcaacgagatcacgatccgccccgttgcaggcacccgtcgtcgcggggccacgccggaagaagaccgcgcgctggaggctgatctgctggccgaccagaaagagctggctgaacatctgatgctgcttgatctgggccgcaatgacgtgggccgggtcgccaagatcggcaccgtgcgcccgaccgaggaattcatcgtcgaacgctacagccacgtcatgcatatcgtgtccaatgttgtgggcgagctgcgcgaagaccgcgatgcgctggatgccttctttgcggggatgcctgcgggcacagtgtcaggcgcacccaaggtccgcgcgatggagattatcgacgagctggagcccgagaaacgcggcctctacggcggcggtgttggctactttagcgcgggcggcgacatggacatgtgcatcgccctgcgcactgccgtcatcaaggacaagaccctgtacattcaggccggtggcggcgtcgtctatgacagcgacgcagaggcggagtatatggagacggtgcataaatccgacgcgatccgccgtgcggcggccgatgcagcacgcttcgcaggtcaagggaacagctga

SEQ ID NO: 76657 - protein, 503 aa, Sulfitobacter sp. EE-36
MSLTPDYDSFAAGYAAGKNQIVYTRLAADLDTPVSLMLKLTGAAQNAFVLESVTGGEVRGRYSIIGMKPDLIWRCQGTTSAINRSARYDVDAFDDVAGDPLDTLRAVIAESKIDLPDDLPQAAAGLFGYLGYDMIRLVEHLPNVNPDPMGLPDAMMVRPSVIAVLDGVKGEVTIVSPAWVSDGQSAKAAYAQAAERVMDAVRDLERSMPGTSRDLGDAHEESAPVSNFTREGYKSAVEKAREYIVAGDIFQVVPSQRWAQGFSQPPFALYRSLRRTNPSPFMFYFNFGDFHVVGASPEILVRVFGNEITIRPVAGTRRRGATPEEDRALEADLLADQKELAEHLMLLDLGRNDVGRVAKIGTVRPTEEFIVERYSHVMHIVSNVVGELREDRDALDAFFAGMPAGTVSGAPKVRAMEIIDELEPEKRGLYGGGVGYFSAGGDMDMCIALRTAVIKDKTLYIQAGGGVVYDSDAEAEYMETVHKSDAIRRAAADAARFAGQGNS

SEQ ID NO: 76658 - DNA, 1512 bp, Roseovarius nubinhibens ISM
  CDS (1)..(1512): transl_table=11
gtggatctgaccccaagctttgacgattttgccgcgggctttaccgcgggcaagaaccaggtggtctatgcaaggctcgccgccgatctcgacacgcccgtgtcgctgatgctcaagctcaccggcgcggcccgcgatgcgttcttgctcgaatccgtcaccggcggcgaggtgcgcgggcgctattcgatcatcgggatgaagccggatgtggtctggcaatgccacggtcctgcgagccgcatcaaccgcgacgcccgtttcgatggcgacgccttcaccgatcaagacggcgatccgctcaccaatctgcgcgccctgatcgaggaaagccgcatcgacctgcccgaagacctccccgccgcgagcgccgggctctttggctatctcggctatgacatgatccggctcgtcgaacatctgcccgatgtgaaccccgatccgctcggcctgcccgatgcgctgatgctgcggccgtcggtggtggcggtgctcgacggggtcaagggcgaggtgatcgtggtctctccggcttgggtcggctcgggccaatcggccaaggccgcctatgcgcaggccgccgaacgggtgatggatgcggtgcgcgatctcgaacgcgccctgccccagaacacccgtgatctgggcgaagcccgcgaggacgcggcgccggtgtcgaatttcacccgcgagggctataaacaggcggtcgagaaggccaaggaatatatccgcgctggcgacatctttcaggtggtgccgtcacagcgctggacccagcccttccgccagccgcctttcgccctctaccgcagcctgcggcgcaccaacccgtcgcccttcatgttctatttcaacttcggcggctttcaggtggtgggcgccagccccgaaatcctcgttcgcgtcttcggcaacgaggtgaccatccgccccatcgccggcacccgcccgcgcggcgcgacccccgccgaggaccgcgccaacgaggccgatctgatggccgaccagaaagagctggccgaacatctcatgctcttggatctcgggcgcaatgatgtgggccgcgtcgccaagatcggcaccgtgcgcccgaccgaagaattcatcatcgaacgctatagccacgtcatgcatatcgtctcgaatgtggtgggcgaactggccccggaccaggacgcgctcggcgcgcttctggccggtctgcccgcaggcaccgtgtccggcgcgcccaaggtccgcgcgatggaaatcatcgacgagctcgaaccggaaaagcgcggcgtctatggcggcggcgtcggttatttcagcgcgggcggcgacatggatgtctgtatcgcgctgcgcacggcggtggtgaaggacgagaacctctatattcaggccggcggcggcgtggtctatgacagcgaccccgaggccgaatatatggagacggtgcataaatcgaacgccatccgccgcgccgcggccgatgcggcgcggttcaccggcaatggcaatggctag

SEQ ID NO: 76659 - protein, 503 aa, Roseovarius nubinhibens ISM
MDLTPSFDDFAAGFTAGKNQVVYARLAADLDTPVSLMLKLTGAARDAFLLESVTGGEVRGRYSIIGMKPDVVWQCHGPASRINRDARFDGDAFTDQDGDPLTNLRALIEESRIDLPEDLPAASAGLFGYLGYDMIRLVEHLPDVNPDPLGLPDALMLRPSVVAVLDGVKGEVIVVSPAWVGSGQSAKAAYAQAAERVMDAVRDLERALPQNTRDLGEAREDAAPVSNFTREGYKQAVEKAKEYIRAGDIFQVVPSQRWTQPFRQPPFALYRSLRRTNPSPFMFYFNFGGFQVVGASPEILVRVFGNEVTIRPIAGTRPRGATPAEDRANEADLMADQKELAEHLMLLDLGRNDVGRVAKIGTVRPTEEFIIERYSHVMHIVSNVVGELAPDQDALGALLAGLPAGTVSGAPKVRAMEIIDELEPEKRGVYGGGVGYFSAGGDMDVCIALRTAVVKDENLYIQAGGGVVYDSDPEAEYMETVHKSNAIRRAAADAARFTGNGNG

SEQ ID NO: 76660 - DNA, 2169 bp, Oceanicola batsensis HTCC2597
  CDS (1)..(2169): transl_table=11
atgaccgatctgacctatcggaccgccggcggcctgaccgtgacccgacgcgccgtccccgccgattaccatcaggataccgaacgccttgccgagacgctggattcgcatcggggggcgctgttctcctcgaattacgaatacccggggcgctatacccgctgggaattcggctttaccgaaccgcccgtcatgatcgaggcgcgcgggcgggcgatgcggattgctgctctcaatccgcggggccgggtcctgcttgccatgatgcggcccgccgtcgaggaattgccggaggtggccgaattcgatcccggcgacgaggcgatcgcattgcgccttcgcgatccggaccgggtctatgacgaagaggaacggtcgcgcgcgccgtcggtcttttccgttctgcgcgcgatcgtggcgctgttcaaatcggacgaggatcatcacctcgggctgtacggcgccttcggttatgacctcgctttccagttcgagccgatcgaattccatctggagcggcccgccgatcagcgcgacctggtgctattcctggccgacgacattctggtggccgatcactattcggccagcgccgtccgttaccggtacgatttcgacgatggccggatgcgcaccgccggattgcagggcggcggcacggccgagccgttcgaacgcgggccgcaggacgtgccgcgcggcgatcacaatccgggcgaatatgcggaactggtgcgcgaggcgaagaaaagcttccggcgcggcgatctgttcgaggtggtcccgggacaggttttctacgagccctgcaaggacagcccttcggccattttcaaaaggctgaagaagatcaaccccgcgccgttcgggttcatcatgaacctgggcgaacgggaatacctcgtcggcgcctcgcccgagatgttcgtccgggtgacgggccgacgggtcgagacctgcccgatctcgggcacgatccggcgcggggcggacgccatcgaggacagcgagcagatcctcaagctgctccagtccaagaaggacgagagcgagctgacgatgtgttcggacgtggaccgcaacgacaagagccgggtgtgcgatcccggctcggtgcgggtgatcgggcggcgccagatcgagatgtattcgcggctgatccacacggtcgaccatatcgaggggcggctgcgcgaggggatggatgccttcgatgccttcctgtcgcatgcctgggcggtcacggtgacgggggcgccgaaactctgggcgatgcgcttcatcgaacggcacgagaaatcgacgcggttctggtatggcggggccgtcggggccatgggcttcgacggcgacatgaacaccggcctcacgctgcgcacgatccgcatcaaggacggcgtggccgaggtgcgggccggcgcgaccctgctctatgacagcgatcccgacgaggaagaggccgagaccgagctcaaggccagcgccatgcgcgcggcgatccggggcgacgtgcgggcgaacgagggtccgggcgacggctggcggcttgaaacgggccgggggcggcgggtgctgcttgtcgatcacgaggacagtttcgtgcacacgctggccaactatttccgccagaccggggccgaggtgcggacggtgcggacaccggtgccggacgatgtccttgccgaataccggcccgatctggtcgtgctgtcgcccggccccggcaatccgcaggatttcgactgccgcgccaccatcgacaaggcgctggcccgcgcgcttccggtcttcggcgtctgcctcgggctgcaggcgatcgccgagtatttcggggccgagctggcgcagctcgaggtgccgatgcacggcaaaccctcgcgggtgcaggtgaccgagccggggctggtctttgccggtctgcccgagacggtgacgatcggacggtatcattcgctgcacgcgcgcgcccagaccctgcccgaggccctgcgcgtcaccgcacgcacgtcggatggtgtcgtcatgggtctggaacaccgggaactgccggttgcggcggtgcagttccatccggaatcgatcatgtcgctgggccaggaggcgggtcttcggatgatcgagaacgtcgtgagccgcctcgtgtccggggacaggaagatcccggcctga

SEQ ID NO: 76661 - protein, 722 aa, Oceanicola batsensis HTCC2597
MTDLTYRTAGGLTVTRRAVPADYHQDTERLAETLDSHRGALFSSNYEYPGRYTRWEFGFTEPPVMIEARGRAMRIAALNPRGRVLLAMMRPAVEELPEVAEFDPGDEAIALRLRDPDRVYDEEERSRAPSVFSVLRAIVALFKSDEDHHLGLYGAFGYDLAFQFEPIEFHLERPADQRDLVLFLADDILVADHYSASAVRYRYDFDDGRMRTAGLQGGGTAEPFERGPQDVPRGDHNPGEYAELVREAKKSFRRGDLFEVVPGQVFYEPCKDSPSAIFKRLKKINPAPFGFIMNLGEREYLVGASPEMFVRVTGRRVETCPISGTIRRGADAIEDSEQILKLLQSKKDESELTMCSDVDRNDKSRVCDPGSVRVIGRRQIEMYSRLIHTVDHIEGRLREGMDAFDAFLSHAWAVTVTGAPKLWAMRFIERHEKSTRFWYGGAVGAMGFDGDMNTGLTLRTIRIKDGVAEVRAGATLLYDSDPDEEEAETELKASAMRAAIRGDVRANEGPGDGWRLETGRGRRVLLVDHEDSFVHTLANYFRQTGAEVRTVRTPVPDDVLAEYRPDLVVLSPGPGNPQDFDCRATIDKALARALPVFGVCLGLQAIAEYFGAELAQLEVPMHGKPSRVQVTEPGLVFAGLPETVTIGRYHSLHARAQTLPEALRVTARTSDGVVMGLEHRELPVAAVQFHPESIMSLGQEAGLRMIENVVSRLVSGDRKIPA

SEQ ID NO: 76662 - DNA, 1521 bp, Prochlorococcus marinus str. MIT 9211
  CDS (1)..(1521): transl_table=11
atgcatatatcagatcaggattcatttttagaagcagcttctagaggattaacttttattccactggttcacagttggcctgcagaccttgagacaccattatcaacatggttgaaggttggtgaaggccatcctccaggggttcttcttgaatctgtagagggaggcgaaactcttgggagatggagtgtagttgctaccgatcctctttggatagcaactgctagagggaatagtctcaaaagggagtggcgtgacggacaatgcgacgaaatacaaggcaatccttttgaagttattagggaatggcttcttccatatcgtactgagcctattgacggcttaccttgcataggtcaattgtatggaatatggggttatgaattgattcaatgggtagagccaaaagtttcagtgtttgcaaggactaaaagtgatcctcctgatggagtgtggatgtttatggatagagttttaatttttgatcaggttaaaagagtgattaatgcagtctcgtatggagatttgacatgcaatgatcaaccacttcaggcatatgaaaaggctgcacaaagaagcaaagatttgcaagttcttttgcaatccccacttccttcgctgaaacctcttcaatggcaatcaacaactgagactccaaactcagtaaagagtaataccactcaagtcaaatttaagaatgcagttaaatcagctaaggaatacataaaaaaaggagatatttttcaaattgtccttagtcagaaattaagaactcaggttcctaataaaccttttgagatttatcgaagtttgcgcatggtgaatccttcgccgtttatggctttttttgattttggtgattggcaacttattggatctagtcctgaagtgatggttcaagcaaagcccagtgaaaaaggtatctatgcaagcttgagacctattgcaggtacaagacctagaggtatcaatgaaatggaagataaaacattagaacgcgaattattatctgatccaaaagaaatagcagagcatgtaatgctagtggatttaggacgtaatgatttgggcagggtttgtcgatctgggactgttgaagttaaagagttgatggtgattgaaaagtattctcatgtgatgcatattgttagtgaagtagaaggaatgcttagagaagataaggatgtatgggatctactaatggcagctttccctgctggcacggtttctggagcacctaagataagagcaatgcagttaatcaatgaattagaaactcagcctcgaggaccatattcaggggtatatggatcaatggatttaaatggagcattaaatacagcaattaccattagaactatggttgtatcctctcattcaaacaatatttcaaatgtgcaagttcaagcaggtgcaggtgtagttgctgactcaatccctgcaaatgaattccaagaaactatgaataaagctaaaggcttgctcactgcactaggatgtcttgagcggtctgattcatga

SEQ ID NO: 76663 - protein, 506 aa, Prochlorococcus marinus str. MIT 9211
MHISDQDSFLEAASRGLTFIPLVHSWPADLETPLSTWLKVGEGHPPGVLLESVEGGETLGRWSVVATDPLWIATARGNSLKREWRDGQCDEIQGNPFEVIREWLLPYRTEPIDGLPCIGQLYGIWGYELIQWVEPKVSVFARTKSDPPDGVWMFMDRVLIFDQVKRVINAVSYGDLTCNDQPLQAYEKAAQRSKDLQVLLQSPLPSLKPLQWQSTTETPNSVKSNTTQVKFKNAVKSAKEYIKKGDIFQIVLSQKLRTQVPNKPFEIYRSLRMVNPSPFMAFFDFGDWQLIGSSPEVMVQAKPSEKGIYASLRPIAGTRPRGINEMEDKTLERELLSDPKEIAEHVMLVDLGRNDLGRVCRSGTVEVKELMVIEKYSHVMHIVSEVEGMLREDKDVWDLLMAAFPAGTVSGAPKIRAMQLINELETQPRGPYSGVYGSMDLNGALNTAITIRTMVVSSHSNNISNVQVQAGAGVVADSIPANEFQETMNKAKGLLTALGCLERSDS

SEQ ID NO: 76664 - DNA, 1545 bp, Erythrobacter sp. NAP1
  CDS (1)..(1545): transl_table=11
gtgaacgcatcccccgcatcccttccgatcgggctcgaaaacgctgccggagccgccaaggctctcgaaagcggcgcgcctgcgctcgtgtggcgcaaggtcgttgccgacagcgacacgccggttggagcagcgcggcgactgatcgtgcccggtcgcggcgacttcctgctggaatcggtcgaaggtggtgaggttcgcgggcgctattcactcctcggcctcgatcccgatctcgttttccgtgccagcgctagcgaggcggcgatcaaccgtgcatggaaatccgaccgcgacgcgtttgagccttgttcgggcaacgctctgagcgaacttcgcgcgctggccgatgcatgccgcgttgatgtgcccgagggcgccgagaacccgcttccccctgcccttgcctgcctcgttggctatttcggctacgagacgatcgggcttgtcgaaacgcttccgcgtgcgccgcaaagcgagttggcactgccagacatgctgttcgtgcgcccgactgtcattctcgtgttcgacgggttgagcgatgcgctcttttgcgtcgcgccgatctgggaagccgatgatgcccgcgccgctatcgaagcggcaggcgagcggatcgacgaaaccctgcgtgccctcgtccagcctcgtcccgaagcgccacgtgcggccgctgacacgctcgagcctgaactcacgcctgtgatggacggggaggactacaaggcgctcgccctgcgcgcgaaagagtacatccttgccggcgacatcttccaggtcgtgctggcccagcgatttacctgtccgttcgaattgccgccgctggaactttaccgcagcctgcgccgggtaaacccgtcgcccttcctctatttcctcgacctgccaggtttcgccatcgtcggttcgagccctgagatactcgtccgcgtccgagacggagaagtcacgatccgccccatcgccgggacacgcccacgcggcgaaacccccgcgctcgaccgcgagaacgagacgagcctgctcgccgatcctaaggagcgcgcggagcatctcatgctgctcgaccttggacggaacgatgttggccgggtggcagcgcgcgggaccgtcgaagtcacagacagcttcaccatcgaacgctacagccatgtcatgcacatcgtcagcaatgtcgtaggccgcctcgcgagcgacaaggacgcgctcgacgcgcttttcgcaggcttcccagcaggcacagtctcgggagcaccgaaagtgcgcgcctgcgagatcattgccgaactcgaaccagaaacgcgaggggcctatgcgggcggggtcggctatttcgcgccggacgggtcggtggattcgtgcatcgtcctgcgcaccgctgtcgtgaaagacggaaccatgcacgtgcaggcgggcgctggcatcgtcgcggacagcgatcccgactacgaactggcagaatgccgtgccaaggcgggcgcgctaatagcggcggcaaaggaggccgtgcgcgtcgccagcgagccggggttcggacaatga

SEQ ID NO: 76665 - protein, 514 aa, Erythrobacter sp. NAP1
MNASPASLPIGLENAAGAAKALESGAPALVWRKVVADSDTPVGAARRLIVPGRGDFLLESVEGGEVRGRYSLLGLDPDLVFRASASEAAINRAWKSDRDAFEPCSGNALSELRALADACRVDVPEGAENPLPPALACLVGYFGYETIGLVETLPRAPQSELALPDMLFVRPTVILVFDGLSDALFCVAPIWEADDARAAIEAAGERIDETLRALVQPRPEAPRAAADTLEPELTPVMDGEDYKALALRAKEYILAGDIFQVVLAQRFTCPFELPPLELYRSLRRVNPSPFLYFLDLPGFAIVGSSPEILVRVRDGEVTIRPIAGTRPRGETPALDRENETSLLADPKERAEHLMLLDLGRNDVGRVAARGTVEVTDSFTIERYSHVMHIVSNVVGRLASDKDALDALFAGFPAGTVSGAPKVRACEIIAELEPETRGAYAGGVGYFAPDGSVDSCIVLRTAVVKDGTMHVQAGAGIVADSDPDYELAECRAKAGALIAAAKEAVRVASEPGFGQ

SEQ ID NO: 76666 - DNA, 1530 bp, Synechococcus sp. RS9917
  CDS (1)..(1530): transl_table=11
atgctcagccctgaccgcgcctccttttttgaggccgccgctgcgggagccaccttcattccggtggctcacagctggccggccgacctggaaacgcctctcaccacatggttgaaggtgggtgaaggccgaccgccgggtgtgctgctcgaatccgtcgaaggcggtgttcacctaggccgatggagcgtggtggcctgtgacccgctctggacgctgacagctcgcggcgaggcatgcagccgtcgctggcgtgatggagcggtggagtctttacagggcaatcccttcgacctcctgcgcagccaactgaagccttaccgccccggccacatccccggtctgccaccactggggcagctctacggcatctggggctatgaactgattcgctggatcgagcccacggtgccgattcacaccccggccgcaaccgatccgcccgatggcctctggatgctgatggacagcatcctgatcatcgaccaggccaagcgtctgatcacagccgtggcctacggagatctcagcggcggcaggggcagtgcctccagcgccgatgaggcctgggaccaggcgatggtgcgaatccgccacctggaggagcggatggcagcacctctgccttcggtccgcccccttcgctggcaacccaacagcgggatcccccccaccagcagcaaccgcgatcaggacgattttgaggccgccgtgcgcagcggccgcgaccacatcgccgccggcgatgtgttccagctggtactgagtcagcgactggaaacgacggtgccccagaagcccctggagctttaccgcagcctgcggatggtgaacccatcgccctacatggccttctttgacttcggcgactggcagttgatcggctccagcccggaggtgatggtcaaggccgaacccgatgcggagggcatccgcgccagcctcaggccgatcgccggcacccgaccccgtggcgacacggaccaggaggatcgggccctggaggcggacctgctggccgatccaaaggaacgggccgaacacgtgatgctggtggatctcggacgcaacgatctcggccgggtctgtcggcccggcagcgttgccgtgaaggacctgatggtgatcgagcgctactcccacgtgatgcacatcgtgagtgaggtggaggggcgactcgcggacgaccacgacatctgggatctgctgatggccgcgttccccgccggcaccgtcagtggcgcacccaagatccgcgccatgcaactgatccatgcgctggagcctgaggcccgcgggccctattccggggtctatggcgccgtggacctggccggcgcactcaacaccgcgatcacgattcgcaccatggtggtgcatcccgatcccgccgggggctgtcggatccaggtgcaggccggtgcgggcgtggtggccgactccaggccggcagcggaataccaggaaaccctcaacaaggcccggggcatgctcaccgcgatcgcctgcctcggggaccccaccccatga

SEQ ID NO: 76667 - protein, 509 aa, Synechococcus sp. RS9917
MLSPDRASFFEAAAAGATFIPVAHSWPADLETPLTTWLKVGEGRPPGVLLESVEGGVHLGRWSVVACDPLWTLTARGEACSRRWRDGAVESLQGNPFDLLRSQLKPYRPGHIPGLPPLGQLYGIWGYELIRWIEPTVPIHTPAATDPPDGLWMLMDSILIIDQAKRLITAVAYGDLSGGRGSASSADEAWDQAMVRIRHLEERMAAPLPSVRPLRWQPNSGIPPTSSNRDQDDFEAAVRSGRDHIAAGDVFQLVLSQRLETTVPQKPLELYRSLRMVNPSPYMAFFDFGDWQLIGSSPEVMVKAEPDAEGIRASLRPIAGTRPRGDTDQEDRALEADLLADPKERAEHVMLVDLGRNDLGRVCRPGSVAVKDLMVIERYSHVMHIVSEVEGRLADDHDIWDLLMAAFPAGTVSGAPKIRAMQLIHALEPEARGPYSGVYGAVDLAGALNTAITIRTMVVHPDPAGGCRIQVQAGAGVVADSRPAAEYQETLNKARGMLTAIACLGDPTP

SEQ ID NO: 76668 - DNA, 1557 bp, Synechococcus sp. WH 5701
  CDS (1)..(1557): transl_table=11
gtgccccgttttttttgcctgcccgttgccgtgatgccctttcccgatcgcgacgcgttcctcgcccaggcggcggacggcagcaccttcatccccctctggaagcgctggcccgctgatctggaaaccccgctcaccacctggctgaaggtgggagccaccagcagccatggcgtgctgctcgagtcggtggaggggggcgagcggctggggcgctggagcttcgtggtggctgatccggtctggagcctcacggtgcgcggggaggacggtgttcagtgctggcgcgatggccgtcaggcccagttgcagggcaaccccttcgagctgctggccggatgcctggcctcgcttcggcccagcaccattcccggcctgccgccgcttggacaactcttcggcttctggggctacgaactgatccgctggatcgagccgagcgtgcccgtccaccccagcgacccggaaggcccgccggacggctgctggatgctggccgacagcctgctggtgttcgaccaggtgaagcggcagatcacggcggtggcctatgccgacctcagcggtggtgccgatcccctcggcgcctacgccgaggccaccgccaggatccagtcgctggaggagcgcatgcacgggcccctgccggccggagtcacccccctgcgctgggaggctgagcccagcatggagctggacacccgcagcaaccgcagccaggccgatttcgaagccgcagtggtagcggcccgggagcacatcgccgccggtgacgtgttccagctggtgctcagccagcggctggagacccgcatccaacgggatcccttcgagctgtaccgcagcctgcggatggtgaacccatcgccctacatggccttcttcaacttcggcggctggtatctgatcggctccagccccgaggtgatggtcaaggccgagccggtggccggcggcatccgggcctccctgcggccgatcgccggcacccgcccgcgcgggtccgatgaagccagcgaccttgccctggagcaggagctgctggccgaccccaaggagcgcgccgagcacgtgatgctggtggatctgggccgcaacgacctgggccgggtctgccgtccgggcacggtcgaggtgaccgaactgatggtggtcgagcgctactcccatgtgatgcacatcgtcagtcaggtcgagggcctgctcgattcctctcacgacgtctgggatctgctcaaggcctccttcccagccggcaccgtcagcggcgcgcccaagatccgggcgatgcagctgatccatgagcacgagccggatgcgcgcggcccctactccggtgtctacggggcggtggatctggccggcgccctcaacaccgccatcacgatccgcaccatggtggtgctccccgacggagaggggggctggcgggtgcaggtgcaggccggtgcgggcctggtggccgactcccagccggccgccgaataccaggaaactctcaacaaagcccgcggtctgctcaaggccctggcctgcctgcaggggagcggcacatga

SEQ ID NO: 76669 - protein, 518 aa, Synechococcus sp. WH 5701
MPRFFCLPVAVMPFPDRDAFLAQAADGSTFIPLWKRWPADLETPLTTWLKVGATSSHGVLLESVEGGERLGRWSFVVADPVWSLTVRGEDGVQCWRDGRQAQLQGNPFELLAGCLASLRPSTIPGLPPLGQLFGFWGYELIRWIEPSVPVHPSDPEGPPDGCWMLADSLLVFDQVKRQITAVAYADLSGGADPLGAYAEATARIQSLEERMHGPLPAGVTPLRWEAEPSMELDTRSNRSQADFEAAVVAAREHIAAGDVFQLVLSQRLETRIQRDPFELYRSLRMVNPSPYMAFFNFGGWYLIGSSPEVMVKAEPVAGGIRASLRPIAGTRPRGSDEASDLALEQELLADPKERAEHVMLVDLGRNDLGRVCRPGTVEVTELMVVERYSHVMHIVSQVEGLLDSSHDVWDLLKASFPAGTVSGAPKIRAMQLIHEHEPDARGPYSGVYGAVDLAGALNTAITIRTMVVLPDGEGGWRVQVQAGAGLVADSQPAAEYQETLNKARGLLKALACLQGSGT

SEQ ID NO: 76670 - DNA, 1533 bp, Synechococcus sp. WH 7805
  CDS (1)..(1533): transl_table=11
atgctcacacccgaccgcacggcttttcaagaagccattgaatctggtgcaacatttgtacccgtagccagcagctggcctgcagatctggaaacacccctcaccacctggttgaaagtgggcgaggggcatcccccaggagttctgctcgaatccgttgagggcggcgaaaccctgggtcgttggagtgtggtggcttgtaatcccttgtggacactctctgcccggcacaaccagctgcaacggacctggagagatgggcggcatgagacgttgtcaggcaaccctttcaacagcctgagggactgcctggcgccctatcaaccggcaaccctggcgggactgcctccgctcggccagctttacggaatgtggggttatgaactgatccgctggatcgagccctcggtgccggtgcatgacaacgaagggaatgaacctccggagggactgtggatgctgatggacagcatcctcatttttgatcaggtgaaacgcctgatcactgctgtggcctatgcagacctctcaggagagcacaactccttcgccgacccagaggcggcctggacggatgcgctccagcgcattcagtccctcaagcagacaatggccgagccactgccccctgtgcgcccgctcaactggactcccagccgaggagatacaccttcgacaaccagcaatcggacccaggatgacttccagaaggcggttttagaggcccgggaacacatcgcagctggagatgcctttcagctggtgatcagccaaagactcagcacggaggtccgccacgctcccctggatctttaccggagcttgcgcatggtgaatccttcgccgtatatggcgttctttgacttcggtgactggcagctgatcggatccagtcctgaagtgatggtcaaggcggaacccgatcaaggaggaatccgcgctgtacttcgaccgattgcagggacaagaccccggggaagcaatgaactggaagatcggagtctggaagcggagctgctcgctgatcccaaagaacgtgccgaacacgtaatgcttgtcgacctcggtcgcaacgacctcggccgcgtctgcgttccgggatcggtgtcagtccgcgaactcatggtgatcgagcgttactcccacgtgatgcacatcgtcagtgaggtggaggggcgactggctcctgggaacgacatctgggatctgctcatggcggcttttcctgcgggaacggtgagcggagcacccaagatcagggcgatgcagctcattcacgagctcgagcccgactctcgaggtccttactccggtgtgtacggatcagtggatctagcgggtgcattgaataccgccatcacgatccggacgatggtggttcagccaaatcgagacggaggctggaccttgcacgttcaggccggcgcgggcatcgtcgcggactcccgacctgaggcggaataccaggaaacgctcaacaaagcccggggcatgctgactgcactggcctgcctcgaggacgtcgagacatga

SEQ ID NO: 76671 - protein, 510 aa, Synechococcus sp. WH 7805
MLTPDRTAFQEAIESGATFVPVASSWPADLETPLTTWLKVGEGHPPGVLLESVEGGETLGRWSVVACNPLWTLSARHNQLQRTWRDGRHETLSGNPFNSLRDCLAPYQPATLAGLPPLGQLYGMWGYELIRWIEPSVPVHDNEGNEPPEGLWMLMDSILIFDQVKRLITAVAYADLSGEHNSFADPEAAWTDALQRIQSLKQTMAEPLPPVRPLNWTPSRGDTPSTTSNRTQDDFQKAVLEAREHIAAGDAFQLVISQRLSTEVRHAPLDLYRSLRMVNPSPYMAFFDFGDWQLIGSSPEVMVKAEPDQGGIRAVLRPIAGTRPRGSNELEDRSLEAELLADPKERAEHVMLVDLGRNDLGRVCVPGSVSVRELMVIERYSHVMHIVSEVEGRLAPGNDIWDLLMAAFPAGTVSGAPKIRAMQLIHELEPDSRGPYSGVYGSVDLAGALNTAITIRTMVVQPNRDGGWTLHVQAGAGIVADSRPEAEYQETLNKARGMLTALACLEDVET

SEQ ID NO: 76672 - DNA, 1572 bp, Pseudoalteromonas tunicata D2
  CDS (1)..(1572): transl_table=11
ttgatttttagccatataacaaccagtccaggtgaggtcaccagtattaccctttcaagggaatacattgcctgcccattatctgtctatgccaatctaaataaagccaactctttattgctagagtcagccgagattgattctaaagataatgtaaaaagtttaattttagttgatgccgccattcgtattgaatgcacaggtggacgcgtaactttagtttctcagtctaataatggtcaacagcttttaccgtatttagcgcaacgagttgaaaattgtgatgtaacactgacagacaattctctgacattactctatcgtgacaatcaatctgaaatggatgaattttcacgtctaacagcagacaatgcatttagtgcgctacgtagctgtatcaatacaataaaaagtaccacagcgcacccattcgcggtatttttagggggtgtatttgcatatgatatggtggcaaattttgaaacattgcctgaggttccgactggccctaacgaatgtccagactacgtattttatttagcagaaaccttggtggtaattgatcaccaaaaacaaactactgagttagtgggcaatgtttttaatggccccgatgtacatgcaaattgttttgaagtaggtcaacagcttgaaactctcaatctgttgtgttctagcagtcacccttttactccacaagccgttaacgctcgccccaatgtcaatgttgatatcagcgacgatgatttttgcaaccaagtaacccagttaaaaaaacacatcgttgatggggatatctttcaagtggtaccgtcacgcaccttcagcattgcttgtccaaatgcattagctgcttaccaacagcttaaaaagcaaaatccaagtccatatatgttttatatgcaagaccaagattttaccttgtttggcgcatcaccagaatcagccttaaaatattgtgccaccagcaaccaagttgaagtttatccaattgcaggcactcgcccacgcggaaaatttgccaatggcgaaattaaccctgatatggacagccgcattgagcttgatttacgcaacgataaaaaagaactcgctgaacatttaatgctggttgatttagcgcgaaatgatgtcgcacgaatttctattgcaggcactcgttttgccaaggagttactcaaagtagaccgctattctcaagttatgcacttagtctcgcgtgttgtaggtcaattaaaaccacaacttgatgcgctgcatgcttatcaagcatgtatgaacatgggtacacttgttggcgccccaaaagtaaaagcgtctgaactcattcgcttaactgaacaaaaacgccgtgggagttacggtggggccgtgggatatttaaccggagatggctcaatggattcatgtatcgtcattcgcagtgcgtttgtcaaaaataatatcgctcatgtgcaagccggtgcaggtgttgtatttgattcaaatccccaggctgaagccaatgaaactcgcgccaaagcacaagcggtcattaaagccattcaatctacatttttggcaggtgaataa

SEQ ID NO: 76673 - protein, 523 aa, Pseudoalteromonas tunicata D2
MIFSHITTSPGEVTSITLSREYIACPLSVYANLNKANSLLLESAEIDSKDNVKSLILVDAAIRIECTGGRVTLVSQSNNGQQLLPYLAQRVENCDVTLTDNSLTLLYRDNQSEMDEFSRLTADNAFSALRSCINTIKSTTAHPFAVFLGGVFAYDMVANFETLPEVPTGPNECPDYVFYLAETLVVIDHQKQTTELVGNVFNGPDVHANCFEVGQQLETLNLLCSSSHPFTPQAVNARPNVNVDISDDDFCNQVTQLKKHIVDGDIFQVVPSRTFSIACPNALAAYQQLKKQNPSPYMFYMQDQDFTLFGASPESALKYCATSNQVEVYPIAGTRPRGKFANGEINPDMDSRIELDLRNDKKELAEHLMLVDLARNDVARISIAGTRFAKELLKVDRYSQVMHLVSRVVGQLKPQLDALHAYQACMNMGTLVGAPKVKASELIRLTEQKRRGSYGGAVGYLTGDGSMDSCIVIRSAFVKNNIAHVQAGAGVVFDSNPQAEANETRAKAQAVIKAIQSTFLAGE

SEQ ID NO: 76674 - DNA, 1596 bp, Photobacterium sp. SKA34
  CDS (1)..(1596): transl_table=11
gtgaatactcactcaataggaaatcatccactagggcaaaatacattagctgctaatgagatcgatcttctcagccttgatgtaccttatgttgccgatcccactgaactgtacttttcagtttgtggcgatcgcccgcacaaccttttattagaatcagcagaagttgattctaagcaagatttaaagagcttaatgcttgtcgatgccgccgtacgtattgtttgccgcggtaaaaaagtcacgttggaagcattaaccagtaatggtgtgaacgtcattacgcatttacaaagccaactgcctaacgatattaatgcagcagtaaatggaaaaacattaaccttggtatttccatcccatgctcatgatattgatgaggatagccgcttacgccaaacctcatcattcgatgctctacgtttgatccaacatgcatttgataccaaacaccacccaaaagaagccttattcttaggtggcctatttgcctatgacttagtcgctgactttgaaccgctacctgaagtgaagcaagacaataactgtcctgactatattttctatattgccgaaaccttgttgattattgatcaccaacgtcgtaaaggcacactgcaagcgactttatttggtggcgatcactacatcaatagctatcacgatttaagtcgtcgtctgcaagcgattaaggagatctgtttaagccctcagcctgtgccaccagcacaagtattagcaaaatgtgatccagagacatctattagcgatgaagatttctgccaaaccgttaacgatcttaaacaatacgttatcaatggtgatgtgttccaagtggtgccatcacgccaatttacattgccatgtccttcaacgctcgcagcatataaagcattgaaaattggtaacccaagcccttacatgttctttttacaagactcagaatttaccctatttggcgcctctcctgaaagcgcactgaagtattgttcagattcaaaccaagtagagatctacccgattgcaggtactcgaccacgtggcaaaaacagcgacggatcaattaaccttgatttagatggacgtattgaattagagctacgctgcgataaaaaagaaaatgctgaacacatgatgttagtggatttagcacgtaatgatgtcgcaaggatcagtgaggcgggtagccgctatgtggcagatttactgaaagttgatcgctacagccatgtcatgcacttagtttctcgagtcgttggtcaactacgtggcgatcttgatgcccttcatgcatatcaagcgtgtatgaacatggggacattaacaggagcaccgaaaatccgagctatgcagcttatccgtgatgttgaacaacgtcgtcgtggtagttatggtggtgctgtgggttatcttacaggtcatggtgatatggatacttgtatcgttatccgctcagcctatgttgagaatggtattgcgagtgttcaagctggggctggcgtggtttacgactccattccacaagcagaagccgatgaaacacgtggcaaagcgcaagcggttattaacgctattcgcactgcacatcaaggttaa

SEQ ID NO: 76675 - protein, 531 aa, Photobacterium sp. SKA34
MNTHSIGNHPLGQNTLAANEIDLLSLDVPYVADPTELYFSVCGDRPHNLLLESAEVDSKQDLKSLMLVDAAVRIVCRGKKVTLEALTSNGVNVITHLQSQLPNDINAAVNGKTLTLVFPSHAHDIDEDSRLRQTSSFDALRLIQHAFDTKHHPKEALFLGGLFAYDLVADFEPLPEVKQDNNCPDYIFYIAETLLIIDHQRRKGTLQATLFGGDHYINSYHDLSRRLQAIKEICLSPQPVPPAQVLAKCDPETSISDEDFCQTVNDLKQYVINGDVFQVVPSRQFTLPCPSTLAAYKALKIGNPSPYMFFLQDSEFTLFGASPESALKYCSDSNQVEIYPIAGTRPRGKNSDGSINLDLDGRIELELRCDKKENAEHMMLVDLARNDVARISEAGSRYVADLLKVDRYSHVMHLVSRVVGQLRGDLDALHAYQACMNMGTLTGAPKIRAMQLIRDVEQRRRGSYGGAVGYLTGHGDMDTCIVIRSAYVENGIASVQAGAGVVYDSIPQAEADETRGKAQAVINAIRTAHQG

SEQ ID NO: 76676 - DNA, 1485 bp, Oceanospirillum sp. MED92
  CDS (1)..(1485): transl_table=11
atgacacctgaactttttgctgaacttgcagcgcaagattacaatcgaatccccgtaacccgtgaggtgttagcggatttagatacacctttatccacctataaaaaactcgcgaatcagccttatagttatcttttggaatctgttgagggcggcgaaaaatgggggcggtactccattatcggtttgccttgccggacgattctgaaagttcatggtgagaccgtcactgtcaccgataacggtgaagagctggaaaacttccaaatggaagatcctctggattttgtggaaacgtttcagcagcgctatcgggtccctcagttagaaggtatgcctcgttttaacggagggctggtaggttattttggctatgactgtgttcgctatgtagaaaagcgcctgaaagacagctgtccagaggatacgctgggtacacctgatatcctgctgatggtgtcggatgaagtggtggttttcgacaatctggcagggaagttgatcctgatcgctcatgcagaccctgctgaagatagtgcctatgaaaaggcgcaacgtcgcctggatcaattggttgaaaaattaagggtggcgaccccttatgatgaaaccccggcctctcaacagcgagaggtggctgaagcggagtttaaatcaagctttggtgaacaggcatttatgggctctgttgataagatcaaagagtatgttctcgacggtgatatcatgcagtgcgtgatatcccagcggatgtcgattccatttaaccgcaaaccgttggatctctaccgggcacttcgttgtcttaacccatcaccttatatgtatgtgttaaatcttgaagattttcatgtggtaggctcttcaccagagattttagcgcgggtagaagatggtcaggtaagtgttcgtccaattgcgggtacccgaaagcgcggtcttacacctgaagaagatttggcaatggagaaagagctgctggctgatcctaaagagatcgctgagcatcttatgttgattgatctgggtcggaatgatgtgggtcgtgtcgctgaagtcggtggtgtagagctaacggataagatggtaatagagcgctattcgcatgtgatgcatatcgtatctaatgtgaacggcaggctaaaacctgatgtttcagcaatggatgttctgcgtgcgacgttacctgcgggaacattaagcggtgcacctaaagtgcgtgccatggaaatcattgatgagatggaaccggtaaaacgcggcgtctatggtggtgcagtgggttatctatcctggaatgggaacatggatacagcgattgcgatccgcacagcggtcattaaagatgatgtgctgcatatccaggcgggtgcgggtgttgtagcggattctgtgccgcgtttggagtggaaagaaaccatgaataaaggacgtgctgtgtttagtgcggtcgcaatggttgaaaaagggctggataatctgtga

SEQ ID NO: 76677 - protein, 494 aa, Oceanospirillum sp. MED92
MTPELFAELAAQDYNRIPVTREVLADLDTPLSTYKKLANQPYSYLLESVEGGEKWGRYSIIGLPCRTILKVHGETVTVTDNGEELENFQMEDPLDFVETFQQRYRVPQLEGMPRFNGGLVGYFGYDCVRYVEKRLKDSCPEDTLGTPDILLMVSDEVVVFDNLAGKLILIAHADPAEDSAYEKAQRRLDQLVEKLRVATPYDETPASQQREVAEAEFKSSFGEQAFMGSVDKIKEYVLDGDIMQCVISQRMSIPFNRKPLDLYRALRCLNPSPYMYVLNLEDFHVVGSSPEILARVEDGQVSVRPIAGTRKRGLTPEEDLAMEKELLADPKEIAEHLMLIDLGRNDVGRVAEVGGVELTDKMVIERYSHVMHIVSNVNGRLKPDVSAMDVLRATLPAGTLSGAPKVRAMEIIDEMEPVKRGVYGGAVGYLSWNGNMDTAIAIRTAVIKDDVLHIQAGAGVVADSVPRLEWKETMNKGRAVFSAVAMVEKGLDNL

SEQ ID NO: 76678 - DNA, 1410 bp, Flavobacteria bacterium BBFL7
  CDS (1)..(1410): transl_table=11
atgcatcattataaagcaaaatccacgcaacaaacgatattagcagacatgctaactcctgttgctatatacatgcgtttacgtgataagtatcccggtagcatcttattagaaagcaacgaatatggagaacgcagtaatagctattccttcatttgttgtaatcctgtagctcaattctctgttactaatacaaaaattgaaagccaatttcctgatggaacaatagagcaatcagacttcagttcgagttatgatttagcgtctggattaacccaatttaaaaattccttcaagcatgcaaatactgacttaccatttcctaatcatggccttttcggttatttagggtatgatgccgtgcaactatttgaatccttagaatttcgctttcgcgaaagcgataacaatatacctcttgcccattaccaagtatttcaaaatgtaatggtatttgatcattatcataaccaattacacgtttttgaacacttatatgacggtaaaaactcaaatatgcgtgaactattaagtgtaataaaacataaagatgttgcgcaatatagttttgaaacctcaggcgatgaaacatcagaaatgaccgatgagaattttcaaaacctggtagaaaaaggaaaagagcattgccgtcgtggcgatgtatttcaaatagtactatcccgtaaattttcacaagaatttaaaggcgatgatttcaatgtatatcgtgaattgcgtgctattaatcccagtccttatttattttattttgattatggtaatttcaggattttcggatcatctcctgaagctcaattgattataaagggtgattacgctagtatacaacctatagctggcacctataaaagaacaggtaatgatagtgcagacttaaaagctgccgaagagttaaaaaaagatcctaaagaaacagcagagcatgtaatgctagtagacctagctcgcaatgatttgagcagacacgcaagagatgtatcggtaactgattatcaaaacattcatttttactctcatgtaattcatatggttagtaaagttactggccgtattaacgaagatgataaaataaaacttataggagatacttttccagcaggcacactaagtggtgcaccaaaatataaagctatgcagttgattgatgaatatgaaaaatcaagtagaagtttttatggtggggcaattggatatctaggatttgatggtaatttcaatcatgcaatcatcatacgtagtattctttcacaaggtaaaacacttaactttagagctggagctggtgttgttgtacacagcaatctcaatgacgaaacacaagaagtatataataaaactaatgccttaagaaaggctatcaatcaagcaactcaaaaccattctttataa

SEQ ID NO: 76679 - protein, 469 aa, Flavobacteria bacterium BBFL7
MHHYKAKSTQQTILADMLTPVAIYMRLRDKYPGSILLESNEYGERSNSYSFICCNPVAQFSVTNTKIESQFPDGTIEQSDFSSSYDLASGLTQFKNSFKHANTDLPFPNHGLFGYLGYDAVQLFESLEFRFRESDNNIPLAHYQVFQNVMVFDHYHNQLHVFEHLYDGKNSNMRELLSVIKHKDVAQYSFETSGDETSEMTDENFQNLVEKGKEHCRRGDVFQIVLSRKFSQEFKGDDFNVYRELRAINPSPYLFYFDYGNFRIFGSSPEAQLIIKGDYASIQPIAGTYKRTGNDSADLKAAEELKKDPKETAEHVMLVDLARNDLSRHARDVSVTDYQNIHFYSHVIHMVSKVTGRINEDDKIKLIGDTFPAGTLSGAPKYKAMQLIDEYEKSSRSFYGGAIGYLGFDGNFNHAIIIRSILSQGKTLNFRAGAGVVVHSNLNDETQEVYNKTNALRKAINQATQNHSL

SEQ ID NO: 76680 - DNA, 1491 bp, gamma proteobacterium HTCC2207
  CDS (1)..(1491): transl_table=11
atgaccgccgaacaatttgctgagttagcccgccaagaatacaaccgtatccccgttacccgggaagtgctggctgatctagaaaccccccttagtgtttatttaaagctggcttttgggccaaactcctacctatttgaatcagtgcagggcggcgaaaaatggggccgttactcgctgattggtctgcatacctcaacagttcttaagatattcggaacgcggctcgaaattattcgtgacggcaagccgatggttaaccgctcaacctctgaccctctgggcgaagtcgagcgattccgaaaattatttagcatgcccgatctgcctaatctgccgcgcttcactggcggtctggtggggtattttggctatgacactgtgcgttttgtcgaaccaaaattagctcagactgcgccatcggatgagctgggaacgcctgatatattgcttatggcttcggatgaggtggcgattttcgacaacctctcaggcaccatcatgttagtggttcatgtggatgctaaagacccagatgccctagctagcgcggaagctcgccttgatgaacttgaggccaagcttgagcagtcgacaccgcaactgccgccgatgaacatggctggcgatggtctatctgaagacgattttgtctcgagctttggtgcgcaggatttcaaagcggcagtcaataaagtcaaagactatgtcatggccggcgatgttatgcaggtggtgccgtctcagcgtctgtcggcacccttcgatgcggaaccgattaatctttaccgcgcactgcgccgccttaacccatcaccctatatgtacttcctcgatcttgatggtttccatattgtcggctcgtccccagaggttctcgcccgtcttgaggacggagaggtgaccgttaggccaattgctggcactcgcaagcgcggtgcaacagcccaagaagatcaggccatggaagatgagatgcttgccgatcctaaagaaattgctgagcatttaatgttgattgatttgggtcgcaatgatgttgggcgcatcagtaaaactggcactgtcgaagtcaccgaaaaaatggtcgttgagcgctactctcatgttatgcatatcacctctaatgtggtcggccaagtcaccgatgatatgggtgccctggaagttctgaaggcaaccttacctgccggtaccctgagcggtgcaccgaaaattcgcgccatggaaattatcgatgaactggagccagtgaagcgtaatatctacggcggcgctgtgggttatatagggtggaatggcaatatggacactgctatcgcgattcgcactgcggtgattaaagacaagatcctacacgttcaagctggagctggtgtagttgccgattcggttcccgagctggagtggaaagaaaccaacaataaagcccgagcccttatgagcgcagcagccatggtctgtaacaaagcgtctggagagtcaaaatga

SEQ ID NO: 76681 - protein, 496 aa, gamma proteobacterium HTCC2207
MTAEQFAELARQEYNRIPVTREVLADLETPLSVYLKLAFGPNSYLFESVQGGEKWGRYSLIGLHTSTVLKIFGTRLEIIRDGKPMVNRSTSDPLGEVERFRKLFSMPDLPNLPRFTGGLVGYFGYDTVRFVEPKLAQTAPSDELGTPDILLMASDEVAIFDNLSGTIMLVVHVDAKDPDALASAEARLDELEAKLEQSTPQLPPMNMAGDGLSEDDFVSSFGAQDFKAAVNKVKDYVMAGDVMQVVPSQRLSAPFDAEPINLYRALRRLNPSPYMYFLDLDGFHIVGSSPEVLARLEDGEVTVRPIAGTRKRGATAQEDQAMEDEMLADPKEIAEHLMLIDLGRNDVGRISKTGTVEVTEKMVVERYSHVMHITSNVVGQVTDDMGALEVLKATLPAGTLSGAPKIRAMEIIDELEPVKRNIYGGAVGYIGWNGNMDTAIAIRTAVIKDKILHVQAGAGVVADSVPELEWKETNNKARALMSAAAMVCNKASGESK

SEQ ID NO: 76682 - DNA, 1521 bp, delta proteobacterium MLMS-1
  CDS (1)..(1521): transl_table=11
atgcctgattttcgggatcccgagctttttcagcaactcgccgcccgccacggcctggtgccggtggcccgggagttgatcgttgatcttgacaccccgctgaccattttcgccaaagtggccgccgaccactcccacgccttcctgtttgaaagcctggaaggcggggaaaagtgggggcgttactccttcatcggttttgatcccctgctgatttttgaaagccggggtgaggatgtcctgatccgccgccggtcggccgctgccgcccgggatgcccgggatgaagacagcctggacgagcgccgccggggtgagccgttgcggatcttggaagagcttttagccgagctcaaccccgccttggtcgattcctccctttcccgtttcggcggcggcgcggtgggttttctgggttatgacatggtccgctttatggagcggttgccggagattaacccgccgctggccggaattcccgacagcagttttatgattccccgcctggtgctggtttatgacaacctgcgccagcgcctgaccgtggtcaactgggtgccgattgcgcccggctctgatcacccggcgctgtttgccgccgccgggcagcgcctggaagaggtggtcgccgccctggggggcagctggcagagcgatctgcttggcccgttgccgaccgttgacgaaccaccgccgccctttcgctccaatcttgagcagcagagttttcaggccatggtggaacgggccaaggagtatatcaggagcggtgatgtgatccaggtggtcctctcccagcgttttgaaaccgaaaccgcggtggagcccctgcggctctaccgggccctgcgccatatcaatcccagtccctatctcttttacctcaaactgggcgagttggtccagatcggctcctcgccggaaatcctggtgcggctggaggatgacgacatcgaactgcgccccatcgccggtacccgccctcggggccggaaccgggccgaagatctggccctggagcaggagctgttggccgaccccaaggaacgggccgagcacctgatgctggtcgatctggggcgcaacgatgtcggccgggtggcccgttacggctcggtggaggtccgtgatctgctgatgatcgaacgctacagccatgtgatgcatatcgtctccggagtccatggcaagctggcggcgggtaacaaccagtttgacgtggtgcgggcctgtttccccgccggcaccgtctccggggcccccaagatccgggccatggagatcatcgaggaacttgagggcgagcggcgcggcccctatgccggggcggtgggctatttcggttttaccggcaatatggatttctgtatcaccatccgcacttttattatgcaaggagaacggctctggatccaggccggggccgggatcgtcgccgattccgagccggtggcggagttccaggaaacggtcaacaagtccatggggttgcggcgggccctgcaactggcccaacggtag

SEQ ID NO: 76683 - protein, 506 aa, delta proteobacterium MLMS-1
MPDFRDPELFQQLAARHGLVPVARELIVDLDTPLTIFAKVAADHSHAFLFESLEGGEKWGRYSFIGFDPLLIFESRGEDVLIRRRSAAAARDARDEDSLDERRRGEPLRILEELLAELNPALVDSSLSRFGGGAVGFLGYDMVRFMERLPEINPPLAGIPDSSFMIPRLVLVYDNLRQRLTVVNWVPIAPGSDHPALFAAAGQRLEEVVAALGGSWQSDLLGPLPTVDEPPPPFRSNLEQQSFQAMVERAKEYIRSGDVIQVVLSQRFETETAVEPLRLYRALRHINPSPYLFYLKLGELVQIGSSPEILVRLEDDDIELRPIAGTRPRGRNRAEDLALEQELLADPKERAEHLMLVDLGRNDVGRVARYGSVEVRDLLMIERYSHVMHIVSGVHGKLAAGNNQFDVVRACFPAGTVSGAPKIRAMEIIEELEGERRGPYAGAVGYFGFTGNMDFCITIRTFIMQGERLWIQAGAGIVADSEPVAEFQETVNKSMGLRRALQLAQR

SEQ ID NO: 76684 - DNA, 1485 bp, Oceanobacter sp. RED65
  CDS (1)..(1485): transl_table=11
atgacacccgaactgtatactgagttatcccagcaaggttataaccgaatacccgtatttcaagaagtacttgctgatttagataccccactaagcgcttatctgaaagtggccaaaggtccctattcctacttacttgagtctgtacaagggggagagaagtgggggcgctacagcatgattgggctgccctgccgtcgtgttttgaaagtttttgaccatgaagtgcaaatcattgaacaagattccgtgattgaacgccatgaagtcgatgatccattagatttcatcgctgaatatcaaaagcagtttaatgttgcaccgatagaaggcttgcctcgatttgatggcggacttgtcggatattttggttatgacgtggtgcgttatgtagaaaagcgtctcactgaaacttgccctgaggatgaaattggaaatcctgatatattgctaatgcaaagtgaagaagtcgttgtgttcgataacttaagcggcaagctgtttttcattgtactggcagatccttcagaccccaatgcatttgcgaaagcaaaacgtcgtatcactttaatgcgagggcaattacgtcgcgcttatcaaggaacgattggtcaacctttgattcaacctcgaaaagtagtggagtcagatttcatatccggattcggtgaagaaaactttcagcagtcggtagagaaaataaaggaatatgtgctggcaggagatatcatgcaatgtgtgataagtcagcgtatgacagtagattatcaagcagagccgctgaatctttatcgagctttacgaaccttaaacccaagcccatacatgtattttatggatttgggggatcaccatgtggtgggctctagcccagaaattttagcgcgtttcgaagatggcacaattacggtgcgtcctatcgcgggtacacgctatcgcggtcaaactcctgaacaagaccaagctctcgaagaagagttgctggcggatcctaaagaaatcgctgagcacttgatgctgattgacttaggtcgcaatgacgttggccgtgtcagtgaaatgggacaagtcagtgtcactgatcaaatggtcgtcgaacgatacagtcacgttatgcatatcgttagcaatgtagaaggcaaagcgaaacctggtattacatctatggatgtattaagagctgcgcacccggcaggaacattgagtggtgcccctaagattcgtgcaatggaaatcattgatgaaatggaacccgtaaaacggggtgtttatggtggtgctgtgggttacttaagttggaacggcaatatggataccgccattgccatacgcacagcggtcataaaaggcggcaagctttatgtgcaagctggtgctggcgtggtagcagacagtgtgccgcgtttagagtggaaagaaaccatgaataaagggcgagccttattcaaggcagtagaaatggcggagtcagggctggataactaa

SEQ ID NO: 76685 - protein, 494 aa, Oceanobacter sp. RED65
MTPELYTELSQQGYNRIPVFQEVLADLDTPLSAYLKVAKGPYSYLLESVQGGEKWGRYSMIGLPCRRVLKVFDHEVQIIEQDSVIERHEVDDPLDFIAEYQKQFNVAPIEGLPRFDGGLVGYFGYDVVRYVEKRLTETCPEDEIGNPDILLMQSEEVVVFDNLSGKLFFIVLADPSDPNAFAKAKRRITLMRGQLRRAYQGTIGQPLIQPRKVVESDFISGFGEENFQQSVEKIKEYVLAGDIMQCVISQRMTVDYQAEPLNLYRALRTLNPSPYMYFMDLGDHHVVGSSPEILARFEDGTITVRPIAGTRYRGQTPEQDQALEEELLADPKEIAEHLMLIDLGRNDVGRVSEMGQVSVTDQMVVERYSHVMHIVSNVEGKAKPGITSMDVLRAAHPAGTLSGAPKIRAMEIIDEMEPVKRGVYGGAVGYLSWNGNMDTAIAIRTAVIKGGKLYVQAGAGVVADSVPRLEWKETMNKGRALFKAVEMAESGLDN

SEQ ID NO: 76686 - DNA, 1527 bp, Synechococcus sp. RS9916
  CDS (1)..(1527): transl_table=11
atgctcagccccgaccgcgccgcgttccttgaggccgcagccgctggtgccacgtttattcccgtggcacgcagctggccggcagacctggagacccccctcaccacctggctcaaagtgggagagggacgtcctccaggtgttttattggaatccgttgagggtggtgaaaccctcggtcgctacagcgtggtggcctgcgatccgctctggaccctcacggtccgcaatgacgagattcaacggcagtggcgtgatggccattgcgagcaactgagcggcaatcctttcgatgtgctgcgtgaagcacttgctccttaccaacctggggccttaccggggctgccgtcgatcggccagttgttcggcatctggagttacgaactgatccgctggatcgaaccctccgtgcccacccatcccctgccggaaggatctcctcccgatggcgtctggatgctgatggacagcatcttgattttcgatcaggtgaaacggctgatcacagccgtggcctacggcgacctcagtggcagcaatccgcccagtgcggaagcggcttggaatgacgccatggcccgcatttcgcgtctggaggagcgaatggcggcaccgttgccagcgatccgcccgctgcgctggcaacccaccagccagaactcgccacagaccatcagcaaccgcagccgcgaagattttgaagccgccgtggagcggggacgcgaccacatcgcagcgggtgatgtgttccaactcgtgctcagccagcgccttgaggctcgcgtgccccaaaagcctctggagctttatcgcagcctgcggatggtgaatccatcgccctacatggccttcttcgacttcggcgactggcagctgatcggctccagccccgaggtgatggtcaaggccgacccagtcccgggaggggtcaaggcaagcctgcgaccaatcgccggcacccgcccgcgaggccattcggaactggaggatcgcaacttcgaggccgatctgctggccgaccccaaggaacgggccgagcacgtgatgctggtggatctgggccgcaatgaccttggccgggtgtgccaaccgggctccgtcgaggtcaaggacctgatggtgatcgagcgttactcccatgtgatgcacatcgtcagccaggtggaaggtcgcctggccgccgagcacgacgtctgggatttattgatggccgcattccccgccggcacggtcagcggtgctccgaagatccgagcgatgcaactgatcaacgagctcgaacccgatgcccgcggtccctattcaggggtgtatgggtcagtcgatctggcaggtgctctcaacactgcgatcaccatccgcacgatggtggtgcgcccccatcccgaaggtggctggaggattcaagtgcaagcaggcgccggagtggtggccgattccaagcctgaggcggaataccaggaaacactcaacaaggccaagggcatgctcaccgccctcgcctgcctcgaggatccatcggcatga

SEQ ID NO: 76687 - protein, 508 aa, Synechococcus sp. RS9916
MLSPDRAAFLEAAAAGATFIPVARSWPADLETPLTTWLKVGEGRPPGVLLESVEGGETLGRYSVVACDPLWTLTVRNDEIQRQWRDGHCEQLSGNPFDVLREALAPYQPGALPGLPSIGQLFGIWSYELIRWIEPSVPTHPLPEGSPPDGVWMLMDSILIFDQVKRLITAVAYGDLSGSNPPSAEAAWNDAMARISRLEERMAAPLPAIRPLRWQPTSQNSPQTISNRSREDFEAAVERGRDHIAAGDVFQLVLSQRLEARVPQKPLELYRSLRMVNPSPYMAFFDFGDWQLIGSSPEVMVKADPVPGGVKASLRPIAGTRPRGHSELEDRNFEADLLADPKERAEHVMLVDLGRNDLGRVCQPGSVEVKDLMVIERYSHVMHIVSQVEGRLAAEHDVWDLLMAAFPAGTVSGAPKIRAMQLINELEPDARGPYSGVYGSVDLAGALNTAITIRTMVVRPHPEGGWRIQVQAGAGVVADSKPEAEYQETLNKAKGMLTALACLEDPSA

SEQ ID NO: 76688 - DNA, 1626 bp, Vibrio sp. Ex25
  CDS (1)..(1626): transl_table=11
atgcgactatgtacggtaggaagatttagacagctacaaggaggtcttgtgaataaggccatagaaatcaagaaacttggatgcctagaagtattaaagacttcggttccttacactcaagacccaacacgtttgttccataccatttgtgagaacaaaagagatagcttgcttctcgaatccgctgaaattgattcgaaacagaatctaaaatcacttttaatcgtagattcagcggtgcgcatcgtttgttacggccacactgtaaacatgcaggcgttaaccaacaacggtaaaaacctactgtctcacctaaaccagaacatccgtggtgacgttgaaagtaagttcgatggcgaaacgctgactttggagtttagccagccatgcgacacgttagatgaagactctcgactacgtgaagcttcttcttttgacgcgctacgtttagtgcaacacagcttcgatgtttcacagcaagacaaacacgcgattttccttggcggtctgtttgcctacgacttagtcgcaaacttcgagccgcttggtaatgcagaagcaaccaatcaatgtccagattacgttttctacgtagcggaaacattgcttgttgtcgaccatcaaacggaatcttgccagcttcaagctacattgtttgtggatgattcagaaaaactagcgctagagactcgcatcgcagaaatcagcgctcaatgtgcggcgccaaagttacttccaaatgcagagcaaatcgccgacgtaacggtagaacctagcgtatctgattcagacttctgtcaaatcgttcgcgacttaaaagagttcgtagtgaaaggcgatgtgttccaagtcgtaccatctcgccgattcactctaccttgcccttctccactcgctgcttacaaagaactgaaacaaagtaacccaagcccttacatgttctacatgcaagatgagctgttcactttgtttggcgcatcaccagaaagcgcgcttaagtatgaaaccgacaccaaccaaattgaaatctacccaattgcaggcacacgtcgccgtggcaagcaccctaacggcgagattgatttcgacctagatagccgcatcgaacttgaactgcgcaccgacatgaaagaaaacgcagaacacatgatgttggttgacttggcacgtaacgacgtcgctcgtattgctcaagctggcactcgccacgtagcagaccttctaaaagtcgaccgctacagccacgttatgcacttggtatctcgtgtggttggtcaactgcgtgaagacctagacgcgctgcacgcataccaagcatgtatgaacatgggcacgctcactggtgcaccaaagattcgtgcaatgcagttgattcgcgatgtagaaggcgcacgacgcggcagctacggcggtgctgtgggttaccttaccggcgaaggtacactcgacacatgtatcgtaattcgctcagcttacgttgagaacggcattgctcaagttcaagctggtgcaggcgttgtgttcgactctgatccacaagcggaagcagacgaaacgcgcggtaaagcgcaagcggtaatctctgctatccaagcagcgcattctcaacctacgaacaaggagtag

SEQ ID NO: 76689 - protein, 541 aa, Vibrio sp. Ex25
MRLCTVGRFRQLQGGLVNKAIEIKKLGCLEVLKTSVPYTQDPTRLFHTICENKRDSLLLESAEIDSKQNLKSLLIVDSAVRIVCYGHTVNMQALTNNGKNLLSHLNQNIRGDVESKFDGETLTLEFSQPCDTLDEDSRLREASSFDALRLVQHSFDVSQQDKHAIFLGGLFAYDLVANFEPLGNAEATNQCPDYVFYVAETLLVVDHQTESCQLQATLFVDDSEKLALETRIAEISAQCAAPKLLPNAEQIADVTVEPSVSDSDFCQIVRDLKEFVVKGDVFQVVPSRRFTLPCPSPLAAYKELKQSNPSPYMFYMQDELFTLFGASPESALKYETDTNQIEIYPIAGTRRRGKHPNGEIDFDLDSRIELELRTDMKENAEHMMLVDLARNDVARIAQAGTRHVADLLKVDRYSHVMHLVSRVVGQLREDLDALHAYQACMNMGTLTGAPKIRAMQLIRDVEGARRGSYGGAVGYLTGEGTLDTCIVIRSAYVENGIAQVQAGAGVVFDSDPQAEADETRGKAQAVISAIQAAHSQPTNKE

SEQ ID NO: 76690 - DNA, 1569 bp, Alteromonadales bacterium TW-7
  CDS (1)..(1569): transl_table=11
ttgatttttagtcatataacaactacaccgggtgaagtaacgagtattacgcaaacacgcgactacatcagtagtccacttgcgctctacgcagcacttgataaacctaactcactgctacttgaatcggctgaaattgattctaaagacagtgtaaaaagtttaattttagtcgattgcgcattgcgcatcgtttgccaaggcaaaaaagtcacgattacagctcagtcaaacaatggccaccagctgttaagctacttacaagctcatgttaaaaactgcaatgcagaattaaacgatacaagcctaaccctaaattacttgagtacaagtaacgacattgatgaagccagtaaactagttgccgataatgcatttagtgccctacgaacctgtattaactcaatcaaaagcaccaccgacaaccctttctctctatttttaggcggtgtatttgcctacgacatggttgcaaactttgaacagctaagtgacgttcccgatggcgagaacagctgtcctgattatgtattttatttagctgaaacattagttgtaatagaccaccaaaaacagaccaccgaacttatcggtaacgtgtttaacggccctgacgtacacgcaaactgctttgaagtaggcaaacagctagagcagttaaatagcctttgcgataacgcagcccaatacagcgccccattaaacaaaggcgaatgtgaggtgagcgtagacataagcgacagcacctactgtcagcaggttgtaaaacttaaaaagaacattgtagacggtgatatttttcaggttgttccttctcgtactttctcgctgccatgccctaacgctttacatgcgtatagccaattaaaacaacaaaacccaagcccttatatgttttacatgcgcgatgaggactttgctttatttggcgcatcacccgaatcagcccttaaatacgatattaataaccagcaggtagaagtgtacccaattgcaggaacgcgccctcgtggtaagtttgctaatggacaaataaatcccgatttagatagccgtattgagcttgaacttagaaacgatcaaaaagaacgtgcagaacacctaatgcttgttgacttagcccgtaacgatgtagcccgcattagtgttgcaggtacacgtcatgccaaagagctattaaaagtagaccgttattcgcaagttatgcatttagtttcacgtgttgttggtacattaaaaccagaacttgatgcacttcacgcttaccaagcatgcatgaacatgggtaccttagtaggcgcgcctaaagttcgcgctgcagaattagttcgccaaacagaaggaaaacgacgtggcagttacggtggcgcagtaggttatttaaccggtgatggcgcaatggacagctgtattgttattcgctctgcctttgttaaaaacaacatggcttatgttcaagccggtgccggggttgtatttgactcagacccacaatctgaagctaacgaaactcgcgctaaagctcaagcggttattaccgccataaaatcaactttcgaggcggtataa

SEQ ID NO: 76691 - protein, 522 aa, Alteromonadales bacterium TW-7
MIFSHITTTPGEVTSITQTRDYISSPLALYAALDKPNSLLLESAEIDSKDSVKSLILVDCALRIVCQGKKVTITAQSNNGHQLLSYLQAHVKNCNAELNDTSLTLNYLSTSNDIDEASKLVADNAFSALRTCINSIKSTTDNPFSLFLGGVFAYDMVANFEQLSDVPDGENSCPDYVFYLAETLVVIDHQKQTTELIGNVFNGPDVHANCFEVGKQLEQLNSLCDNAAQYSAPLNKGECEVSVDISDSTYCQQVVKLKKNIVDGDIFQVVPSRTFSLPCPNALHAYSQLKQQNPSPYMFYMRDEDFALFGASPESALKYDINNQQVEVYPIAGTRPRGKFANGQINPDLDSRIELELRNDQKERAEHLMLVDLARNDVARISVAGTRHAKELLKVDRYSQVMHLVSRVVGTLKPELDALHAYQACMNMGTLVGAPKVRAAELVRQTEGKRRGSYGGAVGYLTGDGAMDSCIVIRSAFVKNNMAYVQAGAGVVFDSDPQSEANETRAKAQAVITAIKSTFEAV

SEQ ID NO: 76692 - DNA, 1497 bp, marine gamma proteobacterium HTCC2143
  CDS (1)..(1497): transl_table=11
atggacgcccaacgtttttctgaattggcaagccagcattataaccgtatccctgtaagtcgtgaggtccttgctgatctcgacacgccgcttagtagctatctgaagttagccgacggggagtattcctatttgtttgaatcagttcagggcggagaaaagtggggtcgttattcgattatcgggctgccctgtcatactgtgctgaaaattttcggttatgtcgctaccattgaaaccgatggtaaggtcgtcgagcggctcgacttagaagaccctttagcttttgttgaagagtttcaacatcgttatcgagttcctgaactcgacgatatgccagctttctctggtggtctggtgggatatttcggctatgacactgtgcgttatgttgaaaagcgcttacgcgattctatgcccgaagataagttaggtacgccggatattttgttgatggtatccgacgaaatgttggtatttgataatctgtcagggacaatacgcctgatcatccatgcggaccccgcgctgcccaatgcctacgcacaggcacaggctagaattaccgagctcgtcgaacaactgcaaaaaccggcccccatattgcctgcggtttcactagcgcaggaagaccaggccggacgaattagtgaaaacgatttcgtttctgagtctggtgagagtgcttacaagcaggcagtagaaactataaaagagtatgtattggcgggtgacgtcatgcaggttgtgccctctcagcgcttagttgctgattttactggtgagccacttaatctttaccgagctttgcgtaatttaaacccttctccctacatgtacttccttaatttgaaggatttttatattgccggttcgtccccggaaattctggcacgactcgaagacggcgttatcacggtacgtccaatagctggtacacgtcgccgcggttataccgatgaagaagatcgcgccctagaggccgagttactggccgatcctaaagaaattgccgaacatttaatgctgatagatttaggtcgcaatgatgtaggcagagtatcagagatcggctcggtagagctcactgacaaaatgattgttgagcgttattcgcacgtcatgcatattgtttctaacgtgactggcaaacttcgtaaaggtaagactgcaatggacgtgttgcgggctacactgcccgcggggacattgagtggcgcgccaaaaattcgtgcgatggaaattatcgatgaattagagtcggtgaaacgtggtgtctatggcggtgcggtagggtatctcggttggaacggtaatatggataccgctatagctattcgcactggcgtcattaaagacaaaaaactctatgttcaagctgggggtggagttgttgccgactcaattcctcggttggaatggaaagaatcattgaacaaagcgcgggccttatttcgagccgcagctatggtgccacagcaagcggacgaggagtaa

SEQ ID NO: 76693 - protein, 498 aa, marine gamma proteobacterium HTCC2143
MDAQRFSELASQHYNRIPVSREVLADLDTPLSSYLKLADGEYSYLFESVQGGEKWGRYSIIGLPCHTVLKIFGYVATIETDGKVVERLDLEDPLAFVEEFQHRYRVPELDDMPAFSGGLVGYFGYDTVRYVEKRLRDSMPEDKLGTPDILLMVSDEMLVFDNLSGTIRLIIHADPALPNAYAQAQARITELVEQLQKPAPILPAVSLAQEDQAGRISENDFVSESGESAYKQAVETIKEYVLAGDVMQVVPSQRLVADFTGEPLNLYRALRNLNPSPYMYFLNLKDFYIAGSSPEILARLEDGVITVRPIAGTRRRGYTDEEDRALEAELLADPKEIAEHLMLIDLGRNDVGRVSEIGSVELTDKMIVERYSHVMHIVSNVTGKLRKGKTAMDVLRATLPAGTLSGAPKIRAMEIIDELESVKRGVYGGAVGYLGWNGNMDTAIAIRTGVIKDKKLYVQAGGGVVADSIPRLEWKESLNKARALFRAAAMVPQQADEE

SEQ ID NO: 76694 - DNA, 1479 bp, marine gamma proteobacterium HTCC2080
  CDS (1)..(1479): transl_table=11
atggatcaaaagacctttgattactgggtaactcagggttacaaccggattcctgtttccaaaacgattcttgccgatgtagaaaccccgctttctgcctatatgaaactggcggccggtccctactctttcttgtttgagtcggttcagggcggtgaaaaatggggccgttattcgattattggattacctgctcgtcatcgtattcgcgtacgaggaaaacgagtctccctagagcgtgatggggttgccacgacggtcgttgaaagtgaagaccccttggccgaggttgaagcacagcacgctaagtttcgaagtgcgcccatcgagggcttgccggtctttcacggtggtttagtaggctattttggttatgacgtggtgcgctatgtggaggcaaagcttgaacagcatgatcaaactgatgccctgaacactccggatatactgttgctggtggccgaggaagttctggtttttgataatctggcgggcacgctgacgatggttgtcactgccaatgcagaagagcctgacgcccgcgtggcagcgcttgcacggcttgaagtccttgaacatcagctgccgcagcctggcccctcacttgagcctatcagtcttgacggtgctggattggaggccattgaggcaacggctcgataccataccgatccctcgcaatttatggggtgggtcgagatgattcgaaaatctattcttgatggcgatgtcatgcaggtcgtgccttcccagcgtatgaccgttgattttagaagtgcccccatttcgctgtatcgtgcgctgagaaatttgaacccctcgccttatatgtattttttagatatgggcgatttccaaattgtgggctcctctccagaaatactggtgcgcgctgagcagggcgaggttacggttagacctattgccggcactcgcaagcgcggtcaaaatccggaggaggatcaggccctcgctgaagagttattagcagaccccaaggaaatggctgaacacctgatgttgattgatttggggcgcaatgatttgggtcgcatcgctcaacccggcacggttgaagtcactgagtccatgcttatcgagcgctactctcacgtcatgcatatcgtttctaatgtaaaagggcgggcgcaagctgatttaacggccatggacgccctgcgggcaaccttgcccgcgggcacattgagtggtgcgccgaaggtgatggcaatgcaaattatcgatcgtttagagtcggttaagcgcggcgtatatggtggtgcagtgggctatatttcttgggcgggtgacatggataccgccatcgctatccgcaccgcagtgatcaaagatgatgaagttcacattcaggcaggcgctggcatcgtcgcagattctgtgccggctctggagtgggaagagacaatgaataaggctagaggtatgttaagagctgtagctatggcgcagcccaaatga

SEQ ID NO: 76695 - protein, 492 aa, marine gamma proteobacterium HTCC2080
MDQKTFDYWVTQGYNRIPVSKTILADVETPLSAYMKLAAGPYSFLFESVQGGEKWGRYSIIGLPARHRIRVRGKRVSLERDGVATTVVESEDPLAEVEAQHAKFRSAPIEGLPVFHGGLVGYFGYDVVRYVEAKLEQHDQTDALNTPDILLLVAEEVLVFDNLAGTLTMVVTANAEEPDARVAALARLEVLEHQLPQPGPSLEPISLDGAGLEAIEATARYHTDPSQFMGWVEMIRKSILDGDVMQVVPSQRMTVDFRSAPISLYRALRNLNPSPYMYFLDMGDFQIVGSSPEILVRAEQGEVTVRPIAGTRKRGQNPEEDQALAEELLADPKEMAEHLMLIDLGRNDLGRIAQPGTVEVTESMLIERYSHVMHIVSNVKGRAQADLTAMDALRATLPAGTLSGAPKVMAMQIIDRLESVKRGVYGGAVGYISWAGDMDTAIAIRTAVIKDDEVHIQAGAGIVADSVPALEWEETMNKARGMLRAVAMAQPK

SEQ ID NO: 76696 - DNA, 1488 bp, Candidatus Desulfococcus oleovorans Hxd3
  CDS (1)..(1488): transl_table=11
atgatccttcaacagtttccggacaaaacggcatttcgtgagatggcgcagaccgccaacaccattcccgtgtgcgccgagattctggcggataccgagactccggtctctatcttgaaaaagctctacaccggaaaagggccgattttcctgtttgaaagcgcggaaggcggcgagcggtggggccggtacagctttctgggggcatcggcaaaggcccatgtaaaactgttccgggaccacgtggagattttggacaacggcacggtgcagcggattcgacacaacggcttgcccctgcaaatcctgcgaaacatcatggccgactacacgccggccgagatgcctggcctgccccggttctggggcgggctggtggggtattttacctacgaaatggtctcattttttgaaaagattcccaaccggctccccgaagaccggcccattgccgctttcatgattccggacgagctgatcatctttgacaacatccgccacacgctggtagccctggccattgcctttacccgatcagcaaaaagcattgacgcggcttacgaggcggcggaaaagcgggttgaaaaactgcttgccgtggtgcaggcgcccctgcccgtggaggccggcaactcagccgcagccccctgtgtgctggcccctgaaagaacagatgaggattacagaacaatggtcggggtcaccaaggactatatccgccagggtgaaatcattcaggcggtgctgtcccagcccttttcctgctgcccggccccggatctctggaccctttaccgggcccagcggtacatcaacccgtcgccataccttttctttctgcacatcggggaaacggccctggtggggtcatcgccggaaaccatggtgcggcttgaaaaccgcatcgctacggtgcggcccattgccggcacccggccccggggaaggaccgaacaggaggaccgggcactggccgatgaaatgctgaaggacgaaaaagaaagggccgagcacctgatgctggtggacctgggcagaaacgacctgggccgggtggcggtcaccggcacggtacaggtcaccgacctgatggtggtggagcgctactctcatgtgatgcacctggtctcaaacgtacgctgcgaccttgaacgggaccttgacgcgtgggacctgctggccgccacctttccggccggcaccctttccggcgcgcccaaaatccgggccatgcagatcatcgatgagcttgaaaagggtccccggggaccgtatggcggagccgtgggatatatctccttcagcggcaacatggatctggccatcaccatccgcacggcctgcattgaagacgattgtctcacggtgcgggccggagccggcatcgtggccgactcggacccggaaaaggagcgcgttgaaaccgtgaacaaggccagggccattcagaaagccctggaactggccggcagacaacacacccattaa

SEQ ID NO: 76697 - protein, 495 aa, Candidatus Desulfococcus oleovorans Hxd3
MILQQFPDKTAFREMAQTANTIPVCAEILADTETPVSILKKLYTGKGPIFLFESAEGGERWGRYSFLGASAKAHVKLFRDHVEILDNGTVQRIRHNGLPLQILRNIMADYTPAEMPGLPRFWGGLVGYFTYEMVSFFEKIPNRLPEDRPIAAFMIPDELIIFDNIRHTLVALAIAFTRSAKSIDAAYEAAEKRVEKLLAVVQAPLPVEAGNSAAAPCVLAPERTDEDYRTMVGVTKDYIRQGEIIQAVLSQPFSCCPAPDLWTLYRAQRYINPSPYLFFLHIGETALVGSSPETMVRLENRIATVRPIAGTRPRGRTEQEDRALADEMLKDEKERAEHLMLVDLGRNDLGRVAVTGTVQVTDLMVVERYSHVMHLVSNVRCDLERDLDAWDLLAATFPAGTLSGAPKIRAMQIIDELEKGPRGPYGGAVGYISFSGNMDLAITIRTACIEDDCLTVRAGAGIVADSDPEKERVETVNKARAIQKALELAGRQHTH

SEQ ID NO: 76698 - DNA, 1482 bp, Pseudomonas putida GB-1
  CDS (1)..(1482): transl_table=11
atgaaccgcgaagaattcctgcgcctggccgctgccggctacaaccgcattcctttggcctgcgaaaccctggccgacttcgacacgccgctgtcgatctacctgaaactggctgaccaacccaactcgtacctgctcgaatcggtgcagggcggcgagaagtggggccgttactcgatgatcggcttgccgtcgcgcacggtgatgcgtgtgcatggctaccacgtcagcatcctgcaggatggcgtggaagtggaaagccacgatgtcgaagacccgctggcgttcgttgaaaccttcaaggaccgctacaaggttgccgacattcccggcctgccgcgtttcaacggcggcctggtcggctacttcggctacgactgcgtgcgttatgtggaaaagcgcctgggcgccagccccaacccggacccgctgggcgtgccggatatcctgctgatggtgtccgacgcggtggtggtattcgacaacctggcgggcaagatgcacgccatcgtgctggttgacccggccgaggagcaggccttcgaacagggccaggcacgccttcaaggcttgctcgaaaccctgcgtcagccgatcaccccgcgccgtggcctggacctgagcggcccacaggtcgacgaaccggagttccgctccagctatacccgtgaggattacgagaacgcggtcggccgtatcaaggaatatattctggccggtgactgcatgcaggtggtgccgtcacagcgcatgtcgatcgacttcaaggctgcgcctatcgacctgtaccgcgcgctgcgctgcttcaacccgacgccgtacatgtacttcttcaacttcggtgacttccatgtggtcggcagctcgcccgaggtgctggtacgtgtcgaggacaacctggtcaccgtgcgcccaatcgccggcacccgcccgcgcggcgccaccgaagaggccgaccgcgccctggaagacgacctgctgtcggacgacaaggaaattgccgagcacttgatgctgatcgacctgggccgcaacgacgtgggccgtgtgtcttcgaccggcagcgtgcgcctgaccgagaagatggtcatcgagcgttattccaacgtgatgcacatcgtctccaacgtcaccggccaactgcgtgaagggctgacggcgatggatgcactgcgggcgatcctgccggctggcaccctgtcgggtgcaccgaaaatccgcgcgatggaaatcatcgacgaactggagccggtcaagcgtggagtttacggtggtgcagtcggctactttgcctggaacggcaacatggataccgcgattgccatccgtactgccgtgatcaaggacggtgaactgcatgtgcaagccggtggtggcattgttgccgactcggtaccggcgctggaatgggaagaaaccatcaacaagcgccgagcgatgttccgcgcggtggcgctggccgagcagacgttgaccaaataa

SEQ ID NO: 76699 - protein, 493 aa, Pseudomonas putida GB-1
MNREEFLRLAAAGYNRIPLACETLADFDTPLSIYLKLADQPNSYLLESVQGGEKWGRYSMIGLPSRTVMRVHGYHVSILQDGVEVESHDVEDPLAFVETFKDRYKVADIPGLPRFNGGLVGYFGYDCVRYVEKRLGASPNPDPLGVPDILLMVSDAVVVFDNLAGKMHAIVLVDPAEEQAFEQGQARLQGLLETLRQPITPRRGLDLSGPQVDEPEFRSSYTREDYENAVGRIKEYILAGDCMQVVPSQRMSIDFKAAPIDLYRALRCFNPTPYMYFFNFGDFHVVGSSPEVLVRVEDNLVTVRPIAGTRPRGATEEADRALEDDLLSDDKEIAEHLMLIDLGRNDVGRVSSTGSVRLTEKMVIERYSNVMHIVSNVTGQLREGLTAMDALRAILPAGTLSGAPKIRAMEIIDELEPVKRGVYGGAVGYFAWNGNMDTAIAIRTAVIKDGELHVQAGGGIVADSVPALEWEETINKRRAMFRAVALAEQTLTK

SEQ ID NO: 76700 - DNA, 1488 bp, Marinobacter sp. ELB17
  CDS (1)..(1488): transl_table=11
atgacccccgaacattttcacgaactggcacaagccggcttcaaccgtatccctgtgtaccgtgaagtactggcggacatggacacgccattaagcacctacctgaaactggccagcgggccttattcctacctgttcgaatccgttcagggcggggaaaaatggggccgttattccatcattggcttgcccagccaggaagtactgaaagtcttcgatcaccgtattgaaatccgccgccatggtgaactggtagagagcagcgaggtgaaagaccccctggctttcatcgccagctatcaggaacgcttccacgcccctgacctggccgaactgccacgattcaacggtggcctggtgggctactttggctacgacaccgtgcgctacattgagaaacgcctggccaacagctgcccgccagaccgcattggcaccccggacatcctgctaatggtgtctaacgaactggtggtgttcgacaacctgcgcggcaaactgcacctgattgttcacgtaaacccggcaaacgaaggcgcctttgaacaggcccagaagcgcctggatcaactggaacagcagttacgccaaaacaccgctcaaacaccaaaaaccccggctcatctgcgcggcaaaaccgtggatgaaagcgagttcgtgtccggcttcagccaggaaaaatttgaagccgccgtggacaccatcaaggactacgtgctggatggcgacgtgatgcaaaccgtcatttcccaacgcatgtcgattccgtttgaggcgccgccgctgaatctgtaccgctcgctgcgaataatgaatccttcgccgtacatgtactttctggatctggacgacttccacattgtgggttcatcaccggaaattctggcgcgcatggaagaccgcgaagtgaccgtgcggcccatcgccggcacccgcaaacgcggcgccaccgaagctgaagaccgcgccctggaagccgaactgctggctgacccaaaagaaattgccgaacacctgatgctgattgacctgggccgcaacgacgcgggccgggtatcggaaaccggcaccgtacggctgaccgagaaaatggctgttgagcgctactcccatgtaatgcacatcgtatcgaacgtcaccggccaggtaaaagacggcatcagctgccttgatgtactaaaagctaccctgcctgccggcacattaagcggcgcaccaaaaacccgcgccatggaaatcattgacgagctggagccggtcaaacgcggcgtgtatggcggcgccgtaggctatttgtcgttcaacggcaacatggacaccgccatcgccatccgcaccgcggtgatcaaagacaacaccctgcacatacaggccggcgccggtatagtcgcagattctgtaccacgcctggaatggaaagaaaccatgaacaaaggccgcgccattttccgcgccgtcgccatgacctacaacgactttgaccactaa

SEQ ID NO: 76701 - protein, 495 aa, Marinobacter sp. ELB17
MTPEHFHELAQAGFNRIPVYREVLADMDTPLSTYLKLASGPYSYLFESVQGGEKWGRYSIIGLPSQEVLKVFDHRIEIRRHGELVESSEVKDPLAFIASYQERFHAPDLAELPRFNGGLVGYFGYDTVRYIEKRLANSCPPDRIGTPDILLMVSNELVVFDNLRGKLHLIVHVNPANEGAFEQAQKRLDQLEQQLRQNTAQTPKTPAHLRGKTVDESEFVSGFSQEKFEAAVDTIKDYVLDGDVMQTVISQRMSIPFEAPPLNLYRSLRIMNPSPYMYFLDLDDFHIVGSSPEILARMEDREVTVRPIAGTRKRGATEAEDRALEAELLADPKEIAEHLMLIDLGRNDAGRVSETGTVRLTEKMAVERYSHVMHIVSNVTGQVKDGISCLDVLKATLPAGTLSGAPKTRAMEIIDELEPVKRGVYGGAVGYLSFNGNMDTAIAIRTAVIKDNTLHIQAGAGIVADSVPRLEWKETMNKGRAIFRAVAMTYNDFDH

SEQ ID NO: 76702 - DNA, 1620 bp, Bacillus amyloliquefaciens
  CDS (1)..(1620): transl_table=11
ttgggtttatttcttatacgcaagactcctctcactcttcatctcattctccttaccgtaaggaggagaatcatgaatttacaatcggatgtttctttatttttaaaggacagtctgacacaccgcaccattccaatcgcagagacttttacggtcgacacgatcacacccattcagatggttgaaaaactggacagaaacattacgtatcttttagaaagcaaggatgagtcgtcaagctggtcgagatactcttttatcggcctcgatccttttatcacgattaaagagagtcataacacattcactgccgctgatccaaacgggcatacgctgtttgaagccggagaattaaaagccgtgcttgactggatgaatgagagcttccgcattaaaacacccgagcttgatatcccattttcgggaggggcggtcggttatctgagctatgacatgattcctttgattgagccttccgtgccaagccacgcgaaagtaacagatttcgaaaaatgcatgctgtttgtctgccggaaaatcatcgcgtacgaccacgaaacgaaacaagtgcatttcattcaatatgcggagcttaacggccgggagacggaggaagaaaagcgggccgtttttaaagaaaattgcgcggagcttcgtaagcttatcggtattttgacagaatcgaaagatatgaaagagccgtttttttctaaagaaacgtttgacacgccaagttttgccgctgtgacatcaaattatacgaaagaagagtttatggccggcgttaataaactgaaagaatatataaaagcgggagacatttttcaaggggtgctttcgcaaaagtttgacattccggtatccagacattcatttgagctgtacagggtgctccgcatcgtcaatccttcaccttatatgtactatatcaaactgcctgacagagacattgtcgggagttcgcctgaacgtctgatccgcgtgcatgacaggcacctggaaattcatccgattgccggaacgagaagaaggggcgccggaaaagaagaggacgaacgcctgaaaaaagagctgatgaatgacgaaaaagaaaaagctgaacattacatgctcgtcgatcttgcgcgcaatgacatcggcagagttgcggagtacggttccgtagccgttccggaattcacaaaggtcgtttctttttcacatgtgatgcacatcatctctgttgtaaccggccgtttaaagcagggcatccatcccgttgacgcgctgatgtcggcattcccggcaggaacactcacgggcgctccgaaaatccgcgcgatgcagcttttaaatgaattagaaccgacttccagagaaacctacggcggatgtatcgcttatatcggatttgacgggtcaattgattcgtgtattaccatccgcaccatgagtgtcaaaaacggtacggcatcggtgcaggcgggcgcgggaatagtcgccgattccgtcccggaagccgaatatgaagaaagctgtaacaaagcgggggcgcttttaaaaacgattcaaatcgcagaagacatcttttctggcggggaggagaagacggatgaacaaatttctgcaatcgtgcgttaa

SEQ ID NO: 76703 - protein, 539 aa, Bacillus amyloliquefaciens
MGLFLIRKTPLTLHLILLTVRRRIMNLQSDVSLFLKDSLTHRTIPIAETFTVDTITPIQMVEKLDRNITYLLESKDESSSWSRYSFIGLDPFITIKESHNTFTAADPNGHTLFEAGELKAVLDWMNESFRIKTPELDIPFSGGAVGYLSYDMIPLIEPSVPSHAKVTDFEKCMLFVCRKIIAYDHETKQVHFIQYAELNGRETEEEKRAVFKENCAELRKLIGILTESKDMKEPFFSKETFDTPSFAAVTSNYTKEEFMAGVNKLKEYIKAGDIFQGVLSQKFDIPVSRHSFELYRVLRIVNPSPYMYYIKLPDRDIVGSSPERLIRVHDRHLEIHPIAGTRRRGAGKEEDERLKKELMNDEKEKAEHYMLVDLARNDIGRVAEYGSVAVPEFTKVVSFSHVMHIISVVTGRLKQGIHPVDALMSAFPAGTLTGAPKIRAMQLLNELEPTSRETYGGCIAYIGFDGSIDSCITIRTMSVKNGTASVQAGAGIVADSVPEAEYEESCNKAGALLKTIQIAEDIFSGGEEKTDEQISAIVR

SEQ ID NO: 76704 - DNA, 1548 bp, Bacillus subtilis
  CDS (1)..(1548): transl_table=11
atgtattaccaatccaacatttcttcatttttacaggacagcttgtcctaccacaccataccgattgtggagaccttcacagtcgatacgatgacacccattcaaatgatagagaagctcgacagggagattacgtatcttcttgaaagcaaggatgatacatccaattggtcaagatattcgtttatcggcctgaatccattcctcacgattaaagaaaagcagagccgttttacagctacagatcatgacggcagatctcattacacaggaaatgaacttaaagaagttctgaattggatgaataccacgtacaaaatcaaaacgccagagctaggcattccttttgtcggcggagctgtcgggtacttaagctacgatatgatcccgctgattgagccttctgttcctccgcattcaaaagaaacaggaatggaaaagtgtatgctgtttgtttgccggacattaattgcatatgatcatgaaactaaaaacgtccactttatccaatatgcaaggctcaatggacaggaaacagaaaacgaaaaaatcgatgtatttcatcaaaatcatcaagagcttcaagatctcatagaaaaaatgatggatcaaaaaaacataaaagaactgtttctttctgctgattcatataagacacccagctttgagacagtatcttctaattatgaaaaaccagcctttatggctgatgtagaaaaaataaaagaatatataaaagcgggcgatatcttccaaggcgttctgtcacaaaaatttgagattccgataaaatcagatgcctttgagttataccgggtgcttaggatcgtcaatccttctccgtatatgtattatatgaaactccaagacagagaaatagtcggcagctctccggaacgattaatccacgttaaggacgggcacttggaaatccatccgattgccggtacgagaaaacgaggcgcagataaagaggaagatgaaaaactcaaagttgagctgatgaaggatgaaaaagaaaaagcggagcactacatgctcgttgaccttgcccggaacgatattggcagagtagcagagtatggatctgtttctgtgccggagttcacaaaaattgtctccttttcgcatgtcatgcacattatttcggtggttacaggccgattgaaagaaggggttcaccctgtcgatgcactgatgtccgctttcccggcgggaactttaacaggcgctccaaaaatccgtgctatgcagcttttgcaagagctcgagccaacaccgagagagacatacggcggctgtatcgcctacatcggatttgacggtaatatcgactcttgtattacgattcgcaccatgagcgtaaagaacggtgttgcatcgatacaggcaggtgctggaattgttgcggattctgttccggaagccgaatacgaagaaagctgtaataaagccggtgcgctgctgaaaacgattcatattgcagaagacatgttccatagcaaggaggataaagctgatgaacaaatttctacaattgtgcgttga

SEQ ID NO: 76705 - protein, 515 aa, Bacillus subtilis
MYYQSNISSFLQDSLSYHTIPIVETFTVDTMTPIQMIEKLDREITYLLESKDDTSNWSRYSFIGLNPFLTIKEKQSRFTATDHDGRSHYTGNELKEVLNWMNTTYKIKTPELGIPFVGGAVGYLSYDMIPLIEPSVPPHSKETGMEKCMLFVCRTLIAYDHETKNVHFIQYARLNGQETENEKIDVFHQNHQELQDLIEKMMDQKNIKELFLSADSYKTPSFETVSSNYEKPAFMADVEKIKEYIKAGDIFQGVLSQKFEIPIKSDAFELYRVLRIVNPSPYMYYMKLQDREIVGSSPERLIHVKDGHLEIHPIAGTRKRGADKEEDEKLKVELMKDEKEKAEHYMLVDLARNDIGRVAEYGSVSVPEFTKIVSFSHVMHIISVVTGRLKEGVHPVDALMSAFPAGTLTGAPKIRAMQLLQELEPTPRETYGGCIAYIGFDGNIDSCITIRTMSVKNGVASIQAGAGIVADSVPEAEYEESCNKAGALLKTIHIAEDMFHSKEDKADEQISTIVR

SEQ ID NO: 76706 - DNA, 1548 bp, Bacillus subtilis
  CDS (1)..(1548): transl_table=11
atgtattaccaatccaacatttcttcatttttacaggacagcttgtcctaccacaccataccgattgtggagaccttcacagtcgatacgatgacacccattcaaatgatagagaagctcgacagggagattacgtatcttcttgaaagcaaggatgatacatccaattggtcaagatattcgtttatcggcctgaatccattcctcacgattaaagaaaagcagagccgttttacagctacagatcatgacggcagatctcattacacaggaaatgaacttaaagaagttctgaattggatgaataccacgtacaaaatcaaaacgccagagctaggcattccttttgtcggcggagctgtcgggtacttaagctacgatatgatcccgctgattgagccttctgttcctccgcattcaaaagaaacaggaatggaaaagtgtatgctgtttgtttgccggacattaattgcatatgatcatgaaactaaaaacgtccactttatccaatatgcaaggctcaatggacaggaaacagaaaacgaaaaaatcgatgtatttcatcaaaatcatcaagagcttcaagatctcatagaaaaaatgatggatcaaaaaaacataaaagaactgtttctttctgctgattcatataagacacccagctttgagacagtatcttctaattatgaaaaaccagcctttatggctgatgtagaaaaaataaaagaatatataaaagcgggcgatatcttccaaggcgttctgtcacaaaaatttgagattccgataaaatcagatgcctttgagttataccgggtgcttaggatcgtcaatccttctccgtatatgtattatatgaaactccaagacagagaaatagtcggcagctctccggaacgattaatccacgttcaagacgggcacttagaaatccatccgattgccggtacgagaaaacgaggcgcagataaagaggaagatgaaaaactcaaagttgagctgatgaaggatgaaaaagaaaaagcggagcactacatgctcgttgaccttgcccggaacgatattggcagagtagcagagtatggatctgtttctgtgccggagttcacaaaaattgtctccttttcgcatgtcatgcacattatttcggtggttacaggccgattgaaagaaggggttcaccctgtcgatgcactgatgtccgctttcccggcgggaactttaacaggcgctccaaaaatccgtgctatgcagcttttgcaagagctcgagccaacaccgagagagacatacggcggctgtatcgcctacatcggatttgacggtaatatcgactcttgtattacgattcgcaccatgagcgtaaagaacggtgttgcatcgatacaggcaggtgctggaattgttgcggattctgttccggaagccgaatacgaagaaagctgtaataaagccggtgcgctgctgaaaacgattcatattgcagaagacatgttccatagcaaggaggataaagctgatgaacaaatttctacaattgtgcgttga

SEQ ID NO: 76707 - protein, 515 aa, Bacillus subtilis
MYYQSNISSFLQDSLSYHTIPIVETFTVDTMTPIQMIEKLDREITYLLESKDDTSNWSRYSFIGLNPFLTIKEKQSRFTATDHDGRSHYTGNELKEVLNWMNTTYKIKTPELGIPFVGGAVGYLSYDMIPLIEPSVPPHSKETGMEKCMLFVCRTLIAYDHETKNVHFIQYARLNGQETENEKIDVFHQNHQELQDLIEKMMDQKNIKELFLSADSYKTPSFETVSSNYEKPAFMADVEKIKEYIKAGDIFQGVLSQKFEIPIKSDAFELYRVLRIVNPSPYMYYMKLQDREIVGSSPERLIHVQDGHLEIHPIAGTRKRGADKEEDEKLKVELMKDEKEKAEHYMLVDLARNDIGRVAEYGSVSVPEFTKIVSFSHVMHIISVVTGRLKEGVHPVDALMSAFPAGTLTGAPKIRAMQLLQELEPTPRETYGGCIAYIGFDGNIDSCITIRTMSVKNGVASIQAGAGIVADSVPEAEYEESCNKAGALLKTIHIAEDMFHSKEDKADEQISTIVR

SEQ ID NO: 76708 - DNA, 1521 bp, Magnetospirillum gryphiswaldense
  CDS (1)..(1521): transl_table=11
atgaccgccaatcccgaatacgccgccttccgccagacctatgacgcgggcaaaccgcaattggtgtggcggaccatggtggccgatctggaaacgccggtttccgccttcatgaagttggccggcggccagccccattcgttcctgctggaatcggtggaaggcggcgccgtgcgcggtcggtattcggtgttgggcatgaagcccgatctgttgtggaaatgcgtgggcaacatggcctgggtcaaccgcaacgcccgcaccgatgcggatgcgttcgagccctgcccggtggccgaagccagcggcaccttggaatccttgcgcgccctgatcgccgaaagccgcgtcgatattcccgccaacctgccgcccatggccgccggtctggtcggctacatgacctatgacaccatccggctggtggaaaaactgcccgacaacaaccccgacaccatcggcattcccgacggcatctatatgcggccgacggtgatggcggtgttcgacaacgtcaacggcaccttgaccgccgtggtgccggtgtggccgcgccccggcgtcgatgcccgcgccgcctttgaattggcgcaggaacgcctgggtttcgtcgtcgaggcgctggaaagcccgctgccccacgtgatttccgccagcgaccgcgccagccatgcgcccaatccggtgccgtcgatgacggcggaggaatattgcgccaaggtgctgaaggccaaggaatacatcgccgccggcgacatcttccaggtggtcctcagccagcgtctggcggtgccgttcaaattgccgccgttttcgctgtaccgggcgttgcgccgcctcaatcccagcccgttcctggtctacatgaacatggacggctttcagttggtggcgtcgagcccggaaatcctggtccgcctgcgtgacggcaaggtgaccatccgccccatcgccggcacccgcaagcgtggcgtcgatcaggccgaggacgatgccctggccgccgatctgctggccgatcccaaggaactggccgaacatctgatgctgctggatctgggccgcaacgatgtgggccgggtggccaagatcggctcggtcaaggtgaccaagaagatgttcgtggaatattattcccacgtcatgcacatcgtttccaacgtggaaggcgacatccgcgacgattgcgacgccatggacgcgctgatggctggctttcccgccggcaccacctcgggtgcgcccaagattcgcgccatggaaatcatcgacgagttggaaccggagcgccggtcgttctatgccggctgcatgggctatatttccggcaacggcaatatggatacctgcatcgccctgcgcaccaccttggtcaaggacggcaccatgtatgtgcaggccggcgccggcatcgtcgccgattcggttcccgaaaaggaacacgaggaatgcatgaacaaggcccgcgccctggttcgcgcggcggaagaggcgctggaatacacgctgacccgccaataa

SEQ ID NO: 76709 - protein, 506 aa, Magnetospirillum gryphiswaldense
MTANPEYAAFRQTYDAGKPQLVWRTMVADLETPVSAFMKLAGGQPHSFLLESVEGGAVRGRYSVLGMKPDLLWKCVGNMAWVNRNARTDADAFEPCPVAEASGTLESLRALIAESRVDIPANLPPMAAGLVGYMTYDTIRLVEKLPDNNPDTIGIPDGIYMRPTVMAVFDNVNGTLTAVVPVWPRPGVDARAAFELAQERLGFVVEALESPLPHVISASDRASHAPNPVPSMTAEEYCAKVLKAKEYIAAGDIFQVVLSQRLAVPFKLPPFSLYRALRRLNPSPFLVYMNMDGFQLVASSPEILVRLRDGKVTIRPIAGTRKRGVDQAEDDALAADLLADPKELAEHLMLLDLGRNDVGRVAKIGSVKVTKKMFVEYYSHVMHIVSNVEGDIRDDCDAMDALMAGFPAGTTSGAPKIRAMEIIDELEPERRSFYAGCMGYISGNGNMDTCIALRTTLVKDGTMYVQAGAGIVADSVPEKEHEECMNKARALVRAAEEALEYTLTRQ

SEQ ID NO: 76710 - DNA, 1851 bp, Nicotiana tabacum
  CDS (1)..(1851)
atgcagtcgttacctatctcataccggttgtttccggccacccaccggaaagttctgccattcgccgtcatttctagccggagctcaacttctgcacttgcgcttcgtgtccgtacactacaatgccgctgccttcactcttcatctctagttatggatgaggacaggttcattgaagcttctaaaagcgggaacttgattccgctgcacaaaaccattttttctgatcatctgactccggtgctggcttaccggtgtttggtgaaagaagacgaccgtgaagctccaagctttctctttgaatccgttgaacctggttttcgaggttctagtgttggtcgctacagcgtggtgggggctcaaccatctatggaaattgtggctaaggaacacaatgtgactatattggaccaccacactggaaaattgacccagaagactgtccaagatcccatgacgattccgaggagtatttctgagggatggaagcccagactcattgatgaacttcctgataccttttgtggtggatgggttggttatttctcatatgacacagttcggtatgtagagaacaggaagttgccattcctaagggctccagaggatgaccggaaccttgcagatattcaattaggactatacgaagatgtcattgtgtttgatcatgttgagaagaaagcacatgtgattcactgggtgcagttggatcagtattcatctcttcctgaggcatatcttgatgggaagaaacgcttggaaatattagtgtctagagtacaaggaattgagtctccaaggttatctcccggttctgtggatttctgtactcatgcttttggaccttcattaaccaagggaaacatgacaagtgaggagtacaagaatgctgtcttacaagcaaaggagcacattgctgcaggagacatatttcaaatcgttttaagtcaacgctttgagagaagaacatttgctgacccatttgaagtgtacagagcattaagaattgtgaatccaagcccatatatgacttacatacaagccagaggctgtattttagttgcatcgagcccagaaattttgacacgtgtgaagaagagaagaattgttaatcgaccactggctgggacaagcagaagagggaagacacctgatgaggatgtgatgttggaaatgcagatgttaaaagatgagaaacaacgcgcagagcacatcatgctggttgatttaggacgaaatgatgtaggaaaggtgtcaaaacctggttctgtgaatgtcgaaaagctcatgagcgttgagcggtattcccatgtgatgcacataagctccacggtctctggagagttgcttgatcatttaacctgttgggatgcactacgtgctgcattgcctgttgggaccgtcagtggagcaccaaaggtaaaggccatggagttgattgatcagctagaagtagctcggagagggccttacagtggtgggtttggaggcatttccttttcaggtgacatggacatcgcactagctctaaggacgatggtattcctcaatggagctcgttatgacacaatgtattcatatacagatgccagcaagcgtcaggaatgggttgctcatctccaatccggggctggaattgtggctgatagtaatcctgatgaggaacagatagaatgcgagaataaagtagccggtctgtgccgagccattgacttggccgagtcagcttttgtaaagggaagacacaaaccgtcagtcaagataaatggttctgtgccaaatctattttcaagggtacaacgtcaaacatctgttatgtcgaaggacagagtacatgagaaaagaaactag

SEQ ID NO: 76711 - protein, 616 aa, Nicotiana tabacum
MQSLPISYRLFPATHRKVLPFAVISSRSSTSALALRVRTLQCRCLHSSSLVMDEDRFIEASKSGNLIPLHKTIFSDHLTPVLAYRCLVKEDDREAPSFLFESVEPGFRGSSVGRYSVVGAQPSMEIVAKEHNVTILDHHTGKLTQKTVQDPMTIPRSISEGWKPRLIDELPDTFCGGWVGYFSYDTVRYVENRKLPFLRAPEDDRNLADIQLGLYEDVIVFDHVEKKAHVIHWVQLDQYSSLPEAYLDGKKRLEILVSRVQGIESPRLSPGSVDFCTHAFGPSLTKGNMTSEEYKNAVLQAKEHIAAGDIFQIVLSQRFERRTFADPFEVYRALRIVNPSPYMTYIQARGCILVASSPEILTRVKKRRIVNRPLAGTSRRGKTPDEDVMLEMQMLKDEKQRAEHIMLVDLGRNDVGKVSKPGSVNVEKLMSVERYSHVMHISSTVSGELLDHLTCWDALRAALPVGTVSGAPKVKAMELIDQLEVARRGPYSGGFGGISFSGDMDIALALRTMVFLNGARYDTMYSYTDASKRQEWVAHLQSGAGIVADSNPDEEQIECENKVAGLCRAIDLAESAFVKGRHKPSVKINGSVPNLFSRVQRQTSVMSKDRVHEKRN

SEQ ID NO: 76712 - DNA, 1602 bp, Ostreococcus tauri
  CDS (1)..(1602)
atgagcgcgacggcggcgatggcggcgcgggagacgcttcgggatgcgtgcggtgacgcggtgcggggtggacataacgtcgtgccggtgtatcgacggatctttgacgatcagttgacgccgatattggcgtatcgcttgttggtgaaggaggacgatagagaagcgccgagctttctgttggagtccgtcgtcggggggtcgcaggttgggcggttttcgttcctggggagacggccggtgatggaggtgacggcgaaggattacgaggtgacgacgacgcaccacgggacggggcggagcgagacgacgacggagacagatccgatggaggtgatgaagcgcattagcgcggagtggcgggcgtgcacgatgtcgggtttaccggaatgcttctcagggggctgggtcgggttcaccggatacgacaccgtgcggtatcagtacaagagtaagctcgatttcggagaggcggcgccgaaggacgataggtctctgccggacattcatctcgggctctacagggatgtcgtggtgttcgataacgcgaccaagcagctctatgcggtgcactgggtgatgacggatgagtacgcgaacgtggacgaggcgtaccacaagggaatggacgccgtggacgcgttgattgacgacttgcagccgtccaagtcgccgacgttgaagcaaggtttcgtcaacttgcagctcgaccaacgaccgagcgtgccgaaagacagcacgatgaccaaggatgagtttttaggtgcggtggcgcagacgaaggaacacatcaaggctggggatatcttccagctcgtcctcagccatagattccaacgccagacgcacgcggacccgttcgaggtgtaccgagcgttacgcgtcgttaacccatccccgtacatgatttactaccaaggtcgggattgcatcctagttgcatcgagcccggagattttgtgcagagtgaacaaggagcggaccgtggtgaaccgcccgctcgcggggacgcgtatgcgtggcaagacgcaagaagaggatgaggcgttggaggctgatttgctcgcggaccagaaagagtgcgccgaacacgtcatgctcgttgatcttggtcgtaacgacgtcggtcgtgtctccaaggcgggcacggtcaaggttgaaaagctcatggagatcgagcgatactcgcacgtgatgcacatctcctcgaccgtgacgggtagcttagttgataaccttggaccgtgggatgtccttcgcgcggcattgcccgcaggtacggtgagcggtgcgccaaaggttcgagcgatgcaaatcattgacgatttagaggtgacgcgccgcggtccgtacggtggcggtatcggttacgtcggcttcacgggtgagatggatatggcgctcgcgttgcgcaccatggtggtcccgacgcgccaagccaaggacgtcaacggatctcgcgagtggatgatccatctccaagctggtgccgggatcgttgccgattctaacccggagagcgagtatcaagaaactgtcaacaaggcggctgctttaggcagggccatcgatttggcggaatccgcattctccgcggactaa

SEQ ID NO: 76713 - protein, 533 aa, Ostreococcus tauri
MSATAAMAARETLRDACGDAVRGGHNVVPVYRRIFDDQLTPILAYRLLVKEDDREAPSFLLESVVGGSQVGRFSFLGRRPVMEVTAKDYEVTTTHHGTGRSETTTETDPMEVMKRISAEWRACTMSGLPECFSGGWVGFTGYDTVRYQYKSKLDFGEAAPKDDRSLPDIHLGLYRDVVVFDNATKQLYAVHWVMTDEYANVDEAYHKGMDAVDALIDDLQPSKSPTLKQGFVNLQLDQRPSVPKDSTMTKDEFLGAVAQTKEHIKAGDIFQLVLSHRFQRQTHADPFEVYRALRVVNPSPYMIYYQGRDCILVASSPEILCRVNKERTVVNRPLAGTRMRGKTQEEDEALEADLLADQKECAEHVMLVDLGRNDVGRVSKAGTVKVEKLMEIERYSHVMHISSTVTGSLVDNLGPWDVLRAALPAGTVSGAPKVRAMQIIDDLEVTRRGPYGGGIGYVGFTGEMDMALALRTMVVPTRQAKDVNGSREWMIHLQAGAGIVADSNPESEYQETVNKAAALGRAIDLAESAFSAD

SEQ ID NO: 76714 - DNA, 1836 bp, Avena sativa
  CDS (1)..(1836)
atggaatccctagccgcctcggcgttctccccctcacgtctcgccgcccacccctcccgggcggcggcggcggcggcggttcctgtcagggcaagagcggtggcagcagcaggagcgaggaggaggaggagcgggaaggggagcagcggcgtgcggtgctgcgccgggagcgccagcgcgagcgcgaacgcggtgatcaatgggagcgccgcggcgaaggcggagcaggaggacaggcagcggttcttcgaggcggcggcgcgggggagcggcaagggcaacctggtgcccctgtgggagtgcatcgtgtccgaccaccttacccccgtgctcgcctaccgctgcctcgtcggcgaggacgacatggacacccccagcttcctcttcgagtccgtcgagcaggggctcgagggcaccaccaacgtcggtcgctacagcatggttggagcccacccggtgatggagatcgtggccaaggaggacaaggtcaccaccatggaccacgagaagggcaccgtcacggagcagatcgtggacgatcctatggaggttcccaggagcataatggagggatggcacccgcagcagatcgacgatctccctgaaaccttcagcggtggatgggttggattcttctcctacgacacagtccgctatgtcgagaagaagaagatacccttctctggtgctcctcaggatgataggaaccttcccgatgttcacctgggcctctacgatgatgttcttgtctttgacagtgtggagaagaaagtatatgtcatccactgggtaagtctggaccgccatgcatccaccgaggaagcatacaaatatggcaggtcccggctgaggcggtttctttctaaagtccacaacacaaatgtgcccaaactctctccaggatttgtgaagctgcacactaagcagtttggtacagcattgaccaaatcaactatgacaagtgatgagtacaagaatgctgttctgcaggccaaggagcatattctggccggtaatattttccagattgttttaagccagcgttttgagaggcgaacatatgccaccccttttgaggtttatcgggcactacgaattgtgaacccgagtccatacatggcatatgtacaggctagaggctgtatcctggtagcatccagtcctgaaattcttacaaaagtccagaagggaaagatcattaacaggccacttgctgggactacccgaaggggcaagacggaaaatgaagataaattgcaggaggaagaactattaagtgataaaaaacaacgtgctgaacacattatgcttgtagacctgggaaggaacgatgttggcagggtctccaaacctggatctgtgaaggtggaaaagttgatgaacatcgagcggtactcccatgtcatgcacatcagctcaacggttagtggagagttagatgatgatctccaaagctgggatgccttgcgagcagctttgcctgtaggaacagtcagtggagcaccaaaggtgaaagccatggagctgatagatcagttggaggtgacaaggcgaggaccatacagtggcgggttaggagggatatcatttaacggtgacatgatgatcgctcttgctctccgcaccattgtgttctcaacagctccaagccacaacacgatgttctcatacaaaaactcagataggcgccgagagtgggtcgctcacctacaggctggtgcaggtattgttgctgatagtatcccagaagatgagcaaaaagaatgcgagaacaaggcggctgctctagctcgggctattgatcttgccgagtcagcttttgtagacaaggaatag

SEQ ID NO: 76715 - protein, 611 aa, Avena sativa
MESLAASAFSPSRLAAHPSRAAAAAAVPVRARAVAAAGARRRRSGKGSSGVRCCAGSASASANAVINGSAAAKAEQEDRQRFFEAAARGSGKGNLVPLWECIVSDHLTPVLAYRCLVGEDDMDTPSFLFESVEQGLEGTTNVGRYSMVGAHPVMEIVAKEDKVTTMDHEKGTVTEQIVDDPMEVPRSIMEGWHPQQIDDLPETFSGGWVGFFSYDTVRYVEKKKIPFSGAPQDDRNLPDVHLGLYDDVLVFDSVEKKVYVIHWVSLDRHASTEEAYKYGRSRLRRFLSKVHNTNVPKLSPGFVKLHTKQFGTALTKSTMTSDEYKNAVLQAKEHILAGNIFQIVLSQRFERRTYATPFEVYRALRIVNPSPYMAYVQARGCILVASSPEILTKVQKGKIINRPLAGTTRRGKTENEDKLQEEELLSDKKQRAEHIMLVDLGRNDVGRVSKPGSVKVEKLMNIERYSHVMHISSTVSGELDDDLQSWDALRAALPVGTVSGAPKVKAMELIDQLEVTRRGPYSGGLGGISFNGDMMIALALRTIVFSTAPSHNTMFSYKNSDRRREWVAHLQAGAGIVADSIPEDEQKECENKAAALARAIDLAESAFVDKE

SEQ ID NO: 76716 - DNA, 1833 bp, Avena sativa
  CDS (1)..(1833)
atggaatccctagccgcctcggcgttctcgccctcacgtctcgccgcccgcccctcccgggcggcggcggcggcggcggttcctgccagggcaagagcggtggcatcagcaggagggaggaggaggaggagcgggaaggggagcggcgccgtgcggtgctgcgccgggagtagcgcgagcgcgagcgcggtgatcaacgggagcgccgcggcgaaggcggagcaggaggacaggcagcgcttcttcgaggcggcggcgcggggcagcggcaagggcaacctggtgcccctctgggagtgcatcgtgtccgaccacctcacccccgtgctcgcctaccgctgcctcgtcggcgaggacgacatggacacccccagcttcctcttcgagtccgtcgagcaggggctcgagggcaccaccaacgtcggtcgctacagcatggttggagcccacccggtgatggagatcgtggccaaggaggacaaggtcaccaccatggaccacgagaagggcaccgtcacggagcagatcgtggacgatcctatggaggttcccaggagcataatggagggatggcacccgcagcagatcgacgatctccctgaaaccttcagcggtggatgggttggattcttttcctacgacacagtccgctatgtcgaaaagaagaagatacccttctctggtgctcctcaggatgacaggaaccttcccgatgttcacttgggcctctacgatgatgttcttgtctttgacagtgtggagaagaaagtatatgtcatccactgggtaagtctggaccgccatgcatccactgaggaagcataccaatatggcaggtcccggctgagacggtttctttctaaagttcacaacacaaatgtgcccaaactctctccaggatttgtgaagctgcatactaagcagtttggtacagcattgaccaaatcaaccatgacaagtgatgagtacaagagtgctgttctgcaggccaaggagcatattctggccggtaatattttccagattgttttaagccagcgttttgagaggcggacatatgccaccccttttgaggtttatcgagcactacgaattgtgaacccgagtccatacatggcatacgtacaggctagaggctgtatcctggtagcatccagtcctgaaattcttacaaaagttcagaagggaaagattattaacaggccacttgctgggactacccgaaggggcaagacagagaatgaagataaattgcaggaggaagaactattaagtgataaaaaacaacgtgctgaacacattatgcttgtagacctgggaaggaacgatgttggcagggtctccaaacctggatctgtgaaggtggaaaagttgatgaacatcgagcggtactcccatgtcatgcacatcagctcaacggttagtggagagttagatgataatctccaaagctgggatgccttgcgagcagcgttgcctgtaggaacagtcagtggagcaccaaaggtgaaagccatggagctgatagatcagttggaggtgacaaggcggggaccatacagtggcgggttaggagggatatcatttaacggcgacatgatgatcgctcttgctctccgcaccattgtgttctcaacagctccaagccacaacacgatgttctcatacaaaaactcagataggcgccgagagtgggttgctcacctgcaggctggtgcaggcattgttgctgatagtatcccagaagatgagcaaaaagaatgcgagaacaaggcggctgctctagctcgggctattgatcttgccgagtcagcttttgtagacaaggaatag

SEQ ID NO: 76717 - protein, 610 aa, Avena sativa
MESLAASAFSPSRLAARPSRAAAAAAVPARARAVASAGGRRRRSGKGSGAVRCCAGSSASASAVINGSAAAKAEQEDRQRFFEAAARGSGKGNLVPLWECIVSDHLTPVLAYRCLVGEDDMDTPSFLFESVEQGLEGTTNVGRYSMVGAHPVMEIVAKEDKVTTMDHEKGTVTEQIVDDPMEVPRSIMEGWHPQQIDDLPETFSGGWVGFFSYDTVRYVEKKKIPFSGAPQDDRNLPDVHLGLYDDVLVFDSVEKKVYVIHWVSLDRHASTEEAYQYGRSRLRRFLSKVHNTNVPKLSPGFVKLHTKQFGTALTKSTMTSDEYKSAVLQAKEHILAGNIFQIVLSQRFERRTYATPFEVYRALRIVNPSPYMAYVQARGCILVASSPEILTKVQKGKIINRPLAGTTRRGKTENEDKLQEEELLSDKKQRAEHIMLVDLGRNDVGRVSKPGSVKVEKLMNIERYSHVMHISSTVSGELDDNLQSWDALRAALPVGTVSGAPKVKAMELIDQLEVTRRGPYSGGLGGISFNGDMMIALALRTIVFSTAPSHNTMFSYKNSDRRREWVAHLQAGAGIVADSIPEDEQKECENKAAALARAIDLAESAFVDKE

SEQ ID NO: 76718 - DNA, 1830 bp, Avena sativa
  CDS (1)..(1830)
atggaatccctagccgcctcggcgttctcgccctcacgtctcgccgcccgcccctcccgggcggcggcggcggcggttcctgccagggcaagagcggtggcagcagcaggagggaggaggaggaggagcgggaaggggagcggcggcgtgcggtgctgcgccgggagtagcgcgagcgcgagcgcggtgatcaacgggagcgccgcggcgaaggcggagcaggaggacaggcagcggttcttcgaggcggcggcgcgcgggagcggcaagggcaacctggtgcccctgtgggagtgcatcgtgtccgaccacctcacccccgtgctcgcctaccgctgcctcgtcggcgaggacgacatggacacccccagcttcctcttcgagtccgtcgagcaggggctcgagggcaccaccaacgtcggtcgctacagcatggtcggagcccacccggtgatggagatcgtggccaaggaggacaaggtcaccaccatggaccacgagaagggcaccgtcacggagcagatcgtggacgaccctatggaggttcccaggagcataatggagggatggcacccgcagcagatcgacgatctccctgaaaccttcagcggtggatgggttggattcttttcttacgacacagtccgctatgtcgaaaagaagaagatacccttctctggtgctcctcaggatgacaggaaccttcccgatgttcacttgggcctctacgatgatgttcttgtctttgacagtgtggagaagaaagtatatgtcatccactgggtaagtctggaccgccatgcgtccaccgaggaagcataccaatatggcaggtcccggctgaggcggtttctttctaaagttcacaacacaaatgtgcccaaactctctccaggatttgtgaagctgcatactaagcagtttggtacagcattgaccaaatcaaccatgacaagtgatgagtacaagagtgctgttctgcaggccaaggagcatattctggccggtaatattttccagattgttttaagccagcgttttgagaggcgaacatatgccaccccttttgaggtttatcgggcactacgaattgtgaacccgagtccatacatggcatatgtacaggctagaggctgtatcctggtagcatccagtcctgaaattcttacaaaagtccagaagggaaagattattaacaggccacttgctgggactacccgaaggggcaagacagagaatgaagataaattgcaggaggaagaactattaagtgataaaaaacaacgtgcggaacacattatgcttgtagacctgggaaggaacgatgttggcagggtctccaaacctggatctgtgaaggtggaaaagttgatgaacatcgagcggtactcccatgtcatgcacatcagctcaacggttagtggagagttagatgatgatctccaaagctgggatgcgttgcgagcagctttgcctgtaggaacagtcagtggagcaccaaaggtgaaagccatggagctgatagatcagttggaggtgacaaggcgaggaccatacagtggcgggttaggagggatatcatttaacggcgacatgatgatcgctcttgctctccgcaccattgtgttctcaacagctccaagccacaacacgatgttctcatacaaaaactcagataggcgccgggagtgggtcgctcacctgcaggctggtgcgggcatcgtcgctgatagtatcccagacgatgagcaaaaagaatgcgagaacaaggcggctgctctagctcgggctattgatcttgccgagtcagcttttgtagacaaggaatag

SEQ ID NO: 76719 - protein, 609 aa, Avena sativa
MESLAASAFSPSRLAARPSRAAAAAVPARARAVAAAGGRRRRSGKGSGGVRCCAGSSASASAVINGSAAAKAEQEDRQRFFEAAARGSGKGNLVPLWECIVSDHLTPVLAYRCLVGEDDMDTPSFLFESVEQGLEGTTNVGRYSMVGAHPVMEIVAKEDKVTTMDHEKGTVTEQIVDDPMEVPRSIMEGWHPQQIDDLPETFSGGWVGFFSYDTVRYVEKKKIPFSGAPQDDRNLPDVHLGLYDDVLVFDSVEKKVYVIHWVSLDRHASTEEAYQYGRSRLRRFLSKVHNTNVPKLSPGFVKLHTKQFGTALTKSTMTSDEYKSAVLQAKEHILAGNIFQIVLSQRFERRTYATPFEVYRALRIVNPSPYMAYVQARGCILVASSPEILTKVQKGKIINRPLAGTTRRGKTENEDKLQEEELLSDKKQRAEHIMLVDLGRNDVGRVSKPGSVKVEKLMNIERYSHVMHISSTVSGELDDDLQSWDALRAALPVGTVSGAPKVKAMELIDQLEVTRRGPYSGGLGGISFNGDMMIALALRTIVFSTAPSHNTMFSYKNSDRRREWVAHLQAGAGIVADSIPDDEQKECENKAAALARAIDLAESAFVDKE

SEQ ID NO: 76720 - DNA, 1560 bp, Buchnera aphidicola
  CDS (1)..(1560): transl_table=11
atgcttaataaaaatactattcaaatttttaccaaaataatacaatatcaaaaaaatccaattaaaacttttaatactttatgtaaaaaaaaaaaatatactttattgttagaatcctcaaaaaaaaaaaaacaaaaaaaaagtattatcattattgatagtgcattaaaaatttttgcggaaggttttaaagttttcattaaatctttaactttaaatggacaagcaatattaaatttattagataaaaaattaccaaaaaatttatgcattctaaaaaaagaaaatttaagaatattattatttaaaaaaaataaaaaacaaatgcatgaagaagaatctttacaatctgtatcaatttttgatagttttcgtttattaattaaaagtattttaattccttcacaatatccatattctatgttttttggtggtttattttcatatgatttaattaatacatttgaaaatttaccttatacacaaaaaattaatcaatgtcctgatttttgtttttatttagcagaaagtttattaattattaatcaccaaaaaaaaaatactattttacaaattagtacttttacaaaaaatatttctgaattaaatcgcttaaaaaaaagattctataaaatacaaaaaattttaaaaaaaaaattaatttctttaacttcagtttcttcagaaaatatttctgtatctactaatattactgataaaaaatttattaaaattattcaaaatttacaattattaataaaatgtggagaaatttttcaaattgttccatctcgtaaattttttattccttgtaaacattcattacattcatatcaaattttaaaaaaaaataatcctagtccatatatgttttacttacaagataaaaattttgttttatttggtgcttcaccggaaagttttttaaaatattgtcctaataaaaatcttattgaaatacatcctattgcaggaactcgtcctagaggaaaaaatttagatttttctattaatcaagaattagataatcgtttagaattatctttacgtattaatactaaagaacttgcagaacatattatgttagttgatttagcgagaaatgatttagcaaaaatttgtaaatgtggaagtcgaaaagtttctaaattaatgcaaatagaaaaatattcacatgttatgcatttagtgtcgaaagttacagggaaattaaaaaaaaatttagatatctttcatgcatatcaatcttgtatgaatatgggtactttaactggtgcaccaaaaattcgtgcaatgcaaattattgctcaaatagaacaaacaaaacgtggaagttatggaggatcaattggatattttactggcttaggaaaattggatactagtattattattcgttccgcatatgttgaaaataatattgctactgtacaggcaggagctggtattatgtttgattcatctcctttagaagaattgaatgaatgttttaataaagcttatgtagttttattatcaatttttcaatcttgcaattcattaggagtattaaaaatatga

SEQ ID NO: 76721 - protein, 519 aa, Buchnera aphidicola
MLNKNTIQIFTKIIQYQKNPIKTFNTLCKKKKYTLLLESSKKKKQKKSIIIIDSALKIFAEGFKVFIKSLTLNGQAILNLLDKKLPKNLCILKKENLRILLFKKNKKQMHEEESLQSVSIFDSFRLLIKSILIPSQYPYSMFFGGLFSYDLINTFENLPYTQKINQCPDFCFYLAESLLIINHQKKNTILQISTFTKNISELNRLKKRFYKIQKILKKKLISLTSVSSENISVSTNITDKKFIKIIQNLQLLIKCGEIFQIVPSRKFFIPCKHSLHSYQILKKNNPSPYMFYLQDKNFVLFGASPESFLKYCPNKNLIEIHPIAGTRPRGKNLDFSINQELDNRLELSLRINTKELAEHIMLVDLARNDLAKICKCGSRKVSKLMQIEKYSHVMHLVSKVTGKLKKNLDIFHAYQSCMNMGTLTGAPKIRAMQIIAQIEQTKRGSYGGSIGYFTGLGKLDTSIIIRSAYVENNIATVQAGAGIMFDSSPLEELNECFNKAYVVLLSIFQSCNSLGVLKI

SEQ ID NO: 76722 - DNA, 2037 bp, Acidovorax avenae subsp
  CDS (1)..(2037): transl_table=11
atggcgctccaggtacaggccggcggcatagaccttgaagacggccttgtagcgcacgcccgcgccgttgagcgtcagcgggacgtccgccagcgtgacacgcggctcgaacgccacgccggccacggtggtggcggtctgtgcgcccgcgggcacggccccgcaggcgatgagcccggcgagcgcccagacgaggctgcgttgccgaagtgtcatggcgactccctaaaaaagcacgatcgttctttttattctcggtgcccttccgcgggctgcgcaacagggttttcgcgcaggccgctttgctacactttgcgcccatgttcattcaccacgtggtcatcacaggtcgcagcggccggggagcctggccctggcgcaagcctgccgcaccgaaccgctgaccgcacccgggccccgcgatcccggtgtgtcctccgtggcccctgcggggccgaacgcaatgaacctggcgcggcaccggccgcgggcgcaacgaccgcccgtggcgggccggccgatctggagcgatctcccgtgatcaccgaactcgaattcaaaagcctggccggcgaaggctacaaccgcattccgctcatcgcggaggctttcgcggacctggaaacccccctgtccctctacctcaagctggcccatgcccgcgacggcggccgctacagtttcctgctggaatccgtggtgggtggcgagcgctttggacgctacagcttcatcggcctgccggcgcgcacgctgctgcgcgccagcggcttcggcgaccaggcgcgcacggaggtggtgaccgacgggcaggtggtggaaaccgaccagggcaatccgctggacttcatcgctgcctaccagaagcgcttcaaggtggcgctgcggcccggcctgccccgcttctgcggtggcctggcggggtatttcggctacgacgcggtgcgctacatcgagaagaagctggaatcgacctgtccgcccgacacgctgggcatgccggacatcctgctgctgcagtgcgaggaagtggccgtcatcgacaacctctcgggcaagctctacctgatcgtctatgcggacccggcgcagcccgaggcctatgcgcgcggcaagaagcgcctgcgcgagctgaaggaccagctcaagtactcggtggccgcccccctggtcaagccgaccgagagccacccgccgcagcgcgacttcgccaaggccgactacctggcggccgtggagcgggccaaggaactcatcgccgcgggcgacttcatgcaggtgcaggtgggccagcgcatccacaagcgctatacggagtcgcccctgtcgctctaccgcgcgctgcgctcgctcaatccttccccctacatgtactactaccacttcggcgactgccacgtggtgggagcgagcccggagatcctggtgcgccaggagcgcaccgacgagggccagaagatcaccatccggcctctggccggcacgcgcccgcgcggcgccacgcccgagaaggacaaggcggccgaggtcgaactggtgaacgaccccaaggagcgtgccgagcacgtgatgctcatcgacctggcgcgcaacgacatcgggcgcatcgcccgcaccggcacggtgaaagtgacggaggccttcgccgtggagcgctacagccacgtgatgcacatcgtgagcaatgtggaaggcctgctgaacgaaggcatgaccagcatggacgtgctcaaggcgaccttccccgccggcacgctcaccggcgcgcccaaggtgcatgcgatggagctcatcgatcggctcgagccctccaagcggggactgtacggcggcgcctgcggctacctcagctacgcgggcgacatggacgtggccatcgccatccgcaccggcatcgtgaaggacggcacgctctacgtgcaggccgcggccggcgtggtggcggactcggtccccgagctggaatggaaggaaacggagcacaaggcccgcgccctgctgcgcgcggccgaactcgtcgaagaaggactggaatga

SEQ ID NO: 76723 - protein, 678 aa, Acidovorax avenae subsp
MALQVQAGGIDLEDGLVAHARAVERQRDVRQRDTRLERHAGHGGGGLCARGHGPAGDEPGERPDEAALPKCHGDSLKKHDRSFYSRCPSAGCATGFSRRPLCYTLRPCSFTTWSSQVAAAGEPGPGASLPHRTADRTRAPRSRCVLRGPCGAERNEPGAAPAAGATTARGGPADLERSPVITELEFKSLAGEGYNRIPLIAEAFADLETPLSLYLKLAHARDGGRYSFLLESVVGGERFGRYSFIGLPARTLLRASGFGDQARTEVVTDGQVVETDQGNPLDFIAAYQKRFKVALRPGLPRFCGGLAGYFGYDAVRYIEKKLESTCPPDTLGMPDILLLQCEEVAVIDNLSGKLYLIVYADPAQPEAYARGKKRLRELKDQLKYSVAAPLVKPTESHPPQRDFAKADYLAAVERAKELIAAGDFMQVQVGQRIHKRYTESPLSLYRALRSLNPSPYMYYYHFGDCHVVGASPEILVRQERTDEGQKITIRPLAGTRPRGATPEKDKAAEVELVNDPKERAEHVMLIDLARNDIGRIARTGTVKVTEAFAVERYSHVMHIVSNVEGLLNEGMTSMDVLKATFPAGTLTGAPKVHAMELIDRLEPSKRGLYGGACGYLSYAGDMDVAIAIRTGIVKDGTLYVQAAAGVVADSVPELEWKETEHKARALLRAAELVEEGLE

SEQ ID NO: 76724 - DNA, 1500 bp, Acidovorax avenae subsp
  CDS (1)..(1500): transl_table=11
gtgatcaccgaactcgaattcaaaagcctggccggcgaaggctacaaccgcattccgctcatcgcggaggctttcgcggacctggaaacccccctgtccctctacctcaagctggcccatgcccgcgacggcggccgctacagcttcctgctggaatccgtggtggggggcgagcgcttcgggcgctacagcttcatcggcctgccggcgcgcacgctgctgcgcgccagcggcttcggcgaccaggcccgcacggaggtcgtgaccgacgggcaggtggtggaaaccggccacggcaatcccctggatttcattgccgcctaccagaagcgcttcaaggtggcgctgcggcccggcctgccgcgcttctgcggcggcctggcggggtatttcggctacgacgcggtgcgctacatcgagaagaagctggaatcgacctgcccgcccgacacgctgggcatgccggacatactgctgctgcagtgcgaggaagtggccgtcatcgacaacctctcgggcaagctctacctgatcgtctatgcggacccggcgcagcccgaggcctatgcgcgcggcaagaagcgcctgcgcgagctcaaggaccagctcaagtactcggtggccgcccccctggtcaagccgacggagagccacccgccgcagcgcgacttcgccaaggccgactacctggcggccgtggagcgcgccaaggagctcatcgccgcgggcgatttcatgcaggtgcaggtgggccagcgtatccacaagcgctatacggagtcgccgctgtcgctctaccgcgcgctgcgctcgctcaatccttcgccctacatgtactactaccacttcggcgactgccacgtcgtgggggcgagcccggagatcctggtgcgccaggagcgcacggacgagggccagaagatcaccatccgtccgctggcgggcacgcgcccgcgcggcgccacgcccgagaaggacaaggcggccgaggtcgagctggtgaacgacccgaaggagcgggccgaacacgtgatgctcatcgacctcgcgcgcaacgacatcgggcgcatcgcccgcaccggcaccgtgaaggtgacggaggccttcgcggtggagcgctacagccacgtgatgcacatcgtgagcaatgtggaaggcctgctgaacgaaggcatgaccagcatggacgtgctcaaggcgacattccccgccggcacgctcaccggcgcgcccaaggtgcatgcgatggagctcatcgaccggctcgagcccaccaagcgggggctgtacggcggcgcctgcggctacctcagctacgcgggcgacatggacgtggccatcgccatccgcaccggcatcgtgaaggacgggacgctctacgtgcaggccgcggccggcgtggtggcggactcggtccccgagctggaatggaaggaaacggaacacaaggcccgcgccctgctgcgcgcggccgaactcgtcgaagaaggactggaatga

SEQ ID NO: 76725 - protein, 499 aa, Acidovorax avenae subsp
MITELEFKSLAGEGYNRIPLIAEAFADLETPLSLYLKLAHARDGGRYSFLLESVVGGERFGRYSFIGLPARTLLRASGFGDQARTEVVTDGQVVETGHGNPLDFIAAYQKRFKVALRPGLPRFCGGLAGYFGYDAVRYIEKKLESTCPPDTLGMPDILLLQCEEVAVIDNLSGKLYLIVYADPAQPEAYARGKKRLRELKDQLKYSVAAPLVKPTESHPPQRDFAKADYLAAVERAKELIAAGDFMQVQVGQRIHKRYTESPLSLYRALRSLNPSPYMYYYHFGDCHVVGASPEILVRQERTDEGQKITIRPLAGTRPRGATPEKDKAAEVELVNDPKERAEHVMLIDLARNDIGRIARTGTVKVTEAFAVERYSHVMHIVSNVEGLLNEGMTSMDVLKATFPAGTLTGAPKVHAMELIDRLEPTKRGLYGGACGYLSYAGDMDVAIAIRTGIVKDGTLYVQAAAGVVADSVPELEWKETEHKARALLRAAELVEEGLE

SEQ ID NO: 76726 - DNA, 1551 bp, Aspergillus oryzae
  CDS (1)..(1551)
atggcgccccctatcaccgttgtgccgtcgcttgagacagcaaaggatgtgatcagccactcgaaagatgctaaatatcctcctaacctactcccacttactgcatctatccccgccgaccttttgacgcccacagtggcatatttgaaggttgccgagaaatccaaactgtcatttctctacgaaagtgctgctaccacagagacaattgggaggtatagttttgtgggagctgatccccgcaaagttctcaagaccggccccggccacggccccgagtgcgacccccttccgatcctggagaaggagatcgctgaatatcgcgttgcgacggtgcccggcttgacgctaccaccactcacgggtggtgctattggttacgtcggatacgattgtgtgaagtactttgagcccaagacggcccgacctctcaaggatgtgctcggaatcccagagtcgctgttcatgctgtttgataccattgtcgcctttgatcacttttaccaggtcatcaagatcatcaccttcattcctatcacacatgtcgactcggatttcgaaaccgagtaccggaaaggcgaagatgtgatcaagcgctatatcgaacgactactccgacctgagaccccgctacctccccaaggtccaatcattcccaaccaggagtacacatccaacatcggacgcgaggggtacgagcggcacgtggtgaaactcaaggagcacatctccaaaggcgatatcttccagaccgtgccatcgcaacggctgtcgcgtccaacctcccttcacccattcaacctcttccgtcatttgcgcacagtcaacccatcgccatacctattttatattgattgcgaagacttccagctcgttggcgctagtccagaacttttggcgaaggaggaaaagggtcgtatcattacgcatcccatcgccggcaccgtcaagcgtggcaagtcacccgaggaggatgaggcgctcgcagatgagctacgaggaagcctgaaggatcgcgcggagcacgtcatgttggtggatctggcacggaacgatgttaatcgcgtgtgtgacccgacgaccacccaggtggaccggttgatggtggtcgagaagttctcgcatgtgcaacacctggtgtcgcaggtatcgggtattctgcggccggataagaccaggttcgacgcgttccggtccatcttccccgccggcacggtctccggggctcccaaagtgcgggctatgcaactgattgccgagttagagggcgagaagcgcggagtgtatgctggcgcggtgggctacttcgggtacaacatcgccagcacggacggagcaacagaaatgccgggtgctatggatacctgcattgccctccggacgatgatggtcaaggacggggtggcctacctccaagcgggtggtggaattgttttcgactcagacccgtacgacgagtatatggagacgatcaacaaactgggggccaacattgcctgcatcaagggagcggaagcgaagtatttgagcatggagggtgaacaatcctag

SEQ ID NO: 76727 - protein, 516 aa, Aspergillus oryzae
MAPPITVVPSLETAKDVISHSKDAKYPPNLLPLTASIPADLLTPTVAYLKVAEKSKLSFLYESAATTETIGRYSFVGADPRKVLKTGPGHGPECDPLPILEKEIAEYRVATVPGLTLPPLTGGAIGYVGYDCVKYFEPKTARPLKDVLGIPESLFMLFDTIVAFDHFYQVIKIITFIPITHVDSDFETEYRKGEDVIKRYIERLLRPETPLPPQGPIIPNQEYTSNIGREGYERHVVKLKEHISKGDIFQTVPSQRLSRPTSLHPFNLFRHLRTVNPSPYLFYIDCEDFQLVGASPELLAKEEKGRIITHPIAGTVKRGKSPEEDEALADELRGSLKDRAEHVMLVDLARNDVNRVCDPTTTQVDRLMVVEKFSHVQHLVSQVSGILRPDKTRFDAFRSIFPAGTVSGAPKVRAMQLIAELEGEKRGVYAGAVGYFGYNIASTDGATEMPGAMDTCIALRTMMVKDGVAYLQAGGGIVFDSDPYDEYMETINKLGANIACIKGAEAKYLSMEGEQS

SEQ ID NO: 76728 - DNA, 2214 bp, Azospirillum brasilense
  CDS (1)..(2214): transl_table=11
atgtaccccgccgacctcctcgcctcgcccagcctcctcgaaccgctgcgtttccaaacgcgcggcggcgtggccgtgacccgctgcgccacggcgctcgacccgcagggcgccctcgatccggtgatcgacgcgctcgaccgccgccgcggcctgctgctgtccagcggggtggaggcgccgggccgctaccgccgccacgcgctgggcttcaccgatccgccgctggccgccacggcgcgcgggcggacgctgcgcatcgacgcgctgaacgcgcggggccgggtgctgctgccggccgttgccgaggccctgcgcggcctggaggcgctggccgggctggaggaggcgccgtcgcgcgtcaccgccctggtccgcaagccccagcaccccttcccggaggaggagcgcagccgccagccctccgtcttctcggtcctgcgcgcggtgctgaacctgttcgccgcccccgacgacccgctgctcggcctctacggggccttcgcctacgacctcgccttccagttcgagccgatccgcctgcggctggagcggccggacgaccagcgcgatctggtgctctacctgccggaccggctcgtcgctctggaccccgtcgcaggactcgcgcggctcgtcgagtatgagttcgccacggcggcgggcagcaccgaggggctggagcgcgccgggcgcgaccacccgtaccgcccggacaccaacgccgaggccggctgcgaccacgcgcccggcgcgtatcagcgcgtcgtcgagaccgccaaggccgccttccgccgcggcgacctgttcgaggtggttcctggccagaccttcgccgagccctgcgccgacgcgccttcggcggtgttccggcggctgcgcgccgccaacccggcgccctacgaggccttcgtcaaccttgggcggggcgagttcctcgtcgccgccagcccggaaatgtacgtgcgggtggcgggcggtcgaatgggcgggcgggtggagacctgcccgatctccggcaccgtggcgcggggggccgacgcgctgggcgactcctcccagatcctccgcctgctgacctcggccaaggacgcggccgaactgaccatgtgcaccgacgtcgaccgcaacgacaaggcgcgggtgtgcgagccagggtccgtccgggtgatcgggcggcggatgatcgagctgtactcccgcctgatccatacggtggaccatgtcgaggggcggctgcggcccggcctggacgcgctggacgccttcctcacccacacctgggcggtgaacgggaccggggcgcccaagcgctgggccatgcagttcctggaggacacggagcagtcgccgcggcgctggtacggcggggccttcggccggctgggcttcgacggcgggatggacaccggcctgaccctgcgcaccatccgcatggccgagggcgtcgcctacgtgcgggccggggcgaccctgctgtccgacagcgacccggacgcggaggacgcggagtgccgcctgaaggccgccgccttccgcgacgccatccgcggggtgacggaaggcgtggcgtgcgctcttccggcggctcccaacggcgggcggggccggcgggtgctgctggtggatcacgacgacagcttcgtccacacgctggccgattacctgcgccagaccggcgcctcggtgacgacgctgcgtcacggccacgcgcgggcggcgctggcggagcggaggccggatctggtcgtgctgtcccccggtccggggcgcccggcggatttcgatgtggccggcaccatcgacgcggcgctggcgctcggcctgccggtgttcggcgtctgcctgggcttgcaggggatggtggagcggttcggcggtgcgctggacgtgctgccggagccggttcacggcaaggcgacggaggtccgtgtgctgggcggcgcgctgttcgccggcctgccggagcggatgagggttgggcgctaccactcgctggtggcgcggcgcgaccggctgccggcggacctgacggtgaccgcggagaccgccgacggtttggtgatggcggtcgagcaccggcggcttccgctcgccgccgtgcagttccaccccgagtcgatcctgtcgctcgacggtggggccggtctcgccctgctgggcaacgtgatggatcggctggccgccggcgccctgacggacgctgcggcttga

SEQ ID NO: 76729 - protein, 737 aa, Azospirillum brasilense
MYPADLLASPSLLEPLRFQTRGGVAVTRCATALDPQGALDPVIDALDRRRGLLLSSGVEAPGRYRRHALGFTDPPLAATARGRTLRIDALNARGRVLLPAVAEALRGLEALAGLEEAPSRVTALVRKPQHPFPEEERSRQPSVFSVLRAVLNLFAAPDDPLLGLYGAFAYDLAFQFEPIRLRLERPDDQRDLVLYLPDRLVALDPVAGLARLVEYEFATAAGSTEGLERAGRDHPYRPDTNAEAGCDHAPGAYQRVVETAKAAFRRGDLFEVVPGQTFAEPCADAPSAVFRRLRAANPAPYEAFVNLGRGEFLVAASPEMYVRVAGGRMGGRVETCPISGTVARGADALGDSSQILRLLTSAKDAAELTMCTDVDRNDKARVCEPGSVRVIGRRMIELYSRLIHTVDHVEGRLRPGLDALDAFLTHTWAVNGTGAPKRWAMQFLEDTEQSPRRWYGGAFGRLGFDGGMDTGLTLRTIRMAEGVAYVRAGATLLSDSDPDAEDAECRLKAAAFRDAIRGVTEGVACALPAAPNGGRGRRVLLVDHDDSFVHTLADYLRQTGASVTTLRHGHARAALAERRPDLVVLSPGPGRPADFDVAGTIDAALALGLPVFGVCLGLQGMVERFGGALDVLPEPVHGKATEVRVLGGALFAGLPERMRVGRYHSLVARRDRLPADLTVTAETADGLVMAVEHRRLPLAAVQFHPESILSLDGGAGLALLGNVMDRLAAGALTDAAA

SEQ ID NO: 76730 - DNA, 1827 bp, Ruta graveolens
  CDS (1)..(1827)
atgattactctcaacgtggaaaccccacccctcacccgctctcagcttccgtcaactttccgtgtctcctccgccgcctccgttaactttaacgacagggttgctacctcgagatggcgccccaactccctctccctcaccacctccagctatcgtctccgcactcttaaatgcgccgcctccgcctccacctccgcctccacctccgcctcgccctctccctctccctcattggtcgaccagtcagcaaattttcacgaagcttcgaagaaggggaatttaattcctctataccggtgcatattctcggaccacttgactccagttcttgcgtacaggtgtttggttaaggaagatgatagagatgctccaagctttctgtttgagtcagttgagcctggttcacaagcttccagtattggaaggtatagtgttgttggagctcagccagccatagaaattgtggcaaaggagaacatggttacaattttggaccatgagggtgggcagagaacagagcaatttgtggaggatccaatggatgttcctaggagaatcatggagggatggaaaccccaacttattgatgaacttccagaagcattttgtggtggatgggttggttacttctcatatgacactgtccgctatgttgagaaaaaaaagctgcccttcttttctgccccaactgatgatagaaaccttcctgatgttcatctcggcctctatgacgatgtgatcgtgtttgatcacgtggagaagaaagcatttgttattcattgggtgcgattagatcaatattcttctgtggcggaggcatacaatgacggaatgaaccggttggaaaacctagtatctagagtgcatgatatagttccaccaaagctccgttcaggatcaataaagttacacactcgtcattttggtcctaaactggagaggtcaagcatgacaagtgaagcatacaaggaggcagtactggaggccaaggagcatatccttgctggtgacatattccagatcgtactaagtcagcgttttgaaaggcgaacgttcgcagacccatttgaaatctatagatcactgaggattgttaatccaagcccatatatgacttatttacaagctagaggatgtatattggttgcttctagtccagaaattcttacacgcgtgaagaagagaaagattactaatcgaccccttgctggcactattagaagagggaagacacgtaaggaagatttggtgtttgaaaaggagcttttgaatgatgagaagcaatgtgcggagcacattatgcttgttgacttggggaggaatgatgttggaaaggtctcagaacctggctctgtgaaggttgaaaagctcatgaatattgaacattattctcatgttatgcacattagctcaacagttactggagagttgcttgatcatttaactagctgggatgctttacgtgcagcactacctgttgggaccgtcagcggagcacccaaggtgaaagccatggagataattgataagctggaagtcacaaggcgtggcccatatggtggtggatttggaggcatttcatttactggtgatctggacattgcccttgctctcagaactatggtattccaaactgctacacgctatgacactatgtactcgtacaaagatgtggacaagagacgggaatggatcgctcatctccaagctggggctggaatcgtggccgacagtgatcctgctgatgagcagagagagtgtgagaacaaagctgcagctcttgctcgtgccattgatcttgcagaatcctcgttcattgagaaatga

SEQ ID NO: 76731 - protein, 608 aa, Ruta graveolens
MITLNVETPPLTRSQLPSTFRVSSAASVNFNDRVATSRWRPNSLSLTTSSYRLRTLKCAASASTSASTSASPSPSPSLVDQSANFHEASKKGNLIPLYRCIFSDHLTPVLAYRCLVKEDDRDAPSFLFESVEPGSQASSIGRYSVVGAQPAIEIVAKENMVTILDHEGGQRTEQFVEDPMDVPRRIMEGWKPQLIDELPEAFCGGWVGYFSYDTVRYVEKKKLPFFSAPTDDRNLPDVHLGLYDDVIVFDHVEKKAFVIHWVRLDQYSSVAEAYNDGMNRLENLVSRVHDIVPPKLRSGSIKLHTRHFGPKLERSSMTSEAYKEAVLEAKEHILAGDIFQIVLSQRFERRTFADPFEIYRSLRIVNPSPYMTYLQARGCILVASSPEILTRVKKRKITNRPLAGTIRRGKTRKEDLVFEKELLNDEKQCAEHIMLVDLGRNDVGKVSEPGSVKVEKLMNIEHYSHVMHISSTVTGELLDHLTSWDALRAALPVGTVSGAPKVKAMEIIDKLEVTRRGPYGGGFGGISFTGDLDIALALRTMVFQTATRYDTMYSYKDVDKRREWIAHLQAGAGIVADSDPADEQRECENKAAALARAIDLAESSFIEK

SEQ ID NO: 76732 - DNA, 1842 bp, Ruta graveolens
  CDS (1)..(1842)
atgagtgcagcggcaacgtcgatgcaatcccttaaattctccaaccgtctggtcccacccagtcgccgtctgtctccggttccgaacaatgtcacctgcaataacctccccaagtctgcagctcccgtccggacagtcaaatgctgcgcttcttcctggaacagtaccatcaacggcgcggccgccacgaccaacggtgcgtccgccgccagtaacggcgcatccacgaccaccactacatatgttagtgatgcaaccagatttatcgactcttctaaaagggcaaatctagtgccattataccgttgcatattcgcggatcatctcacgccggtgcttgcctatagatgtttggttcaagaagacgataaagagactccaagttttttattcgaatcagtagagccgggtcggatttctactgttgggaggtatagtgtggttggagctcatcccgtgatggaagttatagctaaagataatatggttacggtgatggatcatgagaaagggagcttagttgaggaggtggtcgatgatcccatggagattcctagaagaatttccgaggattggaagcctcaaataatcgatgatcttcctgaagctttttgcggtggttgggttggtttcttctcatacgatacagttcgatatgtggagaagaaaaagttaccattctcaaaggcacctcaggatgataggaatcttgcagatatgcatctaggtctctataacgatgttattgtgtttgatcatgtggaaaagaaagtatatgttattcattgggtgaggctaaatcaacagtcttctgaagaaaaagcatatgccgagggtctggaacacttggagagactagtatccagagtacaggatgagaacacgccaaggctcgccccaggttccatagacttacacactggtcattttggacctccattaaaaaagtcaaacatgacatgtgaagaatacaaaatggctgtactagcggcaaaagaacatattcaggctggggatatttttcaaatcgtactaagccaacgttttgaacgtcgaacatttgctgatccatttgaagtttatagggcactgagagttgttaatccgagtccctatatgacgtatatgcaggcaagagggtgtgttctggtagcttcaagtccagaaattcttactcgagtaaagaagaataagattgtgaatcgacctttggctggaacagcccgaagagggaggactactgaagaagatgagatgttggaaacacagttgctaaaagacgcaaagcaatgtgctgagcatgttatgctggtcgatttgggacggaatgatgttggcaaggtttcaaaatctggttctgtgaaagtggaaaagctgatgaatgttgaacgatattcacatgttatgcacataagctctacggtcacaggtgagttgcaagataatctcagttgctgggatgccctgcgtgctgcactgcctgtcgggactgttagtggagcaccaaaggtgaaggcaatggagttaatcgatgaattggaggtaaatagacgtggcccctacagtggtgggtttggcggtatctccttcaccggagatatggacattgccctggctctaaggaccattgttttccaaaccggtacacgctatgacacaatgtactcgtacaagaatgctaccaaacgccggcagtgggtggcataccttcaagccggggctggcattgttgctgatagtgatccagacgacgagcatcgtgagtgccagaacaaagccgccggactggcccgtgccatcgacctagctgagtctgcttttgtgaacaaatcaagtagctaa

SEQ ID NO: 76733 - protein, 613 aa, Ruta graveolens
MSAAATSMQSLKFSNRLVPPSRRLSPVPNNVTCNNLPKSAAPVRTVKCCASSWNSTINGAAATTNGASAASNGASTTTTTYVSDATRFIDSSKRANLVPLYRCIFADHLTPVLAYRCLVQEDDKETPSFLFESVEPGRISTVGRYSVVGAHPVMEVIAKDNMVTVMDHEKGSLVEEVVDDPMEIPRRISEDWKPQIIDDLPEAFCGGWVGFFSYDTVRYVEKKKLPFSKAPQDDRNLADMHLGLYNDVIVFDHVEKKVYVIHWVRLNQQSSEEKAYAEGLEHLERLVSRVQDENTPRLAPGSIDLHTGHFGPPLKKSNMTCEEYKMAVLAAKEHIQAGDIFQIVLSQRFERRTFADPFEVYRALRVVNPSPYMTYMQARGCVLVASSPEILTRVKKNKIVNRPLAGTARRGRTTEEDEMLETQLLKDAKQCAEHVMLVDLGRNDVGKVSKSGSVKVEKLMNVERYSHVMHISSTVTGELQDNLSCWDALRAALPVGTVSGAPKVKAMELIDELEVNRRGPYSGGFGGISFTGDMDIALALRTIVFQTGTRYDTMYSYKNATKRRQWVAYLQAGAGIVADSDPDDEHRECQNKAAGLARAIDLAESAFVNKSSS

SEQ ID NO: 76734 - DNA, 1815 bp, Zea mays
  CDS (1)..(1815)
atggaatccctagccgccacctccgtgttcgcgccctcccgcgtcgccgtcccggcggcgcgggccctggttagggcggggacggtggtaccaaccaggcggacgagcagccggagcggaaccagcggggtgaaatgctctgctgccgtgacgccgcaggcgagcccagtgattagcaggagcgctgcggcggcgaaggcggcggaggaggacaagaggcggttcttcgaggcggcggcgcgggggagcgggaaggggaacccggtgcccatgtgggagtgcatcgtgtcggaccatctcacccccgtgctcgcctaccgctgcctcgtccccgaggacaacgccgacgcccccagcttcctcttcgagtccgtcgagcaggggccccagggcaccaccaacgtcggccgctacagcatggtgggagcccacccagtgatggagattgtggccaaagaccacaaggttacgatcatggaccacgagaagagccaagtgacagagcaggtagtggacgacccgatgcagatcccgaggaccatgatggagggatggcacccacagcagatcgacgagctccctgaatccttctccggtggatgggttgggttcttttcctatgatacggttaggtatgttgagaagaagaagctaccgttctccagtgctcctcaggacgataggaaccttcctgatgtgcacttgggactctatgatgatgttctagtcttcgataatgttgagaagaaagtatatgttatccattgggtcaatgtggaccggcatgcatctgttgaggaagcataccaagatggcaggtcccgactaaacatgttgctatctaaagtgcacaattccaatgtccccacactctctcctggatttgtgaagctgcacacacgcaagtttggtacacctttgaacaagtcgaccatgacaagtgatgagtataagaatgctgttctgcaggctaaggaacatattatggctggggatatcttccagattgttttaagccagaggttcgagagacgaacatatgccaacccatttgaggtttatcgagcattacggattgtgaatcctagcccatacatggcgtatgtacaggcaagaggctgtgtattggttgcgtctagtcctgaaattcttacacgagtcagtaaggggaagattattaatcgaccacttgctggaactgttcgaaggggcaagacagagaaggaagatcaaatgcaagagcaacaactgttaagtgatgaaaaacagtgtgccgagcacataatgcttgtggacttgggaaggaatgatgttggcaaggtatccaaaccaggatcagtgaaggtggagaagttgatgaacattgagagatactcccatgttatgcacatcagctcaacggttagtggacagttggatgatcatctccagagttgggatgccttgagagctgccttgcccgttggaacagtcagtggtgcaccaaaggtgaaggccatggagttgattgataagttggaagttacgaggcgaggaccatatagtggtggtctaggaggaatatcgtttgatggtgacatgcaaattgcactttctctccgcaccatcgtattctcaacagcgccgagccacaacacgatgtactcatacaaagacgcagataggcgtcgggagtgggtcgctcatcttcaggctggtgcaggcattgttgccgacagtagcccagatgacgaacaacgtgaatgcgagaataaggctgctgcactagctcgggccatcgatcttgcagagtcagcttttgtagacaaagaatag

SEQ ID NO: 76735 - protein, 604 aa, Zea mays
MESLAATSVFAPSRVAVPAARALVRAGTVVPTRRTSSRSGTSGVKCSAAVTPQASPVISRSAAAAKAAEEDKRRFFEAAARGSGKGNPVPMWECIVSDHLTPVLAYRCLVPEDNADAPSFLFESVEQGPQGTTNVGRYSMVGAHPVMEIVAKDHKVTIMDHEKSQVTEQVVDDPMQIPRTMMEGWHPQQIDELPESFSGGWVGFFSYDTVRYVEKKKLPFSSAPQDDRNLPDVHLGLYDDVLVFDNVEKKVYVIHWVNVDRHASVEEAYQDGRSRLNMLLSKVHNSNVPTLSPGFVKLHTRKFGTPLNKSTMTSDEYKNAVLQAKEHIMAGDIFQIVLSQRFERRTYANPFEVYRALRIVNPSPYMAYVQARGCVLVASSPEILTRVSKGKIINRPLAGTVRRGKTEKEDQMQEQQLLSDEKQCAEHIMLVDLGRNDVGKVSKPGSVKVEKLMNIERYSHVMHISSTVSGQLDDHLQSWDALRAALPVGTVSGAPKVKAMELIDKLEVTRRGPYSGGLGGISFDGDMQIALSLRTIVFSTAPSHNTMYSYKDADRRREWVAHLQAGAGIVADSSPDDEQRECENKAAALARAIDLAESAFVDKE

SEQ ID NO: 76736 - DNA, 1866 bp, Arabidopsis thaliana
  CDS (1)..(1866)
atgtcggccgtttcaatctccgccgtcaaatctgattttttcaccgtcgaagccatagccgttacacaccatcggacgccgcatccaccacatttcccttcgctccggtttccactatcgctcaagtccccgccggctacttctcttaaccttgtggctggatcaaaactcctccacttctcgcgtcgtcttccttctatcaaatgctcatatactccgtcgttagatttatcggaggaacagttcacaaaattaaaaaaagcatcggaaaagggaaacttagttcctctattccgatgtgtattctcggatcatttgactccgatacttgcttaccgatgtttggtgaaagaagatgatagagatgctcctagcttcttgttcgagtctgtggagcctggttcgcaatcgtccaacatcggtaggtatagtgtagttggagctcagcctacaatagaaatcgttgcaaagggaaatgtagttactgtgatggaccatggagctagtcttaggacagaggaggaagtggatgatccaatgatggttcctcagaaaatcatggaggaatggaatccacaaggcattgatgaattgcctgaagctttctgcggtggttgggttggatacttttcatatgacactgtacgttatgttgagaagaagaagctgcctttttctaatgctccagaggatgataggagtcttcctgatgttaatttgggtctttatgatgatgtgatcgtgtttgatcatgttgagaagaaagcatatgtgatccactgggtgcggatagataaggatcgttctgttgaagaaaatttccgtgaaggaatgaatcggttggaatctctaacctctagaattcaagaccaaaaaccccccaagatgcctactggtttcataaaactacgcactcagctcttcggtccgaaattggagaaatcaactatgacgagtgaggcatacaaggaggcagtggtggaagccaaagaacatatcttggctggggacatctttcagatagttcttagtcagagatttgaaaggcggacatttgcggacccatttgagatatatagagctcttaggattgtaaatccaagtccctacatggcctatttgcaggttagaggatgcatattagttgcatcaagtccagagatattgttacgttcaaaaaataggaaaattaccaatcgcccccttgctggaactgtcagaagagggaagacacccaaagaagatctaatgctggaaaaagagctcttaagcgatgaaaaacaatgcgcagaacatattatgcttgttgatttgggaaggaacgatgttggcaaggtttcaaagcctggttctgtggaggtcaagaagctcaaggatatagaatggttttcacatgtcatgcacattagctccacggtagtaggtgaattgctcgatcatctaacaagctgggacgctcttagagctgtacttcccgttggaaccgtgagcggagccccaaaggtaaaagccatggagctgatagatgaacttgaagtaacaaggcgtggtccttacagtggaggctttggaggcatttcgtttaatggagacatggacattgccttagctctcagaacaatggtcttcccaacaaatacccgttatgacacattgtactcatacaagcatcctcagagacgtagagaatggattgctcatattcaagctggagctgggattgttgcagacagtaaccctgatgatgaacatagagagtgtgagaacaaagcagcggctttagcccgagccatcgatcttgctgagtcctcctttcttgaggcgcctgagtttactactatcacacctcacatcaacaatatctga

SEQ ID NO: 76737 - protein, 621 aa, Arabidopsis thaliana
MSAVSISAVKSDFFTVEAIAVTHHRTPHPPHFPSLRFPLSLKSPPATSLNLVAGSKLLHFSRRLPSIKCSYTPSLDLSEEQFTKLKKASEKGNLVPLFRCVFSDHLTPILAYRCLVKEDDRDAPSFLFESVEPGSQSSNIGRYSVVGAQPTIEIVAKGNVVTVMDHGASLRTEEEVDDPMMVPQKIMEEWNPQGIDELPEAFCGGWVGYFSYDTVRYVEKKKLPFSNAPEDDRSLPDVNLGLYDDVIVFDHVEKKAYVIHWVRIDKDRSVEENFREGMNRLESLTSRIQDQKPPKMPTGFIKLRTQLFGPKLEKSTMTSEAYKEAVVEAKEHILAGDIFQIVLSQRFERRTFADPFEIYRALRIVNPSPYMAYLQVRGCILVASSPEILLRSKNRKITNRPLAGTVRRGKTPKEDLMLEKELLSDEKQCAEHIMLVDLGRNDVGKVSKPGSVEVKKLKDIEWFSHVMHISSTVVGELLDHLTSWDALRAVLPVGTVSGAPKVKAMELIDELEVTRRGPYSGGFGGISFNGDMDIALALRTMVFPTNTRYDTLYSYKHPQRRREWIAHIQAGAGIVADSNPDDEHRECENKAAALARAIDLAESSFLEAPEFTTITPHINNI

SEQ ID NO: 76738 - DNA, 1596 bp, Buchnera aphidicola str
  CDS (1)..(1596): transl_table=11
atttttttgattgaaaagagacgtaaattaatgcaaaaaagcccgtatgagattgaaataattcaaaaaaaggctaattatcactctgatcctacaacagtttttaatcatctttgtggatcaagacccgcaacattattactggaaacagcagaagttaataaaaaaaataatttagaaagtataatgattgtcgatagcgcgatacgcgtctctgctgtcaagaattcagttaagattactgcgctctctgaaaacggagcagagatattatctattttaaaagaaaaccctcataaaaaaataaaattttttgaaaaaaacaaaagtatcaacttgatctttccctctttagacaacaatcttgatgaagataaaaaaattttttctttatcagtatttgattctttcagattcattatgaaatctgttaacaacacaaaaagaacaagtaaagcaatgttttttggcggattgttttcttatgatcttatttctaattttgaatcgttgccgaatgtaaagaaaaaacaaaaatgcccggatttttgtttttatttagcagaaacattacttgttgtagatcatcaaaaaaaaacatgtttgattcaaagcagtttatttggtagaaatgtagatgaaaaaaatagaattaaaaaaagaacagaagaaatagaaaagaaactggaagaaaaattgacatccattcctaaaaataagacaactgtaccagttcaattgacttccaatataagtgattttcaatattcatctacaataaaaaaattacaaaaattaattcaaaaaggtgaaattttccaagtcgtgccctctcgaaagttttttttgccttgtaacaattcattatcagcatatcaagaattaaaaaaaagcaaccccagtccctatatgttttttatgcaagatgaagatttcatactattcggtgcatctccagaaagttctttaaaatatgatgaaaaaaatagacaaattgagctctatcctattgctggaaccagacccagaggtagaaaaaaagacggaactttagatctcgatttagacagcagaatagaacttgaaatgagaactaatcataaagaacttgctgaacatttgatgctggttgacttagcaagaaatgatcttgcacgtatttgtgagccgggatctagatatgtttccgatctagttaaggtggataaatattcgcacgtgatgcatttggtttctaaagtagtggggcaattaaaatatggtttagatgcgcttcacgcatattcctcttgtatgaatatggggacattaactggtgcacccaaagttcgagcgatgcaattaattgctgaatatgaaggggaagggagaggaagttatggcggcgctataggttattttactgatttaggaaatttagatacttgcatcacaatacgttcagcttatgtggaatcaggtgtcgcaacaattcaagcaggagccggtgttgtttttaattcaatacctgaagacgaagtgaaagagagtttaaacaaggcgcaagctgtaataaatgctataaaaaaagcacattttacaatgggatcctcttaa

SEQ ID NO: 76739 - protein, 531 aa, Buchnera aphidicola str
MFLIEKRRKLMQKSPYEIEIIQKKANYHSDPTTVFNHLCGSRPATLLLETAEVNKKNNLESIMIVDSAIRVSAVKNSVKITALSENGAEILSILKENPHKKIKFFEKNKSINLIFPSLDNNLDEDKKIFSLSVFDSFRFIMKSVNNTKRTSKAMFFGGLFSYDLISNFESLPNVKKKQKCPDFCFYLAETLLVVDHQKKTCLIQSSLFGRNVDEKNRIKKRTEEIEKKLEEKLTSIPKNKTTVPVQLTSNISDFQYSSTIKKLQKLIQKGEIFQVVPSRKFFLPCNNSLSAYQELKKSNPSPYMFFMQDEDFILFGASPESSLKYDEKNRQIELYPIAGTRPRGRKKDGTLDLDLDSRIELEMRTNHKELAEHLMLVDLARNDLARICEPGSRYVSDLVKVDKYSHVMHLVSKVVGQLKYGLDALHAYSSCMNMGTLTGAPKVRAMQLIAEYEGEGRGSYGGAIGYFTDLGNLDTCITIRSAYVESGVATIQAGAGVVFNSIPEDEVKESLNKAQAVINAIKKAHFTMGSS

SEQ ID NO: 76740 - DNA, 1746 bp, Camptotheca acuminata
  CDS (1)..(1746)
atgcaaaccctatccaactctcactgtttgtgtccgacaaggcgccgcctatctccggttccggtcaccgccatttccagcagaagctttggctctcttgcatgcgtccgtactatcaaaatcaaatgctgttctctcaaatctccatctctagctacggatgaaacgaagttctttgaagcttcgaggaaaggaaatttaattccgctttacaaatgcatattatctgatcacttgactccggttcttgcttaccggtgcttagttaaagaggacgatcgagaagctcccagctttctatatgagtcggtcgagcctggttttcaagcttcgaatgtcggtcggtatagcgtggttggtgctcagccggcgatggaaattgtggccaaagaaaataaggttacgatagtagaccataggaacggttgccttactgagaagattgttgatgatccaatgacagttccaagaaacatatcagagagttggcaacctcaacttattgatgaacttcctgatgcattttgtggtggatgggttggttttttctcatatgatacagttcgttatgtggagaagaagaagctgccattcctaagggcaccgcaagatgacagaaatcttgctgacattcatctaggactttatgatgatgtgcttgtgtttgatcatgtagagaagaaagtttacgtgattcattgggtgagattggatcaatacctgtctgttgaaaaggcttatatggatggaatgaaacgcttggaaatgttggcatcgaaagtattggatattaatcccccaaggttgtctccgggttctgtggaattgtgcacccaacattacggtcctcctttgaagaagtcaaatatgacaagtgaacaatacaagaatgctgtactgcaagctaaagatcatattcttgcaggggatatattccagattgtattaagtcaacggtttgaacgccgaacatttgctgatccatttgaagtctacagggcattgagagtcgtgaatccaagtccatacatggcttacttgcaagctaaaggctgtattttggttgcttcaagtccagaaattcttacacgtgtaaacaagaggaagattgtcaatcggccattggccgggaccactagaagggggaggacacctcatgaagatgagatgttaaaaaagcagctgctaaatgataaaaaacaatgcgcagaacacataatgctggttgatttgggaaggaatgatgttggaaaggtctcgaaatctggttccgtgaatgtggaaaggcttatgaatgttgaacggtattcccatgtgatgcatatcagctccacagttacaggggagttgcttgatcatctgacttgctgggatgctctgcgtgctgccttgcctgttggaacagttagtggagcaccaaaggtgaaggctatggaattgattgatcagttggaagcaacaagacgtgggccttacagtggtggatttggagggatttccttttctggcgatctggatattgcattagctctcaggacaattgttttcccaaccggagcccgttatgatacaatgtactcgtacaagaatgccaacaagcgccaggaatgggttgcttacctacaagccggtgccggcattgtagcagacagtgatcctgatgacgagcagagagagtgtgagaacaaagctgctggtcttgctcgtgcaattgacttggcggagtccgcgtttgtggataaataa

SEQ ID NO: 76741 - protein, 581 aa, Camptotheca acuminata
MQTLSNSHCLCPTRRRLSPVPVTAISSRSFGSLACVRTIKIKCCSLKSPSLATDETKFFEASRKGNLIPLYKCILSDHLTPVLAYRCLVKEDDREAPSFLYESVEPGFQASNVGRYSVVGAQPAMEIVAKENKVTIVDHRNGCLTEKIVDDPMTVPRNISESWQPQLIDELPDAFCGGWVGFFSYDTVRYVEKKKLPFLRAPQDDRNLADIHLGLYDDVLVFDHVEKKVYVIHWVRLDQYLSVEKAYMDGMKRLEMLASKVLDINPPRLSPGSVELCTQHYGPPLKKSNMTSEQYKNAVLQAKDHILAGDIFQIVLSQRFERRTFADPFEVYRALRVVNPSPYMAYLQAKGCILVASSPEILTRVNKRKIVNRPLAGTTRRGRTPHEDEMLKKQLLNDKKQCAEHIMLVDLGRNDVGKVSKSGSVNVERLMNVERYSHVMHISSTVTGELLDHLTCWDALRAALPVGTVSGAPKVKAMELIDQLEATRRGPYSGGFGGISFSGDLDIALALRTIVFPTGARYDTMYSYKNANKRQEWVAYLQAGAGIVADSDPDDEQRECENKAAGLARAIDLAESAFVDK

SEQ ID NO: 76742 - DNA, 1479 bp, Arabidopsis thaliana
  CDS (1)..(1479)
atgatcaagaggctccaagtttccttttcgaatctgttgagccaggacatcactcttccactgtttgtcgttggagcgcatccgaaaatggaaattgtggcaaaggagaataaagttacagtcatggatcatgtgaaaggcactaagactacagaggaagttgaagatccaatgatgattcctagaagaatctcagagacttggaaaccacaattgatcgatgatcttcctgatgttttttgtggtggatgggttggttacttttcttatgatactgttccctatgccgaaaagcgaaagctacctctctcaaaggctccggttgatgaccgaaatttaccagatatgcatcttggtctttatgatgatgtggttgtgtttgatcatgtcgaaaagaaaatacatataattcattgggtgaggttatcagaaaactcatcatttgatgatgtttatgctaatgctgtgaaacacttggaagaacttgtttcgaggatcaaatgcatgaatccccccaagctaccttatggatcagtggacttgcacacaaatcaatttggcactcctttggaaaaatcaagcatgacaagtgatgcatataagaatgctgtacttcaagccaaagaacacatactggctggagatatctttcagattgttttaagtcaaagatttgagcgccacacttttgcccatccgtttgaagtttatcgagctttgagaattgtgaacccaagtccttctatgtgttacttgcaagcaagaggttgtattctagtagcgtcaagtcctgagattctcactagagtgaagaaaaacaagatcgtgaatagaccactagcaggaactgcaagacgaggaaagagtttcgaggaggatcaaatgttggaggaggcacttttaaaagatgaaaaacagtgtgcagaacacatcatgctcgttgacttgggtcgcaatgatgttggaaaggtgtccaagaacggctcagtgaaagtagaaaggctcatgaatatagagcgttattctcatgtcatgcatattagctcaacggtgattggagagttgcaagagaatctgacttgctgggacacgcttcgtgctgctttacccgttggaaccgttagcggagctccaaaggtgaaggctatggagttgatcgatgagctagaggtgactagaagaggtccatatagtggtggattcggtagtgtctcattcactggagacatggacatagctttggctcttaggaccattgtgttcccaacacaagctcgttacgacacaatgtactcatacaaagacaaagacacgccacgccgtgagtgggtagcctatctacaagcaggtgcaggcattgtagctgatagtgacccagaggatgagcaccgtgagtgtcagaacaaagctgctgggctagcacgtgccattgacttggctgagtctgcattcgttgataaaagtgatacaacaatctag

SEQ ID NO: 76743 - protein, 492 aa, Arabidopsis thaliana
MIKRLQVSFSNLLSQDITLPLFVVGAHPKMEIVAKENKVTVMDHVKGTKTTEEVEDPMMIPRRISETWKPQLIDDLPDVFCGGWVGYFSYDTVPYAEKRKLPLSKAPVDDRNLPDMHLGLYDDVVVFDHVEKKIHIIHWVRLSENSSFDDVYANAVKHLEELVSRIKCMNPPKLPYGSVDLHTNQFGTPLEKSSMTSDAYKNAVLQAKEHILAGDIFQIVLSQRFERHTFAHPFEVYRALRIVNPSPSMCYLQARGCILVASSPEILTRVKKNKIVNRPLAGTARRGKSFEEDQMLEEALLKDEKQCAEHIMLVDLGRNDVGKVSKNGSVKVERLMNIERYSHVMHISSTVIGELQENLTCWDTLRAALPVGTVSGAPKVKAMELIDELEVTRRGPYSGGFGSVSFTGDMDIALALRTIVFPTQARYDTMYSYKDKDTPRREWVAYLQAGAGIVADSDPEDEHRECQNKAAGLARAIDLAESAFVDKSDTTI

SEQ ID NO: 76744 - DNA, 2196 bp, Brucella abortus
  CDS (1)..(2196): transl_table=11
  misc_feature (967)..(967): s is g or c
  misc_feature (1804)..(1804): y is t or c
  misc_feature (1815)..(1815): s is g or c
atgaatgcgaagactgcggatagcgagatattccagcacgaaacggctggcggtatcatcgtcgagcgggtgcgccacctcacggcctataagggcgccattgaaagctatatcgatgtgctgaacgaatggcgcggtgcggtgttctcgtccaattacgaatatccgggccgctatacgcgatgggataccgcaattgtcgatccgccggtcgtcatcacgtcgcgtgcccgcacgatgcgcatcgaggcgctgaacgcgcgcggcgtcatcctgcttcggcccattctggataccgtcaaggcgctttcggaagtaaagatcgaccagtccggcgaaaaccgtatcgatctgacgattgtggaaccggtcggcaccttcacggaagaagaacgctcgcgcatgccctcggtctttacggtgctgcgcgccatagtcgggcttttcttctcggaggaggatgccaatctcggcctttatggcgcctttggctatgatctggcgttccagttcgatcccatccagtacaagctgaagcgcccggacgaccagcgtgacctcgtgctgttcattcccgacgaaatcttcgtcgccgaccattatgcggcgcgcgcctgggtggaccgttatgaatttcgctgcggcggttcgtccacgcacggtcttgatcgcgcgacgccggtggtgcctttcaagccatcggagcgcaagcttgcgcgcggcgatcataatccgggtgaatatgccaggcttgtcgagcgcgccaaggaaagcttcaagcgcggcgacctgttcgaggttgtgccgggccagaccttctatgagcgctgccacacggcgccgtcggagattttccgccggctgaagtcgatcaatccttcgccctattcctttttcatcaatctgggcgagagcgaatatctggtcggcgcatcgccggaaatgtttgtgcgcgtcaatgggcggsgcatcgagacctgcccgatttccggcaccatcaagcgcggtgaagatgcaatttcggattctgagcagatattgaaactgcttaattccaagaaggacgaatccgagctgaccatgtgttcggatgtggaccgcaacgacaagagccgcgtttgcgagccgggttcggtgcgtgttatcggtcgccgccagatcgagatgtattcccgcctgatccatacggtcgatcatatcgaaggccgcctgcgtgacggcatggatgcgtttgacggcttcctcagccatgcatgggctgtgacggtgacaggcgcgccgaagctgtgggcaatgcgctttcttgaggaaaacgaacgcagcccgcgcgcatggtatggcggcgcgatcggcatgatgcatttcaatggcgatatgaatacagggctgacgctgcgcaccatccgcatcaaggatggtgtggcggaaatccgtgcaggggcgacgcttctgttcgattccaaccctgacgaggaagaagacgagaccgaattgaaggcatcgcccatgattgcggctgtgcgggacgcacagaagagcaatcagatcgcggaagaaagtgtggcgccaaaggtgggtgagggggtttcgatcctgctggtcgatcacgaggattccttcgtccatacgcttgccaattatttccgccagacgggcgccaaggtttccaccgtgcgttcaccggtggcagaggagatattcgaccgcgtcaatcccgatctggtggtgttatcgccgggaccgggctcgccgcaggatttcgattgcaaggcgaccatcgataaggcgcgcaagcgccagcttycgatttttggsgtctgcctcggccttcaggcactggcggaagcctatggcggggcgttgcgccagcttcgcgttccggtgcatggcaagccttcacgcatccgcgtatcaaagccggagcgcattttctccggcttgccggaggaagtgacggtggggcgttatcattcgatcttcgccgatcctgaacgcctgccggatgattttctcgtcacagccgaaacggaagacgggatcatcatggcttttgaacataaacatgaaccggtggcagccgttcaattccatcccgaatccatcatgacgcttggccataatgccggtatgcgcatgatcgagaatgtcgtgacgcatcttgcaggcaagcacaaggcgcgccgcaccaactattga

SEQ ID NO: 76745 - protein, 731 aa, Brucella abortus
  misc_feature (323)..(323): The Xaa at location 323 stands for Arg, or Gly.
  misc_feature (602)..(602): The Xaa at location 602 stands for Pro, or Ser.
MNAKTADSEIFQHETAGGIIVERVRHLTAYKGAIESYIDVLNEWRGAVFSSNYEYPGRYTRWDTAIVDPPVVITSRARTMRIEALNARGVILLRPILDTVKALSEVKIDQSGENRIDLTIVEPVGTFTEEERSRMPSVFTVLRAIVGLFFSEEDANLGLYGAFGYDLAFQFDPIQYKLKRPDDQRDLVLFIPDEIFVADHYAARAWVDRYEFRCGGSSTHGLDRATPVVPFKPSERKLARGDHNPGEYARLVERAKESFKRGDLFEVVPGQTFYERCHTAPSEIFRRLKSINPSPYSFFINLGESEYLVGASPEMFVRVNGRXIETCPISGTIKRGEDAISDSEQILKLLNSKKDESELTMCSDVDRNDKSRVCEPGSVRVIGRRQIEMYSRLIHTVDHIEGRLRDGMDAFDGFLSHAWAVTVTGAPKLWAMRFLEENERSPRAWYGGAIGMMHFNGDMNTGLTLRTIRIKDGVAEIRAGATLLFDSNPDEEEDETELKASPMIAAVRDAQKSNQIAEESVAPKVGEGVSILLVDHEDSFVHTLANYFRQTGAKVSTVRSPVAEEIFDRVNPDLVVLSPGPGSPQDFDCKATIDKARKRQLXIFGVCLGLQALAEAYGGALRQLRVPVHGKPSRIRVSKPERIFSGLPEEVTVGRYHSIFADPERLPDDFLVTAETEDGIIMAFEHKHEPVAAVQFHPESIMTLGHNAGMRMIENVVTHLAGKHKARRTNY

SEQ ID NO: 76746 - DNA, 1827 bp, Catharanthus roseus
  CDS (1)..(1827)
atgcaatctgtatcatcttcttcttcaatttctactttcaagtctggatcgctatctccggtaatggaaaccctagcatttttctcagaaaccgaacgtttgcccttctcttctccatgttccgtccagttacaaagctatttctttcgccaactcgcctgctgctctcttcacctcctcgtcttatcaagtccgctgctcgataaatgttctgccgtctcgccgccttcatttgtcgaccattcagcgaagttcaaggtggcggcgaagcatgggaacttgattcctttgtacaggcctatattttcagatcacttgacgccagttctagcttaccgttgcttggttaaggaagatgacagagaagctcccagctttctttttgagtccgttgagcctggcttgaaagtctccaacgttgggagatatagtgtgattggagctcaaccaactatggaaatagttgctaaagagaacatggtgactgtgatggatcaccgtcaaggtcgtcgtgtggagcagtatgaggaggatcccatggtagttcctcggagaattatggagaagtggaaaccccagcggaccgaggagctacctgaagctttttgtggtggctgggttggttatttctcatatgatacagtaaggtatgtagagaagaagaagttgccattctcaaatgctcctgtggatgatagagaccttcctgacattcatctaggactttatgatgatgtaattgtatttgaccatgtggagaagaaagcttatgtaatacattgggtgcggctggatcaattttcttctgttgaggaggcttataaagatggaatgaagcgcttggaatctttggtatcgagagtgcatgacatagtccctcctaagttgtccgcggggtcgattaatttacatactagtctttttggccctaaattgaagaattcgaccatgacaagtgaagaatatgagaaagccgtcttgcaggctaaggagcacatcctggctggggacatattccagcttgtcctaagtcagcgttttgaacggcgaacatttgcagatccatttgaagtctaccgagcattgagaattgtcaacccaagtccatatatgacttatttacaagcaagagggtgtattttggttgcttcaagtcctgaaattcttactcgagttaaacagggaacaataacaaatcggcccttagcagggactactcggagggggaaaacaccaaaagaagattatatgttggaacaacagctccttaatgatgaaaaacaatgtgcagaacacattatgcttgtagacttgggaaggaatgatgttggaaaggtatcaaaacctggttctgagaaggtggagaaactgatgaacattgaaccatattcacatgtcatgcacatcagctctacagttactggagagttacttgataacttaactagctgggacgttctacgtgcagcattgcctgttggaactgttagtggagcaccaaaggtcaaagctatggaattgatcgatgaactggaagttacaaggcgtggaccatatagtggtggatttggaggaatttccttttccggtgatatggatgttgcattagcattgagaaccattgtattctccattggaacaagatatgacactatgtactcttacaagacgaggttcaagcgccgagaatggatcgcccatctgcaagctggtgcaggtatagtagccgatagtgatccagctgacgagcagagagaatgtgaaaataaatctgcagctcttgctcgcgctattgatcttgcagagtcatcatttgttgataaatga

SEQ ID NO: 76747 - protein, 608 aa, Catharanthus roseus
MQSVSSSSSISTFKSGSLSPVMETLAFFSETERLPFSSPCSVQLQSYFFRQLACCSLHLLVLSSPLLDKCSAVSPPSFVDHSAKFKVAAKHGNLIPLYRPIFSDHLTPVLAYRCLVKEDDREAPSFLFESVEPGLKVSNVGRYSVIGAQPTMEIVAKENMVTVMDHRQGRRVEQYEEDPMVVPRRIMEKWKPQRTEELPEAFCGGWVGYFSYDTVRYVEKKKLPFSNAPVDDRDLPDIHLGLYDDVIVFDHVEKKAYVIHWVRLDQFSSVEEAYKDGMKRLESLVSRVHDIVPPKLSAGSINLHTSLFGPKLKNSTMTSEEYEKAVLQAKEHILAGDIFQLVLSQRFERRTFADPFEVYRALRIVNPSPYMTYLQARGCILVASSPEILTRVKQGTITNRPLAGTTRRGKTPKEDYMLEQQLLNDEKQCAEHIMLVDLGRNDVGKVSKPGSEKVEKLMNIEPYSHVMHISSTVTGELLDNLTSWDVLRAALPVGTVSGAPKVKAMELIDELEVTRRGPYSGGFGGISFSGDMDVALALRTIVFSIGTRYDTMYSYKTRFKRREWIAHLQAGAGIVADSDPADEQRECENKSAALARAIDLAESSFVDK

SEQ ID NO: 76748 - DNA, 1566 bp, Buchnera aphidicola
  CDS (1)..(1566): transl_table=11
atgcaaagtattagccataaaattgaaattattcaaagacaagcacaatatcattctgatcctacattgttttcaaatcattttgcggcgtcaagatcagctacactattattagaaacagcagaaattaagaagaaaaacaacttagaaagcattatgattgttgatagtgcaatacgaatatctgctattaaaaattcagttcaaatgactgctttatctattaatggacaagcaatattagctgctttcaaacaaacatatcatcacacattaacgctattggaaaaacaatctagcctctgtttcacttttcctactatgaatcataatgctgatgaagatgaaaaaattcttgcattatcaatattcgattcgtttcgatttattatgaagctattttcgaatacgactaaagtgagtaaagggatgttttttggtggactattttcttatgatcttattgctaactttgaacaattaccggatgtaatacgaacacaaaagtgtcccgatttgtgtttttatttagctgaaactttattagtattagatcatcagaaacaacaatgtttgattcaaagtagtatatttagtcaaaataccaatgaacataagagaatcgaaataagatccaaagacatacaaaagatgttacaacaagagttgtcttacaccccacctaaaatagcacatgttcacactaatgtaacttcaaatatgagtgatgctgaatattcatcaatcattacagaattacaagaattcattcaaaaaggtgatatttttcaagttgtaccttcgcgaaaattttttttatcatgttatcatgcactgtcagcgtatcaggcattaaaaattagcaatcccagtccatatatgttttttatgcaagatcaactattcacgttatttggtgcatcccctgaaagttctttaaagtataatcgcattacaagacaagtggaactctatcctatcgccggaacgaggcctcgaggaaaacgcacagacgggagtatagattacgatttggatagcagaattgaactagaaatgagaaccaatcaaaaagagttatctgaacatttaatgcatgtagatttagctcgaaatgatctggctcgtatttgtgaaccgggttcacgatatgtatcagaattagtcaaagtagataaatattcacatgtgatgcacttggtatctaaagttatcggcacactaaaatctcatttggatgcgcttcatgcatatgcctcctgtatgaatatgggtaccttaaccggagcccctaaagtgcgtgccatggaattgattgcagcatgcgaaaaagaaacacgggggagctacggtggcgctatcggatattttactgatgaaggtaatttagatacgtgtatcaccattcgttcagcttacatcgaaaaagatatggcaacggttcaatctggagcaggtgttgtgttgaactctactgctcaagaagaggtgacagaaagtgtcaataaagctgctgcagtaattaacgctattcaaacagcacatcgtttaacaggatctttttaa

SEQ ID NO: 76749 - protein, 521 aa, Buchnera aphidicola
MQSISHKIEIIQRQAQYHSDPTLFSNHFAASRSATLLLETAEIKKKNNLESIMIVDSAIRISAIKNSVQMTALSINGQAILAAFKQTYHHTLTLLEKQSSLCFTFPTMNHNADEDEKILALSIFDSFRFIMKLFSNTTKVSKGMFFGGLFSYDLIANFEQLPDVIRTQKCPDLCFYLAETLLVLDHQKQQCLIQSSIFSQNTNEHKRIEIRSKDIQKMLQQELSYTPPKIAHVHTNVTSNMSDAEYSSIITELQEFIQKGDIFQVVPSRKFFLSCYHALSAYQALKISNPSPYMFFMQDQLFTLFGASPESSLKYNRITRQVELYPIAGTRPRGKRTDGSIDYDLDSRIELEMRTNQKELSEHLMHVDLARNDLARICEPGSRYVSELVKVDKYSHVMHLVSKVIGTLKSHLDALHAYASCMNMGTLTGAPKVRAMELIAACEKETRGSYGGAIGYFTDEGNLDTCITIRSAYIEKDMATVQSGAGVVLNSTAQEEVTESVNKAAAVINAIQTAHRLTGSF

SEQ ID NO: 76750 - DNA, 1566 bp, Buchnera aphidicola
  CDS (1)..(1566): transl_table=11
atgcgaataaaaatagtcgtcataaaattcaagcaaaaacaagtacattatcaccctgatcctacaattatttttaatcatctttgtggatcaagatcagcgacattattgctggaaaccgctgaaattaataagaaaaaaaatttagaaagcatcatgatcatcgacagtgcgatacgatatcccgcgatgaaaaattcagtccaaatcaccgctctttctcttaatggaagagtaatactgtcatttttaaaagatacgcttgaaaaaaaaataaccattctgtcaaatgatacaagtattaatttaatttttcctgttatagaaaaaaatattgatgaagataaaaaaattttatcattgtcaatatttgattgttttagattcattatgaatatgtttaaaaatacaaaaaaaatcagcaaagctatgtttttcggaggcctgttttcctatgatcttattgctaactttgaatctttacctcatgtaaaaagaaaacaaaaatgccctgatttatgcttttatttagcagaaaccttgctggtattagatcatcaaaaacaaacctgtttaattcaacatagtttatttagcaataattgtgatgaatataaaagaatacaaaaaagatcaaagaagatcacaaagaaactgacacaaccattatttaagattccaaaaaaaaacgtacatatggcgacctcattaacgtcaaatatgagcgatcttgaatatgcgtcgattattaaagaattacatttatttattcaaaaaggtgatatttttcaggtagtgccttcccgaaagtttttcttaccgtgctatcattcgttagcagcgtatcaagaattaaaaataagtaatccaagtccgtacatgttttttatgcaggatgaaatatttacattatttggtgcgtctccagaaagttctttaaaatatgatgaaaccaccagacaagcagaactatatcctatagcaggtacgagaccgagaggcaaaaaaaaagacggtactatagattatgatttagatagcagaattgagttagaaatgagaaccaatcaaaaggaactagccgaacacttaatgcttgttgatttagcacgaaacgatcttgctcgcatttgtgaaccgggttcacgatatgtatcagagttagtaaaagttgataaatattcacatgttattcatttagtttctagggtaattgggacattaaaatctgatttagatgctttacatgcttattctgcttgtatgaatatggggactctaactggtgtccctaaagtacgcgctatgcaactcattgcaagatatgaaaaaggaacacgaggcagctatggaggcgctataggatattttactgacacaggccagttagatacctgcataacaattcgatcagcttatgtagagcaaaatatggcaacaattcaagctggtgcaggtattgtattaaattcaatagccgaagaagaaatcaaagaaagcttaaacaaagcaaaggctgtaattaatgctataaaaacagcacattatttaataggatctttttaa

SEQ ID NO: 76751 - protein, 521 aa, Buchnera aphidicola
MRIKIVVIKFKQKQVHYHPDPTIIFNHLCGSRSATLLLETAEINKKKNLESIMIIDSAIRYPAMKNSVQITALSLNGRVILSFLKDTLEKKITILSNDTSINLIFPVIEKNIDEDKKILSLSIFDCFRFIMNMFKNTKKISKAMFFGGLFSYDLIANFESLPHVKRKQKCPDLCFYLAETLLVLDHQKQTCLIQHSLFSNNCDEYKRIQKRSKKITKKLTQPLFKIPKKNVHMATSLTSNMSDLEYASIIKELHLFIQKGDIFQVVPSRKFFLPCYHSLAAYQELKISNPSPYMFFMQDEIFTLFGASPESSLKYDETTRQAELYPIAGTRPRGKKKDGTIDYDLDSRIELEMRTNQKELAEHLMLVDLARNDLARICEPGSRYVSELVKVDKYSHVIHLVSRVIGTLKSDLDALHAYSACMNMGTLTGVPKVRAMQLIARYEKGTRGSYGGAIGYFTDTGQLDTCITIRSAYVEQNMATIQAGAGIVLNSIAEEEIKESLNKAKAVINAIKTAHYLIGSF

SEQ ID NO: 76752 - DNA, 1560 bp, Buchnera aphidicola
  CDS (1)..(1560): transl_table=11
atgcaaaacgaccgtcatgaagttgatatttatcaaaaaaaagtgtgttatcattccgatcctacaataatttttcatcatctttgtggatcgagatcagcaacgttattactggaaacagcggaaattaacaaaaaacacaatttagaaagtatcatgatcattgacagtgcaatacgcatatctgcacaaaaaaattcagtacaaataactgccttatccctgaacggggcagcaatattagctgccttaaaacatagactgcacaaaaaagttacaatgtttgaagatagtaataaaaaaattcatttaatttttcccttgttaaacaaaaatatcgatgaagataaaaaaattcttgcattatccatctttgattgttttagattcattatcaatgcatttaaaaatacagaaaaaatcagcaaaggcatgtttttcggcggtcttttttcttatgatcttattgaaaattttgaagttttacctcttttgcaacgaaaacaacagtgccccgatttgtgtttttatttgtcagaaactttattagtttgggatcatcaaactcaaacatgtttaattcaaaacagtttatttactagggacagcaatgaacgagacagagtgaaagagagatcaaaaacgatacaacacaaattaacacaacaattgcacagcatcccccaacatcaagcacatacacaagaagcactcttgacatcaaatatgaccgatgctcaatatttatcaatgattaaacaattacaaatatttattcaaaaaggtgatatttttcaagtcgttccttctcgaaaattttttttaccgtgtcggtatgcgttgtcggcatatcaggaattaaaaaaaagtaatcccagcccttatatgttttttatgcaagatcaagcatttatattatttggccgttcgcccgaaagttctttaaaatatgatgaaaaaaacagacaaatagaactgtatcctatagcaggtacaagatctcgagggaaaaacaaaaacgggagtataaattatgatttagacagtagaattgaactagaaatgagaactaatcaaaaagaattatctgaacatttgatgcttgtagatttagcacgtaacgatcttgcccgtatttgtgaacccgggtcacgatatgtttcagagttgttaaaagtggacaaatactcacatgttatgcatttggtttcgaaagtgattggtacgttaaaatctaacttagacgtgttacacgcctatgctgcttgtatgaacatgggaactttaacgggcgcacctaaggtacgtgcgatgcaattaattgcaaaatatgaaaaagaaacaagaggcagttacggcggagctataggttatttgaccgatgcaggtaatttagacacttgcataacaattcgttctgcttatgtagaacaaaatattgcaactgtgcaagccggagcgggggtggtattaaactcaattgctaaagaagaagttcaagaaagtatcaataaagctacagccgtaattaatgctatcaaaacagcacattacatttga

SEQ ID NO: 76753 - protein, 519 aa, Buchnera aphidicola
MQNDRHEVDIYQKKVCYHSDPTIIFHHLCGSRSATLLLETAEINKKHNLESIMIIDSAIRISAQKNSVQITALSLNGAAILAALKHRLHKKVTMFEDSNKKIHLIFPLLNKNIDEDKKILALSIFDCFRFIINAFKNTEKISKGMFFGGLFSYDLIENFEVLPLLQRKQQCPDLCFYLSETLLVWDHQTQTCLIQNSLFTRDSNERDRVKERSKTIQHKLTQQLHSIPQHQAHTQEALLTSNMTDAQYLSMIKQLQIFIQKGDIFQVVPSRKFFLPCRYALSAYQELKKSNPSPYMFFMQDQAFILFGRSPESSLKYDEKNRQIELYPIAGTRSRGKNKNGSINYDLDSRIELEMRTNQKELSEHLMLVDLARNDLARICEPGSRYVSELLKVDKYSHVMHLVSKVIGTLKSNLDVLHAYAACMNMGTLTGAPKVRAMQLIAKYEKETRGSYGGAIGYLTDAGNLDTCITIRSAYVEQNIATVQAGAGVVLNSIAKEEVQESINKATAVINAIKTAHYI

SEQ ID NO: 76754 - DNA, 1587 bp, Buchnera aphidicola
  CDS (1)..(1587): transl_table=11
atgaaaaatagccgtcataaaattgaaattattcaaaaaaaagcgcattatcatcccgatcccacaatgatttttaatcatatttgtggattaaaatcagcaacactattattagaaacagcagaaatcaataagaaacgaaacttaggaagtattatgattattgacagtgcaatacgcatatccgcgataaaaaattcagttcagataactgctttttctttaaatgggatggcaatattgacggctttaaaaaacatgttacataataaaattaataaaattcaaatatttgaaaataaacaaaatatttatttaattttccctagtatagataaaaatattgacgaggatcaaaaaattttatcaatatcaatatttgattgttttagattcattatgaaaatgttcacgaacccccataaaatcagcaaagcaatcttttttggaggactattttcttatgatcttattgctaattttgaattcttatctcatttagtccgcaaacaaaaatgtcctgatatatgtttttatttagctgaaactttattagttttagatcatcaaaaacaaacatgtttaattcaaaatagcttgtttagtcataatatgaatgagaaatatagaattcaaaaacgatcagcagaaatagaaaagaaacttaaacaaccattatcgggaatattaactaataatgcacatgttaaagtatgtgaaacagcgtcattgacttcaaatataagcgatgttgaatatttatctattattaaaaaattacaaatatttattcaaaaaggtgatatctttcaagtcgtcccctctcgaaaattttttttaccgtgttatcatgcgttatcagcatatcaggaattaaaaaaaagcaatcctagcccctacatgttttttatgcaagatgaaatctttacattatttggagcttctcccgaaagttctttaaaatataatcatcaaaataggcaaatagaactctatccgatagcaggtaccaggcctagaggaaaaacaaaaaatggtaatatagactatgatttagacagcaaaatcgagctagaaatgagaactaatcaaaaagaattatctgagcatttaatgcttgtggatttggcacgcaacgatcttgctcgtatttgtgaaccggggtcgcgatatgttgcagagttactaaaagtcgacaaatactctcatgttatgcatttagtctcgcgcgtcattggtacgctcaaatctcacttagatgccttacacgcatattcttcttgtatgaatatgggaactttaaccggtgctccgaaggtgcgtgcgatgcaattaattgctgaatatgaaaaagaaacacggggcagctacggcggcgctataggttattttactgattctggagatttagatacctgtatcacaattcgttcagcttatatagaacaaaatattgcgactgttcaagccggggcgggtattgttttgcactcaatagcggaagaagaaatacaagaaagcttgaataaagcaactgcggtgattaatgctatcaaaacagcgcattatgtaacaggatctttttaa

SEQ ID NO: 76755 - protein, 528 aa, Buchnera aphidicola
MKNSRHKIEIIQKKAHYHPDPTMIFNHICGLKSATLLLETAEINKKRNLGSIMIIDSAIRISAIKNSVQITAFSLNGMAILTALKNMLHNKINKIQIFENKQNIYLIFPSIDKNIDEDQKILSISIFDCFRFIMKMFTNPHKISKAIFFGGLFSYDLIANFEFLSHLVRKQKCPDICFYLAETLLVLDHQKQTCLIQNSLFSHNMNEKYRIQKRSAEIEKKLKQPLSGILTNNAHVKVCETASLTSNISDVEYLSIIKKLQIFIQKGDIFQVVPSRKFFLPCYHALSAYQELKKSNPSPYMFFMQDEIFTLFGASPESSLKYNHQNRQIELYPIAGTRPRGKTKNGNIDYDLDSKIELEMRTNQKELSEHLMLVDLARNDLARICEPGSRYVAELLKVDKYSHVMHLVSRVIGTLKSHLDALHAYSSCMNMGTLTGAPKVRAMQLIAEYEKETRGSYGGAIGYFTDSGDLDTCITIRSAYIEQNIATVQAGAGIVLHSIAEEEIQESLNKATAVINAIKTAHYVTGSF

SEQ ID NO: 76756 - DNA, 1581 bp, Arabidopsis thaliana
  CDS (1)..(1581)
atgaagttcgcggaaggttctaagaaggagaatcttgttccgcttcgtcacaccattttctccgaccatctcactcctgttcttgcttaccgttgtcttgtcaaagaagatgatcaagaggctccaagtttccttttcgaatctgttgagccaggacatcactcttccactgttggaagatatagtgtcgttggagcgcatccgaaaatggaaattgtggcaaaggagaataaagttacagtcatggatcatgtgaaaggcactaagactacagaggaagttgaagatccaatgatgattcctagaagaatctcagagacttggaaaccacaattgatcgatgatcttcctgatgttttttgtggtggatgggttggttacttttcttatgatactgttccctatgccgaaaagcgaaagctacctctctcaaaggctccggttgatgaccgaaatttaccagatatgcatcttggtctttatgatgatgtggttgtgtttgatcatgtcgaaaagaaaatacatataattcattgggtgaggttatcagaaaactcatcatttgatgatgtttatgctaatgctgtgaaacacttggaagaacttgtttcgaggatcaaatgcatgaatccccccaagctaccttatggatcagtggacttgcacacaaatcaatttggcactcctttggaaaaatcaagcatgacaagtgatgcatataagaatgctgtacttcaagccaaagaacacatactggctggagatatctttcagattgttttaagtcaaagatttgagcgccacacttttgcccatccgtttgaagtttatcgagctttgagaattgtgaacccaagtccttctatgtgttacttgcaagcaagaggttgtattctagtagcgtcaagtcctgagattctcactagagtgaagaaaaacaagatcgtgaatagaccactagcaggaactgcaagacgaggaaagagtttcgaggaggatcaaatgttggaggaggcacttttaaaagatgaaaaacagtgtgcagaacacatcatgctcgttgacttgggtcgcaatgatgttggaaaggtgtccaagaacggctcagtgaaagtagaaaggctcatgaatatagagcgttattctcatgtcatgcatattagctcaacggtgattggagagttgcaagagaatctgacttgctgggacacgcttcgtgctgctttacccgttggaaccgtgaaggctatggagttgatcgatgagctagaggtgactagaagaggtccatatagtggtggattcggtagtgtctcattcactggagacatggacatagctttggctcttaggaccattgtgttcccaacacaagctcgttacgacacaatgtactcatacaaagacaaagacacgccacgccgtgagtggatagcctatctacaagcaggtgcaggcattgtagctgatagtgacccagaggatgagcaccgtgagtgtcagaacaaagctgctgggctagcacgtgccattgacttggctgagtctgcattcgttgataaaagtgatacaacaatctag

SEQ ID NO: 76757 - protein, 526 aa, Arabidopsis thaliana
MKFAEGSKKENLVPLRHTIFSDHLTPVLAYRCLVKEDDQEAPSFLFESVEPGHHSSTVGRYSVVGAHPKMEIVAKENKVTVMDHVKGTKTTEEVEDPMMIPRRISETWKPQLIDDLPDVFCGGWVGYFSYDTVPYAEKRKLPLSKAPVDDRNLPDMHLGLYDDVVVFDHVEKKIHIIHWVRLSENSSFDDVYANAVKHLEELVSRIKCMNPPKLPYGSVDLHTNQFGTPLEKSSMTSDAYKNAVLQAKEHILAGDIFQIVLSQRFERHTFAHPFEVYRALRIVNPSPSMCYLQARGCILVASSPEILTRVKKNKIVNRPLAGTARRGKSFEEDQMLEEALLKDEKQCAEHIMLVDLGRNDVGKVSKNGSVKVERLMNIERYSHVMHISSTVIGELQENLTCWDTLRAALPVGTVKAMELIDELEVTRRGPYSGGFGSVSFTGDMDIALALRTIVFPTQARYDTMYSYKDKDTPRREWIAYLQAGAGIVADSDPEDEHRECQNKAAGLARAIDLAESAFVDKSDTTI

SEQ ID NO: 76758 - DNA, 1569 bp, Buchnera aphidicola
  CDS (1)..(1569): transl_table=11
atgaataaacgtcttaaaagaatggatgttttaaaagttgaagctttataccaatctaatccaacaattgtttttcatcaaatctgccgaaataaaagtaatacattactcttagaatctgctgaaattaataaaagagatagtttagaaagtatgatgattatagattctgctttacgtatctcagcattaaatcaaatagttgtattagaagcattaacaaaaaatggagaaagtctattaccaatttttatatctttgctgccaaaatcagtaaaaatattggttaataaaaatttattaaaaattgaatttcctttaatttctatgaacttagatgaggataaaaaattacatgtattatctatatttgattcaatacgattcttaataaatagtactaaaaacaacaaagtgtctaaatctatgttttttggtggattgttttcatatgatttaattactaattttgaaaatcttccaaaattaaaaactactcaatcttgtcctgacttttgtttttacttggctgaaactttattagtattagatcataaaaaaaaaacttgttatatacaagctagcttattttcttcagacatatttgaaaaaaatagactacagtctagactgttaatgataaaaaaacaattatctagttctttttatccattacaacctatttttttaaaaaaaatggtattaacttgcaataagacagataaagtatatattaaaattattgaagaaatgcaaaaattaatattaattggagaaatttttcaggtagttccatcgagacgattttatttgccatgtattgattctttggcagcgtatgatgttttaaaaaaaaataatcctagcccgtatatgttttttatgcaagattctcatttcactttgtttggtgcttctccagtaagtgctttaaaatatgatgtatcgtctagacaaattgaaatttatcctattgctggaactaggccaagggaaagaaaaataaatggatcgttagatttagatttagatagtagaatagaacttgaaatgagaacaaatcataaagaattagctgaacatttaatgttagtagatttagcaagaaacgatttagcaagaatttgtgatcctggtactcgttatgtagctaatttaacacaagtagatcggtattctcacgttatgcacttagtttctcgagttgtcggaaaattaaaatctaatttagatgtatttcatgcatatcaagcatgtatgaatatgggaacgttaagtggtgccccgaaaattcgagcaatggaattaatttcatatgtagaaaaggaaaaaagaggtagttatggaggatcaataggatattttactgcttcaggagcattagatacttgcattgttattcgatctgcgtatgttgaaaataatatagctattgttcaagcaggagctggaatagttgtagattctattccgcaatcagaagcagatgaaagcaaaaataaagctaaagctgtactacaagctatttctgaatcacattcctgtcatatagagtatcataatgaatga

SEQ ID NO: 76759 - protein, 522 aa, Buchnera aphidicola
MNKRLKRMDVLKVEALYQSNPTIVFHQICRNKSNTLLLESAEINKRDSLESMMIIDSALRISALNQIVVLEALTKNGESLLPIFISLLPKSVKILVNKNLLKIEFPLISMNLDEDKKLHVLSIFDSIRFLINSTKNNKVSKSMFFGGLFSYDLITNFENLPKLKTTQSCPDFCFYLAETLLVLDHKKKTCYIQASLFSSDIFEKNRLQSRLLMIKKQLSSSFYPLQPIFLKKMVLTCNKTDKVYIKIIEEMQKLILIGEIFQVVPSRRFYLPCIDSLAAYDVLKKNNPSPYMFFMQDSHFTLFGASPVSALKYDVSSRQIEIYPIAGTRPRERKINGSLDLDLDSRIELEMRTNHKELAEHLMLVDLARNDLARICDPGTRYVANLTQVDRYSHVMHLVSRVVGKLKSNLDVFHAYQACMNMGTLSGAPKIRAMELISYVEKEKRGSYGGSIGYFTASGALDTCIVIRSAYVENNIAIVQAGAGIVVDSIPQSEADESKNKAKAVLQAISESHSCHIEYHNE

SEQ ID NO: 76760 - DNA, 1413 bp, Bacillus subtilis
  CDS (1)..(1413): transl_table=11
atggcacaacgcagaccggcaggcaaaaaaataccttttcaaaaagactcattcttacaacaatttgagaaacttgcgcaatcccggaaacatcatgtacttctcgaaagtgcaagaggcggcagatatagtatagccggtcttgatccaattgcgactgtgaaaggaaaagacggaataactacaattaagcatggtgatgagatgctgtttaaagaaggtgatccattacgggccttccacagctggtttaaaacactggaaacagaaacgaatcatgagttccctgactttcaaggcggggcaatcgggtttctcagctatgattacgcacggtacattgaaaattttaaaatgctctcattagatgatttagaaacaccagatatttattttcttgtttttgatgatatagcagtttatgaccatcaagaagagtctctatggctgattactcatgttaatggttctgatcaggaaacagcggatgtgaagctatctgagttagagcagatgtggttgactgagcttcccgctgtcacttcgcgagagatgaagcctgaaacagctggttctttcgcggcgccatttaccgaggatgggttctcacaagctgtagagaaaatcaaacaatacattgccagcggagatgtgtttcaagtcaatctatcaataaggcagtcacagtcactgtctgtccacccatatcaaatttacaaaaccttgagagaagtaaatccttctccttatatggcgtatttagaaacacctgatttccaaatcatttgcggatcgcctgaactgcttgtcagcaaaaagggcaagctattagagacgagaccgattgcgggcacccgttccagagggaaaacaaatgaagaagacgaggcgcttgcaaacgaattgatacacaatgaaaaagaacgcgcggaacatgtcatgctggttgatcttgagcgaaatgatctgggaagagtatcacgttacgggtctgtgcgcgtaaatgaattcatggcaattgaaaaatactcgcatgtgatgcacattgtgtctaatgtccaaggtgaactgcaggatgggtatgatgctgtagatattattcatgctgtgtttcccggaggaaccattactggtgcaccgaaagtaagaacgatggaaattatagaagaacttgagccgacacgccgagggctttatactggatctataggatggtttggatataatcacgatctgcagtttaatatcgtcattcgaaccatttatgcaaccggagggcaggcatttatgcagtccggtgcaggagttgtgattgattctgttccgaagcacgaatacaaggaatcattcaaaaaagcttttgcgatgcaaagagcattagagctgagcgaagaagagacaaaaattagatga

SEQ ID NO: 76761 - protein, 470 aa, Bacillus subtilis
MAQRRPAGKKIPFQKDSFLQQFEKLAQSRKHHVLLESARGGRYSIAGLDPIATVKGKDGITTIKHGDEMLFKEGDPLRAFHSWFKTLETETNHEFPDFQGGAIGFLSYDYARYIENFKMLSLDDLETPDIYFLVFDDIAVYDHQEESLWLITHVNGSDQETADVKLSELEQMWLTELPAVTSREMKPETAGSFAAPFTEDGFSQAVEKIKQYIASGDVFQVNLSIRQSQSLSVHPYQIYKTLREVNPSPYMAYLETPDFQIICGSPELLVSKKGKLLETRPIAGTRSRGKTNEEDEALANELIHNEKERAEHVMLVDLERNDLGRVSRYGSVRVNEFMAIEKYSHVMHIVSNVQGELQDGYDAVDIIHAVFPGGTITGAPKVRTMEIIEELEPTRRGLYTGSIGWFGYNHDLQFNIVIRTIYATGGQAFMQSGAGVVIDSVPKHEYKESFKKAFAMQRALELSEEETKIR

SEQ ID NO: 76762 - DNA, 1593 bp, Pseudomonas aeruginosa
  CDS (1)..(1593): transl_table=11
atgggcgcgaggaggtggctcgtgagcggggttggctatcgactggaagaaagtctggagtaccgcacgctggtgccggaggcgctgtcgatctggcgcatggccggcgccaaccggatgctgttcgactgcttcgacgtggacagcaaggctgcgcggcgtagcgtggcgatcctttccagctgcctgcgcatcgagtgctgggggcgcgatgtggtgctgcgggcgttgaactccaacggacgcgccttgctggcgccgttgagcgaggactgtccggcccaggtcacctgcttgcgtgacggcgacaccctgcactggcgcttcccccaggaagagtcgcatgcggacgagtggcgacgcctgcatggcctgtccagcctggaggcgctgcgccgcgtgctcggaacgctgggcgacgcggaggggcccgtgctgctgggcggcctgttcagcttcgacctggccgagcagttcgaacccttgccggcgccggccgaacctgcgcggcattgcccggactacctgttcctggtgccggagttgctgctggacatcgatcacctggcgcgccggacttcgctgcaggcgttcgtccacgatccggccgggcacgaccggttggccgccagcctgcgccagtgtgccgacgaattccatggcgccgtggaggaggcttccgagtcgccggtggcaggcgtacgggccggcaactaccaggtcgacctggacgatgcgagctttgcccgccaggtagagcgcctgcaggcccacgtgagggccggcgacgtgttccagatcgtaccgtcgcgcagcttcagcatgccgtgtgcggacccctggcgggcctatcgccagttgtgcctgcgcaaccccagcccgtaccgcttcttcctcgatgcgggggacttctgcctgttcggcgcttcgccggagtcggcattgaagtacgacgcggagagtcgcgaggtggaactctatcccatcgccggcacccgcccgcgcggacgcgatgcccggggcgccatcgatgcggaactggacaatcgcctggaagcggagttgcgcctggacgccaaggagatcgccgagcacatgatgctggtcgacctggcgcgcaacgatctggcgcgcgtctgccgcagcggtacgcggcaggtgcgcgacatgctcaaggtcgatcgctacagccacgtgatgcacctggtctcgcgcgtggctggcgaactgcatggcgaactggatgcgctgcatgcctaccgtgcctgcctgaacatgggcaccttggtcggtgcgccgaaggtccgtgccatgcagttgctgcggcagtacgaggatggctatcgcggcagctacggtggcgcgatcggcattctcgacagcgccggcaacctcgataccagcatcgtcatccgctccgccgaggtccgcgaaggtatcgcccgggtccgggcaggcgccggcgtggtgctggattcggatccacggctggaggccgaggaaacccgcaacaaggcgctggcggtgctgaccgccgtggccgctgccgaacgcgaaaggggagagcgcgatgcgcatcacgctgttggataa

SEQ ID NO: 76763 - protein, 530 aa, Pseudomonas aeruginosa
MGARRWLVSGVGYRLEESLEYRTLVPEALSIWRMAGANRMLFDCFDVDSKAARRSVAILSSCLRIECWGRDVVLRALNSNGRALLAPLSEDCPAQVTCLRDGDTLHWRFPQEESHADEWRRLHGLSSLEALRRVLGTLGDAEGPVLLGGLFSFDLAEQFEPLPAPAEPARHCPDYLFLVPELLLDIDHLARRTSLQAFVHDPAGHDRLAASLRQCADEFHGAVEEASESPVAGVRAGNYQVDLDDASFARQVERLQAHVRAGDVFQIVPSRSFSMPCADPWRAYRQLCLRNPSPYRFFLDAGDFCLFGASPESALKYDAESREVELYPIAGTRPRGRDARGAIDAELDNRLEAELRLDAKEIAEHMMLVDLARNDLARVCRSGTRQVRDMLKVDRYSHVMHLVSRVAGELHGELDALHAYRACLNMGTLVGAPKVRAMQLLRQYEDGYRGSYGGAIGILDSAGNLDTSIVIRSAEVREGIARVRAGAGVVLDSDPRLEAEETRNKALAVLTAVAAAERERGERDAHHAVG

SEQ ID NO: 76764 - DNA, 1584 bp, Halobacterium salinarium
  CDS (1)..(1584): transl_table=11
atgatcgaaaccgaccgcgagacgttcaccgcactcgccgacgatggccccgcgatcgtgcgcgtcgccgccgacctcgatatcgacgtggcaccgctgacggcgtacgacgcgctcgttgccgacgccgacgaccacgccttcctgcttgagagcgccgaaaagacccccgccagcgaccccgacggggcgtttacccccgacacgaccaccgaagagacccgccacgcccgctactcgttcgtgggctacgaccccgcggccgtcgtcaccgtcgaccccgacgacacgacgatcacgcggctgcgcgacgaccccatcaccgacctgctggacgcccccgaccacgccaccggagatgtgcttgaccgcctccggtcggtgatgcccgcggtcccgcgccgcaacatccccaccgaggaccgccagctgctcgatggcggcctggtcgggttcctcgcctacgacgccgtctacgacctctggctcgacgaggtcggcgtcgagcgtccgccgacgccgctgccggacgcggagttcgccgtgaccacgcgcacgctcgtgttcgaccgcgccaccgactccgtctcgctcgtgtgcacgccggtcgccgacgcggacaccgccacggacgtctacgacgccctcgaagccgaagccaagcgcgtgcaggccgtgcttcgggacgcgaccgcgcccgccaccgccggcatcgaggtgaccaccgagcgcgccggcgaccgcgacgcctacaccgacgccgtcgagaccgccgcgaccgcggtccgggacggcgaagtgtatcaggcggtggtttcacgcacgcgcgagcttgacggtgacatcgacccgcgggcgctctacgacgcgctgcgcgcggtcaacccctcgccgtacatgttcctgctcgcgcacggggaccacacggtcgtgggtgccagcccggagacgctggtcgcggtccacgacgacaccgtcgtcacgaacccgatcgcgggcacctgccagcgcggcgccagcccggtggcggaccgccgcctcgccggggagatgctcgccgacgagaaggaacgcgccgaacacacgatgctcgtggatctcgcgcgcaacgacgtgcgccgcgtgagcgcgcccggcaccgtctcggtgcccgagttcatgcgcgtgctgaagtacagccacgtccagcacatcgaatccacggtcaccgggacgctggccgccgacgccgacgccttcgacgcgacccgcgcggcgttcccggcgggcaccctctcgggcgcgccgaaggtccgcgccatggagcacatcgacgccatcgaagccacaccgcggggcatctacggcggcggcgtggggtatttctcctggaccggtgacgcggagctcgcgatcaccatccgatccgggacgatcacccacaccggcgacgaggacacgctcaccgtccgggccggtgcgggcgtcgtcgccgacagcgacccggacgccgagtacgaggagaccgaggcgaaaatggacggcgtgctcgcggccgtggaccgactccggacgaccgacgacggggaggcggtgcaccgatga

SEQ ID NO: 76765 - protein, 527 aa, Halobacterium salinarium
MIETDRETFTALADDGPAIVRVAADLDIDVAPLTAYDALVADADDHAFLLESAEKTPASDPDGAFTPDTTTEETRHARYSFVGYDPAAVVTVDPDDTTITRLRDDPITDLLDAPDHATGDVLDRLRSVMPAVPRRNIPTEDRQLLDGGLVGFLAYDAVYDLWLDEVGVERPPTPLPDAEFAVTTRTLVFDRATDSVSLVCTPVADADTATDVYDALEAEAKRVQAVLRDATAPATAGIEVTTERAGDRDAYTDAVETAATAVRDGEVYQAVVSRTRELDGDIDPRALYDALRAVNPSPYMFLLAHGDHTVVGASPETLVAVHDDTVVTNPIAGTCQRGASPVADRRLAGEMLADEKERAEHTMLVDLARNDVRRVSAPGTVSVPEFMRVLKYSHVQHIESTVTGTLAADADAFDATRAAFPAGTLSGAPKVRAMEHIDAIEATPRGIYGGGVGYFSWTGDAELAITIRSGTITHTGDEDTLTVRAGAGVVADSDPDAEYEETEAKMDGVLAAVDRLRTTDDGEAVHR

SEQ ID NO: 76766 - DNA, 1611 bp, Haloarcula marismortui
  CDS (1)..(1611): transl_table=11
atgactctcgatatctcccgcgaggagttcgtcgaacacgccaaggccgaccgtccggtcgtcgtccgcaccgctgcggaacttgacgtagacgtggagcccctgaccgcgtacgcggccctgactggtcgcacgagcgacgtggccgccaacgactacacgttcctgctcgaaagtgccgaaaaggtcgcctccagcgaccccgacggcgcgttcgcgccggagacggacgaccgccacgcccgcttttccttcgtcggctacgacccgcgcgccgtcgtcaccgtgaccggtgacgagagcgaggtcgaggcgttcgacgaccgctacgccgacctcgtaacgactgacggtggcgacgtggttgatgacctccgggcggcgatgcccgacgtggcgctgcgaaacttcccggcgatggaccgccagcacctcgaaggcggcctcgtgggctttctctcgtacgacgccgtctacgacctctggctcgacgaagtgggcctagaccgcccggactcgcggttcccggacgcgcagttcgtcctcaccacgtcgacggtccggttcgaccacgtcgaggacactgtttcgctcgtgttcacgccggttgtcaggcaaggcgaggacgccggcgagcgctacggcgaactggtcgccgaagctgaacgggtcgaggccgtgctctcggacctgtcaccgctttcgaccggcggtttccgccgcgaggacgaagtcgctggccccagagacgagtacgaggacgccgtcgaacgcgcaaaggagtacgtcctctcgggcgacatctatcagggcgttatctcccgaacccgagagctgtacggcgacgtcgacccgctgggcttctacgaggccctccgggcggtgaacccctcgccgtatatgtacctgctgggctacgatgacctgaccatcgtcggcgcgagtccggagacgctcgtctccgtcgccggcgaccacgtcgtctcgaatcctatcgcggggacgtgcccgcgcgggaactctccggttgaggaccgccgcctcgccggtgagatgctcgccgacgggaaggagcgggccgaacacacgatgctggtcgatctggcacgaaacgatgtccggcgcgtcgccgaggccggcagcgtccgagtccccgagttcatgaacgtcctcaagtacagccacgtccagcacatcgagtccacggtgacgggccgactcgccgaagacaaagacgccttcgacgccgcccgggcaacgttcccggcggggaccctctccggtgcaccgaagatccgcgccatggagattatcgacgaactcgaacgctcgccccgtggcccctacggcggcggcgtcggttacttcgactgggacggcgacaccgacttcgctatcgtcatccgctcggcgacggtcgaggacgagggtgaccgggaccgcatcaccgtgcaggccggggccggcatcgtcgcggactcggacccggaaagcgagtacgtcgagactgagcagaagatggacggcgtgttgaccgcgcttgaggaaatcgaaggggaaccggtcgacgtggcagagcgcgctgcaggccacgaggaggtgacccgatga

SEQ ID NO: 76767 - protein, 536 aa, Haloarcula marismortui
MTLDISREEFVEHAKADRPVVVRTAAELDVDVEPLTAYAALTGRTSDVAANDYTFLLESAEKVASSDPDGAFAPETDDRHARFSFVGYDPRAVVTVTGDESEVEAFDDRYADLVTTDGGDVVDDLRAAMPDVALRNFPAMDRQHLEGGLVGFLSYDAVYDLWLDEVGLDRPDSRFPDAQFVLTTSTVRFDHVEDTVSLVFTPVVRQGEDAGERYGELVAEAERVEAVLSDLSPLSTGGFRREDEVAGPRDEYEDAVERAKEYVLSGDIYQGVISRTRELYGDVDPLGFYEALRAVNPSPYMYLLGYDDLTIVGASPETLVSVAGDHVVSNPIAGTCPRGNSPVEDRRLAGEMLADGKERAEHTMLVDLARNDVRRVAEAGSVRVPEFMNVLKYSHVQHIESTVTGRLAEDKDAFDAARATFPAGTLSGAPKIRAMEIIDELERSPRGPYGGGVGYFDWDGDTDFAIVIRSATVEDEGDRDRITVQAGAGIVADSDPESEYVETEQKMDGVLTALEEIEGEPVDVAERAAGHEEVTR

SEQ ID NO: 76768 - DNA, 1494 bp, Acinetobacter calcoaceticus
  CDS (1)..(1494): transl_table=11
atgacatcactaactcaatttgaacagcttaaaacagcaggctataacaccattcctgtttatcgtcagcgtcttgctgataccgatacaccattgtccgtctttgctcgactcaaggactatacacaagcctatttgtttgagtcggttgagggtggagagaactgggcgcgctattccattattggcttgggtgagtctaccgttttttcttgtaatgcggggcagctcacgatcaaaaatgcacaagggaacattacaacacaatcttgtgcagatccatttcagtatattcgtgattatcaaagccagtttaaagttccaccgcatgcgcttataccagacttgcctcaatttactggggggctggtcggttattttggctacgatgcggtgcgttatatcgaaccgcgtttgagtaacgttccagaggcagatccagtcggtttacctgacatctggatgatgctctctaagaccgtgattatttttgataatctcaaagacacgctgtttttgattgtgcatgccaataccactgatgaagaagcctatcaacgtgcgcagaatcaactggattatctggaacgattgctggcaacaccagtgagcttgcaggccaaaaaacataaagcaccacattttgaatcccttacagggaaagaaaaattcttagaatcggttgaaaccgtcaaggaatatattcgtgcgggcgatgtcatgcaagtggttccagggcaccgtatggtctctgattttgatggcgatcctttacaggtctatcgtgcattgcgccatttaaacccttcgccttatctgtttttagtgcagggacacacactcacggataacacgccttttcacattgttggctcatcaccagaaatcctgtcacgcttggaagatggtattgccacagttagacctcttgcgggaactcgccctcgtggtaagaccaaagaggaagatttggcgctcgaacaagagctgctcgctgatgaaaaagaaattgcagagcatttaatgctgatcgatcttggacgtaacgatgtggggcgtgtctcaaaaattggaaaggtgcaggtgaccgatcgaatggtgatcgaacgttattcacatgtcatgcatattgtctccaatgtacaaggcgaagtgcgggatgatattgatgcattggacgtatttaaagcaacctttcctgcgggtacgctttctggggcacccaaaattcgtgccatggaaatcattgatgaagttgaaccagtcaagcgtggaatttttggtggtgctgtcggatatttaggctggcatggcgaaatggatatgtcgattgccattcgtacttgtgtgattcgtgaaaataaagtctatgtccaggcaggagcagggctggtggcggactcaaatccagaatctgaatggaatgaaacccaaataaaagctcgcgcagtgatcaaagcggttgaattatcatcaaatggattgattttatga

SEQ ID NO: 76769 - protein, 497 aa, Acinetobacter calcoaceticus
MTSLTQFEQLKTAGYNTIPVYRQRLADTDTPLSVFARLKDYTQAYLFESVEGGENWARYSIIGLGESTVFSCNAGQLTIKNAQGNITTQSCADPFQYIRDYQSQFKVPPHALIPDLPQFTGGLVGYFGYDAVRYIEPRLSNVPEADPVGLPDIWMMLSKTVIIFDNLKDTLFLIVHANTTDEEAYQRAQNQLDYLERLLATPVSLQAKKHKAPHFESLTGKEKFLESVETVKEYIRAGDVMQVVPGHRMVSDFDGDPLQVYRALRHLNPSPYLFLVQGHTLTDNTPFHIVGSSPEILSRLEDGIATVRPLAGTRPRGKTKEEDLALEQELLADEKEIAEHLMLIDLGRNDVGRVSKIGKVQVTDRMVIERYSHVMHIVSNVQGEVRDDIDALDVFKATFPAGTLSGAPKIRAMEIIDEVEPVKRGIFGGAVGYLGWHGEMDMSIAIRTCVIRENKVYVQAGAGLVADSNPESEWNETQIKARAVIKAVELSSNGLIL

SEQ ID NO: 76770 - DNA, 1317 bp, Aeropyrum pernix
  CDS (1)..(1317): transl_table=11
ttgccttcacccccagagcctcccctccactggagggactgtaggctagagcctatcctaggatttcctaggcctagggagctagccaagtcacttgaagtccagggggaggagtggatagcactccttgagagtgggggaggcctacagcataggagcaggtactctttcctagcgtggggcaggagaaagtcgagtgaaacagacgctatcagggcgtatgaggaactcgagcgcttagcggacgataagtgcagggcgctgccttgccgcagccccacgttctttctggtatcctatgaggctgttgtcggtgaggagccgtggctatcgcggctggttggtaggcatgagtggccaggtatgacagccttctcccctgaatatgttgtagtctacgatcacgcagggggaagggtgtcggtttgcccaggtgacaccccccttccggcgccggcgagtaggaaagagagtttctcggcggaaggccctacctatgagacctccaggaaagggttcgaagctatggtcgctgacgcgttggagaggatcagggctggagaggctttccaggtagtgttatccagggttgagaggtatagggtctgggggagcctgtttagcgcgtatgagaggctcgccgatgccaaccctagtccctacctatactacgctaggctgggcggcagggttatcatagggagtagcccggagctcctggtcaagctggaggcgggcagagttgagactcacccgatagctggtaccaggcctcgcggctcaacgcccattgaggacatcgagttagaagtagagttgttgaacgacgagaaggagagggcagagcatgtgatgcttgttgacctggctaggaacgatataacccgtgtatcgatccctggaaccgtacaggtaacaagcttcatggatatcgagagatacgagactgtaatgcatatagtaagcagggttgaaggagtgacaaggcccagcaccacattcgtcgaagcccttaaagccctccaccctgcaggcacggttagcggagcgccaaagcctagggccatggaaattatagccgaactagaggaagaggccaggggcccctacgcaggagccataggagtagcgggttctagcgcgggcgaggcggccatagtgctgaggagcgcctggctcctagatgacggggagaccttggaagctagagctggcgccgggatagtctatgatagcaagcccgagagagagtacatggagactgtccagaaactcggaagcctaaagagggctctgggggtggatatgtgtggctga

SEQ ID NO: 76771 - protein, 438 aa, Aeropyrum pernix
MPSPPEPPLHWRDCRLEPILGFPRPRELAKSLEVQGEEWIALLESGGGLQHRSRYSFLAWGRRKSSETDAIRAYEELERLADDKCRALPCRSPTFFLVSYEAVVGEEPWLSRLVGRHEWPGMTAFSPEYVVVYDHAGGRVSVCPGDTPLPAPASRKESFSAEGPTYETSRKGFEAMVADALERIRAGEAFQVVLSRVERYRVWGSLFSAYERLADANPSPYLYYARLGGRVIIGSSPELLVKLEAGRVETHPIAGTRPRGSTPIEDIELEVELLNDEKERAEHVMLVDLARNDITRVSIPGTVQVTSFMDIERYETVMHIVSRVEGVTRPSTTFVEALKALHPAGTVSGAPKPRAMEIIAELEEEARGPYAGAIGVAGSSAGEAAIVLRSAWLLDDGETLEARAGAGIVYDSKPEREYMETVQKLGSLKRALGVDMCG

SEQ ID NO: 76772 - DNA, 1485 bp, Aquifex aeolicus
  CDS (1)..(1485): transl_table=11
atgaatttaaacctcagccttgaggaagtaagaaaactatcagagaattacaacgttattcccttatatacggaacttctggtggatactgaaactcctctttctattttcctcaagttaaaggaaaaaggacagttcaacatcttactggaaagtgcggagggcggtgagaagtggggaaggtactcctttataatcacgggatcttccttttacctgagaacgagaaaagatatcggagagatttacgaaaggggaaaggtcaatttctttgaaacgaaggatcctctttcaaagattaaggaagttgtaaagaagttcataccttatcatgatgaaagattgcctaggttctggggagggttagttggttactttgcctacgacgtggtgaagttctacgaacctgtggaagacaaaaatcccgatccgattcacacttacgatatatacctcgtgcttacggacgttgtggttatccacgacaaccttacgggaaaaataaaggtcgttgttcccatcttcgcacaaaacggaattgaggaagagtacgaaagggctaaaaacttaataagggataccgtgaaaaaactaaaggaaaggggaactacttttttaaacgttgtagagaaagaaccggatttcaaaaactggcgttctaacttcacaaaagaggaatttgaggatatagtcaaaaaggcaaaggagtacatagcgcagggggatgtgatacaggtagttctttctcaaagattcagaaagaggtttaagggtaatcccgacaacatttacagagttctcaggttcttaaatccttctccctatatgtactacctcgattttgatcagttaaaagtcataggctcttctcccgaaatcctcgtgagactggaagagggaaggattgaaacgagacctatagcggggacgagaaagaggggaagaacggaagaagaagataaaagactggaagaggatctactttcggacgagaaggagagggcggaacacttaatgcttgttgaccttgcgagaaacgacatagggagggttgcaaaaaccggaagtgtgagagttgaaaactttatgcggatagaacgctactcccatgttatgcacatagtgagcgacgttgtgggagagttaagagaaggctacgacgctctagacgtcttgaaggctacctttcctgcgggaactgtttctggagctcccaaggtaagggctatgcagataatagaggaacttgaaaacgaaaggagaggaatatacgcgggcagtgtaggttatatatcctttcaggggaacatggacatggcgatagccataaggactgcagtttacagggacagggatatattcgtccaagctggagcgggaatagtggcggactccgttcctgaaaaggagtgggaagagaccgtaaacaaggcaaaagcgctcatgaaggcaatagaaattgcagaggaaagccaagaagagtaa

SEQ ID NO: 76773 - protein, 494 aa, Aquifex aeolicus
MNLNLSLEEVRKLSENYNVIPLYTELLVDTETPLSIFLKLKEKGQFNILLESAEGGEKWGRYSFIITGSSFYLRTRKDIGEIYERGKVNFFETKDPLSKIKEVVKKFIPYHDERLPRFWGGLVGYFAYDVVKFYEPVEDKNPDPIHTYDIYLVLTDVVVIHDNLTGKIKVVVPIFAQNGIEEEYERAKNLIRDTVKKLKERGTTFLNVVEKEPDFKNWRSNFTKEEFEDIVKKAKEYIAQGDVIQVVLSQRFRKRFKGNPDNIYRVLRFLNPSPYMYYLDFDQLKVIGSSPEILVRLEEGRIETRPIAGTRKRGRTEEEDKRLEEDLLSDEKERAEHLMLVDLARNDIGRVAKTGSVRVENFMRIERYSHVMHIVSDVVGELREGYDALDVLKATFPAGTVSGAPKVRAMQIIEELENERRGIYAGSVGYISFQGNMDMAIAIRTAVYRDRDIFVQAGAGIVADSVPEKEWEETVNKAKALMKAIEIAEESQEE

SEQ ID NO: 76774 - DNA, 1788 bp, Arabidopsis thaliana
  CDS (1)..(1788)
atgtcttcctctatgaacgtagcgacgatgcaagcactgactttctctcgccggcttctcccttctgttgcttctcgttatctctcttcttcttctgtgaccgttactggatactccggtagaagctcggcttacgcgccttctttccgttcgattaaatgcgtctctgtttctccggaagcttcaatagtaagtgatacaaagaagttggcagatgcttctaagagtacaaaccttataccaatttaccgctgtatattctctgatcagcttactcctgttcttgcttaccgttgtttggtcaaagaagatgaccgtgaagctcctagctttcttttcgagtccgttgagcctggttctcagatgtctagcgttggtcgttatagcgttgttggggctcagcctgcgatggagatcgtggcaaaggagaataaagttattgtaatggatcacaacaatgaaaccatgactgaggaattcgtcgaagatccaatggagatcccaagaaaaatctctgagaaatggaaccctgatcctcaactagttcaggaccttccagatgcgttttgtggtgggtgggttggttttttctcgtacgacactgttcgttatgttgagaagaggaaattgccattttcaaaggcccctgaggatgataggaacttgccagacatgcatcttggtctgtacgacgatgtagttgtatttgatcacgtggaaaagaaagcatatgtcattcactggattagactagatgggagccttccttacgaaaaggcatacagtaatggaatgcaacatttggagaacttggtggccaagttacatgatattgagccgccaaaactggctgcaggtaacgtgaatcttcagacacgacaatttgggccatctttggataattcaaacgtgacatgcgaagagtacaaggaggctgtggtcaaggccaaagaacatatacttgcaggagacatatttcagatcgtgctgagtcaacgttttgagcggcgaacatttgcagacccctttgaagtttatagagcactaagagttgtgaatccaagtccgtatatgggttatttgcaggctagaggatgcattttggtagcatcaagtccagaaattctcaccaaagtaaagcagaacaagatagtgaatcggccattggcaggaaccagcaagagagggaagaatgaagttgaggataagagattagaaaaggaactgctagagaatgaaaagcaatgtgctgagcacatcatgttggttgatctcggtcgcaacgatgttggaaaggttacgaaatacggatcagtgaaagtagagaagcttatgaacatcgaacgttattcccatgttatgcatataagctccacggtgacaggagaattacaagatggtttgacttgctgggacgtactacgtgcggctttaccagtgggaacagttagtggtgcaccaaaggtcaaagctatggaactaatcgatgagctagagccaacgaggcgtggaccatacagtggcggttttggtggagtctccttcactggtgacatggacattgctttatcccttaggacaatcgtttttccgacagcatgtcaatacaatacaatgtactcttacaaggatgctaacaaacggcgtgagtgggtggcttatcttcaagctggagctggtgtagtagctgatagtgacccgcaagacgaacactgtgagtgccagaacaaagccgctggtcttgctcgagccatcgacttggctgaatctgcatttgtgaaaaaatga

SEQ ID NO: 76775 - protein, 595 aa, Arabidopsis thaliana
MSSSMNVATMQALTFSRRLLPSVASRYLSSSSVTVTGYSGRSSAYAPSFRSIKCVSVSPEASIVSDTKKLADASKSTNLIPIYRCIFSDQLTPVLAYRCLVKEDDREAPSFLFESVEPGSQMSSVGRYSVVGAQPAMEIVAKENKVIVMDHNNETMTEEFVEDPMEIPRKISEKWNPDPQLVQDLPDAFCGGWVGFFSYDTVRYVEKRKLPFSKAPEDDRNLPDMHLGLYDDVVVFDHVEKKAYVIHWIRLDGSLPYEKAYSNGMQHLENLVAKLHDIEPPKLAAGNVNLQTRQFGPSLDNSNVTCEEYKEAVVKAKEHILAGDIFQIVLSQRFERRTFADPFEVYRALRVVNPSPYMGYLQARGCILVASSPEILTKVKQNKIVNRPLAGTSKRGKNEVEDKRLEKELLENEKQCAEHIMLVDLGRNDVGKVTKYGSVKVEKLMNIERYSHVMHISSTVTGELQDGLTCWDVLRAALPVGTVSGAPKVKAMELIDELEPTRRGPYSGGFGGVSFTGDMDIALSLRTIVFPTACQYNTMYSYKDANKRREWVAYLQAGAGVVADSDPQDEHCECQNKAAGLARAIDLAESAFVKK

SEQ ID NO: 76776 - DNA, 2199 bp, Azospirillum brasilense
  CDS (1)..(2199): transl_table=11
atgtaccccgccgaccttcttgcctcgcccgacctcctcgaaccgctgcgtttccagacgcgcggcggcgtcaccgtcacgcggcgggcgacggcgctcgacccgcggaccgccctcgacccggtgatcgacgcgctggaccgccgccgcggcctgctgctgtccagcggggtggaggcgccgggccgctaccgccgtcacgcgctgggcttcaccgaccccgcggtggcgctcacggcgcgtgggcggacgctgcgcatcgacgcgctgaacgggcgggggcaagtgctgctgcccgccgtcgccgaggccctgcgtggcctggaggccctggccggtctagaggaggcgccgtcgcgggtcactgcctcgtccgcaagcccagcaccccttcccggagaggagcggagccgccagccctccgttttctcggtcctgcgggcggtgctggatctgtttgccgcccccgacgacccgttgctcgggctctacggggccttcgcctacgacctcgccttccagttcgagccgatccgccagcggttggagcggcccgacgaccagcgcgatctgctgctctacctgccggaccggctcgtcgcgctggaccccatcgcaggactcgcccggctcgtcgcgtatgagttcatcacggcggcgggcagcaccgaggggctggagtgcggcgggcgcgaccacccctaccgtcccgacaccaacgccgaggccggctgcgaccacgcgcccggtgactatcagcgcgtcgtcgagagcgccaaggccgccttccgccgcggcgacctgttcgaggtggtgcccggccagaccttcgccgagccctgcgccgacgcgccttcgtcggtgttccggcggctgcgcgccgccaacccggcgccttacgaggccttcgtcaacctcgggcggggcgagttcctcgtcgccgccagcccggagatgtatgtgcgggtggcgggcgggcgggtggaaacctgcccgatctccggcaccgtggcgcgcggggccgacgcgctgggcgacgccgcgcaggtcctgcgcctgctgacctcggccaaggacgcggcggagctgaccatgtgcaccgacgtggaccgcaacgacaaggcgcgggtgtgcgagccgggatccgtccgggtgatcgggcggcggatgatcgagctgtactcccgtctgatccacacggtggaccatgtggagggacggctgcggtccggaatggacgcgctggacgccttcctcacccacagctgggcggtgacggtgaccggcgcgcccaagcgctgggccatgcagttcctggaggatacggagcaatcgccgcgccgctggtacggcggggccttcggccggctgggcttcgacggcgggatggacaccggcctgaccctgcgcaccatccgcatggccgagggcgttgcctacgtgcgggcgggggcgacgctgctgtccgacagcgatccggacgcggaggacgcggagtgccgcctgaaggccgccgccttccgcgacgccatccgcgggacggcggcgggtgcggcgcccacgctgccggcggctccccgtggcggggagggcaggcgggtgctgctggtggatcacgacgacagcttcgtccacacgctggccgactatctgcgccagacgggcgcttcggtgacgacgctgcgtcacagtcacgcacgggcggcgctggcggagcggaggccggatctggtcgtgctgtcccccggtccggggcgcccggcggatttcgacgtggcgggcaccatcgacgcggcgctggcgctcggcctgccggtgttcggcgtctgcctgggcctgcaagggatggtggagcgcttcggcggcgcgctggacgtgctgccggagcccgtccacggcaaggcgacggaggtccgggtgctgggcggcgcgctgttcgccggcctgccggagcggctgacggtcgggcgctaccactctctggtggcccggcgcgaccggctgccggcggacctcacggtgaccgcggagaccgccgacggtctggtgatggcggtcgagcaccggcggcttccgctcgccgccgtgcagttccaccccgagtcgatcctgtcgctcgacggtggggccggtcttgccctgctgggcaacgtgatggaccggctggccgccggcgccctgacggacgctgcggcttga

SEQ ID NO: 76777 - protein, 732 aa, Azospirillum brasilense
MYPADLLASPDLLEPLRFQTRGGVTVTRRATALDPRTALDPVIDALDRRRGLLLSSGVEAPGRYRRHALGFTDPAVALTARGRTLRIDALNGRGQVLLPAVAEALRGLEALAGLEEAPSRVTASSASPAPLPGEERSRQPSVFSVLRAVLDLFAAPDDPLLGLYGAFAYDLAFQFEPIRQRLERPDDQRDLLLYLPDRLVALDPIAGLARLVAYEFITAAGSTEGLECGGRDHPYRPDTNAEAGCDHAPGDYQRVVESAKAAFRRGDLFEVVPGQTFAEPCADAPSSVFRRLRAANPAPYEAFVNLGRGEFLVAASPEMYVRVAGGRVETCPISGTVARGADALGDAAQVLRLLTSAKDAAELTMCTDVDRNDKARVCEPGSVRVIGRRMIELYSRLIHTVDHVEGRLRSGMDALDAFLTHSWAVTVTGAPKRWAMQFLEDTEQSPRRWYGGAFGRLGFDGGMDTGLTLRTIRMAEGVAYVRAGATLLSDSDPDAEDAECRLKAAAFRDAIRGTAAGAAPTLPAAPRGGEGRRVLLVDHDDSFVHTLADYLRQTGASVTTLRHSHARAALAERRPDLVVLSPGPGRPADFDVAGTIDAALALGLPVFGVCLGLQGMVERFGGALDVLPEPVHGKATEVRVLGGALFAGLPERLTVGRYHSLVARRDRLPADLTVTAETADGLVMAVEHRRLPLAAVQFHPESILSLDGGAGLALLGNVMDRLAAGALTDAAA

SEQ ID NO: 76778 - DNA, 1527 bp, Bacillus caldotenax
  CDS (1)..(1527): transl_table=11
atgtctgctgatgggctggccgcttttttggcggaagcgaacgaatttcgaaccatcccgattgtgcgcaaatttgtagccgatgtcattgagccgctcggcgtgtttgccaatttgcgcgaggaagccgtgtttttgcttgaaagcaaggatgacgaatcgccgtgggcgcgctattcgttcatcggtgtggcgccgtttttgacgctggagagcgaaaccggcgaaacgttttcggtgaaagacgaaaacgggaacgaacaaatcaccgcaccgacgctgaaagaagcgtttcaatgggtcgagcggacgcttgccgtcaagccgcttgccgagacggtgccgtttacaggcggtgcagttgggtttttaggctacgatttcatttccgccatcgaaaaagtgccgcgccacaaaaaccgcgatgtgcctatgaagacggcctatttcgtgttttgtgaatcgctgtttgcgtttgaccaaaaaaagcgtgagttgctcgtcattcactatattcggttgagcggcaacgaaacggaggaagagaaaatcgaagcgtaccgcgcggccgaacggcgcatggccgatctcgcggcgaaagcggcccgccctcaagccgagcaaccgctcttgccggcggaaagcgaatcggggcggaccgcctcgtttgccaaagcggtgtccaactatgacaaaaaacagtttttgcgcgatgtggaggccgtgaaacggtacatcgcggccggcgatgtgtttcaagcggttctgtcgcagcgcttctgcgtgccggttcaagccggaggctttgccatttatcggctgctccgatacatcaacccgtcgccgtacatgttttatttccagcttgacggtgtggaaattgtcggcagttcgccggaaaaactgattcaagtgcaccgtcggcgcgttgaaatcgatccgattgccggcacacggcggcgcggccgatcgccggaggaagacgagaggctggctgatgagctgtaccacgacccgaaagaacgggctgagcattatatgcttgtcgatttggcgcgcaacgacatcggccgggtcgccaagtacggaacggtcgaggtgccggtgttgcttcagatcggcaagttttcacacgtgatgcacttaatttccaaggtcgtcggtgaactggacgacaacgtccacccgatcgatgcactccttgccgcctttccggctggaacggtgagcggggcgccgaaagtgcgggcgatgcaaattttgcaggaactcgagccgacagcgagggggctgtatgccggagcgattgcctatatcgggtttgatggcaacatcgattcgtgcatcgccatccggacagcggtcgtgaaagacggctatgcctatgtgcaagccggcgccggcattgtcgccgactccgttccggaactggagtggaaagagacgcgcaataaggcgagcgccttgatgaatgcgattgaacaagcggaacgactatttgctaaaggggagagggccgtatgttga

SEQ ID NO: 76779 - protein, 508 aa, Bacillus caldotenax
MSADGLAAFLAEANEFRTIPIVRKFVADVIEPLGVFANLREEAVFLLESKDDESPWARYSFIGVAPFLTLESETGETFSVKDENGNEQITAPTLKEAFQWVERTLAVKPLAETVPFTGGAVGFLGYDFISAIEKVPRHKNRDVPMKTAYFVFCESLFAFDQKKRELLVIHYIRLSGNETEEEKIEAYRAAERRMADLAAKAARPQAEQPLLPAESESGRTASFAKAVSNYDKKQFLRDVEAVKRYIAAGDVFQAVLSQRFCVPVQAGGFAIYRLLRYINPSPYMFYFQLDGVEIVGSSPEKLIQVHRRRVEIDPIAGTRRRGRSPEEDERLADELYHDPKERAEHYMLVDLARNDIGRVAKYGTVEVPVLLQIGKFSHVMHLISKVVGELDDNVHPIDALLAAFPAGTVSGAPKVRAMQILQELEPTARGLYAGAIAYIGFDGNIDSCIAIRTAVVKDGYAYVQAGAGIVADSVPELEWKETRNKASALMNAIEQAERLFAKGERAVC

SEQ ID NO: 76780 - DNA, 1527 bp, Bacillus stearothermophilus
  CDS (1)..(1527): transl_table=11
atgtccattgatcggctagccgcttttttagcggatgctcgccagtttcgcaccatcccgatcatgcgcaaatttttagccgatgtcatcgaaccgttgcaagtgtttgccaatttgcgcgaggaagcggtgtttctgcttgaaagcaaagacgacgaatcgccatgggcgcgttattcgtttatcggcgtggccccatttttgacgcttgagagcgagacaggagaaacgtttttgatcaaagacgagaacggaaatgtccaaatgacggcgtcgacgttgaaagaagcgtttcaagcggtcgagcgggcgctttgcgttaagccgctcgccgaagcggcgccgtttacgggcggcgcggtcggctttttaggctatgatttcatttccgccattgaaaaggtgccgcgccatcgtgcccccgacctagccatgaaagccgggcattttgtgttttgcgagtcgctgttcgcttttgatcacgaaaaacgcgagctgtctctcattcattatatccggttgaagggtcatgaaacgatgcaggagaaaatcgcgatataccgagccgccgaagaacgcatcgccgcgctggcagcgaaagcgtcgcgcccccgggccgaacagccgctgctgccggccgaagacgaggccgagcgggccgccttgttctcgaaagcgtcgtccaattacgaaaaagagcaatttttgcgtgacgtcgaggcggtgaaacagtatattgcggccggcgatgtgtttcaggcggtgctgtcgcagcggttctccgtcccggtgcaagcgggtgggtttgccatttatcgcatcttgcgccacatcaacccgtcgccgtacatgttttattttcggcttgacggcattgaaattgtcggtagttcgccggaaaagctcatccaagtgcgcaaccggcgcgccgagatcgacccgatcgccggaacaaggcggcgcggacgctcaccggcggaggatgaaaagctcgccgacgagctgtaccatgacccgaaagagcgggcggagcattatatgctcgtcgatttggcgcgcaatgacatcggccgggtggcgaagtacggaacggtcgaggtgccggtgttgatggaaatcggcaagttctctcatgtgatgcatttaatttccaaagtcgtcggcgtgcttgacgacgacatccacccgatcgacgcgctcttggccgcttttccggctggaacggtgagcggggcgcccaaagtgcgggcgatgcaaatcttgcaggagctcgagccgaccgcccgaggattgtacgctggagcgatcgcgtacatcggctttgacggcagcattgattcgtgcatcgccatccggacggcggtcattaaagacggttatgcgtacgtgcaggccggcgccggcattgtcgccgactcggttccggagcttgaatggaaagagacgcgcaacaaggcgagcgccctcatttacgccatcgaacaagcggaacgattatttgcgaaaggggaacagatcgtatgttaa

SEQ ID NO: 76781 - protein, 508 aa, Bacillus stearothermophilus
MSIDRLAAFLADARQFRTIPIMRKFLADVIEPLQVFANLREEAVFLLESKDDESPWARYSFIGVAPFLTLESETGETFLIKDENGNVQMTASTLKEAFQAVERALCVKPLAEAAPFTGGAVGFLGYDFISAIEKVPRHRAPDLAMKAGHFVFCESLFAFDHEKRELSLIHYIRLKGHETMQEKIAIYRAAEERIAALAAKASRPRAEQPLLPAEDEAERAALFSKASSNYEKEQFLRDVEAVKQYIAAGDVFQAVLSQRFSVPVQAGGFAIYRILRHINPSPYMFYFRLDGIEIVGSSPEKLIQVRNRRAEIDPIAGTRRRGRSPAEDEKLADELYHDPKERAEHYMLVDLARNDIGRVAKYGTVEVPVLMEIGKFSHVMHLISKVVGVLDDDIHPIDALLAAFPAGTVSGAPKVRAMQILQELEPTARGLYAGAIAYIGFDGSIDSCIAIRTAVIKDGYAYVQAGAGIVADSVPELEWKETRNKASALIYAIEQAERLFAKGEQIVC

SEQ ID NO: 76782 - DNA, 1548 bp, Bacillus subtilis
  CDS (1)..(1548): transl_table=11
atgaatttccaatcaaacatttccgcatttttagaggacagcttgtcccaccacacgataccgattgtggagaccttcacagtcgatacactgacacccattcaaatgatagagaagcttgacagggagattacgtatcttcttgaaagcaaggacgatacatccacttggtccagatattcgtttatcggcctgaatccatttctcacaattaaagaagagcagggccgtttttcggccgctgatcaggacagcaaatctctttacacaggaaatgaactaaaagaagtgctgaactggatgaataccacatacaaaatcaaaacacctgagcttggcattccttttgtcggcggagctgtcgggtacttaagctatgatatgatcccgctgattgagccttctgttccttcgcataccaaagaaacagacatggaaaagtgtatgctgtttgtttgccggacattaattgcgtatgatcatgaaaccaaaaacgtccactttatccaatatgcaaggctcactggagaggaaacaaaaaacgaaaaaatggatgtattccatcaaaatcatctggagcttcaaaatctcattgaaaaaatgatggaccaaaaaaacataaaagagctgtttctttctgctgattcatacaagacacccagctttgagacagtatcttctaattatgaaaaatcggcttttatggctgatgtagaaaaaatcaaaagctatataaaagcaggcgatatcttccagggtgttttatcacaaaaatttgaggtgccgataaaagcagatgcttttgagttataccgagtgcttaggatcgtcaatccttcgccgtatatgtattatatgaaactgctagacagagaaatagtcggcagctctccggaacggttaatacacgttcaagacgggcacttagaaatccatccgattgccggtacgagaaaacgcggtgcagacaaagctgaagatgagagactgaaggttgagctcatgaaggatgaaaaagaaaaagcggagcattacatgctcgttgatcttgcccgaaacgatatcggcagagtagcagagtatggttctgtttctgtgccggagttcacaaaaattgtttccttttcacatgtcatgcacattatctcggtggttacaggccgattgaaaaaaggggttcatcctgtcgatgcactgatgtctgctttcccggcggggactttaacaggcgcacccaaaatccgtgccatgcagcttttgcaagaactcgagccaacaccgagagagacatacggagggtgtattgcctacattgggtttgacgggaatatcgactcttgtattacgattcgcacgatgagtgtaaagaacggtgttgcatcgatacaggcaggtgctggcattgttgctgattctgttccggaagccgaatacgaagaaagctgtaataaagccggtgcgctgctgaaaacgattcatattgcagaagacatgtttcatagcaaggaggataaagctgatgaacagatttctacaattgtgcgttga

SEQ ID NO: 76783 - protein, 515 aa, Bacillus subtilis
MNFQSNISAFLEDSLSHHTIPIVETFTVDTLTPIQMIEKLDREITYLLESKDDTSTWSRYSFIGLNPFLTIKEEQGRFSAADQDSKSLYTGNELKEVLNWMNTTYKIKTPELGIPFVGGAVGYLSYDMIPLIEPSVPSHTKETDMEKCMLFVCRTLIAYDHETKNVHFIQYARLTGEETKNEKMDVFHQNHLELQNLIEKMMDQKNIKELFLSADSYKTPSFETVSSNYEKSAFMADVEKIKSYIKAGDIFQGVLSQKFEVPIKADAFELYRVLRIVNPSPYMYYMKLLDREIVGSSPERLIHVQDGHLEIHPIAGTRKRGADKAEDERLKVELMKDEKEKAEHYMLVDLARNDIGRVAEYGSVSVPEFTKIVSFSHVMHIISVVTGRLKKGVHPVDALMSAFPAGTLTGAPKIRAMQLLQELEPTPRETYGGCIAYIGFDGNIDSCITIRTMSVKNGVASIQAGAGIVADSVPEAEYEESCNKAGALLKTIHIAEDMFHSKEDKADEQISTIVR

SEQ ID NO: 76784 - DNA, 1548 bp, Buchnera aphidicola subsp
  CDS (1)..(1548): transl_table=11
atgtcaaaaaatccatatgaaattgaaataattcaaaaaacagctccttatcatcccgatcctactatgatatttaatcatctttgcgcatcccgaccaggaacattgttactagaaacagctgaggtaaacaaaaaaagagatctagaaagcataatgattattgatagtgcaatgcgtatttcttcagaggacaattcagttaaattaacacccttatctataaatgggacagacattttatcaactttaaaaaaaacgatacctaaaaaaatagaaatatacgaaaaaaataacagtacaatccttgtttttccgaaaattaaaaaaaatattgacgaagataaaaaacttttttccctgtcagtttttgatgcttttagattgatgattagaatatttgaaaatcgagaaaaaaaatcaaaagcgatgttttttggtggattattttcttatgatttaatttcagtttttgaatcattacctaagttaaagggcaatcaaaaatgttcaaatttttgtttttacttagcagaaacattactggttttagatcaccaaaaaaaaacgtgtttaattcaaaatagtttattcagtaaaaatttgaaagaaagaaaaagaattaaaaaaagatcagtagaaatagagagaaaactcaatgaaaagttaaagttaataccaaaaacaaaaattaaagatatcaatttaacttcgaatatgaataattttgaatatggtactataataaaaaaattacaaaaattaattcaaaaaggtgaaatttttcaagttgtaccatcccgaaaattctatctaccatgtccgaacccgttatctgcttatcaaaaactaaaaaaaagcaatccgagcccctatatgttttttatgcaagatcaagattttacattatttggagcatcgccagaaagttcattaaaatacgatgaaaaaacaagaaaaattgaactttatcccattgcaggaaccagacctagggggaaaactgaagacggcaatttagatttagatttagacagcagaatagaacttgagatgagaactaaccataaagaattagcagaacatttaatgcttgttgatctagcacgcaatgatcttgcgcgtatctgcaaaccgggttcgagatatgtttcagatttagtaagggtagatagatattctcacgtaatgcaccttgtatcaagggtgataggtgaacttagagagggattagatgcattgcatgcatacgcttcgtgcatgaacatggggacgttaacaggtgcacccaaggtacgagcaatgcaattgattgctgaacatgagggtgaaaaaagagggagttatggtggcgctataggctattttaccgatttaggtaatttggatacctgtatcacaatacgttcagcgtatgtggaaaaacaagttgccacaattcaagcaggtgctggtattgtttacaattcgataccagaaaatgaagtaaatgaaagtttaaataaagcccaagcagtaattaacgctattaaaaacgcacattattaa

SEQ ID NO: 76785 - protein, 515 aa, Buchnera aphidicola subsp
MSKNPYEIEIIQKTAPYHPDPTMIFNHLCASRPGTLLLETAEVNKKRDLESIMIIDSAMRISSEDNSVKLTPLSINGTDILSTLKKTIPKKIEIYEKNNSTILVFPKIKKNIDEDKKLFSLSVFDAFRLMIRIFENREKKSKAMFFGGLFSYDLISVFESLPKLKGNQKCSNFCFYLAETLLVLDHQKKTCLIQNSLFSKNLKERKRIKKRSVEIERKLNEKLKLIPKTKIKDINLTSNMNNFEYGTIIKKLQKLIQKGEIFQVVPSRKFYLPCPNPLSAYQKLKKSNPSPYMFFMQDQDFTLFGASPESSLKYDEKTRKIELYPIAGTRPRGKTEDGNLDLDLDSRIELEMRTNHKELAEHLMLVDLARNDLARICKPGSRYVSDLVRVDRYSHVMHLVSRVIGELREGLDALHAYASCMNMGTLTGAPKVRAMQLIAEHEGEKRGSYGGAIGYFTDLGNLDTCITIRSAYVEKQVATIQAGAGIVYNSIPENEVNESLNKAQAVINAIKNAHY

SEQ ID NO: 76786 - DNA, 1569 bp, Buchnera aphidicola subsp
  CDS (1)..(1569): transl_table=11
atgaaaaaaaatctaataagtatagatgtatttttaacagagactcgttatcaaccaaatcctactgctatttttaatcaaatatgcaaaaagaaatcagaaacattattactagaatccgcagaaattaataaaaagcatcatttagagagtatgatgattatagatgctgcattaaaaatttcatttttgaatcaaatagttattgtagaggcattaactaaaaatggtgttaatttattgtctgtttttaaatctttattacctaaaaatgttattatactatcagataataatccattagaaataaaatttccaattttatctatgtatttagatgaagatcagcgattacggtcactatctgtatttgatgcaataagatttttaattaaaagtgttaaaaatcttagcgaattcgccccaaaatctatgtttttcggaggtttgttttcgtatgatttaattaccagttttgaaaatttaccaatattaaatactcatcaacactgtcctgatttttgtttttatctttctgaaacattattaatattagatcataaaaataaaacatctatcgttcaagtcacttcatttactaatgataattttgaaaaaaagaggttaaaggatagattagaaattttgaaaaataaattatctaaaaatttgtgccctataaaatttgatacgctaaaaaacatgaaattatggtgtaataaaacagacgaagaatacaataaaattattgttaatgtaaaaaaatttattttacaaggagaaatttttcaagtagtaccatcgagaaaattttatctttcttgtgtgaatccattgtcttcatatgaagttttaaaaaaaaataatcctagtccatatatgttttttatgcaagatcgaaagtttactttgtttggagcttctcctgaaagtgctttaaaatatgatataaattctaggcaaattgaaatatatcctatcgctggtactagacctcgaggtagacgatctgatggatcgttggatttagatttagataatcggatagaattagaaatgcggaccaataataaagagttggctgaacatctaatgttagtagatttagctcgcaatgatttagctaaaatttgcgaaccaggaacacgtcatgtagcagatttaattagagttgatcgttattcgcatgtcatgcatttagtatcaagagttattggaaaattgcgttttgatttagattttttacatgcatatcaagcatgcatgaatatggggacactaactggtgctcctaaagtgcgagctatggaattaatttcagaaattgaaggcgaaaagagggggagttatggaggcgcgataggatatttcactggtttaggtatgttagatacttgtattgtaattcgttctgcgtatgttgaaaataaaatagcaactattcaagctggagctggaatagtattggattctgtacctcaattggaatcagatgagagtaaaaataaagctaaagcagttattcaagctatagctaattcgcattcttgtcagatagagtatttgtga

SEQ ID NO: 76787 - protein, 522 aa, Buchnera aphidicola subsp
MKKNLISIDVFLTETRYQPNPTAIFNQICKKKSETLLLESAEINKKHHLESMMIIDAALKISFLNQIVIVEALTKNGVNLLSVFKSLLPKNVIILSDNNPLEIKFPILSMYLDEDQRLRSLSVFDAIRFLIKSVKNLSEFAPKSMFFGGLFSYDLITSFENLPILNTHQHCPDFCFYLSETLLILDHKNKTSIVQVTSFTNDNFEKKRLKDRLEILKNKLSKNLCPIKFDTLKNMKLWCNKTDEEYNKIIVNVKKFILQGEIFQVVPSRKFYLSCVNPLSSYEVLKKNNPSPYMFFMQDRKFTLFGASPESALKYDINSRQIEIYPIAGTRPRGRRSDGSLDLDLDNRIELEMRTNNKELAEHLMLVDLARNDLAKICEPGTRHVADLIRVDRYSHVMHLVSRVIGKLRFDLDFLHAYQACMNMGTLTGAPKVRAMELISEIEGEKRGSYGGAIGYFTGLGMLDTCIVIRSAYVENKIATIQAGAGIVLDSVPQLESDESKNKAKAVIQAIANSHSCQIEYL

SEQ ID NO: 76788 - DNA, 1560 bp, Buchnera aphidicola subsp
  CDS (1)..(1560): transl_table=11
atggaaaaaaagccatacgagatcaaaatcattcaaaaaaaagcaaagtatcatcctgacccaacaatagtatttaatcatatttgtggatctcaaaaacaaacattgttactagaaacagcagaaattaacaaaaaaaatgatctagaaagtattatgatcatcgatgctgcgctacgaatttcttctgaaagaaatcactcggtacaactaacagcattatctaaaaatggtgaaaatattttatcaattttaaaaagcaatctgaaacaaaaagttcaaatgttcatacaagatacatctattcgtttagaattccctcattttcagaaaaatttagatgaagacaaaaaaattttttcattgtctatatttgacacttttagatttattatgaaatttttcaaaaatcgcaataaagtacagaaagcaatgttttttggtggactattctcctatgatttaatttctaattttgagttattaccaaaattaaaaaaaacacaaaaatgccctcacttttgtttttatttagcagaaacattactgattgtagatcatcaaaaaaaaacatgtttaattcaaaatagtttatttacgaaaaattcccacgaacagatgagagtagaaaaaagagggagagaaatacaaaaaaaacttgaagcatctttaaactctattcctgtaaggcaagaagtaaaaaatagtatgttaactgcaaatatgagtgacgaacaatattgttccataataaaaaaattacaaattttaattcgaaaaggtgagatttttcaagttgtaccatctcgaaaattttttttaccctgttctaatcctttatctgcctatcaaaaattaaaaaaaagcaatcctagtccttatatgttttttatgcaagataaagattttaccttatttggtgcttcaccagaaagttctttaaaatatgatgacacaacaagacaagtagaattatatccgattgctggcactagacccagagggaggaacatggatggcacattaaatctagatttggacagtcgaatcgaacttgaaatgagaaccaatcataaggaactcgccgaacatttaatgttagtagatttagctcgtaacgatttagcacggatctgtgaaccgggatcaagatatgtctcggatttggttagagtcgacaaatatcctcatgtcatgcatttagtctctagagtcgtaggaacgttaaaaccagagttagatgcattacatgcttatgcagcttgcatgaatatgggtacattaactggtgctcctaaaattcgcgctatggaattgattgctgaatatgaaatggaacagaggggcagttacggtggtgccataggatattttactgatttaggaaatttagacacatgcattacaatacgttcggcttatgtagaggacaatattgcaaccattcaatcaggatcaggtattgtttataattccatacccgaagacgaagtcaaagaaggtatcaataaagcgaaacgtgtaataaatgctatccaacacgctcatcatttagtttaa

SEQ ID NO: 76789 - protein, 519 aa, Buchnera aphidicola subsp
MEKKPYEIKIIQKKAKYHPDPTIVFNHICGSQKQTLLLETAEINKKNDLESIMIIDAALRISSERNHSVQLTALSKNGENILSILKSNLKQKVQMFIQDTSIRLEFPHFQKNLDEDKKIFSLSIFDTFRFIMKFFKNRNKVQKAMFFGGLFSYDLISNFELLPKLKKTQKCPHFCFYLAETLLIVDHQKKTCLIQNSLFTKNSHEQMRVEKRGREIQKKLEASLNSIPVRQEVKNSMLTANMSDEQYCSIIKKLQILIRKGEIFQVVPSRKFFLPCSNPLSAYQKLKKSNPSPYMFFMQDKDFTLFGASPESSLKYDDTTRQVELYPIAGTRPRGRNMDGTLNLDLDSRIELEMRTNHKELAEHLMLVDLARNDLARICEPGSRYVSDLVRVDKYPHVMHLVSRVVGTLKPELDALHAYAACMNMGTLTGAPKIRAMELIAEYEMEQRGSYGGAIGYFTDLGNLDTCITIRSAYVEDNIATIQSGSGIVYNSIPEDEVKEGINKAKRVINAIQHAHHLV

SEQ ID NO: 76790 - DNA, 1545 bp, Buchnera aphidicola subsp
  CDS (1)..(1545): transl_table=11
atgaaaaaaaaaccatatcaaattgaaatcattcaaaaaaaagccccctatcaccccgatcctactatgatatttaatcacctttgtgaatcacggtcagcaactcttttattagaaacagcagaggtaaataaaaaaaaagatcttgaaagcataatgattatcgatagcgcgattcgaatttcttcaaaaaaaaatttagttaaattaaaaccactatctataaatggagaggaaattttattagctttaaaaaaaagaatacctaaaaaaatcgaaatatatgaaaaaaataaaaacataattcttgttttccccaaaattgaaaaaaatcttgatgaagataaaaaacttttttcattatcagtttttgatgccttcagatttatgatcaaaatttttgaaaataaagaaaaaaaatcaaaagcaatgtttttcggtgggttattttcttatgatttatctcaattttttgaatcattacctaaattaaaaggtaatcaaaaatgttcaaatttttgtttttatttagcagaaacattacttgttttagaccatcaaaaaaaaacatgtttaattcaaaatagtttatttactaagaatgcaaatgaaaaaaaaagaattaaggaaagatcaatagaaatcgagaaaaaacttaatgaaaaattaaaatcaataccaaaagtaaaaattacagatattaatttaacttcaaatatgaataattttgaatatggttctataataaaaaaattacaaaaattaattcaaaaaggagaaattttccaagttgtaccatctagaaaattttatctaccatgcccgaatccattatccgcttatcaaaaattaaaaaaaagtaatccaagtccatatatgttttttatgcaagataaagatttcacattatttggagcttcaccagaaagttcattgaaatatgacgaaaaaacaaggaaaattgaactttatcctatagcggggacaaggcctagggggagaactgaggacggaaatctagacttagatttagacagtagaatagaacttgaaatgagaactaatcataaagaattagcagaacatttaatgcttgtggatctagcacgtaatgatcttgctcgcatttgcaaaccaggatccaggtatgtttcagatttagtaaaggtagataagtattctcatgttatgcaccttgtatcaaaagttataggtgaacttaaagaaggcttagatgcattacatgcatacgcatcctgcatgaatatgggtacattaacaggcgcaccaaaagttcgagcaatgcaattaattgctgaatacgaaaaagaaaaaagaggaagttacggtggtgctataggttatttcaccgatttaggtaatttagatacgtgtattactatacgttcagcatatgtagaaaacattgctacaattcaagcaggcgcaggtattgtttataattcaatcccagaagatgaagtaaatgaaagtttaaacaaagctcaagcagtaattaatgctataaaaaacgcacattattaa

SEQ ID NO: 76791 - protein, 514 aa, Buchnera aphidicola subsp
MKKKPYQIEIIQKKAPYHPDPTMIFNHLCESRSATLLLETAEVNKKKDLESIMIIDSAIRISSKKNLVKLKPLSINGEEILLALKKRIPKKIEIYEKNKNIILVFPKIEKNLDEDKKLFSLSVFDAFRFMIKIFENKEKKSKAMFFGGLFSYDLSQFFESLPKLKGNQKCSNFCFYLAETLLVLDHQKKTCLIQNSLFTKNANEKKRIKERSIEIEKKLNEKLKSIPKVKITDINLTSNMNNFEYGSIIKKLQKLIQKGEIFQVVPSRKFYLPCPNPLSAYQKLKKSNPSPYMFFMQDKDFTLFGASPESSLKYDEKTRKIELYPIAGTRPRGRTEDGNLDLDLDSRIELEMRTNHKELAEHLMLVDLARNDLARICKPGSRYVSDLVKVDKYSHVMHLVSKVIGELKEGLDALHAYASCMNMGTLTGAPKVRAMQLIAEYEKEKRGSYGGAIGYFTDLGNLDTCITIRSAYVENIATIQAGAGIVYNSIPEDEVNESLNKAQAVINAIKNAHY

SEQ ID NO: 76792 - DNA, 1545 bp, Buchnera aphidicola subsp
  CDS (1)..(1545): transl_table=11
atgaaaaaaagcgcatatccaattgaaataattcaaaaacaggccccctatcatcccgatcctactatgatatttaatcacctttgtgaatcacgatcagaaacattgttactagaaacagctgataataaaaaaaaaagatctagaaagataatgattattgatagtgctatgcgaatttcttcagaacacaatgcagttaaattaacaccactatctataaatggaatggaaattttattagtcttaaaaaaaataatatccaaaaaaattgaaatataccgaagaaaaaaaaatacaattcttatttttcccaacattgaaaaagatcttgacgaagataaaaaacttttttcactatcagtttttgatgcctttagattaatcattaaaacatttgaaaatagagaaaaaaaatcaaaagcaatgtttttcgggggattattttcttacgatttaatttcagtttttgaaacattacctaaattaaaagggaatcaaaaatgttcaaatttttgtttttacctggcagaaacactacttgttttagatcatcaacaaaaaacatgcttaattcaaagcagtttatttactaaaaattcaaacgaaaaaaaaagaattgaggaaagatctgtagaaataaaacaaaaactcaatcaaaagttaaattcaataccgaaaataaaaattaaagatattaatttaacttcaaatatgaataattttgaatatgggtcaataataaaaaaactacaaaaactaatccaaaaaggtgaaatttttcaagttgtaccgtctcgaaaattttatttaccctgtcccaatccgctatctgcttatcaaaaattaaaaaaaagcaacccaagtccttatatgttttttatgcaagatcaagattttacactgtttggagcttcaccagaaagttcattaaaatatgatgaaaaaacaagaaagattgaactatatcctatcgcaggaacaagacccagggggagaactaaggatggaaatttagatttagatttagatagcagaatagaacttgaaatgagaactaatcataaagaattagcagagcacttgatgctcgtagatttagcacgtaacgatcttgctcgtatttgtaaaccgggatctagatacgtgtcggatttagtgagggtagatcgatattctcatgtaatgcacttggtatcaagagttataggtgaacttagagagggtttagacgcattacatgcatatgcttcctgtatgaacatgggaacgctaacaggtgctccaaaggtttgcgcgatgcaattaattgcggaatatgaaaaagaaaaaagaggaagttacggtggtgctataggttattttacagatttaggtaatttagacacgtgtattacaatacgttcagcgtatgtggaaaaaaggtattgctacaatcaagcaggagccggtattgtttataattcaattccagaagatgaagtaaatgaaagtttaaacaaagcgcaagctgtaattaacgctataaaaaacgcacattattaa

SEQ ID NO: 76793 - protein, 514 aa, Buchnera aphidicola subsp
MKKSAYPIEIIQKQAPYHPDPTMIFNHLCESRSETLLLETADNKKKRSRKIMIIDSAMRISSEHNAVKLTPLSINGMEILLVLKKIISKKIEIYRRKKNTILIFPNIEKDLDEDKKLFSLSVFDAFRLIIKTFENREKKSKAMFFGGLFSYDLISVFETLPKLKGNQKCSNFCFYLAETLLVLDHQQKTCLIQSSLFTKNSNEKKRIEERSVEIKQKLNQKLNSIPKIKIKDINLTSNMNNFEYGSIIKKLQKLIQKGEIFQVVPSRKFYLPCPNPLSAYQKLKKSNPSPYMFFMQDQDFTLFGASPESSLKYDEKTRKIELYPIAGTRPRGRTKDGNLDLDLDSRIELEMRTNHKELAEHLMLVDLARNDLARICKPGSRYVSDLVRVDRYSHVMHLVSRVIGELREGLDALHAYASCMNMGTLTGAPKVCAMQLIAEYEKEKRGSYGGAIGYFTDLGNLDTCITIRSAYVEKRYCYNQAGAGIVYNSIPEDEVNESLNKAQAVINAIKNAHY

SEQ ID NO: 76794 - DNA, 1593 bp, Buchnera aphidicola subsp
  CDS (1)..(1593): transl_table=11
atgtgtgaacatcttaagagtatggatgttttaaaagttgaaacattttaccaacccaatccaacagctatttttcatcatatttgtcgtaatagaagtaatacgttacttttagaatcagctgaaattaataataaaaaaaatttagaaagcatgatgattgtagattctgcattacgcatttcagctttaaatatggtagttacattagaagcattaactaaaaacggagaaagtttattacctgtctttaagtctttattaccaaaagaagtgagaattcttagtaatgacaattttttaaaaattaaattcccttcaatcgttaaagatattgatgaagacaagaagttacatgtattgtctatatttgattcgatacgttttttgataaatagtgtaaaaaataataaaggttctaagtctatgttttttggaggattatttgcatatgacttggtttctagttttgagaatttacctaaattaaaaacttctcaatcttgccctgatttttgcttttatttatctgaaatattacttgttttgaaccataaaagaagaacttgttatatacaagcaagtttgttttcttctagcaatcttgaaagaaataaattacaacatagattattagaagtaaagaacaagttgtctcaaaatttttatccattagaatcaacttcattaaaaaaaatgattttaaaatgtaatagaacagatagagaatatgaaaaaatcattaaggaaatgaaaaaatcaataatgattggagaaattttccaagttgtaccgtctagaaaattttatttgccatgtactaattcgttagcggcttatgatgttttaaaaaaaaataatcctagtccatatatgttttttatgcaagattctaattttactttatttggtgcttctccagaaagttctttaaagtatgatacattatcgcggaaaattgaaatttatcctattgcaggaactaggccgcgagccagaaagatagatggatctatagatttggatttagatagtagaatagagttggaaatgcgaacaaatcataaagagttgtctgaacatttaatgttagtggatttggcacgtaatgatttagcaaaaatttgtgatcctggaactcgttatgttgctgatttaacacaagtagataagtattctcatgttatgcatttagtatcgagagttgtgggcaagttaagattagatttagatgtttttcatgcatatcaggcatgcatgaacatgggaacattaagtggtgctccaaaaattagagcgatggagttaatttctaatgcagagaaagagaaaagaggaagttatgggggatctataggatattttactgcgtctggaacattagatatgtgtattattattagatctgcatatgtagaaaataatattgctactattcaagtaggagctggaatagtactagattctatacctcaattagaagtagatgagagtaagaataaagctaaagctgtattacaggcaatttctgaatcacattcttgtcatatagagttaaacatagaaaatgaacgacatacttttgctggataa

SEQ ID NO: 76795 - protein, 530 aa, Buchnera aphidicola subsp
MCEHLKSMDVLKVETFYQPNPTAIFHHICRNRSNTLLLESAEINNKKNLESMMIVDSALRISALNMVVTLEALTKNGESLLPVFKSLLPKEVRILSNDNFLKIKFPSIVKDIDEDKKLHVLSIFDSIRFLINSVKNNKGSKSMFFGGLFAYDLVSSFENLPKLKTSQSCPDFCFYLSEILLVLNHKRRTCYIQASLFSSSNLERNKLQHRLLEVKNKLSQNFYPLESTSLKKMILKCNRTDREYEKIIKEMKKSIMIGEIFQVVPSRKFYLPCTNSLAAYDVLKKNNPSPYMFFMQDSNFTLFGASPESSLKYDTLSRKIEIYPIAGTRPRARKIDGSIDLDLDSRIELEMRTNHKELSEHLMLVDLARNDLAKICDPGTRYVADLTQVDKYSHVMHLVSRVVGKLRLDLDVFHAYQACMNMGTLSGAPKIRAMELISNAEKEKRGSYGGSIGYFTASGTLDMCIIIRSAYVENNIATIQVGAGIVLDSIPQLEVDESKNKAKAVLQAISESHSCHIELNIENERHTFAG

SEQ ID NO: 76796 - DNA, 1581 bp, Buchnera aphidicola subsp
  CDS (1)..(1581): transl_table=11
atgtattatcgttcaataaaaagtgaaataattcaaacaatttgtacatatcatgaagaaccatccctaatttttaataaaatttgccgtacaaaaactgaaacgttattattggaatctgctacggtacatggtaaaaaaaatatagaaagtatgctaatcatagatacagcaattaaaataagttgttttaaaaatattgtagaaatagaagctatttcaaataatggtttatttctattgaatacaattgatttaaaaattttaaaaaaaaaatcaacgaaaataaaaaaaaaaaaatcaaatgtattagaaatacattttcctatttttaattattttactgacgaagataaaaaattgtttttaacatcggtttttgatgctttaagaattattaaaaaatcgattaaaaaccccgaaaagagcaaaatgggagtattttttggtggtattctatcctacgacctcatttcttcttttgagcctattcctagagtttttaattctaaatataatcatccagatttttgtttttatttatctgaaaatttattgatttttgatcataaaaaaaaaaaatgtaaattacaaacaaatatatttactgataatgaagaagaaaaattaaatatcttaaaaagaataaaaattatttataatcaaataaaagaaataaattcaaaaaaaaaaaataatagaattaatacttttaatgattttaaaacaaaaaataaaaaatgggttgattgtaaaaatgattcaaaagtctataagaataaagttaaaaaaatgaaacaaatgatactcaatggagaagtctttcagattgttatttctagaaaattttttttaccatgtccttacccattagaatcttatatatttcttaaaaaaaataatcctagtccatatatgttttttatgcaggatagacattttgttctttttggagcttcccccgaaagttctctaaaattttcgtctataactagaaaaatagaaattcatcctatagcaggaacaagacccagagctttttcttctattaaaaaaattgatataaacgaagacaataaaatggaattagctatgagaattaattcaaaagaattagctgaacattgtatgttggtcgatcttgctaggaatgatctttctcggatttgtttacctggttctcgtgttgtttctgatttaatgaaagtagttaaatattctcatgttatgcatttagtttctaaagttgaaggggtattaagaaatgatttagatatttttcatgcataccaatgttgtatgaatatgggtactttaacaggtgcgcctaaaatacgtgcaatgcaaattattgcagaagagggggagataagagaatgttacggaggagcaattggatattttacagggaagggggatttagatacatgtattgtaattagatctgcttatgtaagaaatggaatagcttgtgttcaagctggtgcaggaattgttttagattctatagctgacgaagaaaacgaagaatgtaaaaataaagcaatggctgtgattaatgctataaataaaactctttaa

SEQ ID NO: 76797 - protein, 526 aa, Buchnera aphidicola subsp
MYYRSIKSEIIQTICTYHEEPSLIFNKICRTKTETLLLESATVHGKKNIESMLIIDTAIKISCFKNIVEIEAISNNGLFLLNTIDLKILKKKSTKIKKKKSNVLEIHFPIFNYFTDEDKKLFLTSVFDALRIIKKSIKNPEKSKMGVFFGGILSYDLISSFEPIPRVFNSKYNHPDFCFYLSENLLIFDHKKKKCKLQTNIFTDNEEEKLNILKRIKIIYNQIKEINSKKKNNRINTFNDFKTKNKKWVDCKNDSKVYKNKVKKMKQMILNGEVFQIVISRKFFLPCPYPLESYIFLKKNNPSPYMFFMQDRHFVLFGASPESSLKFSSITRKIEIHPIAGTRPRAFSSIKKIDINEDNKMELAMRINSKELAEHCMLVDLARNDLSRICLPGSRVVSDLMKVVKYSHVMHLVSKVEGVLRNDLDIFHAYQCCMNMGTLTGAPKIRAMQIIAEEGEIRECYGGAIGYFTGKGDLDTCIVIRSAYVRNGIACVQAGAGIVLDSIADEENEECKNKAMAVINAINKTL

SEQ ID NO: 76798 - DNA, 1485 bp, Clostridium thermocellum
  CDS (1)..(1485): transl_table=11
atgttttatccaaccctggacgaagtcaaaataatggcaaaagattataatatcatacctgtcacaatggaagtatatgccgacatggaaacccctataagcctttttaaaaggtttgaggaaagcagttgctgtttccttttggagagcgttgagggcggtgaaaaatgggcccggtactccatcatcggaaaaaatccgtttcttgttgtggaaagctacaaaaacaaaaccattataagggagaggaacggttctcaaagggaagttgaaggaaatcctgttgaaataataaagggcattatggggaagtttaaaggtgccaaccttccgaatcttccgagattcaacgggggagcggtgggatattttgggtatgacctcatacgacactatgaaaatcttcccaatgtccccgaagatgacatgggtcttccggaatgccatttcatgtttaccgacgaagtgctggtgtatgaccatctaaagcagaaaattcatataattgttaatttgcatgtcaacggcaacattgaacgggcctatataagcgcggttgaccggataaaaaccatacacagggagattcttgacaccaggtggaaaaccgctgacaactctgttctaagttacaataaaaagaaaaatgaacttgcggtaaccagcaatatttcaaaagaggatttctgccggaatgtgttgaaggcaaagcagtatataagggacggagacatattccaggtggttttgtcgcaacgcttgtgtgttgagacaaatgaaaatccttttaacatataccgcgccttaagggttataaatccttctccatatatgtattatcttaaatttggcggctacagaataataggttcttcccccgagatgctggtcagggttgaaaatggaattgtggaaacctgtccgattgcaggaacgcgaaagagaggcaggacaaaagaagaggatgaggctttggaaaaagagcttctttccgatgagaaagaaatagccgagcatgtgatgctggtggacctgggcagaaacgatatcggaagagtatcgaaatttggtaccgtagcggtaaagaaccttatgcacattgagagatattcccatgtaatgcatgtggtaacaaacgtacagggagagattcgggaggataagactccttttgacgcccttatgtccattcttcctgccggtaccctttccggagcgccaaaggtcagggctatggagataatagacgagcttgagaccgtaaaaagaggtccctacggcggtgcgatcgggtatcttagctttaacggcaatctcgacagctgcataaccataaggacaattatattaaaggacggaaaggcttatgttcaggccggagcgggcatagtcgcggattcggtcccggaaagggagtatgaagagtgctacaacaaagcaatggcacttcttaaagccatagaagaggcaggtgaaataagatga

SEQ ID NO: 76799 - protein, 494 aa, Clostridium thermocellum
MFYPTLDEVKIMAKDYNIIPVTMEVYADMETPISLFKRFEESSCCFLLESVEGGEKWARYSIIGKNPFLVVESYKNKTIIRERNGSQREVEGNPVEIIKGIMGKFKGANLPNLPRFNGGAVGYFGYDLIRHYENLPNVPEDDMGLPECHFMFTDEVLVYDHLKQKIHIIVNLHVNGNIERAYISAVDRIKTIHREILDTRWKTADNSVLSYNKKKNELAVTSNISKEDFCRNVLKAKQYIRDGDIFQVVLSQRLCVETNENPFNIYRALRVINPSPYMYYLKFGGYRIIGSSPEMLVRVENGIVETCPIAGTRKRGRTKEEDEALEKELLSDEKEIAEHVMLVDLGRNDIGRVSKFGTVAVKNLMHIERYSHVMHVVTNVQGEIREDKTPFDALMSILPAGTLSGAPKVRAMEIIDELETVKRGPYGGAIGYLSFNGNLDSCITIRTIILKDGKAYVQAGAGIVADSVPEREYEECYNKAMALLKAIEEAGEIR

SEQ ID NO: 76800 - DNA, 1557 bp, Haemophilus influenzae
  CDS (1)..(1557): transl_table=11
atgaacattcaaactcaagcctttattgcggtgacagctcaacccattccctattatgctgacaccaccgctatttttaatacactttgtcaatccaattcaaattctcttctactcgactctgccgaaatcggtagtaaaaacagtttacaaagccttatcttagtcaatgctgcggttaaaataacgtgcttaggtcacaacgtcacatttaaagctttaaataataatggaaaacaagttttaaaagaaattcatccaaaattaaccgcacttggaaaagtaagtgcggtcaattttgaagacgaattttctgtacaatttttgccacttgataatcaacttgatgaagatagtaaattacagtctgccactatttttgatgggttgcgtgttatttctagtctttatcaacatagccaaacgcctattttcttaggcggattatttgcttacgatctcgtcgcaaattttattccaatggatggcattacattaaaaaatgatggtatcaactgccctgattacagtttctatcttgccgaacacctcattactatcgaccatcaaaatcaacaagcaacactgaaaagtttctgttttgctcaagaagaacaagttaatattgcgaaaacctccctttccatcgcacaaaaactaaaaaatattgatcacgttctttctattaaagcggcaagtgatgaagttaaaacaaactttgacgatcctgaatttactggtatcgtaaaagccttaaaacaccatattaatattggagatgttttccaaattgtgccttctcgccgtttctcccttgcttgcccgaatacattagccagttacgctcaactcaaacaaaataatccaagcccttatatgttctatatgaacgatgaagactttattttgtttggtgcatcgccagaaagtgcgctgaaatacgcgccagaaaatcgtcagctagaaatttaccctatcgcaggttcacgccctcgtggttttgatgctcacggcaacattgatcctgaattggatgcgcgtttagaactagaacttcgccttgatcataaagaacaagcagaacatttaatgttagttgatttagcgcgtaacgacattgctcgagtttgccaaagtggcacccgtaaagtggcagaattaatgcaagtggatcgctattctcacatcatgcatttagtgtctcgtgtggtgggtaaattacgccctgaattagatgcacttcacgcctatcaagcctgtatgaatatgggcacattaactggtgcgcctaaaattaaagcgatgcagcttatttatcaatttgagcagcaaaaacgccatagttacggtggtgcagtgggttatctcacgtccgatggacattttgatacctgtatcgtgatccgttctgcttttgtacaaaatggaatggcccatgtacaagcaggttgcggcgaagtgttggattctgatccacaaatggaagctgatgaaacacgccacaaagccgcggctgtcttaaaagcaattcgtcaagttaatacacaagcaaaataa

SEQ ID NO: 76801 - protein, 518 aa, Haemophilus influenzae
MNIQTQAFIAVTAQPIPYYADTTAIFNTLCQSNSNSLLLDSAEIGSKNSLQSLILVNAAVKITCLGHNVTFKALNNNGKQVLKEIHPKLTALGKVSAVNFEDEFSVQFLPLDNQLDEDSKLQSATIFDGLRVISSLYQHSQTPIFLGGLFAYDLVANFIPMDGITLKNDGINCPDYSFYLAEHLITIDHQNQQATLKSFCFAQEEQVNIAKTSLSIAQKLKNIDHVLSIKAASDEVKTNFDDPEFTGIVKALKHHINIGDVFQIVPSRRFSLACPNTLASYAQLKQNNPSPYMFYMNDEDFILFGASPESALKYAPENRQLEIYPIAGSRPRGFDAHGNIDPELDARLELELRLDHKEQAEHLMLVDLARNDIARVCQSGTRKVAELMQVDRYSHIMHLVSRVVGKLRPELDALHAYQACMNMGTLTGAPKIKAMQLIYQFEQQKRHSYGGAVGYLTSDGHFDTCIVIRSAFVQNGMAHVQAGCGEVLDSDPQMEADETRHKAAAVLKAIRQVNTQAK

SEQ ID NO: 76802 - DNA, 1572 bp, Halobacterium volcanii
  CDS (1)..(1572): transl_table=11
gtgacggcccccgacaccgaccgcgaggagttcgtctccctcgccggcgacgcggacggaccggtcgtgacccacctcgtggccgacctcgacgtgtccgtggacccgctggccgcgtacacgacgctcgcggaccgcagcgactacggcttcctcctggagagcgccgagaaggtctcctcgagcaacccgcaggcgcgttctccgcgcccgcgcacggccgccgactcccacgcgcgcttctcgttcgtcggctacgaccccgaagcggtcgtgacggtcggtcccgacggcgtcgacgtgaccgacctcggcggccccgccgcggagttcgtcggcgcgggcgacggcgacgtgctcgattccctgcgcggcgcgctccccgacctcccgcgcgtcaacttccccgagacggacgcagacgtcaccggcgggctggtcggcttcctcgcctacgaggccgtctacgacctctggctcgacgaggtcggccgcgagcgccccgacacggacgacccggacgccgagttcgtcctcacgacccggaccctctcgttcgaccaccgcgaggacgccgtccgcctcgtctgtacccccgtcgtctcgcccgacgacgaccccggcgaggtgtacgacggcgtcgtcgccgaggccgagcgcgtcgcggaaaagctccgcgcggcggacgaccccgcccccggcggcttcgagcggaccggcgaggacgccggctcccgcgaggagtacgaggccgcggtcaggaagacgaaagaacacgtccgcgacggcgacatctatcagggcgtcatctcgcgcacccggaagctccgcgggcaggtcgacccggtcggtctgtacgcctcgctgcgcgaggtgaacccctcgccgtacatgttcctgctccggcacggcgaccggcgcgtcgtcggcgcgagccccgaaacgctcgtctccgtcaggggcgaccgcgtcgtcgtcaaccccatcgcggggacgtgccagcgcgggtccggcccggttgaggaccgccgcctcgccggcgaactcctcgcggacgcgaaagagcgcgccgagcacacgatgctcgtcgacctcggccgcaacgacgtgcgccgggtctcgacgcccgggagcgtccgcgtcgaggacttcatgagcatcatcaagtacagccacgtccagcacatcgaatcgaccgtctcggggacgctcgacgccgacgccgacgccttcgacgccacgcgagcgacgttccccgcggggacgctcaccggcgcgccgaaggtccgcgcgatggagattatcgacgacctcgaagccgagccccgtggcgtctacggcggcggcgtcggctactactcgtggaccggcgacgccgacgtggcaatcgtcatccgaaccgcgacggtcgactccggcggcgcggacgacgccatcaccgtccgcgcgggtgccggcatcgtcgccgactccgacccgaccgcggagtacgaggagacggaacagaagatgggcggggtgctcgacgccgtccgccgcatcgagtacgggaccgaggaggcgtcgcaatga

SEQ ID NO: 76803 - protein, 523 aa, Halobacterium volcanii
MTAPDTDREEFVSLAGDADGPVVTHLVADLDVSVDPLAAYTTLADRSDYGFLLESAEKVSSSNPQARSPRPRTAADSHARFSFVGYDPEAVVTVGPDGVDVTDLGGPAAEFVGAGDGDVLDSLRGALPDLPRVNFPETDADVTGGLVGFLAYEAVYDLWLDEVGRERPDTDDPDAEFVLTTRTLSFDHREDAVRLVCTPVVSPDDDPGEVYDGVVAEAERVAEKLRAADDPAPGGFERTGEDAGSREEYEAAVRKTKEHVRDGDIYQGVISRTRKLRGQVDPVGLYASLREVNPSPYMFLLRHGDRRVVGASPETLVSVRGDRVVVNPIAGTCQRGSGPVEDRRLAGELLADAKERAEHTMLVDLGRNDVRRVSTPGSVRVEDFMSIIKYSHVQHIESTVSGTLDADADAFDATRATFPAGTLTGAPKVRAMEIIDDLEAEPRGVYGGGVGYYSWTGDADVAIVIRTATVDSGGADDAITVRAGAGIVADSDPTAEYEETEQKMGGVLDAVRRIEYGTEEASQ

SEQ ID NO: 76804 - DNA, 1503 bp, Helicobacter pylori J99
  CDS (1)..(1503): transl_table=11
atgattagcctgatagaaaaagccccttatattccttaccccctagctctttatgaaaagttagagcaacggcacaccttgctttttgaaagcgctgagattgagagcaaagcgcacaccaaatcccttttaatggctaaggcttgtttgaagctagtttgcaaccacaatatcgtaaccatcactagcctaacgcctaatggcggggcgtttttacaaacattgagcgcgtttttcaaaacgcctatacaagacaatgccctaaccttaacctacaccaaagataaaaaaatccaagatgagtttttaaaactctttgagcctagcccttttgacgctttaagggggctttttaaaagcgttaaaacaagacccaaacacccctttacgctctttagcgcgggcgttttttcttttgaaatgctcaatttttttgaagatttgccccacttaaaagcaaacgacaacaccgcaaatgactttattttttatgtcgcgcaaaatttgatcatcatagatcataaagaaaaaagcgctgaaatcttgggggcatgttttgatgaacgctttaaaacagagatagctaaagaattacaggatttaaaagaattggttaaaaacattaaaagcgattttatccctaaaaaagctaagcaaagcatagaagttagcgttagttgtgatgatagcgagtttgaaaaaaaggtgttattcttacaagaagaaatcaaaaagggcgaaatctttcaagcggtgttgtcgcgcagtttttatatggagtgcttggagggtttgagcgcgtattatcacttaaaactctctaaccctagcccctatatgttctatatcaaagacagcgattttatcctttttggggcaagccctgagagcgctttaaaatacaacgccctaacgaatacggctgaaatttatcccattgctggcactcgtttaaggggtaaggacaagcaagggaatattgattacgatttagatagtaaaatggaatttgatttgcaacacgactataaagaaagggctgaacacatcatgttagtggatttagccagaaacgacatggccagggtttcaaaaaaacgctattgcgacaagcttttaaaagtggataagtattccaatgtcatgcatttagtctcaagggttgtgggggaattgaaaaaagggtgcgatagtttgcatgcttacaggagttttatgaacgccggcacgctcagcggagcgcctaaaatctccgcgatcaaattgatttaccaattagaaaaccaaaggagaggttcttatggggggagcgtggggtatttaaacagcgagggctctatggattcttgcatcactatccgttcatgttttgtcaaaaacaatagagcagtgatccaagcaggagccggtattgtgttagacagcgtgccacaaaatgaagcgaatgaaacaagagccaaagtgcaagcccttattgatgcgatcaggaaaaccatctcatga

SEQ ID NO: 76805 - protein, 500 aa, Helicobacter pylori J99
MISLIEKAPYIPYPLALYEKLEQRHTLLFESAEIESKAHTKSLLMAKACLKLVCNHNIVTITSLTPNGGAFLQTLSAFFKTPIQDNALTLTYTKDKKIQDEFLKLFEPSPFDALRGLFKSVKTRPKHPFTLFSAGVFSFEMLNFFEDLPHLKANDNTANDFIFYVAQNLIIIDHKEKSAEILGACFDERFKTEIAKELQDLKELVKNIKSDFIPKKAKQSIEVSVSCDDSEFEKKVLFLQEEIKKGEIFQAVLSRSFYMECLEGLSAYYHLKLSNPSPYMFYIKDSDFILFGASPESALKYNALTNTAEIYPIAGTRLRGKDKQGNIDYDLDSKMEFDLQHDYKERAEHIMLVDLARNDMARVSKKRYCDKLLKVDKYSNVMHLVSRVVGELKKGCDSLHAYRSFMNAGTLSGAPKISAIKLIYQLENQRRGSYGGSVGYLNSEGSMDSCITIRSCFVKNNRAVIQAGAGIVLDSVPQNEANETRAKVQALIDAIRKTIS

SEQ ID NO: 76806 - DNA, 1425 bp, Methanococcus jannaschii
  CDS (1)..(1425): transl_table=11
atgataattaaaaaaataaaaatggatgtttgtccattagatgtttatgagcaaattaggggagagaatacatttttgttagaatcagctgaaggagttccaaaggtggcaagatactcaatcttaggaaaagctgaaggaaaagtaatatttaaaaatggaaagctgaaagttgaaagctttacagaatttggagataaagctaaagatttagaagggaaatacgaatgtcccttagacgctttaagagaggttagaaatgaatatcttaaatacattgatatatctaacattgagccaataccaagatttaaggggggtttagttgggtatttaagctatgatattatcagatactggatagatttatcaaatatcaacccaaagccaataaatgatttaaaatttccagatgcagagttctttattgttaaggactttatttcatttgatttaaaagagaaagtaattaatttaatagcagaggatgatgaaggtattagagaacttgaaagaattataaaaaatgcaaaaattggaaataatgacaataaagaagaaaaaactacagaaaataaggacttaaaaataaaatctaacatgagcaaagaggaatttattgaggcggttaaaaaagctaaggaatacatttttgctggagatatcttccaagtggttttatcaagaaggatagagatagatttagataacttagaccacttgaaaatttacaaaaaagttagagagataaatccttccccatacatgtattacttagattttggagacagaaagattataggttcatcaccagagattttggtaaggacagattataaagataataaaaggctggttataacaagacctatagctggaacaattaggaggggtaagacagaagaagaagataaagagttagagaaaaagctgttaagtgatgagaaagagagggcagagcatgttatgcttgtagatttagcaaggaatgatattggaaaaatatcaaaatttggaactgttgaagttactgatttcatgattattgagaaatactcccatgttcagcatatagtaagtaatgttgttggggagttaaaagacaattatgattcattcttagctgtaaaagctaccttcccagcgggaactttaagtggagcaccaaaggtcagagcgatggagattattgaagagcttgaaaaaacttggagaggaccttatggtgggggagttggctatttcggatgggatgatttaatggatttggctataacaatcagaacctttgtaatctcgaaaaataagggatatattcaagttggtgctggaattgtagctgattcaatcccagaaaatgaatgggaagagacagagagaaagggaatggctaacgttaagacgattgagagtttattgaaatga

SEQ ID NO: 76807 - protein, 474 aa, Methanococcus jannaschii
MIIKKIKMDVCPLDVYEQIRGENTFLLESAEGVPKVARYSILGKAEGKVIFKNGKLKVESFTEFGDKAKDLEGKYECPLDALREVRNEYLKYIDISNIEPIPRFKGGLVGYLSYDIIRYWIDLSNINPKPINDLKFPDAEFFIVKDFISFDLKEKVINLIAEDDEGIRELERIIKNAKIGNNDNKEEKTTENKDLKIKSNMSKEEFIEAVKKAKEYIFAGDIFQVVLSRRIEIDLDNLDHLKIYKKVREINPSPYMYYLDFGDRKIIGSSPEILVRTDYKDNKRLVITRPIAGTIRRGKTEEEDKELEKKLLSDEKERAEHVMLVDLARNDIGKISKFGTVEVTDFMIIEKYSHVQHIVSNVVGELKDNYDSFLAVKATFPAGTLSGAPKVRAMEIIEELEKTWRGPYGGGVGYFGWDDLMDLAITIRTFVISKNKGYIQVGAGIVADSIPENEWEETERKGMANVKTIESLLK

SEQ ID NO: 76808 - DNA, 1395 bp, Methanobacterium thermoautotrophicum
  CDS (1)..(1395): transl_table=11
gtgaatgtttttggcattacagaactgaaaaacccggtaaaggaaaagatagaatttaaagaaccctttgaactattcaaaagtatttattctgaatacgactcatcattccttctggagtcaatggaaagcgacacgggtcttgcaagatactcattcatgggattcgagccacagatgataataagggcccgttcaggttttatagaagttgaatacgagggatcaagggaggagtttgatacagaaaacccctttgaattcctgaggcagttcacaagacccgctggaaaatccaggggcttctgtgggggccttgttggctacatatcctatcaggctgcaaggttctttgacagtatcaacctcagccccggaaacttcccggactttgaattcggactcttccttgacggtatcatgttcaaccacctcacaggagaatgcagttacatcagcctcaaggagaacagactcccggaaatatcagaactgctgcgcgaggaaaccccaacagggcaccttaaatacaggagcatggggaccctgttctcaaggaggagataccttggaatggtggaggaggcaagggagaggatagctgagggcgaaatattccaggcagtcctctcaaatgccactgactacaggctccgtggtgacaggcttgccctctacgaagccctcaggagggttaacccctccccctacatgtaccacctgaaacttggcagcagggagataacaggttcaagtcctgaaatgcttgtccgtgtggaggataaacagattgaaaccttcccaatcgcaggaaccaggccaagggggaaaacaccccatgaggatgagagaatagcggcggaactgctgtcagatgagaaggaacttgcagagcacctcatgctcgttgaccttgcaaggaacgacctcgggagaatatctgagtttggcacggtccaggtaccggagtacatgaccataaggaggttctcccatgttcagcacatcctctcccatgtaaccggcagactcaggaagggcatggatgcccttgatgcccttggcgcggtcttcccggcaggtacagtgagcggggcgcccaaaataagggctatggaaataatagagtcacttgagggggtgccgaggaatgcctacgccggtgccctgggctatctctcactgaacggtaacgcagacttcgcaataaccataagatccatggtcgctgagggagcgtatggaagaatacaggcaggggcaggtatagtacatgactccgtacctgagagggaatacgtggagtgccagaacaaggccatggcggtccttaaatcaatggaactggcaggtgatggctttgattctgatgaaccatttatcgccaggaggtaa

SEQ ID NO: 76809 - protein, 464 aa, Methanobacterium thermoautotrophicum
MNVFGITELKNPVKEKIEFKEPFELFKSIYSEYDSSFLLESMESDTGLARYSFMGFEPQMIIRARSGFIEVEYEGSREEFDTENPFEFLRQFTRPAGKSRGFCGGLVGYISYQAARFFDSINLSPGNFPDFEFGLFLDGIMFNHLTGECSYISLKENRLPEISELLREETPTGHLKYRSMGTLFSRRRYLGMVEEARERIAEGEIFQAVLSNATDYRLRGDRLALYEALRRVNPSPYMYHLKLGSREITGSSPEMLVRVEDKQIETFPIAGTRPRGKTPHEDERIAAELLSDEKELAEHLMLVDLARNDLGRISEFGTVQVPEYMTIRRFSHVQHILSHVTGRLRKGMDALDALGAVFPAGTVSGAPKIRAMEIIESLEGVPRNAYAGALGYLSLNGNADFAITIRSMVAEGAYGRIQAGAGIVHDSVPEREYVECQNKAMAVLKSMELAGDGFDSDEPFIARR

SEQ ID NO: 76810 - DNA, 1389 bp, Methanobacterium thermoautotrophicum
  CDS (1)..(1389): transl_table=11
atgggagtgaatgtttttaaaattataaacctggaaaaacccagaaaagaaaaactggaattccgagaaccctttgaagtattcaaaagtatctattctgaatatgagtcttcattccttcttgagtccatggaaagtgacactggacttgcaaggtactccttcattggatttgaacctgagatgataataagggcccgtgaaggggtcattgagattgatgatggcgattccagggaggagtttgattcaaaaaacccattcgaggacctcaggggattcctgaagatggaaaaaaactccggaggattctgcgggggactcgtgggttacatatcctatcaggccgcaaggttctttgacacaatcaggctcagtgaaggtgatttccccgacttcgaatttggactcttccttgatggtatcatgttcaaccacctgacaggggaatgcagctacatcagccgccacggcaacagactacctgatatatcccctctccttggggatgaggtccccacagggaccctgggatacaggagggaaagaacactcctctcaaagaggaggtacatggacatggtccttgaggccaaggagagaataagggagggtgaaatatttcaggcagtgctctccagtgccacagattacaggctgaggggagacaggctcgcattctatgaatccctcaggaggataaacccctcaccatacatgtaccaccttaaactgggtgaacgggagataaccggctcaagccccgagatgcttgtcagggttgaagatagaaggattgaaacatttcccattgcaggaacacgccctcgtggaaggacagaagaggaggacggggtgatagcatctgatcttttatctgatgaaaaggaacaacttgcagagcacctcatgctggttgacctggcccggaacgatatagggcgggtatcggagttcggatcggtggaggtacctgaatacatgaccataaagaggttctcccatgtgcagcacatactctcccatgtaacaggtaaactgagggatggaatggacgcagttgatgcactgggagctgtttttcctgcaggcacagtgagcggcgcaccaaagataagggcaatggagataatagagtcccttgaaggtgttccaagaaatgcctatgcaggcgcactaggctacctctcactcaatggaaacgcggacttcgcaataaccataaggtcaatggtatgccaggggaaaacagggagaatccaggcgggagcaggaatagtgcatgactccatccctgagatggaatatctggagtgccagaataaggcgagggcccttctaaaatcaatggagatggcaggtgaacaagttgatccttataatcgataa

SEQ ID NO: 76811 - protein, 462 aa, Methanobacterium thermoautotrophicum
MGVNVFKIINLEKPRKEKLEFREPFEVFKSIYSEYESSFLLESMESDTGLARYSFIGFEPEMIIRAREGVIEIDDGDSREEFDSKNPFEDLRGFLKMEKNSGGFCGGLVGYISYQAARFFDTIRLSEGDFPDFEFGLFLDGIMFNHLTGECSYISRHGNRLPDISPLLGDEVPTGTLGYRRERTLLSKRRYMDMVLEAKERIREGEIFQAVLSSATDYRLRGDRLAFYESLRRINPSPYMYHLKLGEREITGSSPEMLVRVEDRRIETFPIAGTRPRGRTEEEDGVIASDLLSDEKEQLAEHLMLVDLARNDIGRVSEFGSVEVPEYMTIKRFSHVQHILSHVTGKLRDGMDAVDALGAVFPAGTVSGAPKIRAMEIIESLEGVPRNAYAGALGYLSLNGNADFAITIRSMVCQGKTGRIQAGAGIVHDSIPEMEYLECQNKARALLKSMEMAGEQVDPYNR

SEQ ID NO: 76812 - DNA, 1551 bp, Mycobacterium bovis
  CDS (1)..(1551): transl_table=11
gtgcacgccgacctcgcagccaccacctcgcgtgaggatttccgcctcctggcggccgagcaccgggtggttccggtgactcgcaaggtcttggccgacagcgagacgccgctgtcggcctaccgcaagctcgccgccaatcgcccgggtacgttcctgctggagtcggccgagaacggccggtcgtggtcgcgatggtcgtttatcggtgcgggggcgccaacggcgttgaccgtgcgtgaggggcaagcggtatggctgggtgccgtgcccaaggacgctcccactggcggagacccgctgcgggcgctgcaggtgaccttggagctgctggctacggcggatcgtcagtccgagccgggtcttccgccgctgtcgggtggcatggtcggtttcttcgcctatgacatggtgcgacggctggaacgattgccggaacgggccgtcgatgacctctgcctgccggacatgctgctgttgctggccaccgatgtggcggcggtcgatcaccacgagggcaccatcacgttgatcgccaacgccgtgaactggaacggcaccgacgagcgggtcgactgggcctacgacgacgcggtcgctcggctggacgtgatgaccgcagcgctcggccaaccactaccgtcaaccgtggccaccttcagccgacccgagccgcgccaccgtgcgcaacgcaccgtcgaagaatatggtgcgatcgtcgaatacttggtggatcagattgcagccggtgaagcgttccaggtggtgccctcgcagcgcttcgagatggacaccgatgtcgatcccatcgacgtgtaccgaattctgcgggtaaccaacccaagtccctacatgtatctactgcaggtgccgaatagtgatggtgcagtggacttttcgattgttggatccagtccggaggcgctggtaacggtccacgaaggctgggcgacgacgcatccgatcgccggaacccggtggcgcggaaggacagacgacgaggacgtgcttctggaaaaagagctgctggcggacgacaaagaacgtgccgagcatctgatgctggtcgacctcggccgaaacgacctgggtcgggtctgcacgccgggcactgttcgggtcgaggattacagccacatcgagcggtacagccacgtgatgcacctggtgtccacggtgaccgggaagctcggcgaagggcgcaccgcgctggacgcggtgaccgcctgctttccggccggcacgctgtcgggcgcgccgaaggtgcgggcgatggagctgatcgaagaggtggagaagacacgccgcggcctttacggcggtgtcgtcggttaccttgacttcgccggcaacgctgacttcgccatcgccatccgcaccgcgctgatgcgtaacggcacggcttatgtccaggcaggcggtggtgtggtggccgactccaacggatcctacgaatacaacgaggcgaggaacaaggctcgggctgtgctcaacgcgatcgctgccgccgagacgctggccgctccgggcgcgaaccgcagtggctgctaa

SEQ ID NO: 76813 - protein, 516 aa, Mycobacterium bovis
MHADLAATTSREDFRLLAAEHRVVPVTRKVLADSETPLSAYRKLAANRPGTFLLESAENGRSWSRWSFIGAGAPTALTVREGQAVWLGAVPKDAPTGGDPLRALQVTLELLATADRQSEPGLPPLSGGMVGFFAYDMVRRLERLPERAVDDLCLPDMLLLLATDVAAVDHHEGTITLIANAVNWNGTDERVDWAYDDAVARLDVMTAALGQPLPSTVATFSRPEPRHRAQRTVEEYGAIVEYLVDQIAAGEAFQVVPSQRFEMDTDVDPIDVYRILRVTNPSPYMYLLQVPNSDGAVDFSIVGSSPEALVTVHEGWATTHPIAGTRWRGRTDDEDVLLEKELLADDKERAEHLMLVDLGRNDLGRVCTPGTVRVEDYSHIERYSHVMHLVSTVTGKLGEGRTALDAVTACFPAGTLSGAPKVRAMELIEEVEKTRRGLYGGVVGYLDFAGNADFAIAIRTALMRNGTAYVQAGGGVVADSNGSYEYNEARNKARAVLNAIAAAETLAAPGANRSGC

SEQ ID NO: 76814 - DNA, 1590 bp, Mycobacterium leprae
  CDS (1)..(1590): transl_table=11
gtgcacgcccacctcgccgccaccacgtcacgtgaggactttcgccagctagctgtcgatcatcgggtggttccagtgacccgcaaagtcttggccgatagcgaaacgccgctatcggcataccggaagctcgccgccaatcgtccgagcaccttcctgctagagtcggccgagaacggcagatcctggtcgcagtggtcgttcattggcgtgggtgccccatcggctttgacaattcgtgacggcgaagcggtgtggctgggcactgtaccgcaggacgcgcccactggcggtgaccccctgcatgtcctgcaggccacgctcgagctacttgccaccgcggcaatgcccgggttgccaccgctatcgagtggtatggtgggcttcttcgcctacgacatggtgcggcgcctggagcgcctgcctgaactggccttaaatgatttgcagttgcccgatatgctgctgctgttggccaccgatgtagcggccgttgaccaccacgagggcacgatcaccctgattgccaacgctgtgaactggaacggtaccgatgagcgggtagatcaggcctacgacgatgcgatcgcgcgcttggacgtaatgaccgcagcactgggccagccgctgccatcgaccattgccacgttcagccggcccgaccctcggcgccgagcgcaatgcaccatcgaggaatacggtgcgatcgtcgaccacctcgtcgaccagatcgcggccggtgaggcctttcaagtggtgccctcgcagcgcttcgaggtggataccgatgtcgatccgatcgatgtctatcgcatgctgcgggtcaccaaccctagcccttacatgtatctgctgcatgtgcctaatagcgatggagcaactggcttttcgatcgttggatccagcccggaggcgttggtgaccgtcaaggacggtcgggtgacgacgcatccgatcgctggaactcgctggcgaggccagaccgaagaagaggatcagctactggaaaaagagttgctcgccgacgagaaggaacgagcagagcacttaatgcttgtcgatctcggtcgcaacgaccttggtcgggtctgtacgccaggcaccgtacgtgtcgaggattacagccacgttgaacgttacagtcacgtaatgcacatggtgtctacggtgaccgggctgctcggtgaaggccgcaccgccctggacgcggtgaccgcctgcttccctgccggcacgctgtcgggtgccccgaaggtgcggtccatggagctaatcgaggaagtggagaagacgcgccgcggcctttatggtggcgtggtcggttacctcgacttcgctggtaacgctgacttcgcgatagcaatccgtacagcgctgatgcgtgacggcatcgcgtatgtccaagccggcggtggggtagtggccgactccaacgggccctacgaatacatcgaggcgagtaacaaggctcgagcggtgttgaacgcgatcgccgccgccgagacgttgacctctttggacttcggtgttgccctcgcccctggccgcgtggcggccaggggcgaggcgggcaatcaagggaggctgtga

SEQ ID NO: 76815 - protein, 529 aa, Mycobacterium leprae
MHAHLAATTSREDFRQLAVDHRVVPVTRKVLADSETPLSAYRKLAANRPSTFLLESAENGRSWSQWSFIGVGAPSALTIRDGEAVWLGTVPQDAPTGGDPLHVLQATLELLATAAMPGLPPLSSGMVGFFAYDMVRRLERLPELALNDLQLPDMLLLLATDVAAVDHHEGTITLIANAVNWNGTDERVDQAYDDAIARLDVMTAALGQPLPSTIATFSRPDPRRRAQCTIEEYGAIVDHLVDQIAAGEAFQVVPSQRFEVDTDVDPIDVYRMLRVTNPSPYMYLLHVPNSDGATGFSIVGSSPEALVTVKDGRVTTHPIAGTRWRGQTEEEDQLLEKELLADEKERAEHLMLVDLGRNDLGRVCTPGTVRVEDYSHVERYSHVMHMVSTVTGLLGEGRTALDAVTACFPAGTLSGAPKVRSMELIEEVEKTRRGLYGGVVGYLDFAGNADFAIAIRTALMRDGIAYVQAGGGVVADSNGPYEYIEASNKARAVLNAIAAAETLTSLDFGVALAPGRVAARGEAGNQGRL

SEQ ID NO: 76816 - DNA, 1476 bp, Neisseria gonorrhoeae
  CDS (1)..(1476): transl_table=11
atgatcagcaaacaagaataccaagcccaagccgcccaaggctacaaccgcatcccgctcgtgcaagaactccttgccgacttggatacgccgctttccctctatctcaaactcgccaaccgcccctatacctacctgctcgaatccgttgtcggcggcgaacgtttcggccgctattcctttatcggcctgccttgcagccactatctcaaagccggcggcaaacacgtcgatgtttatcaaaacggcgaaatcgtcgaacaatacgacggcaatccgctaccctttatcgaagctttccacaaccgtttcaaaacacccgaaatcccaagcctgccgcgctttaccggcggcttggtcggctacttcggttacgaaaccgtctacaatttcgaacacttcgcccaccgcctgaaaaacaccgccaaagccaacccgctcggcacgcccgatattttgctgatgctgtcgcaagagttggcggtaatcgacaatttgagcggcaaaatccacctcatcgtttatgctgatccctcgcagcccgacagctacgaacgcgcccgcgaacgcctcgaagacatccgcacccagttgcgccaaagctgcgccatcccactttccctcggcagcaaacaaacccaagcagtcagcgagttcggcgaagaacctttcaaagcctgcgtcgataaaatcaaagactacattttcgcaggcgactgtatgcaggtcgtccccagccaacgcatgagcatggaatttaccgacaatccgcttgccctctaccgcgccctgcgcacgctcaacccttcgccttacctcttttactacgatttcggcgatttccacatcgtcggttcctcgcccgaaatcctcgtccgccgcgaacgcgacgacgtcatcgtccgccccatcgccggcacgcgcctgcgcggcaaaacccccgccgaagaccttgccaacgaacaagatttgttaagcgacgccaaagaaatcgccgaacacgttatgcttatcgatttggggcgcaacgatgtcggacgcatcagcaaaacaggcgaagtcaaagtcaccgacaaaatggtgattgaaaaatactcccatgtgatgcacatcgtttccaacgtcgaaggctgtttgaaagagggcgttaccaatatggacatcctcgccgccaccttccctgccggcacactctccggcgcgccaaaagtccgcgcgatggaaatcatcgaagaaatcgaaccggagaaacgcggcatctacggcggcgccgtcggcgtatggggcttcaacaacgatatggatttggcaatcgccatccgcaccgccgtgattaaaaacaataccctcttcatccaaagcggcgcgggcgtggttgccgactccgacccaacttccgaatggcaggaaactcaaaacaaagcccgcgcagtggttcgggcggcgcagatggtgcaggaagggttggataaataa

SEQ ID NO: 76817 - protein, 491 aa, Neisseria gonorrhoeae
MISKQEYQAQAAQGYNRIPLVQELLADLDTPLSLYLKLANRPYTYLLESVVGGERFGRYSFIGLPCSHYLKAGGKHVDVYQNGEIVEQYDGNPLPFIEAFHNRFKTPEIPSLPRFTGGLVGYFGYETVYNFEHFAHRLKNTAKANPLGTPDILLMLSQELAVIDNLSGKIHLIVYADPSQPDSYERARERLEDIRTQLRQSCAIPLSLGSKQTQAVSEFGEEPFKACVDKIKDYIFAGDCMQVVPSQRMSMEFTDNPLALYRALRTLNPSPYLFYYDFGDFHIVGSSPEILVRRERDDVIVRPIAGTRLRGKTPAEDLANEQDLLSDAKEIAEHVMLIDLGRNDVGRISKTGEVKVTDKMVIEKYSHVMHIVSNVEGCLKEGVTNMDILAATFPAGTLSGAPKVRAMEIIEEIEPEKRGIYGGAVGVWGFNNDMDLAIAIRTAVIKNNTLFIQSGAGVVADSDPTSEWQETQNKARAVVRAAQMVQEGLDK

SEQ ID NO: 76818 - DNA, 1476 bp, Neisseria meningitidis serogroup A
  CDS (1)..(1476): transl_table=11
atgatcagcaaacaagaataccaagcccaagccgcccaaggctacaaccgcatcccgctcgtgcaagaactccttgccgatttggatacgccgctttccctctatctcaaactcgccaaccgcccctatacctacctgctcgaatccgttgtcggtggcgaacgtttcggccgctattcttttatcggcctgccttgcagccactatctcaaagccagcggcaaacacgtcgatgtttatcaaaacggcgaaattgtcgagcaacacgacggcaaccccctgccctttatcgaagccttccacaaccgcttcaaaacacccgaaatcccaagcctgccgcgctttaccggcggactggtcggctacttcggttacgaaaccatctacaattttgaacacttcgcccaccgcctgaaaaacaccaccaaagccgacccgctcggcacgcccgacatcttgctgatgctgtcgcaagaattggcggtgatcgacaatttgagcggcaaaatccatctcgtcgtttacgccgatccgtcgcagcccgacggctacgaacgcgcccgcgaacgcctcgaagacatccgcacccagttgcgccaaagctgcgccatcccgctctcgctcggcagcaaacacaccgaagccgtcagcgaattcggcgaagagccgttcaaagcctgcgttaacaaaatcaaagactacatcttcgcaggcgactgcatgcaggttgtccccagccagcgcatgagcatggaattcaccgacagcccgctcgccctctaccgcgccctgcgtacgctcaacccttcgccttatctcttttactacgatttcggcgatttccacatcgtcggctcctcgcccgaaatcctcgtccgccgcgaacgcgacgatgtcatcgtccgccccatcgccggcacgcgcctgcgcggcaaaacccccgccgaagaccttgccaacgaacaagatttgttaagcgatgccaaagaaatcgccgaacacgtcatgttgattgacttaggacgcaacgacgtcggccgcatcagtaaaaccggcgaagtcaaagttaccgacaaaatggtgattgaaaaatactcccatgtaatgcacatcgtttccaacgtcgaaggccgtctgaaagacggcatgaccaacatggacatcctcgccgctaccttccctgccggcacactctccggcgcacccaaagtccgcgccatggaaatcatcgaagaagtcgaaccgagcaaacgcggcatctacggcggtgccgtcggcgtatggggtttcaacaacgacatggatttggcaatcgccatccgcaccgccgtagtaaaaaacaacacgctatacgtccaaagcggcgcgggcgtggttgccgactccgatccggcctccgaatggcaggaaacacaaaacaaagcccgagccgttatacgcgccgcgcagatggtgcaggaagggttggataaatga

SEQ ID NO: 76819 - protein, 491 aa, Neisseria meningitidis serogroup A
MISKQEYQAQAAQGYNRIPLVQELLADLDTPLSLYLKLANRPYTYLLESVVGGERFGRYSFIGLPCSHYLKASGKHVDVYQNGEIVEQHDGNPLPFIEAFHNRFKTPEIPSLPRFTGGLVGYFGYETIYNFEHFAHRLKNTTKADPLGTPDILLMLSQELAVIDNLSGKIHLVVYADPSQPDGYERARERLEDIRTQLRQSCAIPLSLGSKHTEAVSEFGEEPFKACVNKIKDYIFAGDCMQVVPSQRMSMEFTDSPLALYRALRTLNPSPYLFYYDFGDFHIVGSSPEILVRRERDDVIVRPIAGTRLRGKTPAEDLANEQDLLSDAKEIAEHVMLIDLGRNDVGRISKTGEVKVTDKMVIEKYSHVMHIVSNVEGRLKDGMTNMDILAATFPAGTLSGAPKVRAMEIIEEVEPSKRGIYGGAVGVWGFNNDMDLAIAIRTAVVKNNTLYVQSGAGVVADSDPASEWQETQNKARAVIRAAQMVQEGLDK

SEQ ID NO: 76820 - DNA, 1476 bp, Neisseria meningitidis serogroup B
  CDS (1)..(1476): transl_table=11
atgatcagcaaacaagaataccaagcccaagccgcccaaggctacaaccgcatcccgctcgtgcaagaactccttgccgatttggatacgccgctttccctctatctcaaactcgccaaccgcccctatacctacctgctcgaatccgttgtcggtggcgaacgtttcggccgctattcttttatcggcctgccttgcagccactatctcaaagccagcggcaaacacgtcgatgtttatcaaaacggcgaaattgtcgagcaacacgacggcaaccccctgccctttatcgaagccttccacaaccgcttcaaaacacccgaaatcccaagcctgccgcgctttaccggcggactggtcggctacttcggttacgaaaccatctacaattttgaacacttcgcccaccgcctgaaaaacaccaccaaagccgacccgctcggcacgcccgacatcttgctgatgctgtcgcaagaattggcggtgatcgacaatttgagcggcaaaatccatctcgtcgtttacgccgatccgtcgcagcccgacggctacgaacgcgcccgcgaacgcctcgaagacatccgcacccagttgcgccaaagctgcgccatcccgctctcgctcggcagcaaacacaccgaagccgtcagcgaattcggcgaagagccgttcaaagcctgcgttaacaaaatcaaagactacatcttcgcaggcgactgcatgcaggttgtccccagccagcgcatgagcatggaattcaccgacagcccgctcgccctctaccgcgccctgcgtacgctcaacccttcgccttatctcttttactacgatttcggcgatttccacatcgtcggctcctcgcccgaaatcctcgtccgacgcgaacgcaacgacgttatcgtccgccccatcgccggcacgcgcctgcgcggcaaaacccccgccgaagaccttgccaacgaacaagatttgttaagcgatgccaaagaaatcgccgaacacgtcatgttgattgacttaggacgcaacgacgtcggccgcatcagtaaaaccggcgaagtcaaagttaccgacaaaatggtgattgaaaaatactcccatgtaatgcacatcgtttccaacgtcgaaggccgtctgaaagacggcatgaccaacatggacatcctcgccgctaccttccctgccggcacactctccggcgcacccaaagtccgcgccatggaaatcatcgaagaagtcgaaccgagcaaacgcggcatctacggcggtgccgtcggcgtatggggtttcaacaacgacatggatttggcaatcgccatccgcaccgccgtagtaaaaaacaacacgctatacgtccaaagcggcgcgggcgtggttgccgactccgatccggcctccgaatggcaggaaacacaaaacaaagcccgagccgtcatacacgccgcgcaaatggtacaggaagggttggataaatga

SEQ ID NO: 76821 - protein, 491 aa, Neisseria meningitidis serogroup B
MISKQEYQAQAAQGYNRIPLVQELLADLDTPLSLYLKLANRPYTYLLESVVGGERFGRYSFIGLPCSHYLKASGKHVDVYQNGEIVEQHDGNPLPFIEAFHNRFKTPEIPSLPRFTGGLVGYFGYETIYNFEHFAHRLKNTTKADPLGTPDILLMLSQELAVIDNLSGKIHLVVYADPSQPDGYERARERLEDIRTQLRQSCAIPLSLGSKHTEAVSEFGEEPFKACVNKIKDYIFAGDCMQVVPSQRMSMEFTDSPLALYRALRTLNPSPYLFYYDFGDFHIVGSSPEILVRRERNDVIVRPIAGTRLRGKTPAEDLANEQDLLSDAKEIAEHVMLIDLGRNDVGRISKTGEVKVTDKMVIEKYSHVMHIVSNVEGRLKDGMTNMDILAATFPAGTLSGAPKVRAMEIIEEVEPSKRGIYGGAVGVWGFNNDMDLAIAIRTAVVKNNTLYVQSGAGVVADSDPASEWQETQNKARAVIHAAQMVQEGLDK

SEQ ID NO: 76822 - DNA, 1476 bp, Neisseria meningitidis serogroup C
  CDS (1)..(1476): transl_table=11
atgatcagcaaacaagaataccaagcccaagccgctcaaggctacaaccgcatcccgctcgtgcaagaactccttgccgatttggatacgccgctttccctctatctcaaactcgccaaccgcccctatacctacctgctcgaatccgttgtcggtggcgaacgtttcggccgctattcttttatcggcctgccttgcagccactatctcaaagccagcggcaaacacgtcgatgtttatcaaaacggcgaaattgtcgagcaacacgacggcaaccccctgccctttatcgaagccttccacaaccgcttcaaaacacccgaaatcccaagcctgccgcgctttaccggcggactggtcggctacttcggttacgaaaccatctacaattttgaacacttcgcccaccgcctgaaaaacaccaccaaagccgacccgctcggcacgcccgacatcctcctgatgctctcgcaagagcttgcagtagtggataacctaagcggtaaaatctacctgattgtttacgccgatccgtcgcagcccgacggctacgaacgcgcacgcgaacgcctcgaagacatccgtacacagttacgccaaagttgcgccatcccgctttcgctcggcagcaaacacaccgaagccgtcagcgaattcggcgaagagccgttcaaagcctgcgttaacaaaatcaaagactacatctttgcaggcgactgcatgcaggttgtccccagccagcgcatgagcatggaattcaccgacagctcgctcgccctctaccgcgccttgcgcacgctcaacccttcgccttatctcttctactacgatttcggcgatttccacatcgtcggctcctcgcccgaaatcctcgtccgccgcgaacgcgacgatgtcatcgtccgccccatcgccggcacgcgcctgcgcggcaaaacccccgccgaagaccttgccaacgaacaagatttgttaagcgatgccaaagaaatcgccgaacacgtcatgttgattgacttaggacgcaacgacgtcggccgcatcagtaaaaccggcgaagtcaaagttaccgacaaaatggtgattgaaaaatactcccatgtaatgcacatcgtttccaacgtcgaaggccgtctgaaagacggcatgaccaacatggacatcctcgccgctaccttccctgccggcacactctccggcgcacccaaagtccgcgccatggaaatcatcgaagaagtcgaaccaagcaaacgcggcatctacggcggtgccgtcggcgtatggggtttcaacaacgacatggatttggcaatcgccatccgcaccgccgtagtaaaaaacaacacgctatacgtccaaagcggcgcgggcgtggttgccgactccgatccggcctccgaatggcaggaaacacaaaacaaagcccgagccgtcatacacgccgcgcagatggtgcaggaagggttggataaatga

SEQ ID NO: 76823 - protein, 491 aa, Neisseria meningitidis serogroup C
MISKQEYQAQAAQGYNRIPLVQELLADLDTPLSLYLKLANRPYTYLLESVVGGERFGRYSFIGLPCSHYLKASGKHVDVYQNGEIVEQHDGNPLPFIEAFHNRFKTPEIPSLPRFTGGLVGYFGYETIYNFEHFAHRLKNTTKADPLGTPDILLMLSQELAVVDNLSGKIYLIVYADPSQPDGYERARERLEDIRTQLRQSCAIPLSLGSKHTEAVSEFGEEPFKACVNKIKDYIFAGDCMQVVPSQRMSMEFTDSSLALYRALRTLNPSPYLFYYDFGDFHIVGSSPEILVRRERDDVIVRPIAGTRLRGKTPAEDLANEQDLLSDAKEIAEHVMLIDLGRNDVGRISKTGEVKVTDKMVIEKYSHVMHIVSNVEGRLKDGMTNMDILAATFPAGTLSGAPKVRAMEIIEEVEPSKRGIYGGAVGVWGFNNDMDLAIAIRTAVVKNNTLYVQSGAGVVADSDPASEWQETQNKARAVIHAAQMVQEGLDK

SEQ ID NO: 76824 - DNA, 1482 bp, Pseudomonas putida
  CDS (1)..(1482): transl_table=11
atgaaccgcgaagaattcctgcgcctggccgctgtcggctacaaccgcatccccctggcctgcgaaaccctggccgacttcgacacgccgctgtcgatctacctgaaactggccgaccaacccaactcgtacctgctcgagtcggtgcagggcggcgagaagtggggccgttactcgatgatcggcctgccgtcgcgcaccgtgatgcgcgttcacggctaccacgtcagcatcttgcatgatggcgtcgaggtggaaagccacgatgtcgaagacccgctggcgttcgtcgaaagcttcaaggaccgttacaaggtcgccgacatccccggcctgccgcgcttcaacggcggcctggtcggctacttcggctacgactgcgtgcgttatgtggaaaagcgcctgggcgtcagccccaacccggacccgctgggtgtgccggatattctgctgatggtgtccgatgccgtagtggtgttcgacaacctggcaggcaagatgcacgcgatcgtgctggtcgacccggctgaagagcaagccttcgaacagggccaggcacggctgcaaggcctgctggaaaccctgcgtcagccgatcaccccgcgccgtggcttggacttgagcggcccgcaggccgccgagccggaattccgctccagctacacgcgtgaggactacgagaacgccgtcggccgtatcaaggaatacatcctggccggtgactgcatgcaagtggtgccgtcgcagcgcatgtccatcgacttcaaggcagcgcctatcgacctgtaccgcgcgctgcgctgcttcaacccgacgccctacatgtacttcttcaacttcggtgacttccatgtggttggcagttcgcccgaggtgctggtgcgtgtcgaggacaacctggttaccgtgcgcccgattgccggtacgcgcccgcgtggagcgaccgaagaggccgaccgtgcgttggaagacgacctgctgtcggacgacaaggaaatcgccgagcacctgatgctgatcgacctgggccgtaacgacgtgggccgtgtgtcctcgaccggcagcgtgcggctgaccgagaagatggtgatcgagcgttattccaatgttatgcacattgtctccaacgtcgccggccagctgcgtgaagggctgacggcgatggatgcgctgcgggcgattttgccggctggcaccttgtcgggcgcaccgaagattcgtgcgatggagatcatcgacgaactggagccggtcaagcgtggggtttacggtggtgccgtggggtattttgcctggaatggcaacatggacaccgcgattgccatccgtactgccgtgatcaacgacggcgaactgcatgtgcaggccggtggcggcatcgttgccgactcggtgccggcgctcgagtgggaagaaaccatcaacaagcgccgcgcgatgttccgtgcggtcgccttggctgagcagacttccgccaagtaa

SEQ ID NO: 76825 - protein, 493 aa, Pseudomonas putida
MNREEFLRLAAVGYNRIPLACETLADFDTPLSIYLKLADQPNSYLLESVQGGEKWGRYSMIGLPSRTVMRVHGYHVSILHDGVEVESHDVEDPLAFVESFKDRYKVADIPGLPRFNGGLVGYFGYDCVRYVEKRLGVSPNPDPLGVPDILLMVSDAVVVFDNLAGKMHAIVLVDPAEEQAFEQGQARLQGLLETLRQPITPRRGLDLSGPQAAEPEFRSSYTREDYENAVGRIKEYILAGDCMQVVPSQRMSIDFKAAPIDLYRALRCFNPTPYMYFFNFGDFHVVGSSPEVLVRVEDNLVTVRPIAGTRPRGATEEADRALEDDLLSDDKEIAEHLMLIDLGRNDVGRVSSTGSVRLTEKMVIERYSNVMHIVSNVAGQLREGLTAMDALRAILPAGTLSGAPKIRAMEIIDELEPVKRGVYGGAVGYFAWNGNMDTAIAIRTAVINDGELHVQAGGGIVADSVPALEWEETINKRRAMFRAVALAEQTSAK

SEQ ID NO: 76826 - DNA, 1518 bp, Pseudomonas syringae pv
  CDS (1)..(1518): transl_table=11
atgaaccgtgaagaattcctgcgtttggccgccgaaggctacaaccgcatcccgcttgcccgcgaaaccctggccgacttcgatacgccgctgtcgatctacctcaagcttgccgatcagcccaactcctacttgctggagtcggttcagggcggcgagaagtgggggcgctattcgatcatcggcctgccatgccgcaccgtgatgcgcgttcatggccatcacgtcagcgtgacccacgatggcgtcgagatcgaaagcctggatgtcgaagacccgctggacttcgtagagaccttcaaggcgcgctacaacgtaccgacgattgccgggctgccacgcttcaacggcgggctggtgggctactttggctacgactgtgtgcgttatgtcgagaagcgtctggccaactgcccgaaccctgacccgctgggcgtgccggatatcctgttgatggtttctgacgcggtcgtggtgttcgacaacctggcgggcaagatgcacgccatcgtgctggtcgatccggcgcagcaggatgcctacgcacgtggcgtcgcgcagcttgatgaactgatgcacaagctgcgtcagccgatcactccgcgtcgcggtctggacctggaccgcgctccgcgtgccgacccggtgtttcgctccagctttactcagggcgattacgaggctgcggtcgacacgatcaagcagtacatcctcgcgggtgacgtcatgcaggttgtgccgtcgcaacgcatgtccatcgatttcaaggccgcgcccatcgatctgtatcgggcgctgcgctgcttcaacccgacgccttacatgtacttcttcaacttcggcgacttccatgtcgtcggcagttcgccggaagtgctggtaagggtcgaggacaacctgattacggtgcgtccaatcgccggtactcgccctcgcggtgccaccgaagaggccgatcttgcgctggaagaagacctgctgtccgatcacaaggaaatcgccgagcacctgatgctcatcgatctgggccgtaatgacgttgggcgggtgtccgagatcggtacggtcaaactgaccgagaagatggttatcgagcgttattccaacgtgatgcacattgtttccaacgtcaccggtcaattgaaaaacgggctgacggcaatggacgcactgcgggcgattctgccggctggcacgttgtccggtgcgccgaaaattcgcgccatggaaatcatcgatgagctggagccggtcaagcgcggtgtctatggcggcgccgtggggtatatggcctggaatggcaacatggacacggctatcgcgattcgtactgcggttatcaagaacggcgaactgcatgtacaggccggtggcggcattgttgccgactccgtgccagtgctggaatgggaagaaaccctgaacaaacgccgcgccatggttggttcggcctggtggccctggcctcgcagactgccgagggttgagcaggcttgctgctctggtaatgaacggtaa

SEQ ID NO: 76827 - protein, 505 aa, Pseudomonas syringae pv
MNREEFLRLAAEGYNRIPLARETLADFDTPLSIYLKLADQPNSYLLESVQGGEKWGRYSIIGLPCRTVMRVHGHHVSVTHDGVEIESLDVEDPLDFVETFKARYNVPTIAGLPRFNGGLVGYFGYDCVRYVEKRLANCPNPDPLGVPDILLMVSDAVVVFDNLAGKMHAIVLVDPAQQDAYARGVAQLDELMHKLRQPITPRRGLDLDRAPRADPVFRSSFTQGDYEAAVDTIKQYILAGDVMQVVPSQRMSIDFKAAPIDLYRALRCFNPTPYMYFFNFGDFHVVGSSPEVLVRVEDNLITVRPIAGTRPRGATEEADLALEEDLLSDHKEIAEHLMLIDLGRNDVGRVSEIGTVKLTEKMVIERYSNVMHIVSNVTGQLKNGLTAMDALRAILPAGTLSGAPKIRAMEIIDELEPVKRGVYGGAVGYMAWNGNMDTAIAIRTAVIKNGELHVQAGGGIVADSVPVLEWEETLNKRRAMVGSAWWPWPRRLPRVEQACCSGNER

SEQ ID NO: 76828 - DNA, 2190 bp, Rhizobium meliloti
  CDS (1)..(2190): transl_table=11
atggcagcggtaattctggaagacggcgcggagagttataccacgaagggtggcatcgtcgtcacccgcaggcggcgtgaggcatcctacagcgacgcgatcgccggttatgtcgaccggctggacgaacgccgcggcgcggtcttttcctcgaactacgaatatcccggccgctatacccgctgggacactgcggtggtcgacccgccgcttgccatctcctccttcggtcgctcgctctggatcgaagcctataacgaacgcggcgaagtgctgctggcgctgatcgccgaggatctgaagtccgttgccgacatcacgctcggctcacttgccgcccgccgcctcgacctcaccatcaacgagcccgatcgtgtcttcaccgaggaagagcggtcgaagatgccgacggtctttacggttcttcgcgcggtgacgaacctcttccactcggaggaggactcgaacctcggcctctatggcgccttcggctacgacctcgccttccagttcgatgcgatcgaactgaagctttcgcgtccggacgaccagcgcgacatggttctctttctgccggacgagatccttgtggtcgatcactatgcggccaaggcctggatcgaccgctacgatttcgccagggagaacctttcgaccgagggcaaggcagcggacattgctcccgagccgttccgcagcgtcgacagcatcccgccgcacggggatcaccgcccgggcgaatatgccgagctcgtcgtcaaggcgaaggaaagcttccgtcgcggcgatcttttcgaagtggtgccggggcagaaattctacgagcgctgcgaaagccgcccgtccgagatttccaaccggctgaaggcgatcaatccgtcgccctattccttcttcatcaatctcggcaaccaggaatatctcgtcggtgcttcgccggagatgttcgtgcgcgtttccggccggcgcatcgagacctgcccgatctccggtacgatcaagcgcggcgacgatccgatcgccgacagcgagcagatcctgaagctcttgaactcgaagaaggacgagtccgagctcaccatgtgctcggacgtcgaccgcaacgacaagagccgggtctgcgtgccgggctcggtcaaggtgatcggccggcgtcagatcgagatgtattcgcggctgatccacacggtcgatcacatcgaggggcgcctgcgcgacgatatggacgccttcgacgggttcctcagccacgcctgggcggtgaccgttaccggcgcgccaaagctctgggccatgcgcttcatcgagagccacgagaagagcccgcgtgcctggtatggcggcgcgatcggcatggtcggcttcaacggcgacatgaataccgggctgaccttgcgtaccatccgcatcaaggacgggatcgccgaggtgagggcgggtgcgacgctcctctatgattccaatccggaagaagaagaagccgaaaccgaactgaaggcctctgccatgattgcagccatccgcgacgcgaaatccgcaaacagcgccaaatccgcgcgcgatgtcgccgccgtcggcgccggagtcagcatcctgctcgtcgatcacgaggacagcttcgtccataccctcgcgaactacttccgccagaccggcgcgtccgtcaccaccgtgcgcacgccggtggccgaggaaatcttcgaccgggtcaagccggacctcgtcgtgctttcgcccggtcccggcaccccgaaggacttcgactgcaaggcgacgatcaagaaggcgcgggcgcgggacctgccgatcttcggcgtctgcctggggctgcaggcgctcgcggaggcctatggcggcgaccttcgtcaactggcgatcccgatgcatgggaagccctcgcgcatccgcgtgctcgaacccggcatcgtcttctccggcctcggcaaggaggtgacggtcgggcgctatcattcgattttcgccgatccgtccaacctgccgcgcgaattcgtgatcacggccgaaagcgaagatggtacgatcatgggcatcgaacacagcaaggagccggtggcggccgtgcagttccatccggaatcgatcatgacgctgggcggcgacgccggcatgcggatgatcgagaacgtggttgcccatctcgccaagcgggcgaagaccaaggcagcctga

SEQ ID NO: 76829 - protein, 729 aa, Rhizobium meliloti
MAAVILEDGAESYTTKGGIVVTRRRREASYSDAIAGYVDRLDERRGAVFSSNYEYPGRYTRWDTAVVDPPLAISSFGRSLWIEAYNERGEVLLALIAEDLKSVADITLGSLAARRLDLTINEPDRVFTEEERSKMPTVFTVLRAVTNLFHSEEDSNLGLYGAFGYDLAFQFDAIELKLSRPDDQRDMVLFLPDEILVVDHYAAKAWIDRYDFARENLSTEGKAADIAPEPFRSVDSIPPHGDHRPGEYAELVVKAKESFRRGDLFEVVPGQKFYERCESRPSEISNRLKAINPSPYSFFINLGNQEYLVGASPEMFVRVSGRRIETCPISGTIKRGDDPIADSEQILKLLNSKKDESELTMCSDVDRNDKSRVCVPGSVKVIGRRQIEMYSRLIHTVDHIEGRLRDDMDAFDGFLSHAWAVTVTGAPKLWAMRFIESHEKSPRAWYGGAIGMVGFNGDMNTGLTLRTIRIKDGIAEVRAGATLLYDSNPEEEEAETELKASAMIAAIRDAKSANSAKSARDVAAVGAGVSILLVDHEDSFVHTLANYFRQTGASVTTVRTPVAEEIFDRVKPDLVVLSPGPGTPKDFDCKATIKKARARDLPIFGVCLGLQALAEAYGGDLRQLAIPMHGKPSRIRVLEPGIVFSGLGKEVTVGRYHSIFADPSNLPREFVITAESEDGTIMGIEHSKEPVAAVQFHPESIMTLGGDAGMRMIENVVAHLAKRAKTKAA

SEQ ID NO: 76830 - DNA, 1563 bp, Salmonella typhimurium
  CDS (1)..(1563): transl_table=11
atgcaaacaccaaaacccacgctcgaactgttgacctgcgatgccgcctatcgggaaaacccaacggcgctttttcaccaggtctgcggcgatcgcccggcaacgctgctgctggaatccgcggatatcgacagtaaagatgatttaaaaagcctgctgctggtagatagcgcgctgcgcattaccgctttaggtgacactgtcaccattcaggcgttatctgataatggcgcctcgttattgccgctactggataccgccctgcccgctggcgtggagaacgatgtcctgcctgccggtcgcgttctacgcttcccgcccgtcagcccattattagatgaagacgcccgtttatgctctctgtcggtatttgatgcgttccgtctgttacagggagtggtgaacataccgacgcaagagcgggaggctatgtttttcggcggtctgtttgcctacgacctggtcgctggctttgaagcgctgccacaccttgaggctggcaataactgcccggactactgcttttatttagcggaaacgctgatggttatagatcatcagaaaaaaagcacccgtattcaggccagtctgttcaccgccagcgaccgggaaaaacagcgcctcaacgcccgcctggcgtaccttagccaacagttaacccagcctgcgccgccgttgccggtgacgccggtgccggacatgcgctgtgaatgcaatcagagcgatgacgcgttcggcgcggtggtacgccagttgcaaaaagccatccgcgcgggcgagatatttcaggtggtgccgtcgcgccgcttttcactgccctgcccgtcgccgttggctgcctactacgtgctgaaaaagagcaaccccagcccgtatatgttctttatgcaggataatgatttcacgcttttcggcgcgtcgccggaaagctcgctgaaatatgacgcagccagccgtcagattgagatttatcccatcgcgggtacccgtccacgcggtcgccgcgccgatggtacgctggacagagatctcgacagccgtattgagctggacatgcgtaccgaccataaagagctttccgaacatctgatgctggtcgatctggcgcgcaatgacctggcgcgcatctgtacgccgggcagtcgctacgttgccgatctgacaaaagttgaccgctattcatacgtgatgcatctggtttcccgggtggtgggcgaactgcgtcacgatctcgacgcgctgcacgcctatcgcgcctgcatgaacatgggcaccctgagcggcgcgccgaaagtacgcgccatgcagttgattgccgatgcggaaggacagcgccgcggcagctatggcggcgcggtcggttacttcaccgcccacggcgatctggacacctgtattgttatccgttccgcgctggtggagaacggtatcgccaccgtacaggcgggtgccggaattgtgctggactctgttccgcagtctgaagccgatgaaacccgtaataaagcgcgcgccgtattgcgtgctatcgccaccgcgcatcatgcacaggagaccttctga

SEQ ID NO: 76831 - protein, 520 aa, Salmonella typhimurium
MQTPKPTLELLTCDAAYRENPTALFHQVCGDRPATLLLESADIDSKDDLKSLLLVDSALRITALGDTVTIQALSDNGASLLPLLDTALPAGVENDVLPAGRVLRFPPVSPLLDEDARLCSLSVFDAFRLLQGVVNIPTQEREAMFFGGLFAYDLVAGFEALPHLEAGNNCPDYCFYLAETLMVIDHQKKSTRIQASLFTASDREKQRLNARLAYLSQQLTQPAPPLPVTPVPDMRCECNQSDDAFGAVVRQLQKAIRAGEIFQVVPSRRFSLPCPSPLAAYYVLKKSNPSPYMFFMQDNDFTLFGASPESSLKYDAASRQIEIYPIAGTRPRGRRADGTLDRDLDSRIELDMRTDHKELSEHLMLVDLARNDLARICTPGSRYVADLTKVDRYSYVMHLVSRVVGELRHDLDALHAYRACMNMGTLSGAPKVRAMQLIADAEGQRRGSYGGAVGYFTAHGDLDTCIVIRSALVENGIATVQAGAGIVLDSVPQSEADETRNKARAVLRAIATAHHAQETF

SEQ ID NO: 76832 - DNA, 1470 bp, Schizosaccharomyces pombe
  CDS (1)..(1470)
atgaagatttatcctgacttgaaacaagttcaagagcttgctgaaaagcacaaggctaacaagattcccatttatggagtaatccctgccgatatgctgactccttcagtagcctacttgaagcttaatcaaggaaagaagtattcgtttattttagaaagtgtcactcaaggagagagtgtctcaagatacagttttattggcagcccttatagaatattaatggccaatggaaaaacagatcctttggcacgtttagaacgtgagttgaaagaagttaaaacagcccctgttgagggtctgccatctttcagtggaggtgctgtgggctatgtttcttatgattgcatcaaatattttgaacccactactgaaatgcctttagaagataccttgggtcttccggaggctatgtttttcatgaccgacgatttagtcgctttcgatcatgcttatcagactgtcaagataatttctcatgtttgcattcagcaaggccgacccattgaagaggcttacgaagctgccgttttcaaaatcaatatgcttaaaaagaaacttgaaagtcctgaaattcctttgcctgagcaaaagaaggtccatttaggatacgaagctaagtcaaatgtaggcgaagacgggtataaagcatttgtttccaacctcaaggaacatatctttaatggcgatattttccaagctgtcccaagccaacggattgctaggcgtacagatttacatccttttaatttgtaccgccatttaagaacagttaacccgtccccttatatgttctacatccactgtgatgatttcgacataatcggtgcttcccctgaattactggttaaatcagagcatgggcgtattatcaatcatcccattgccggaactgttccaagaggaaaaactaaagaagaggatgaggcatatgccaaggatttacttgctagtgtcaaggatagagctgaacatgtaatgctggtggacttggcaagaaacgatgtcagtcgtgtctgtgatctcgacacaacaagtgttgacaagttgatgactattgaaaagttttctcatgttcagcatcttgtttctcaagtttctggtgttctgagacctgataaaactcgttttgatgcattccgtagtatatttccggctggaacggtcagtgggtctcccaaagtccgtgcaattcagctcgtttatggattagagaaagaaaagcgtggtatatacgcgggagccgtaggtcgttggggctatgaagatgacaacatggatacttgtatagcaatccgtacaatggtttataaagacggaactgtttatttgcaagccggtggtggtattgtgtttgattcagatgaacaagatgagtacgtggaaactttaaacaaactacgttcaaatgttactgcaattgaggaaaccgaaaaattatacgctgaagaagaaaactcttcagcataa

SEQ ID NO: 76833 - protein, 489 aa, Schizosaccharomyces pombe
MKIYPDLKQVQELAEKHKANKIPIYGVIPADMLTPSVAYLKLNQGKKYSFILESVTQGESVSRYSFIGSPYRILMANGKTDPLARLERELKEVKTAPVEGLPSFSGGAVGYVSYDCIKYFEPTTEMPLEDTLGLPEAMFFMTDDLVAFDHAYQTVKIISHVCIQQGRPIEEAYEAAVFKINMLKKKLESPEIPLPEQKKVHLGYEAKSNVGEDGYKAFVSNLKEHIFNGDIFQAVPSQRIARRTDLHPFNLYRHLRTVNPSPYMFYIHCDDFDIIGASPELLVKSEHGRIINHPIAGTVPRGKTKEEDEAYAKDLLASVKDRAEHVMLVDLARNDVSRVCDLDTTSVDKLMTIEKFSHVQHLVSQVSGVLRPDKTRFDAFRSIFPAGTVSGSPKVRAIQLVYGLEKEKRGIYAGAVGRWGYEDDNMDTCIAIRTMVYKDGTVYLQAGGGIVFDSDEQDEYVETLNKLRSNVTAIEETEKLYAEEENSSA

SEQ ID NO: 76834 - DNA, 2502 bp, Serratia marcescens
  CDS (280)..(1839): transl_table=11
gaattcacgctgatcgctaaaacattgtgcaaaaagagggttgactttgccttcgcgaaccagttaactagtacacaagttcacggcaacggccgtgtcggatgagagttaacaaagagagtctgcaaatgaacacatacatttctcttcacggttggtggcgtacctccctcttgcgggcggtgtaatcgcgcatagctgtcatctgacaatgcagatttcctggcccgcacctgatgcgggcttttttatggacagaattcactggaaccaccgatgatgaacaccaaaccacaattgacactactgaaggtgcaagccagctaccggggcgatcccaccacccttttccaccagctgtgcggcgcccgtccggccaccctgctgctggagtcggcggaaatcaacgacaaacagaatctgcagagcctgctggtgatcgacagcgcgctgccgattaccgcactgggccacaccgttagcgtgcaggcgctgaccgccaacgggccggcgctgctgcccgtgctggacgaagcgctgccgcccgaggtgcgcaatcaggcacgccctaacggccgcgaactgaccttcccggcgatcgacgcggtgcaggacgaagacgcccgcctgcgttcactgtcggtgttcgacgcgctgcgcacgctgctgacgctggtggactctccggcggacgagcgcgaagccgtgatgctgggcggcctgttcgcctatgatttggtcgccggttttgaaaacctgccggccgtgcgccaggatcaacgctgcccggacttctgcttctatctggcggaaaccctgctggtgctcgatcaccaacgcggctcggcccgtctgcaggccagcgtcttcagtgagcaggcgagtgaagcgcagcgtttgcagcatcgcctggaacagctgcaggctgagttgcaacaacccccgcagccaatcccgcaccaaaagctggaaaacatgcagctgagctgtaaccagagtgacgaagagtacggcgcggtggtcagcgagctgcaggaagcgatccgccagggcgaaatcttccaggtggtgccgtcgcgccgcttttccctgccgtgcccggcgccgctggggccctaccaaaccttaaaagacaacaaccccagcccgtacatgttcttcatgcaggatgatgacttcaccctgttcggcgcttcgccggagagcgcgttgaaatacgacgcgggcaatcgccaaatcgaaatctacccgatcgccggcacccgcccgcgcggccgccgtgccgatgggtcgctggatttggatctcgacagccgcatcgagctggaaatgcgcaccgaccacaaagagctggccgagcacctgatgttggtcgatctggcgcgcaacgatctggcgcgcatctgccaggccggcagccgctacgtggccgacctgaccaaagtggatcgctattcgttcgtcatgcatctggtttcccgggtggtgggcaccctgcgcgccgatctcgacgtgctgcacgcctaccaggcctgcatgaacatgggcaccctcagcggcgcgccgaaagtgcgggcgatgcagctgatcgccgccctccgaagcacgcgccgcggcagctacggcggccgagtgggctacttcaccgcccaccggcatctggatacctgcatcgtcattcgctccgcctacgttgaagacgggcatcgcaccgtgcaggccggcgccggcgtggtgcaggactccatccgcaggcgggaagccgacgagacccgtaataaagcccgtgccgtgctgcgcgccatcgccactgcgcaccatgccaaggaggtgttctgatggccgatatcctgctgctcgacaacgtcgactcctttacctacaacctggtcgatcagctgcgcgccagcggccaccaggtggtgatttaccgtaatcagatcggcgccgaggtgatcatcgagcgtctgcaacatatggaacagccagtgctgatgctgtcgcccggccctggcaccccttccgaagcgggctgtatgccggaactgctgcagcgtctgcgcggccaactgccgatcatcggcatctgcctcggccaccaggcgatcgtcgaagcctatggcggccaggtcggccaggcgggcgagatcctgcacggcaaagcctcggcgatcgctcacgatggcgaaggcatgttcgccggtatggccaatccgctgccagtggcgcgctaccactcgctggtcggcagcaatatcccggccgatctcaccgtcaacgcccgttctggcgaaatggtgatggcggtgcgcgacgaccgccgccgcgtgtgcggcttccagttccacccggaatcgattctgaccacccacggcgcgcgcctgcttgagcagaccctggcctgggcgctggcgaagtaatataaggaacacgacgatgcaacctattcttcagaaactgtaccgcgccgagtcgatgagccagcaggaaagccaacagctg

SEQ ID NO: 76835 - protein, 519 aa, Serratia marcescens
MNTKPQLTLLKVQASYRGDPTTLFHQLCGARPATLLLESAEINDKQNLQSLLVIDSALPITALGHTVSVQALTANGPALLPVLDEALPPEVRNQARPNGRELTFPAIDAVQDEDARLRSLSVFDALRTLLTLVDSPADEREAVMLGGLFAYDLVAGFENLPAVRQDQRCPDFCFYLAETLLVLDHQRGSARLQASVFSEQASEAQRLQHRLEQLQAELQQPPQPIPHQKLENMQLSCNQSDEEYGAVVSELQEAIRQGEIFQVVPSRRFSLPCPAPLGPYQTLKDNNPSPYMFFMQDDDFTLFGASPESALKYDAGNRQIEIYPIAGTRPRGRRADGSLDLDLDSRIELEMRTDHKELAEHLMLVDLARNDLARICQAGSRYVADLTKVDRYSFVMHLVSRVVGTLRADLDVLHAYQACMNMGTLSGAPKVRAMQLIAALRSTRRGSYGGRVGYFTAHRHLDTCIVIRSAYVEDGHRTVQAGAGVVQDSIRRREADETRNKARAVLRAIATAHHAKEVF

SEQ ID NO: 76836 - DNA, 1536 bp, Streptomyces coelicolor
  CDS (1)..(1536): transl_table=11
atgaccacccacgccgccgaggcgcccacgacggacccacagggcgcaccgggctcacagaagactccggacgcgacggaggccgaggaggccgcccgcgccaccgtcccgcaccgcgccgccgccgcggcactcgcccgcgagcacgacgtcgtcccgctccaccaggagttcctggacgactcggtcagccccgtcaccgccttcgcccagctgtgcggaccggacgaggcgggcttcctgctggagagcgtgccggtctccggcggcgtggcacggtactcgtacgtcggtcaccgaccggtgccgctcgagccgaccggcggcgacccgctgaccgcgctgcggtcccacctggcccggtccgtggcgccggtgcccggactgccgccgttccacggcggcgtcgtcggctacctcgggtacgaggcggcccgccacttcgaggacctgcccctggccgccggaccgccgcccggactgcccgagtccgccttcctcgccgccgacgacctcgtcgtcttcgaccacgcgacccggcgcgtcctgctgatgaccctctaccgcccggcccgcgagtcctacgacgacgccgtcgcccgcatcgtgcgcctcaaccgcgccctgcgccgcgcgccggcacccgccgccttctccggccgcccgctcgccgccgccacgccggccgaccacgggacgcagggctggaccgcgaacctcaccgaggcacagttcaccgagcgggtcgcccgcgcccgggagcacatcgcggccggtgacgccttccagatcgtgctctcccggcggctcagcaggccgctgcgcgcccggccgaccgacctgtaccggcacctgcgggccaccaacccctcgccgtacatgtaccacctgagcctgggaggaggccggcacgtgatcggcgcctcgcccgagctgctcgtcaaggcggagggccggacggtgcgcacccggcccctcgcgggcacccggccccgccaccccgaccccgccgaggacctgcggctggagcgggagctgcgcgccgacgagaaggaacgcgccgaacacgtcatgctggtcgacctcggtcgcaacgacctgggccgggtcaccgagccgggcacggtccgggtggagcggctgatgcgggtcgagcgcttctcccacgtgatgcacctgtcgtccaccgtgcgcggacggctcgccgagggccgggacgcgctggacgccctgcgctcggccttccccgccggaacgctctccggggcgcccaagatccgggccatggagatcatcgccgagctggagcccgagcagcgcggggtgtacggcggcgccctcggcttcgtcggcgcggacggtctgaccgacttcgccatcgccctgcgcaccatggtcgtcgccgacggccacgtgcacgtgcaggcgggcgccgggatcgtcgccgactccgaccccgcggccgagttccgcgagaccctgcacaagtcgcgcgccatgctcacggccgtacggcgggcggaggcggcggcatga

SEQ ID NO: 76837 - protein, 511 aa, Streptomyces coelicolor
MTTHAAEAPTTDPQGAPGSQKTPDATEAEEAARATVPHRAAAAALAREHDVVPLHQEFLDDSVSPVTAFAQLCGPDEAGFLLESVPVSGGVARYSYVGHRPVPLEPTGGDPLTALRSHLARSVAPVPGLPPFHGGVVGYLGYEAARHFEDLPLAAGPPPGLPESAFLAADDLVVFDHATRRVLLMTLYRPARESYDDAVARIVRLNRALRRAPAPAAFSGRPLAAATPADHGTQGWTANLTEAQFTERVARAREHIAAGDAFQIVLSRRLSRPLRARPTDLYRHLRATNPSPYMYHLSLGGGRHVIGASPELLVKAEGRTVRTRPLAGTRPRHPDPAEDLRLERELRADEKERAEHVMLVDLGRNDLGRVTEPGTVRVERLMRVERFSHVMHLSSTVRGRLAEGRDALDALRSAFPAGTLSGAPKIRAMEIIAELEPEQRGVYGGALGFVGADGLTDFAIALRTMVVADGHVHVQAGAGIVADSDPAAEFRETLHKSRAMLTAVRRAEAAA

SEQ ID NO: 76838 - DNA, 1527 bp, Synechocystis sp
  CDS (1)..(1527): transl_table=11
atgatttcccctgggttttctcacttcactgaactcgcccaacaaggcaattttattccggtgtatcaggaatgggtggcggatttagaaacgccagtttctgcttggtacaaagtttgctctagccaaccctacaattttctcctggagtcggtggaagggggagagagtattggtcgctatagttttctcggttgcgaccccatgtgggtgctagaagccaggggcgacgaaactacccaagttttacgcaatgggcaaacggaaacctttcggggtaatcccctcgatattttgtcccaatgtttggaatcaatccgtccggtgaatttaccccaactacctccgggcattggtgggctgtttggggtttggggttatgagctgattcgttggatggaacccagggttcctgtgtatgaaccccagccggaagatccacccgatggcatttggatgcaggtggaccatctcctcattttcgaccaggtcaaacgcaaaatttgggcgattgcctttgcggatttgcggggggaaaatgttgatttggaaactgcctatcgcaatgcttgtcaacgggtgacgaaattagtcctgcaattacaattacctctgccgccggaagccaccgccctggaactgctcaccaaaacccaacttgagggtaaggaactgaactacagcagtaatacggagcaagaaaagtttttagaagaagtggcgatcgccaaggattacatcacagcgggggacattttccaggtggtgctttcccaaagactttccactatttaccgggatgatcccttcaagctctaccgttccctcaggctgattaatccttccccctacatggcttattacaactttggccattggcaaattattggctctagcccggaggtgatggtcaaagccgatcgccaactggatggcaaattaatggccacggtacgccccattgctggcaccagacccaggggcaaaacccacccagaggatgaacagttagccgaagaattgctgaacgatcccaaagaaatcgccgaacacgtcatgctggtggatttgggtcgcaatgatttgggacgggtttgcgttcagggctcagtcaaagtgaatgagttgatggtgattgaacgttattcccacgtcatgcacatagtcagtaacgtagtgggagaactggcatcggataaaaccgcctgggatcttttgaaagcttgttttcccgctggcaccgtcagtggtgcaccgaaaattagggccatggaaattattaacgagctggaaccggaacggcgggggccctactccggagtctatggctactatgattttgaaggccagttaaatacggcgatcgccattcggaccatggtggtgcaggaacagccagatggagcccatcgggtgtcggtgcagaccggagctggcattgtggccgattccgatccccaaaaagagtatgaggaaactttaaataaagcgaggggacttttggaagccattcgtgccttgtcctag

SEQ ID NO: 76839 - protein, 508 aa, Synechocystis sp
MISPGFSHFTELAQQGNFIPVYQEWVADLETPVSAWYKVCSSQPYNFLLESVEGGESIGRYSFLGCDPMWVLEARGDETTQVLRNGQTETFRGNPLDILSQCLESIRPVNLPQLPPGIGGLFGVWGYELIRWMEPRVPVYEPQPEDPPDGIWMQVDHLLIFDQVKRKIWAIAFADLRGENVDLETAYRNACQRVTKLVLQLQLPLPPEATALELLTKTQLEGKELNYSSNTEQEKFLEEVAIAKDYITAGDIFQVVLSQRLSTIYRDDPFKLYRSLRLINPSPYMAYYNFGHWQIIGSSPEVMVKADRQLDGKLMATVRPIAGTRPRGKTHPEDEQLAEELLNDPKEIAEHVMLVDLGRNDLGRVCVQGSVKVNELMVIERYSHVMHIVSNVVGELASDKTAWDLLKACFPAGTVSGAPKIRAMEIINELEPERRGPYSGVYGYYDFEGQLNTAIAIRTMVVQEQPDGAHRVSVQTGAGIVADSDPQKEYEETLNKARGLLEAIRALS

SEQ ID NO: 76840 - DNA, 1572 bp, Vibrio cholerae
  CDS (1)..(1572): transl_table=11
atgaataaggccatcaacataaagaaaaccgcgccgcttgaggtgctacacagtgaattgccttatacgcaagatcctacggctttatttcatgctctttgcgctgggcgcagcgactgcctactactggaatctgcagaaatcgactccaagcaaaatttgaagagccttctgttagtggatgctgccgtgcgcattgtgtgtgaaggccatcaagtgacctatcatgcgctcagtgcaaacggccaagcgctgctcaacatcattcatagcaacctcactgatcggattccttgcaaagtagagaaagcgaaacttaccctcaccttctctacaccctgtgatacgttggatgaagactcacgattgcgcgaagcgtcttctttcgatgcgctacgtttagtgcagcacagttttgatctcactgaccacggtaaatttgcgctgtttttaggtggcttatttgcctacgatttagtggctaactttgaaccgctcggtgaagcacctgccgacaatcaatgccctgattacgtattttatgtagcagaaactctgatggtgattgatcatcagcgtgaaacttgccaactgcaagccacccaattccaaccgggcgatgcgctgcacagccaactcaaaagccggatgcgtgaaattcgtgcgcaagtgaatcaaaaattgcctttgccgagtgcgcaatctttatctgatgtggaagtgaccaccaatattagcgatgcagcattttgcgatatcgtgcgtgacctcaagcagtacgtggtcaaaggcgatgtgttccaagttgtgccttcgcgccgttttcgcttaccttgcccttcaccactcgcagcttatcaacggctgaaacagagtaacccaagcccttacatgttctacatgcaagatgaacgctttaccctgtttggcgcatcccccgaaagcgcactcaagtatgaaatgcacaccaaccaagtggaaatctacccgattgcagggactcgccgccgcggtaagcgcgccgatggcagcatcgattttgacctcgatagccgcattgagcttgaactgcgcaccgataaaaaagagaacgccgaacacatgatgctggttgacttagcacgcaacgatgtcgcgcgcattagccaagccggtactcgccatgtcgctgacttgctgcaagtagatcgctacagccatgtgatgcacttggtgtcgcgcgtggtgggtcagttacgtgaagatctggatgcgctgcatgcttatcaagcttgcatgaacatgggcacgctgactggcgcaccgaaaattcgcgcgatgcagttaatccgcgatgtggaacaagcgcgtcgcggcagctacggcggcgcggtgggttatctcacgggtgaaggcgatttggatacctgtatcgtgatccgttctgcttatgtggaaaacggcatcgcccaagtccaagctggcgcgggtgtcgtttacgactccgacccacaagccgaagccgatgaaacgcgcggcaaggcgcaagcggtaatctccgctattttatatgctcatcaagggaaggaatga

SEQ ID NO: 76841 - protein, 523 aa, Vibrio cholerae
MNKAINIKKTAPLEVLHSELPYTQDPTALFHALCAGRSDCLLLESAEIDSKQNLKSLLLVDAAVRIVCEGHQVTYHALSANGQALLNIIHSNLTDRIPCKVEKAKLTLTFSTPCDTLDEDSRLREASSFDALRLVQHSFDLTDHGKFALFLGGLFAYDLVANFEPLGEAPADNQCPDYVFYVAETLMVIDHQRETCQLQATQFQPGDALHSQLKSRMREIRAQVNQKLPLPSAQSLSDVEVTTNISDAAFCDIVRDLKQYVVKGDVFQVVPSRRFRLPCPSPLAAYQRLKQSNPSPYMFYMQDERFTLFGASPESALKYEMHTNQVEIYPIAGTRRRGKRADGSIDFDLDSRIELELRTDKKENAEHMMLVDLARNDVARISQAGTRHVADLLQVDRYSHVMHLVSRVVGQLREDLDALHAYQACMNMGTLTGAPKIRAMQLIRDVEQARRGSYGGAVGYLTGEGDLDTCIVIRSAYVENGIAQVQAGAGVVYDSDPQAEADETRGKAQAVISAILYAHQGKE

SEQ ID NO: 76842 - DNA, 1626 bp, Vibrio parahaemolyticus
  CDS (1)..(1626): transl_table=11
atgcgactatgtactgcaggacgattaaaacagctacaaggaggtcttgtgaacaaggccattgaaattaagaaacttggacaactggaagtattaaaagcttctgttccttacactcaagacccaacccgtctgttccatactatttgtgagaacaaaacggatagcttgcttttagaatcggctgaaattgattctaaacagaatctcaaatcgctgttaatcgtcgattctgcggttcgcatcgtttgttatggacataccgtcagctttcatgctctaacggagaacggcaaaaacctactgacgcatgtgaatcaaaacgtacgtggtgaagtcgcaagccaatttgacggcgaaacactgactttagaattcatccaaccatgcgatacgattgatgaagattctcgtctacgagaagcttcttcttttgatgcgcttcgtttggtacagcacagttttgatctttcttcgcaagacaaacatgccattttccttggtggcctatttgcgtatgacttggtggcgaacttcgaaccattaggagacgcggtagcaacaaaccagtgtccagattacgtcttctatgttgcggaaacattgctggttgtagatcaccaaacagaatcctgccaactgcaagcaacattgttcgttgacggctcgcaaaaagcagcgttagaaagtcgaatcgaagatatccgagctcaatgcacatcgccaaagcgtcttccagacgcaacgcaagtggccaatatcacagctcaaccaagcgttccggatcaagacttctgtcaaatcgtccgtgatctaaaagaattcgtggtaaaaggcgatattttccaagtggttccttctcgtcgattcacattgccttgcccttctccgctagcagcttacaaagagctaaagcaaagcaacccaagcccttacatgttctacatgcaagatgagcttttcactttgtttggtgcgtctccagaaagtgccttgaagtatgaaaccgacaccaaccaaatagaaatctacccaattgcggggactcgccgtcgcggtaaacgtccaaatggcgaaatcgattttgatttagatagccgtattgaacttgaactgcgtagcgacaaaaaagagaacgctgaacatatgatgttggtagacctagctcgtaatgatgtagcgcgcatctcgcaagctggtactcgtcatgttgccgatctccttaaagtcgaccgctatagccatgttatgcacttggtgtctcgcgtggttggccagttgcgcgatgaccttgatgctttgcacgcttaccaagcttgtatgaacatgggcacgttaactggggcgccaaaaattcgtgcaatgcaactgattcgcgatgttgaaggtgctcgtcgtggcagctatggcggagcggtaggctatctgaccggagaaggcacgctcgacacttgtatcgtgattcgctcggcttacgtggaaaacggcattgctcaagtacaagcaggtgcaggcgtggtattcgattctgaccctcaagcggaagccgatgaaacacgcggaaaagctcaagcggttatctctgctattcaagcagcgcattctcaacctgctaacaaggagtag

SEQ ID NO: 76843 - protein, 541 aa, Vibrio parahaemolyticus
MRLCTAGRLKQLQGGLVNKAIEIKKLGQLEVLKASVPYTQDPTRLFHTICENKTDSLLLESAEIDSKQNLKSLLIVDSAVRIVCYGHTVSFHALTENGKNLLTHVNQNVRGEVASQFDGETLTLEFIQPCDTIDEDSRLREASSFDALRLVQHSFDLSSQDKHAIFLGGLFAYDLVANFEPLGDAVATNQCPDYVFYVAETLLVVDHQTESCQLQATLFVDGSQKAALESRIEDIRAQCTSPKRLPDATQVANITAQPSVPDQDFCQIVRDLKEFVVKGDIFQVVPSRRFTLPCPSPLAAYKELKQSNPSPYMFYMQDELFTLFGASPESALKYETDTNQIEIYPIAGTRRRGKRPNGEIDFDLDSRIELELRSDKKENAEHMMLVDLARNDVARISQAGTRHVADLLKVDRYSHVMHLVSRVVGQLRDDLDALHAYQACMNMGTLTGAPKIRAMQLIRDVEGARRGSYGGAVGYLTGEGTLDTCIVIRSAYVENGIAQVQAGAGVVFDSDPQAEADETRGKAQAVISAIQAAHSQPANKE

SEQ ID NO: 76844 - DNA, 1524 bp, Saccharomyces cerevisiae
  CDS (1)..(1524)
atgaccgcttccatcaaaattcaaccggatattgactctctaaagcaattacagcagcaaaatgacgatagttccataaatatgtatcccgtgtatgcgtatttgccatcattggatctgactcctcacgtggcatatctaaaattggcacaattgaacaaccctgatagaaaggaatcatttctgttggaaagtgctaagacaaataatgaattagatcgttattcattcataggtatctcgccacgcaagaccatcaaaaccggtcctactgaaggcattgaaacagatcctttggaaattttggaaaaggagatgtctacctttaaagtagccgaaaatgttcctggtttaccgaaattaagtggtggtgctattggttatatttcttatgactgtgttcgttatttcgagccaaaaacaagaaggcctttgaaagatgtcctaagacttccagaggcatatttaatgctttgtgataccattattgcctttgataatgtttttcagagatttcaaatcattcataacattaataccaatgaaacttcgttggaggaaggttaccaagctgcagcacaaataatcactgatatcgtatcaaagctaaccgacgattcctcgccaataccatatccagaacaacctcctattaaattgaatcaaacttttgaatcgaatgtgggcaaggaaggttacgaaaatcacgtctccactttgaagaagcatattaagaaaggtgatattattcaaggtgtgccatcgcaaagagtggcaaggccaacttcgttacatcctttcaatatttacagacatttacgtacagtgaacccatctccttacctgttttatattgattgtttggatttccaaatcattggtgcatctccagaattgttgtgcaaatcggattccaaaaatagagtcattacccatccaattgctggtactgtcaaacgtggggctactactgaagaggatgatgctttagcggaccaattacgtggctcgttaaaagaccgtgcagaacatgttatgctggtagatttagcaagaaacgatattaacagaatttgtgacccattaacaacaagtgtcgataaactgttaactattcaaaaattttctcatgtccaacatctggtttctcaagtcagcggtgttctccgcccagaaaagacaagatttgatgcattcagatcgattttccctgcaggtactgtcagtggtgctccaaaggttagagccatggaattgattgccgaactagaaggagaaaggcgtggggtttatgcaggcgccgtaggtcattggtcatacgacggtaaaacaatggacaattgtatcgctttaaggactatggtctataaagatggcattgcttacttgcaagctggcggtggtattgtttacgattcagatgagtacgatgaatatgtcgaaaccatgaataaaatgatggccaatcacagtactattgtgcaagcagaagaattgtgggccgatatcgtaggatcagcttaa

SEQ ID NO: 76845 - protein, 507 aa, Saccharomyces cerevisiae
MTASIKIQPDIDSLKQLQQQNDDSSINMYPVYAYLPSLDLTPHVAYLKLAQLNNPDRKESFLLESAKTNNELDRYSFIGISPRKTIKTGPTEGIETDPLEILEKEMSTFKVAENVPGLPKLSGGAIGYISYDCVRYFEPKTRRPLKDVLRLPEAYLMLCDTIIAFDNVFQRFQIIHNINTNETSLEEGYQAAAQIITDIVSKLTDDSSPIPYPEQPPIKLNQTFESNVGKEGYENHVSTLKKHIKKGDIIQGVPSQRVARPTSLHPFNIYRHLRTVNPSPYLFYIDCLDFQIIGASPELLCKSDSKNRVITHPIAGTVKRGATTEEDDALADQLRGSLKDRAEHVMLVDLARNDINRICDPLTTSVDKLLTIQKFSHVQHLVSQVSGVLRPEKTRFDAFRSIFPAGTVSGAPKVRAMELIAELEGERRGVYAGAVGHWSYDGKTMDNCIALRTMVYKDGIAYLQAGGGIVYDSDEYDEYVETMNKMMANHSTIVQAEELWADIVGSA

SEQ ID NO: 76846 - DNA, 1866 bp, Arabidopsis thaliana
  CDS (1)..(1866)
atgtcggccgtttcaatctccgccgtcaaatctgattttttcaccgtcgaagccatagccgttacacaccatcggacgccgcatccaccacatttcccttcgctccggtttccactatcgctcaagtccccgccggctacttctcttaaccttgtggctggatcaaaactcctccacttctcgcgtcgtcttccttctatcaaatgctcatatactccgtcgttagatttatcggaggaacagttcacaaaatttaaaaaagcatcggaaaagggaaacttagttcctctattccgatgtgtattctcggatcatttgactccgatacttgcttaccgatgtttggtgaaagaagatgatagagatgctcctagcttcttgttcgagtctgtggagcctggttcgcaatcgtccaacatcggtaggtatagtgtagttggagctcagcctacaatagaaatcgttgcaaagggaaatgtagttactgtgatggaccatggagctagtcttaggacagaggaggaagtggatgatccaatgatggttcctcagaaaatcatggaggaatggaatccacaaggcattgatgaattgcctgaagctttctgcggtggttgggttggatacttttcatatgacactgtacgttatgttgagaagaagaagctgcctttttctaatgctccagaggatgataggagtcttcctgatgttaatttgggtctttatgatgatgtgatcgtgtttgatcatgttgagaagaaagcatatgtgatccactgggtgcggatagataaggatcgttctgttgaagaaaatttccgtgaaggaatgaatcggttggaatctctaacctctagaattcaagaccaaaaaccccccaagatgcctactggtttcataaaactacgcactcagctcttcggtccgaaattggagaaatcaactatgacgagtgaggcatacaaggaggcagtggtggaagccaaagaacatatcttggctggggacatctttcagatagttcttagtcagagatttgaaaggcggacatttgcggacccatttgagatatatagagctcttaggattgtaaatccaagtccctacatggcctatttgcaggttagaggatgcatattagttgcatcaagtccagagatattgttacgttcaaaaaataggaaaattaccaatcgcccccttgctggaactgtcagaagagggaagacacccaaagaagatctaatgctggaaaaagagctcttaagcgatgaaaaacaatgcgcagaacatattatgcttgttgatttgggaaggaacgatgttggcaaggtttcaaagcctggttctgtggaggtcaagaagctcaaggatatagaatggttttcacatgtcatgcacattagctccacggtagtaggtgaattgctcgatcatctaacaagctgggacgctcttagagctgtacttcccgttggaaccgtgagcggagccccaaaggtaaaagccatggagctgatagatgaacttgaagtaacaaggcgtggtccttacagtggaggctttggaggcatttcgtttaatggagacatggacattgccttagctctcagaacaatggtcttcccaacaaatacccgttatgacacattgtactcatacaagcatcctcagagacgtagagaatggattgctcatattcaagctggagctgggattgttgcagacagtaaccctgatgatgaacatagagagtgtgagaacaaagcagcggctttagcccgagccatcgatcttgctgagtcctcctttcttgaggcacctgagtttactactatcacacctcacatcaacaatatctga

SEQ ID NO: 76847 - protein, 621 aa, Arabidopsis thaliana
MSAVSISAVKSDFFTVEAIAVTHHRTPHPPHFPSLRFPLSLKSPPATSLNLVAGSKLLHFSRRLPSIKCSYTPSLDLSEEQFTKFKKASEKGNLVPLFRCVFSDHLTPILAYRCLVKEDDRDAPSFLFESVEPGSQSSNIGRYSVVGAQPTIEIVAKGNVVTVMDHGASLRTEEEVDDPMMVPQKIMEEWNPQGIDELPEAFCGGWVGYFSYDTVRYVEKKKLPFSNAPEDDRSLPDVNLGLYDDVIVFDHVEKKAYVIHWVRIDKDRSVEENFREGMNRLESLTSRIQDQKPPKMPTGFIKLRTQLFGPKLEKSTMTSEAYKEAVVEAKEHILAGDIFQIVLSQRFERRTFADPFEIYRALRIVNPSPYMAYLQVRGCILVASSPEILLRSKNRKITNRPLAGTVRRGKTPKEDLMLEKELLSDEKQCAEHIMLVDLGRNDVGKVSKPGSVEVKKLKDIEWFSHVMHISSTVVGELLDHLTSWDALRAVLPVGTVSGAPKVKAMELIDELEVTRRGPYSGGFGGISFNGDMDIALALRTMVFPTNTRYDTLYSYKHPQRRREWIAHIQAGAGIVADSNPDDEHRECENKAAALARAIDLAESSFLEAPEFTTITPHINNI

SEQ ID NO: 76848 - DNA, 1821 bp, Oryza sativa
  CDS (1)..(1821)
atggagtccatcgccgccgccacgttcacgccctcgcgcctcgccgcccgccccgccactccggcggcggcggcggccccggttagagcgagggcggcggtagcggcaggagggaggaggaggacgagtaggcgcggcggcgtgaggtgctccgcggggaagccagaggcaagcgcggtgatcaacgggagcgcggcggcgcgggcggcggaggaggacaggaggcgcttcttcgaggcggcggagcgtgggagcgggaagggcaacctggtgcccatgtgggagtgcatcgtctccgaccacctcacccccgtgctcgcctaccgctgcctcgtccccgaggacaacatggagacgcccagcttcctcttcgagtccgtcgagcaggggcccgagggcaccaccaacgtcggtcgctatagcatggtgggagcccacccagtgatggaggtcgtggcaaaggagcacaaggtcacaatcatggaccacgagaagggcaaggtgacggagcaggtcgtggatgatcctatgcagatccccaggagcatgatggaaggatggcacccgcagcagatcgatcagctccccgattccttcaccggtggatgggtcgggttcttttcctatgatacagtccgttatgttgaaaagaagaagctgcccttctccggtgctccccaggacgataggaaccttcctgatgttcaccttgggctttatgatgatgttctcgtcttcgacaatgtcgagaagaaagtatatgtcatccattgggtaaatcttgatcggcatgcaaccaccgaggatgcattccaagatggcaagtcccggctgaacctgttgctatctaaagtgcacaattcaaatgtacccaagctttctccaggatttgtaaagttacacactcggcagtttggtacacctttgaacaaatcaaccatgacaagtgatgagtacaagaatgctgttatgcaggctaaggagcatattatggctggtgatattttccagattgttttaagccagaggtttgagaggcgaacatacgccaatccatttgaagtctatcgagctttacgaattgtgaacccaagtccatacatggcatatgtacaggcaagaggctgtgtcctggtagcatctagtccagaaattcttactcgtgtgaggaagggtaaaattattaaccgtccacttgctgggactgttcgaaggggcaagacagagaaggaagatgaaatgcaagagcaacagctactaagtgatgaaaaacagtgtgctgaacatattatgcttgtagatttgggaaggaatgatgttggaaaggtctccaaacctggatctgtgaaggtggagaaattaatgaacattgaacgctactcccatgtcatgcacatcagttccacggtgagtggagagttggatgatcatctccaaagttgggatgccctgcgagccgcgttgcctgttggaacagttagtggagcaccaaaggtgaaagccatggagctgatagacgagctagaggtcacaagacgaggaccatacagtggcggccttggagggatatcatttgacggagacatgcttatcgctcttgcactccgcaccattgtgttctcaacagcgccaagccacaacacgatgtactcatacaaagacaccgagaggcgccgggagtgggtcgctcaccttcaggctggtgctggcattgtcgctgatagcagcccagacgacgagcaacgtgaatgcgagaacaaggcagccgctctggctcgagccatcgatcttgctgaatcagctttcgtagacaaggaatag

SEQ ID NO: 76849 - protein, 606 aa, Oryza sativa
MESIAAATFTPSRLAARPATPAAAAAPVRARAAVAAGGRRRTSRRGGVRCSAGKPEASAVINGSAAARAAEEDRRRFFEAAERGSGKGNLVPMWECIVSDHLTPVLAYRCLVPEDNMETPSFLFESVEQGPEGTTNVGRYSMVGAHPVMEVVAKEHKVTIMDHEKGKVTEQVVDDPMQIPRSMMEGWHPQQIDQLPDSFTGGWVGFFSYDTVRYVEKKKLPFSGAPQDDRNLPDVHLGLYDDVLVFDNVEKKVYVIHWVNLDRHATTEDAFQDGKSRLNLLLSKVHNSNVPKLSPGFVKLHTRQFGTPLNKSTMTSDEYKNAVMQAKEHIMAGDIFQIVLSQRFERRTYANPFEVYRALRIVNPSPYMAYVQARGCVLVASSPEILTRVRKGKIINRPLAGTVRRGKTEKEDEMQEQQLLSDEKQCAEHIMLVDLGRNDVGKVSKPGSVKVEKLMNIERYSHVMHISSTVSGELDDHLQSWDALRAALPVGTVSGAPKVKAMELIDELEVTRRGPYSGGLGGISFDGDMLIALALRTIVFSTAPSHNTMYSYKDTERRREWVAHLQAGAGIVADSSPDDEQRECENKAAALARAIDLAESAFVDKE

SEQ ID NO: 76850 - DNA, 1782 bp, Oryza sativa
  CDS (1)..(1782)
atggagtccatcgccgccgccacgttcacgccctcgcgcctcgccgcccgccccgccactccggcggcggcggcggccccggttagagcgagggcggcggtagcggcaggagggaggaggaggacgagtaggcgcggcggcgtgaggtgctccgcggggaagccagaggcaagcgcggtgatcaacgggagcgcggcggcgcgggcggcggaggaggacaggaggcgcttcttcgaggcggcggagcgtgggagcgggaagggcaacctggtgcccatgtgggagtgcatcgtctccgaccacctcacccccgtgctcgcctaccgctgcctcgtccccgaggacaacatggagacgcccagcttcctcttcgagtccgtcgagcaggggcccgagggcaccaccaacgtcggtcgctatagcatggtgggagcccacccagtgatggaggtcaagggcaaggtgacggagcaggtcgtggatgatcctatgcagatccccaggagcatgatggaaggatggcacccgcagcagatcgatcagctccccgattccttcaccggtggatgggtcgggttcttttcctatgatacagtccgttatgttgaaaagaagaagctgcccttctccggtgctccccaggacgataggaaccttcctgatgttcaccttgggctttatgatgatgttctcgtcttcgacaatgtcgagaagaaagtatatgtcatccattgggtaaatcttgatcggcatgcaaccaccgaggatgcattccaagatggcaagtcccggctgaacctgttgctatctaaagtgcacaattcaaatgtacccaagctttctccaggatttgtaaagttacacactcggcagtttggtacacctttgaacaaatcaaccatgacaagtgatgagtacaagaatgctgttatgcaggctaaggagcatattatggctggtgatattttccagattgttttaagccagaggtttgagaggcgaacatacgccaatccatttgaagtctatcgagctttacgaattgtgaacccaagtccatacatggcatatgtacaggcaagaggctgtgtcctggtagcatctagtccagaaattcttactcgtgtgaggaagggtaaaattattaaccgtccacttgctgggactgttcgaaggggcaagacagagaaggaagatgaaatgcaagagcaacagctactaagtgatgaaaaacagtgtgctgaacatattatgcttgtagatttgggaaggaatgatgttggaaaggtctccaaacctggatctgtgaaggtggagaaattaatgaacattgaacgctactcccatgtcatgcacatcagttccacggtgagtggagagttggatgatcatctccaaagttgggatgccctgcgagccgcgttgcctgttggaacagttagtggagcaccaaaggtgaaagccatggagctgatagacgagctagaggtcacaagacgaggaccatacagtggcggccttggagggatatcatttgacggagacatgcttatcgctcttgcactccgcaccattgtgttctcaacagcgccaagccacaacacgatgtactcatacaaagacaccgagaggcgccgggagtgggtcgctcaccttcaggctggtgctggcattgtcgctgatagcagcccagacgacgagcaacgtgaatgcgagaacaaggcagccgctctggctcgagccatcgatcttgctgaatcagctttcgtagacaaggaatag

SEQ ID NO: 76851 - protein, 593 aa, Oryza sativa
MESIAAATFTPSRLAARPATPAAAAAPVRARAAVAAGGRRRTSRRGGVRCSAGKPEASAVINGSAAARAAEEDRRRFFEAAERGSGKGNLVPMWECIVSDHLTPVLAYRCLVPEDNMETPSFLFESVEQGPEGTTNVGRYSMVGAHPVMEVKGKVTEQVVDDPMQIPRSMMEGWHPQQIDQLPDSFTGGWVGFFSYDTVRYVEKKKLPFSGAPQDDRNLPDVHLGLYDDVLVFDNVEKKVYVIHWVNLDRHATTEDAFQDGKSRLNLLLSKVHNSNVPKLSPGFVKLHTRQFGTPLNKSTMTSDEYKNAVMQAKEHIMAGDIFQIVLSQRFERRTYANPFEVYRALRIVNPSPYMAYVQARGCVLVASSPEILTRVRKGKIINRPLAGTVRRGKTEKEDEMQEQQLLSDEKQCAEHIMLVDLGRNDVGKVSKPGSVKVEKLMNIERYSHVMHISSTVSGELDDHLQSWDALRAALPVGTVSGAPKVKAMELIDELEVTRRGPYSGGLGGISFDGDMLIALALRTIVFSTAPSHNTMYSYKDTERRREWVAHLQAGAGIVADSSPDDEQRECENKAAALARAIDLAESAFVDKE

SEQ ID NO: 76852 - DNA, 1545 bp, Oryza sativa
  CDS (1)..(1545)
atgtgggagtgcatcgtctccgaccacctcacccccgtgctcgcctaccgctgcctcgtccccgaggacaacatggagacgcccagcttcctcttcgagtccgtcgagcaggggcccgagggcaccaccaacgtcggtcgctatagcatggtgggagcccacccagtgatggaggtcgtggcaaaggagcacaaggtcacaatcatggaccacgagaagggcaaggtgacggagcaggtcgtggatgatcctatgcagatccccaggagcatgatggaaggatggcacccgcagcagatcgatcagctccccgattccttcaccggtggatgggtcgggttcttttcctatgatacagtccgttatgttgaaaagaagaagctgcccttctccggtgctccccaggacgataggaaccttcctgatgttcaccttgggctttatgatgatgttctcgtcttcgacaatgtcgagaagaaagtatatgtcatccattgggtaaatcttgatcggcatgcaaccaccgaggatgcattccaagatggcaagtcccggctgaacctgttgctatctaaagtgcacaattcaaatgtacccaagctttctccaggatttgtaaagttacacactcggcagtttggtacacctttgaacaaatcaaccatgacaagtgatgagtacaagaatgctgttatgcaggctaaggagcatattatggctggtgatattttccagattgttttaagccagaggtttgagaggcgaacatacgccaatccatttgaagtctatcgagctttacgaattgtgaacccaagtccatacatggcatatgtacaggcaagaggctgtgtcctggtagcatctagtccagaaattcttactcgtgtgaggaagggtaaaattattaaccgtccacttgctgggactgttcgaaggggcaagacagagaaggaagatgaaatgcaagagcaacagctactaagtgatgaaaaacagtgtgctgaacatattatgcttgtagatttgggaaggaatgatgttggaaaggtctccaaacctggatctgtgaaggtggagaaattaatgaacattgaacgctactcccatgtcatgcacatcagttccacggtgagtggagagttggatgatcatctccaaagttgggatgccctgcgagccgcgttgcctgttggaacagttagtggagcaccaaaggtgaaagccatggagctgatagacgagctagaggtcacaagacgaggaccatacagtggcggccttggagggatatcatttgacggagacatgcttatcgctcttgcactccgcaccattgtgttctcaacagcgccaagccacaacacgatgtactcatacaaagacaccgagaggcgccgggagtgggtcgctcaccttcaggctggtgctggcattgtcgctgatagcagcccagacgacgagcaacgtgaatgcgagaacaaggcagccgctctggctcgagccatcgatcttgctgaatcagctttcgtagacaaggaatag

SEQ ID NO: 76853 - protein, 514 aa, Oryza sativa
MWECIVSDHLTPVLAYRCLVPEDNMETPSFLFESVEQGPEGTTNVGRYSMVGAHPVMEVVAKEHKVTIMDHEKGKVTEQVVDDPMQIPRSMMEGWHPQQIDQLPDSFTGGWVGFFSYDTVRYVEKKKLPFSGAPQDDRNLPDVHLGLYDDVLVFDNVEKKVYVIHWVNLDRHATTEDAFQDGKSRLNLLLSKVHNSNVPKLSPGFVKLHTRQFGTPLNKSTMTSDEYKNAVMQAKEHIMAGDIFQIVLSQRFERRTYANPFEVYRALRIVNPSPYMAYVQARGCVLVASSPEILTRVRKGKIINRPLAGTVRRGKTEKEDEMQEQQLLSDEKQCAEHIMLVDLGRNDVGKVSKPGSVKVEKLMNIERYSHVMHISSTVSGELDDHLQSWDALRAALPVGTVSGAPKVKAMELIDELEVTRRGPYSGGLGGISFDGDMLIALALRTIVFSTAPSHNTMYSYKDTERRREWVAHLQAGAGIVADSSPDDEQRECENKAAALARAIDLAESAFVDKE

SEQ ID NO: 76854 - DNA, 1797 bp, Brassica napus
  CDS (1)..(1797)
atgtcttcttcctccatgaacgtggcgtccatgcaacaaccgctgagcttctctcgccggctcgctccctccgctgcttcttctcacgtactctcttcttcttccgtgaccgttactggctattcccgtagaagctcgccttacgcgccttctctccgttcgattaaatgcgtctctgcgccaccggaagcttcaatagtgactgatacaaaaaagctggcagatgcgtctaagagcacgaaccttataccaatatacagctgcattttctcggatcagctcactcccgttcttgcttaccgttgcttggtcaaagaagatgaccgtgaagctcctagctttctttttgagtccgttgagcctggctctcagatgtccagcgttggtcgttatagcgttgttggggctcagcctgcgatggagatcgtggcaaaggaggataaagttattgtaatggatcacaaaagtggaagcttgactgaggaatacgttgaggatccaatggagatcccgaggaaaatctctgagtcgtggaaccctgatcctcaactagttcaggaccttcctgatgcgttttgtggtggctgggttggtttcttctcgtacgacacagttcgctacgtcgaaaaaaggaaacttccattttcaaaggcccctgaggatgataggaacttgccggacatgcatcttggtctatacgacgatgttattgtatttgatcacgtggagaagaaagcatatgttatccactggattagactagatgggagcgttccctatgagaaggcatacagtaatggagtgcagcatttggagacattggtggctaagttacacgatattgaaccgccaaagctggctgcaggtaacgtgaatcttcagacgcgacaatttggaccagcgttggaaaactcaaacgtgacgcgcgaagagtacaaggaggctgtggtgaatgctaaagaacacatacttgctggagacatattccagattgtgttgagtcagcgttttgaaaggagaacatttgctgacccctttgaagtttatagagctcttagagttgtgaatccaagtccctatatgggttatttgcaggctagaggatgtatattggtggcatcaagtccagaaattctcaccaaagtaaagcagaacaagatagtgaatcggccactagcaggaaccagcaggcgagggaaaacagacgtggaagataaaagattagagaaggagctgctagagaacgagaagcaatgcgctgagcacatcatgttggtcgatctcggtcgcaacgatgttggaaaggttgctaaatacggttcggtgaaagtggagaaactcatgaacatcgaacgttattcccatgttatgcatataagctccacggtgacaggagagttacaagatgatttatcttgctgggacacactacgtgcggctctaccagtgggaacagttagtggagcaccaaaggtaaaagccatggaactaatcgacgagctcgagcctacacggcgaggaccatacagtggaggttttggtggagtctccttcactggcgacatggacattgctttatcacttaggacaatagttttcccgacggcaagtcaatacaacacaatgtactcttacaaagatgctaacaaacgccgtgaatgggtggcttatcttcaagctggagcaggtgtggtagcagacagtgacccggaggacgagcaccgcgagtgccagaacaaagccgctggtcttgcccgagccatcgacttggctgaatccgcttttgttaaaaaatga

SEQ ID NO: 76855 - protein, 598 aa, Brassica napus
MSSSSMNVASMQQPLSFSRRLAPSAASSHVLSSSSVTVTGYSRRSSPYAPSLRSIKCVSAPPEASIVTDTKKLADASKSTNLIPIYSCIFSDQLTPVLAYRCLVKEDDREAPSFLFESVEPGSQMSSVGRYSVVGAQPAMEIVAKEDKVIVMDHKSGSLTEEYVEDPMEIPRKISESWNPDPQLVQDLPDAFCGGWVGFFSYDTVRYVEKRKLPFSKAPEDDRNLPDMHLGLYDDVIVFDHVEKKAYVIHWIRLDGSVPYEKAYSNGVQHLETLVAKLHDIEPPKLAAGNVNLQTRQFGPALENSNVTREEYKEAVVNAKEHILAGDIFQIVLSQRFERRTFADPFEVYRALRVVNPSPYMGYLQARGCILVASSPEILTKVKQNKIVNRPLAGTSRRGKTDVEDKRLEKELLENEKQCAEHIMLVDLGRNDVGKVAKYGSVKVEKLMNIERYSHVMHISSTVTGELQDDLSCWDTLRAALPVGTVSGAPKVKAMELIDELEPTRRGPYSGGFGGVSFTGDMDIALSLRTIVFPTASQYNTMYSYKDANKRREWVAYLQAGAGVVADSDPEDEHRECQNKAAGLARAIDLAESAFVKK

SEQ ID NO: 76856 - DNA, 1815 bp, Zea mays
  CDS (1)..(1815)
atggaatccctagccgccacctccgtgttcgcgccctcccgcgtcgccgtcccggcggcgcgggccctggttagggcggggacggtggtaccaaccaggcggacgagcagccggagcggaaccagcggggtgaaatgctctgctgccgtgacgccgcaggcgagcccagtgattagcaggagcgctgcggcggcgaaggcggcggaggaggacaagaggcggttcttcgaggcggcggcgcgggggagcgggaaggggaacctggtgcccatgtgggagtgcatcgtgtcggaccatctcacccccgtgctcgcctaccgctgcctcgtccccgaggacaacgtcgacgcccccagcttcctcttcgagtccgtcgagcaggggccccagggcaccaccaacgtcggccgctacagcatggtgggagcccacccagtgatggagattgtggccaaagaccacaaggttacgatcatggaccacgagaagagccaagtgacagagcaggtagtggacgacccgatgcagatcccgaggaccatgatggagggatggcacccacagcagatcgacgagctccctgaatccttctccggtggatgggttgggttcttttcctatgatacggttaggtatgttgagaagaagaagctaccgttctccagtgctcctcaggacgataggaaccttcctgatgtgcacttgggactctatgatgatgttctagtcttcgataatgttgagaagaaagtatatgttatccattgggtcaatgtggaccggcatgcatctgttgaggaagcataccaagatggcaggtcccgactaaacatgttgctatctaaagtgcacaattccaatgtccccacactctctcctggatttgtgaagctgcacacacgcaagtttggtacacctttgaacaagtcgaccatgacaagtgatgagtataagaatgctgttctgcaggctaaggaacatattatggctggggatatcttccagattgttttaagccagaggttcgagagacgaacatatgccaacccatttgaggtttatcgagcattacggattgtgaatcctagcccatacatggcgtatgtacaggcaagaggctgtgtattggttgcgtctagtcctgaaattcttacacgagtcagtaaggggaagattattaatcgaccacttgctggaactgttcgaaggggcaagacagagaaggaagatcaaatgcaagagcaacaactgttaagtgatgaaaaacagtgtgccgagcacataatgcttgtggacttgggaaggaatgatgttggcaaggtatccaaaccaggatcagtgaaggtggagaagttgatgaacattgagagatactcccatgttatgcacatcagctcaacggttagtggacagttggatgatcatctccagagttgggatgccttgagagctgccttgcccgttggaacagtcagtggtgcaccaaaggtgaaggccatggagttgattgataagttggaagttacgaggcgaggaccatatagtggtggtctaggaggaatatcgtttgatggtgacatgcaaattgcactttctctccgcaccatcgtattctcaacagcgccgagccacaacacgatgtactcatacaaagacgcagataggcgtcgggagtgggtcgctcatcttcaggctggtgcaggcattgttgccgacagtagcccagatgacgaacaacgtgaatgcgagaataaggctgctgcactagctcgggccatcgatcttgcagagtcagcttttgtagacaaagaatag

SEQ ID NO: 76857 - protein, 604 aa, Zea mays
MESLAATSVFAPSRVAVPAARALVRAGTVVPTRRTSSRSGTSGVKCSAAVTPQASPVISRSAAAAKAAEEDKRRFFEAAARGSGKGNLVPMWECIVSDHLTPVLAYRCLVPEDNVDAPSFLFESVEQGPQGTTNVGRYSMVGAHPVMEIVAKDHKVTIMDHEKSQVTEQVVDDPMQIPRTMMEGWHPQQIDELPESFSGGWVGFFSYDTVRYVEKKKLPFSSAPQDDRNLPDVHLGLYDDVLVFDNVEKKVYVIHWVNVDRHASVEEAYQDGRSRLNMLLSKVHNSNVPTLSPGFVKLHTRKFGTPLNKSTMTSDEYKNAVLQAKEHIMAGDIFQIVLSQRFERRTYANPFEVYRALRIVNPSPYMAYVQARGCVLVASSPEILTRVSKGKIINRPLAGTVRRGKTEKEDQMQEQQLLSDEKQCAEHIMLVDLGRNDVGKVSKPGSVKVEKLMNIERYSHVMHISSTVSGQLDDHLQSWDALRAALPVGTVSGAPKVKAMELIDKLEVTRRGPYSGGLGGISFDGDMQIALSLRTIVFSTAPSHNTMYSYKDADRRREWVAHLQAGAGIVADSSPDDEQRECENKAAALARAIDLAESAFVDKE

SEQ ID NO: 76858 - DNA, 1734 bp, Zea mays
  CDS (1)..(1734)
atggccaccgccagcctcgcgctctcgctgcgcctcgcgccgtcctcgcgcccgctgagcctccgccgccggggggccgccggcgtcacctgccgcgccaccaccgccacgttccaccagctcgacgccgtcgcggtgagggaggaggagtccaggttccggacggcggcggcggagggccgcaacctgctgccgctcacgaggtgcatcttctccgatcacctcacgcccgtgctagcgtaccgctgtctcgttaaggaggacgaacgcgatgcgcccagctttctcttcgagtctgtcgagcaggggtccgagggcaccaatgtggggaggtacagcgtggtcggggcgcagccttctatggaggtcgtggccaaggctaaccatgtgacggtcatggaccatgagatgaagtcgaggagggagcacttcgtgcctgatcccatgaggatccccaggacaatcatggagcagtggaacccgcagattgctgacagcctccctgatgcattttgtggaggatgggttggattcttctcatatgatacagtgcgttatgttgaaacaaagaagcttcctttcagtaaggcaccacatgacgataggaaccttcctgacattcatttaggcctctatagtgacgtcattgtgtttgatcatgttgaaaagaaaacacatgttattcattgggtgaggacagactgctatcgttctgttgatgaagcatatgaagatggaagaaatcggcttgaagctttgttatcaagattacattgcctcaatgtcccaacactttcttctggttctataaaactcaatgttgaaaactttggcccagtaatgcaaaaatcaacgatgtcaagcgaagaatataaaaatatcgttgtccaagctaaagaacacatcttggccggtgacattttccaagttgttttaagccagcgttttgagagacggacattcgccgacccctttgaaatctatcgtgcattgcgcatcgtaaatcctagtccatatatggcctatctacaggcacgaggttgtattctcgtggcatcgagtcctgaaattcttacccgggtacaaaagaggacaataatcaatcgtccgcttgctggaaccataagaagaggcaaaacaaaagcagaagacaaaactttagaacaattgcttttgagtgatgaaaagcagtgtgctgaacatattatgctagtagatcttggccgaaatgatgttgggaaggtgtccaaaccaggttcagtaaaggtagagaaattgatgaatatcgaacgatattctcatgtcatgcacatcagctcaacagtaactggagagctacgcgatgatcttacgtgttgggatgcgctacgagccgcattgccagttggaaccgttagtggcgctccaaaggtgagagcaatggagttgattgatcagctagaagtgagtatgcgtgggccgtatagtggtggttttggagggatttccttccgcggcgacatggacattgcactcgctcttcgcactattgtcttccccaccgcatctaggtttgataccatgtactcgtacacagacagtaagtcccggcaggagtgggtggctcacctccaggccggagctggcatagttgctgatagcaaaccggatgacgagcaccaagagtgtataaacaaggctgcaggtgttgctcgtgccattgaccttgctgaatcgacatttcttgaagagtag

SEQ ID NO: 76859 - protein, 577 aa, Zea mays
MATASLALSLRLAPSSRPLSLRRRGAAGVTCRATTATFHQLDAVAVREEESRFRTAAAEGRNLLPLTRCIFSDHLTPVLAYRCLVKEDERDAPSFLFESVEQGSEGTNVGRYSVVGAQPSMEVVAKANHVTVMDHEMKSRREHFVPDPMRIPRTIMEQWNPQIADSLPDAFCGGWVGFFSYDTVRYVETKKLPFSKAPHDDRNLPDIHLGLYSDVIVFDHVEKKTHVIHWVRTDCYRSVDEAYEDGRNRLEALLSRLHCLNVPTLSSGSIKLNVENFGPVMQKSTMSSEEYKNIVVQAKEHILAGDIFQVVLSQRFERRTFADPFEIYRALRIVNPSPYMAYLQARGCILVASSPEILTRVQKRTIINRPLAGTIRRGKTKAEDKTLEQLLLSDEKQCAEHIMLVDLGRNDVGKVSKPGSVKVEKLMNIERYSHVMHISSTVTGELRDDLTCWDALRAALPVGTVSGAPKVRAMELIDQLEVSMRGPYSGGFGGISFRGDMDIALALRTIVFPTASRFDTMYSYTDSKSRQEWVAHLQAGAGIVADSKPDDEHQECINKAAGVARAIDLAESTFLEE

SEQ ID NO: 76860 - DNA, 24 bp, Artificial sequence
  primer
atgcaaacacaaaaaccgactctc

SEQ ID NO: 76861 - DNA, 25 bp, Artificial sequence
  primer
ttagaaagtctcctgtgcatgatgc

SEQ ID NO: 76862 - protein, 597 aa, Artificial sequence
  consensus sequence
  Variant (2)..(2): Xaa in position 2 is any amino acid
  Variant (5)..(8): Xaa in position 5 to 8 is any amino acid
  Variant (9)..(29): Xaa in position 9 to 29 is any or no amino acid
  Variant (31)..(72): Xaa in position 31 to 72 is any amino acid
  Variant (73)..(137): Xaa in position 73 to 137 is any or no amino acid
  Variant (139)..(141): Xaa in position 139 to 141 is any amino acid
  Variant (143)..(158): Xaa in position 143 to 158 is any amino acid
  Variant (159)..(169): Xaa in position 159 to 169 is any or no amino acid
  Variant (171)..(182): Xaa in position 171 to 182 is any amino acid
  Variant (183)..(183): Xaa in position 183 is any or no amino acid
  Variant (185)..(226): Xaa in position 185 to 226 is any amino acid
  Variant (227)..(279): Xaa in position 227 to 279 is any or no amino acid
  Variant (281)..(289): Xaa in position 281 to 289 is any amino acid
  Variant (292)..(293): Xaa in position 292 to 293 is any amino acid
  Variant (295)..(295): Xaa in position 295 is any amino acid
  Variant (297)..(297): Xaa in position 297 is any amino acid
  Variant (299)..(307): Xaa in position 299 to 307 is any amino acid
  Variant (308)..(314): Xaa in position 308 to 314 is any or no amino acid
  Variant (316)..(318): Xaa in position 316 to 318 is any amino acid
  Variant (320)..(321): Xaa in position 320 to 321 is any amino acid
  Variant (323)..(325): Xaa in position 323 to 325 is any amino acid
  Variant (331)..(341): Xaa in position 331 to 341 is any amino acid
  Variant (342)..(351): Xaa in position 342 to 351 is any or no amino acid
  Variant (353)..(353): Xaa in position 353 is any amino acid
  Variant (357)..(369): Xaa in position 357 to 369 is any amino acid
  Variant (370)..(385): Xaa in position 370 to 385 is any or no amino acid
  Variant (391)..(392): Xaa in position 391 to 392 is any amino acid
  Variant (395)..(398): Xaa in position 395 to 398 is any amino acid
  Variant (399)..(405): Xaa in position 399 to 405 is any or no amino acid
  Variant (407)..(411): Xaa in position 407 to 411 is any amino acid
  Variant (412)..(412): Xaa in position 412 is any or no amino acid
  Variant (414)..(417): Xaa in position 414 to 417 is any amino acid
  Variant (419)..(420): Xaa in position 419 to 420 is any amino acid
  Variant (421)..(421): Xaa in position 421 is any or no amino acid
  Variant (425)..(425): Xaa in position 425 is any amino acid
  Variant (428)..(428): Xaa in position 428 is any amino acid
  Variant (431)..(431): Xaa in position 431 is any amino acid
  Variant (435)..(436): Xaa in position 435 to 436 is any amino acid
  Variant (438)..(440): Xaa in position 438 to 440 is any amino acid
  Variant (441)..(441): Xaa in position 441 is any or no amino acid
  Variant (443)..(444): Xaa in position 443 to 444 is any amino acid
  Variant (445)..(447): Xaa in position 445 to 447 is any or no amino acid
  Variant (449)..(456): Xaa in position 449 to 456 is any amino acid
  Variant (461)..(461): Xaa in position 461 is any amino acid
  Variant (463)..(463): Xaa in position 463 is any amino acid
  Variant (466)..(466): Xaa in position 466 is any amino acid
  Variant (468)..(468): Xaa in position 468 is any amino acid
  Variant (470)..(470): Xaa in position 470 is any amino acid
  Variant (472)..(486): Xaa in position 472 to 486 is any amino acid
  Variant (487)..(488): Xaa in position 487 to 488 is any or no amino acid
  Variant (491)..(491): Xaa in position 491 is any amino acid
  Variant (492)..(492): Xaa in position 492 is any or no amino acid
  Variant (497)..(497): Xaa in position 497 is any amino acid
  Variant (498)..(498): Xaa in position 498 is any or no amino acid
  Variant (501)..(502): Xaa in position 501 to 502 is any amino acid
  Variant (504)..(505): Xaa in position 504 to 505 is any amino acid
  Variant (506)..(506): Xaa in position 506 is any or no amino acid
  Variant (508)..(510): Xaa in position 508 to 510 is any amino acid
  Variant (513)..(513): Xaa in position 513 is any amino acid
  Variant (515)..(515): Xaa in position 515 is any amino acid
  Variant (517)..(518): Xaa in position 517 to 518 is any amino acid
  Variant (520)..(523): Xaa in position 520 to 523 is any amino acid
  Variant (524)..(524): Xaa in position 524 is any or no amino acid
  Variant (526)..(533): Xaa in position 526 to 533 is any amino acid
  Variant (534)..(544): Xaa in position 534 to 544 is any or no amino acid
  Variant (547)..(555): Xaa in position 547 to 555 is any amino acid
  Variant (556)..(575): Xaa in position 556 to 575 is any or no amino acid
  Variant (579)..(579): Xaa in position 579 is any amino acid
  Variant (581)..(581): Xaa in position 581 is any amino acid
  Variant (583)..(583): Xaa in position 583 is any amino acid
  Variant (586)..(586): Xaa in position 586 is any amino acid
  Variant (588)..(589): Xaa in position 588 to 589 is any amino acid
  Variant (591)..(592): Xaa in position 591 to 592 is any amino acid
  Variant (594)..(596): Xaa in position 594 to 596 is any amino acid
LXESXXXXXXXXXXXXXXXXXXXXXXXXXRXXXXXXXXXXXXXXXXXXXXXXXXXXXXXXXXXXXXXXXXXXXXXXXXXXXXXXXXXXXXXXXXXXXXXXXXXXXXXXXXXXXXXXXXXXXXXXXXXXXXXXXXXXXGXXXYXXXXXXXXXXXXXXXXXXXXXXXXXXXPXXXXXXXXXXXXXDXXXXXXXXXXXXXXXXXXXXXXXXXXXXXXXXXXXXXXXXXXXXXXXXXXXXXXXXXXXXXXXXXXXXXXXXXXXXXXXXXXXXXXXXXXXXXXXVXXXXXXXXXGDXXQXVXSXXXXXXXXXXXXXXXXPXXXYXXLXXXNPSPYXXXXXXXXXXXXXXXXXXXXXGXSPEXXXXXXXXXXXXXXXXXXXXXXXXXXXXXPIAGTXXRGXXXXXXXXXXXDXXXXXXLXXXXKXXXAEHXMLXDLXRNDXXRXXXXGXXXXXVXXXXXXXXYSHVXHXVSXVXGXLXXXXXXXXXXXXXXXXXGTXXGAPKXXAMXXIXXXEXXXRGXYXGXXGXXXXXGXXXXXXXXXXXXXXXXXXXRTXXXXXXXXXXXXXXXXXXXXXXXXXXXXXQAGXGXVXDSXPXXEXXEXXXK

SEQ ID NO: 76863 - protein, 24 aa, Artificial sequence
  protein pattern
  Variant (2)..(2): Xaa in position 2 is Glu or Gln
  Variant (3)..(3): Xaa in position 3 is any amino acid
  Variant (4)..(4): Xaa in position 4 is Ala or Ser
  Variant (7)..(7): Xaa in position 7 is any amino acid
  Variant (10)..(10): Xaa in position 10 is Ile, Leu or Val
  Variant (13)..(13): Xaa in position 13 is Ala, Glu, Gly or Ser
  Variant (17)..(17): Xaa in position 17 is any amino acid
  Variant (18)..(23): Xaa in position 18 to 23 is any or no amino acid
KXXXEHXMLXDLXRNDXXXXXXXG

SEQ ID NO: 76864 - protein, 19 aa, Artificial sequence
  protein pattern
  Variant (3)..(3): Xaa in position 3 is Leu or Val
  Variant (4)..(4): Xaa in position 4 is Ser, Thr or Val
  Variant (9)..(9): Xaa in position 9 is Ile, Leu, Pro or Val
  Variant (10)..(10): Xaa in position 10 is Glu, His, Lys or Arg
  Variant (12)..(12): Xaa in position 12 is any amino acid
  Variant (13)..(18): Xaa in position 13 to 18 is any or no amino acid
GTXXGAPKXXAXXXXXXXE

SEQ ID NO: 76865 - protein, 24 aa, Artificial sequence
  protein pattern
  Variant (2)..(2): Xaa in position 2 is Ala, Cys or Gly
  Variant (4)..(4): Xaa in position 4 is any or no amino acid
  Variant (6)..(6): Xaa in position 6 is any amino acid
  Variant (7)..(7): Xaa in position 7 is any or no amino acid
  Variant (10)..(13): Xaa in position 10 to 13 is any amino acid
  Variant (15)..(16): Xaa in position 15 to 16 is any amino acid
  Variant (18)..(18): Xaa in position 18 is Ala, Cys, Ser or Thr
  Variant (19)..(20): Xaa in position 19 to 20 is any amino acid
  Variant (22)..(23): Xaa in position 22 to 23 is any amino acid
  Variant (24)..(24): Xaa in position 24 is Ala, Gly, Ser or Val
GXGXVXXDSXXXXEXXEXXXKXXX

SEQ ID NO: 76866 - protein, 13 aa, Artificial sequence
  protein pattern
  Variant (2)..(3): Xaa in position 2 to 3 is any amino acid
  Variant (5)..(5): Xaa in position 5 is Lys or Arg
  Variant (6)..(7): Xaa in position 6 to 7 is any amino acid
  Variant (12)..(12): Xaa in position 12 is Phe or Tyr
  Variant (13)..(13): Xaa in position 13 is Leu or Met
YXXLXXXNPSPXX

SEQ ID NO: 76867 - DNA, 1293 bp, Escherichia coli
  CDS (1)..(1293): transl_table=11
atgattaaatcaaaaatcgtgctgttatcagcactggtttcatgcgccctgatttcaggctgtaaagaagaaaataaaacgaatgtatccatcgaatttatgcattcttcggtggagcaggagcgccaggccgttatcagtaaattgattgcccgttttgaaaaagaaaaccctggcatcaccgttaagcaagtgcccgtggaagaagatgcctataacactaaagtcattactctttcacgtagcggttcgctgccggaagtgatcgaaaccagccatgactacgccaaagtgatggacaaagagcagcttatcgatcgcaaagcggttgccacagtcatcagcaacgttggtgaaggcgcgttttacgatggcgtactgcgtattgtgcgtaccgaagatggtagcgcatggaccggtgttcctgtcagcgcctggattggcggtatctggtatcgcaaagatgtgctggcaaaagcggggcttgaggagccgaaaaactggcaacagctgctggacgttgcacagaaactgaatgacccggcgaataaaaaatacggcattgcgctgcctacagcagaaagcgtgttgacggaacaatccttctcccagtttgcgttatccaaccaggctaacgtctttaacgccgaaggcaaaatcacccttgatacaccagagatgatgcaggcactgacctattaccgcgaccttactgccaacactatgccgggttctaacgacatcatggaagtgaaagacgcctttatgaacggcaccgcgccgatggcgatttactccacctatatccttccggctgtgattaaagaaggcgacccgaaaaacgtcggtttcgtggtgccaaccgagaaaaactctgcggtctacggcatgttgacctcgctgaccattaccgccgggcaaaagaccgaagagacggaagcagcagaaaaatttgtcacctttatggagcaggcagacaacattgccgactgggtgatgatgtcgccaggtgctgcgctgccggtgaataaagcggtggtgactaccgccacctggaaagacaacgacgttattaaggcgctgggtgaactaccgaatcagctaatcggtgaactgccaaatattcaggtttttggcgcagtaggggataaaaactttacccgcatgggtgatgtgacgggttctggcgtggtgagttcaatggtgcataacgtcaccgtgggtaaagccgatctctctactacgctgcaagcgagccagaaaaaactggatgaactgatcgaacagcactaa

SEQ ID NO: 76868 - protein, 430 aa, Escherichia coli
MIKSKIVLLSALVSCALISGCKEENKTNVSIEFMHSSVEQERQAVISKLIARFEKENPGITVKQVPVEEDAYNTKVITLSRSGSLPEVIETSHDYAKVMDKEQLIDRKAVATVISNVGEGAFYDGVLRIVRTEDGSAWTGVPVSAWIGGIWYRKDVLAKAGLEEPKNWQQLLDVAQKLNDPANKKYGIALPTAESVLTEQSFSQFALSNQANVFNAEGKITLDTPEMMQALTYYRDLTANTMPGSNDIMEVKDAFMNGTAPMAIYSTYILPAVIKEGDPKNVGFVVPTEKNSAVYGMLTSLTITAGQKTEETEAAEKFVTFMEQADNIADWVMMSPGAALPVNKAVVTTATWKDNDVIKALGELPNQLIGELPNIQVFGAVGDKNFTRMGDVTGSGVVSSMVHNVTVGKADLSTTLQASQKKLDELIEQH

SEQ ID NO: 76869 - DNA, 1293 bp, Listeria monocytogenes EGD-e
  CDS (1)..(1293): transl_table=11
atgaagaaaaagagtcttgtattacttgttgttgtgttggttctaagtgcggttctagctgcatgtggaggaaaagagtctggtagtaaggaagtaacgattgaatttatgcattcatccgttgaaaaagagcgtttagatgttattaataaattaattgctgattttgaaaaagaaaatccaacaatcaaaatcaaacaaattccagtagaggaagatgctttcaatacaaaagttgtcacacttgctcgctctggtaaacttccagctgttatggaagtaagtcaagattttgccaaagtaatggataaagatgagttgattgaccaagatgcagtgaaagaagttattgattctgttggagaagacaaatactacgaaggcgcaacaaacttagtacgttctgaagatggtaaaagctatatcgcagcaccattaagcggttgggttcaaggtatttggtacaacaaaaaagctttagccgatgctggttttgaagaacctaaaaactgggcagatattgaaaaagtagcgaaaaaattcacgaataaagcagataaaaaatatggtattgcaattccaacagcagaaagcacgatgagtgagcaagctttctctcaattcgcactttctaacaaagcaaatgttttagatgcaaaaggtaatgtaacgattgatacaccagaaatgaaagaagcgcttcaatattacaaagatttgtcagcatacactatgcctggttcaaatgatgtaacggaaattaaagatgcatttatgaatggaacagttccaatggcaatgtactctacgtatatccttccatccgtttatgaagaaggcgatccaaaaaatatcggtttcgcaattccagaagaaaaagaaaaagcagtttatggaacagtttctggtttaactatctcagctggtttggatgacgagcaaaagaaagcaacgaagaaatttgttgaatacttgtctcaaccagaaaatatggcaacttgggtattaatgtctcctggcggggcgcaaccagtaaacaaagaagtagtagaacaaaaagcttacaaagaaaacgaagtaattaaatcgtttggtgatcttccaaatgaaattgcagcatctttcaatgacatccaagttttcggacttgttgacggtaaaaatctcacaaaaatgggagatattactagctcaggcattatcgcacaaatggttaataacgtaacagttggcggtggcgatgtatcagcggacctaaaagctgcacagaaaaaagctgaagaaggcaaataa

SEQ ID NO: 76870 - protein, 430 aa, Listeria monocytogenes EGD-e
MKKKSLVLLVVVLVLSAVLAACGGKESGSKEVTIEFMHSSVEKERLDVINKLIADFEKENPTIKIKQIPVEEDAFNTKVVTLARSGKLPAVMEVSQDFAKVMDKDELIDQDAVKEVIDSVGEDKYYEGATNLVRSEDGKSYIAAPLSGWVQGIWYNKKALADAGFEEPKNWADIEKVAKKFTNKADKKYGIAIPTAESTMSEQAFSQFALSNKANVLDAKGNVTIDTPEMKEALQYYKDLSAYTMPGSNDVTEIKDAFMNGTVPMAMYSTYILPSVYEEGDPKNIGFAIPEEKEKAVYGTVSGLTISAGLDDEQKKATKKFVEYLSQPENMATWVLMSPGGAQPVNKEVVEQKAYKENEVIKSFGDLPNEIAASFNDIQVFGLVDGKNLTKMGDITSSGIIAQMVNNVTVGGGDVSADLKAAQKKAEEGK

SEQ ID NO: 76871 - DNA, 1293 bp, Listeria innocua Clip11262
  CDS (1)..(1293): transl_table=11
atgaagaaaaaaagtcttgtattacttgttgttgtgttggttctaagtgcggtattagctgcatgtggagggaaagagtctggtagtaaggaagtaacaattgaatttatgcattcatccgttgaaaaagagcgtttagatgttattaataaattaattgctgattttgaaaaagaaaatccaacaatcaaaatcaaacaaattccagttgaagaagatgcttttaatacaaaagttgtcacacttgctcgttctggtaaacttccagcagttatggaagtaagccaagattttgccaaagtaatggataaagatcagttaattgaccaagatgcagtaaaagcagttatcgactcggttggagaagataaatactatgaaggtgcaacaaacttagtgcgttctgaagatggtaaaagctatatcgcagcaccattaagcggttgggttcaaggtatttggtacaacaaaaaagctttagccgatgctggttttgaagaaccaaaaaactgggcggatattgaaaaagtagcgaaaaaattcacgaataaagctgataaaaaatacggtattgcaattccaacagcagaaagtacgatgagtgagcaagctttctctcaattcgcactttctaacaaagccaatgttttagatgcaaaaggaaatgtaacgattgatacaccagaaatgaaagaggctcttcagtactacaaagatctttcagcgtacacaatgcctggttcaaatgacgtaactgaaattaaagatgcgtttatgaatggtactgttccaatggcaatgtactctacgtatattcttccatctgtatatgaagaaggcgacccatctaacatcggattcgctattccagaagaaaaagaaaaagcagtttatggaacagtttccggattgactatctctgctggtttggatgatgaccaaaagaaagcaacgaagaaatttgttgaatacttgtctcaaccagaaaatatggcaacgtgggtattaatgtctccaggtggcgcacaaccagtaaataaagaagtagtagaacaaaaagcatacaaagaaaatgaagtgattaaatcatttggtgatcttccaaacgaaatcgctgcatctttcaacgacatccaagttttcggacttgttgatggtaaaaacctaacaaaaatgggtgatataactagttcaggtattatcgcacaaatggttaacaacgtaactgttggcggtggggatgtttcagcggacttaaaagcagcacagaaaaaggcagaagaaggtaaataa

SEQ ID NO: 76872 - protein, 430 aa, Listeria innocua Clip11262
MKKKSLVLLVVVLVLSAVLAACGGKESGSKEVTIEFMHSSVEKERLDVINKLIADFEKENPTIKIKQIPVEEDAFNTKVVTLARSGKLPAVMEVSQDFAKVMDKDQLIDQDAVKAVIDSVGEDKYYEGATNLVRSEDGKSYIAAPLSGWVQGIWYNKKALADAGFEEPKNWADIEKVAKKFTNKADKKYGIAIPTAESTMSEQAFSQFALSNKANVLDAKGNVTIDTPEMKEALQYYKDLSAYTMPGSNDVTEIKDAFMNGTVPMAMYSTYILPSVYEEGDPSNIGFAIPEEKEKAVYGTVSGLTISAGLDDDQKKATKKFVEYLSQPENMATWVLMSPGGAQPVNKEVVEQKAYKENEVIKSFGDLPNEIAASFNDIQVFGLVDGKNLTKMGDITSSGIIAQMVNNVTVGGGDVSADLKAAQKKAEEGK

SEQ ID NO: 76873 - DNA, 1293 bp, Escherichia coli CFT073
  CDS (1)..(1293): transl_table=11
atgattaaatcaaaaatcgtgctgttatcagcactggtttcctgcgccctgatttcaggctgtaaagaagaaaataaaaataatgtatccatcgaatttatgcattcttcggtggagcaggagcgccaggccgtcatcagcaaattgattgcccgttttgaaaaagaaaacccaggtatcaccgtaaaacaagtgcccgtggaagaagacgcctataacaccaaagtcattaccctttcacgtagcggttcgctgccggaagtgatcgaaaccagccatgactacgccaaagtgatggacaaagagcagcttatcgatcgccaggcggttgccacggtcatcagcaacgtcggtgaaggcgcgttctacgatggcgtactgcggattgtgcgcaccgaagatggcagcgcctggaccggtgttcctgtcagcgcatggattggcgggatctggtatcgcaaagatgtgctggcaaaagctgggctggaggagccaaaaaactggcagcaattgctggacgttgcacagaaactgaatgacccggcgaataaaaaatacggtattgcgctgcctacagcagaaagcgtgttgacggaacagtctttctcccagtttgcgttatccaatcaggctaacgtctttaacgccgaaggcaaaatcacccttgatacaccagagatgatgcaggcgctgacctattaccgcaaccttgctgccaacaccatgccaggttctaacgacatcatggaagtgaaagacgcttttatgaacggcaccgcgccgatggcgatttactccacctatatccttccggctgtgattaaagaaggcgatccgaaaaacgtcggtttcgtggtgccaaccgagaaaaattctgcggtctacggcatgttgacctcgctgaccattaccgccgggcaaaaggccgaagagacggaagcagcagaaaaatttgtcacctttatggagcaggcggacaacattgccgactgggtgatgatgtcgccaggcgcggcgctgccggtgaacaaagcggtggtgactaccgccacctggaaagacaacgacgttattaaggcgctgggagaattgccgaatcagctaatcagcgaactgccaaatattcaggtctttggcgcagtaggggataaaaactttacccgcatgggcgatgtgacggggtctggcgtggtgagttcaatggtgcataacgtcaccgtggggaaagccgatctccctggcacgctgcaagcgagccagaaaaagctggatgaactgatcgaacagcactaa

SEQ ID NO: 76874 - protein, 430 aa, Escherichia coli CFT073
MIKSKIVLLSALVSCALISGCKEENKNNVSIEFMHSSVEQERQAVISKLIARFEKENPGITVKQVPVEEDAYNTKVITLSRSGSLPEVIETSHDYAKVMDKEQLIDRQAVATVISNVGEGAFYDGVLRIVRTEDGSAWTGVPVSAWIGGIWYRKDVLAKAGLEEPKNWQQLLDVAQKLNDPANKKYGIALPTAESVLTEQSFSQFALSNQANVFNAEGKITLDTPEMMQALTYYRNLAANTMPGSNDIMEVKDAFMNGTAPMAIYSTYILPAVIKEGDPKNVGFVVPTEKNSAVYGMLTSLTITAGQKAEETEAAEKFVTFMEQADNIADWVMMSPGAALPVNKAVVTTATWKDNDVIKALGELPNQLISELPNIQVFGAVGDKNFTRMGDVTGSGVVSSMVHNVTVGKADLPGTLQASQKKLDELIEQH

SEQ ID NO: 76875 - DNA, 1293 bp, Listeria monocytogenes str. 4b F2365
  CDS (1)..(1293): transl_table=11
atgaagaaaaagagtcttgtattacttgttgttgtgttggttctaagtgcggttctagctgcatgtggagggaaagagtctagtagtaaggaagtaacgattgaatttatgcattcatccgttgaaaaagagcgtttagatgttattaataaattaattgctgattttgaaaaagaaaatccaacaatcaaaatcaaacaaattccagttgaagaagatgcgtttaatacaaaagttgtcacacttgctcgctctggtaaacttccagcagttatggaagtaagccaagattttgccaaagtaatggataaagatgagttgattgaccaagatgcagtgaaagaagttatcgactcggttggagaagacaaatactacgaaggtgcaacaaacttagtacgttctgaagatggtaaaagctatatcgcagcaccattaagcggttgggttcaaggtatttggtacaacaaaaaagctttagccgatgctggttttgaagaacctaaaaactgggcggatattgaaaaagtagcgaaaaaattcacaaataaagcagataaaaaatacggtattgcaattccaacagcagaaagcacgatgagtgagcaagctttctcccaatttgcactttctaataaagccaatgttttagatgcaaaaggtaatgtaacgattgatacaccagaaatgaaagaagcgcttcaatattacaaagatttgtcagcatacacgatgcctggttcaaatgatgtaactgaaattaaagatgcatttatgaatggaacagttccgatggcaatgtactctacgtatatccttccatccgtttatgaagaaggcgatccaaaaaatatcggtttcgcaattccagaagaaaaagaaaaagcagtttatggtacagtttctggtttaactatttcagcaggacttgatgatgagcaaaagaaagcaacgaagaaatttgttgaatacttgtctcaaccagaaaatatggcaacttgggtattaatgtctccaggtggagcgcaaccagtaaataaagaagtagtagaacaaaaagcatacaaagaaaatgaagtaattaaatcgtttggtgaacttccaaatgaaatcgcagcatcattcaatgacatccaagttttcggacttgttgacggtaaaaaccttacaaaaatgggagatattactagctcaggcattatcgcacagatggttaataacgtaactgttggcggtggcgatgtatcagcggacttaaaagctgcacagaaaaaagctgaagaaggtaaataa

SEQ ID NO: 76876 - protein, 430 aa, Listeria monocytogenes str. 4b F2365
MKKKSLVLLVVVLVLSAVLAACGGKESSSKEVTIEFMHSSVEKERLDVINKLIADFEKENPTIKIKQIPVEEDAFNTKVVTLARSGKLPAVMEVSQDFAKVMDKDELIDQDAVKEVIDSVGEDKYYEGATNLVRSEDGKSYIAAPLSGWVQGIWYNKKALADAGFEEPKNWADIEKVAKKFTNKADKKYGIAIPTAESTMSEQAFSQFALSNKANVLDAKGNVTIDTPEMKEALQYYKDLSAYTMPGSNDVTEIKDAFMNGTVPMAMYSTYILPSVYEEGDPKNIGFAIPEEKEKAVYGTVSGLTISAGLDDEQKKATKKFVEYLSQPENMATWVLMSPGGAQPVNKEVVEQKAYKENEVIKSFGELPNEIAASFNDIQVFGLVDGKNLTKMGDITSSGIIAQMVNNVTVGGGDVSADLKAAQKKAEEGK

SEQ ID NO: 76877 - DNA, 25 bp, Artificial sequence
  primer
atgattaaatcaaaaatcgtgctgt

SEQ ID NO: 76878 - DNA, 24 bp, Artificial sequence
  primer
ttagtgctgttcgatcagttcatc

SEQ ID NO: 76879 - protein, 425 aa, Artificial sequence
  consensus sequence
  Variant (3)..(5): Xaa in position 3 to 5 is any amino acid
  Variant (7)..(9): Xaa in position 7 to 9 is any amino acid
  Variant (12)..(13): Xaa in position 12 to 13 is any amino acid
  Variant (15)..(18): Xaa in position 15 to 18 is any amino acid
  Variant (20)..(21): Xaa in position 20 to 21 is any amino acid
  Variant (24)..(28): Xaa in position 24 to 28 is any amino acid
  Variant (30)..(30): Xaa in position 30 is any amino acid
  Variant (40)..(40): Xaa in position 40 is any amino acid
  Variant (43)..(44): Xaa in position 43 to 44 is any amino acid
  Variant (47)..(47): Xaa in position 47 is any amino acid
  Variant (52)..(52): Xaa in position 52 is any amino acid
  Variant (59)..(59): Xaa in position 59 is any amino acid
  Variant (61)..(62): Xaa in position 61 to 62 is any amino acid
  Variant (65)..(65): Xaa in position 65 is any amino acid
  Variant (72)..(72): Xaa in position 72 is any amino acid
  Variant (77)..(77): Xaa in position 77 is any amino acid
  Variant (80)..(80): Xaa in position 80 is any amino acid
  Variant (84)..(84): Xaa in position 84 is any amino acid
  Variant (87)..(87): Xaa in position 87 is any amino acid
  Variant (89)..(89): Xaa in position 89 is any amino acid
  Variant (91)..(91): Xaa in position 91 is any amino acid
  Variant (93)..(93): Xaa in position 93 is any amino acid
  Variant (95)..(95): Xaa in position 95 is any amino acid
  Variant (102)..(103): Xaa in position 102 to 103 is any amino acid
  Variant (107)..(108): Xaa in position 107 to 108 is any amino acid
  Variant (111)..(112): Xaa in position 111 to 112 is any amino acid
  Variant (115)..(116): Xaa in position 115 to 116 is any amino acid
  Variant (120)..(122): Xaa in position 120 to 122 is any amino acid
  Variant (124)..(124): Xaa in position 124 is any amino acid
  Variant (126)..(129): Xaa in position 126 to 129 is any amino acid
  Variant (132)..(132): Xaa in position 132 is any amino acid
  Variant (136)..(141): Xaa in position 136 to 141 is any amino acid
  Variant (143)..(143): Xaa in position 143 is any amino acid
  Variant (145)..(145): Xaa in position 145 is any amino acid
  Variant (147)..(148): Xaa in position 147 to 148 is any amino acid
  Variant (153)..(153): Xaa in position 153 is any amino acid
  Variant (155)..(156): Xaa in position 155 to 156 is any amino acid
  Variant (159)..(159): Xaa in position 159 is any amino acid
  Variant (162)..(162): Xaa in position 162 is any amino acid
  Variant (169)..(173): Xaa in position 169 to 173 is any amino acid
  Variant (176)..(176): Xaa in position 176 is any amino acid
  Variant (178)..(181): Xaa in position 178 to 181 is any amino acid
  Variant (183)..(183): Xaa in position 183 is any amino acid
  Variant (190)..(190): Xaa in position 190 is any amino acid
  Variant (196)..(198): Xaa in position 196 to 198 is any amino acid
  Variant (201)..(201): Xaa in position 201 is any amino acid
  Variant (210)..(210): Xaa in position 210 is any amino acid
  Variant (214)..(215): Xaa in position 214 to 215 is any amino acid
  Variant (217)..(217): Xaa in position 217 is any amino acid
  Variant (219)..(220): Xaa in position 219 to 220 is any amino acid
  Variant (222)..(222): Xaa in position 222 is any amino acid
  Variant (228)..(229): Xaa in position 228 to 229 is any amino acid
  Variant (232)..(232): Xaa in position 232 is any amino acid
  Variant (235)..(235): Xaa in position 235 is any amino acid
  Variant (238)..(238): Xaa in position 238 is any amino acid
  Variant (240)..(240): Xaa in position 240 is any amino acid
  Variant (248)..(249): Xaa in position 248 to 249 is any amino acid
  Variant (251)..(251): Xaa in position 251 is any amino acid
  Variant (260)..(260): Xaa in position 260 is any amino acid
  Variant (264)..(264): Xaa in position 264 is any amino acid
  Variant (272)..(272): Xaa in position 272 is any amino acid
  Variant (274)..(275): Xaa in position 274 to 275 is any amino acid
  Variant (282)..(282): Xaa in position 282 is any amino acid
  Variant (285)..(286): Xaa in position 285 to 286 is any amino acid
  Variant (288)..(288): Xaa in position 288 is any amino acid
  Variant (291)..(292): Xaa in position 291 to 292 is any amino acid
  Variant (297)..(300): Xaa in position 297 to 300 is any amino acid
  Variant (304)..(304): Xaa in position 304 is any amino acid
  Variant (307)..(309): Xaa in position 307 to 309 is any amino acid
  Variant (311)..(313): Xaa in position 311 to 313 is any amino acid
  Variant (315)..(316): Xaa in position 315 to 316 is any amino acid
  Variant (320)..(323): Xaa in position 320 to 323 is any amino acid
  Variant (325)..(326): Xaa in position 325 to 326 is any amino acid
  Variant (328)..(328): Xaa in position 328 is any amino acid
  Variant (330)..(330): Xaa in position 330 is any amino acid
  Variant (333)..(333): Xaa in position 333 is any amino acid
  Variant (338)..(338): Xaa in position 338 is any amino acid
  Variant (340)..(340): Xaa in position 340 is any amino acid
  Variant (345)..(345): Xaa in position 345 is any amino acid
  Variant (348)..(352): Xaa in position 348 to 352 is any amino acid
  Variant (354)..(354): Xaa in position 354 is any amino acid
  Variant (356)..(356): Xaa in position 356 is any amino acid
  Variant (360)..(361): Xaa in position 360 to 361 is any amino acid
  Variant (363)..(363): Xaa in position 363 is any amino acid
  Variant (367)..(374): Xaa in position 367 to 374 is any amino acid
  Variant (380)..(380): Xaa in position 380 is any amino acid
  Variant (382)..(383): Xaa in position 382 to 383 is any amino acid
  Variant (386)..(386): Xaa in position 386 is any amino acid
  Variant (388)..(388): Xaa in position 388 is any amino acid
  Variant (392)..(392): Xaa in position 392 is any amino acid
  Variant (394)..(394): Xaa in position 394 is any amino acid
  Variant (397)..(400): Xaa in position 397 to 400 is any amino acid
  Variant (403)..(403): Xaa in position 403 is any amino acid
  Variant (409)..(410): Xaa in position 409 to 410 is any amino acid
  Variant (412)..(412): Xaa in position 412 is any amino acid
  Variant (414)..(415): Xaa in position 414 to 415 is any amino acid
  Variant (417)..(417): Xaa in position 417 is any amino acid
  Variant (419)..(419): Xaa in position 419 is any amino acid
  Variant (423)..(424): Xaa in position 423 to 424 is any amino acid
KSXXXLXXXLVXXAXXXXCXXKEXXXXXVXIEFMHSSVEXERXXVIXKLIAXFEKENPXIXXKQXPVEEDAXNTKVXTLXRSGXLPXVXEXSXDXAKVMDKXXLIDXXAVXXVIXXVGEXXXYXGXXXXVRXEDGXXXXXXPXSXWXXGIWYXKXXLAXAGXEEPKNWXXXXXVAXKXXXXAXKKYGIAXPTAESXXXEQXFSQFALSNXANVXXAXGXXTXDTPEMXXALXYYXDLXAXTMPGSNDXXEXKDAFMNGTXPMAXYSTYILPXVXXEGDPKNXGFXXPXEKXXAVYGXXXXLTIXAGXXXEXXXAXXKFVXXXXQXXNXAXWVXMSPGXAXPVNKXVVXXXXXKXNXVIKXXGXLPNXXXXXXXXIQVFGXVXXKNXTXMGDXTXSGXXXXMVXNVTVGXXDXSXXLXAXQKKXXE

SEQ ID NO: 76880 - protein, 60 aa, Artificial sequence
  protein pattern
  Variant (4)..(4): Xaa in position 4 is any amino acid
  Variant (5)..(5): Xaa in position 5 is Glu or Gln
  Variant (8)..(8): Xaa in position 8 is Gln or Thr
  Variant (11)..(11): Xaa in position 11 is Lys or Arg
  Variant (14)..(14): Xaa in position 14 is Ser or Thr
  Variant (16)..(16): Xaa in position 16 is any amino acid
  Variant (24)..(24): Xaa in position 24 is Ile or Val
  Variant (25)..(25): Xaa in position 25 is any amino acid
  Variant (27)..(27): Xaa in position 27 is Ile or Val
  Variant (36)..(36): Xaa in position 36 is Ala or Val
  Variant (40)..(40): Xaa in position 40 is Ile or Met
  Variant (48)..(48): Xaa in position 48 is Ala or Ser
  Variant (50)..(50): Xaa in position 50 is any amino acid
  Variant (51)..(51): Xaa in position 51 is any or no amino acid
  Variant (56)..(56): Xaa in position 56 is any amino acid
  Variant (58)..(58): Xaa in position 58 is Ile or Val
PEMXXALXYYXDLXAXTMPGSNDXXEXKDAFMNGTXPMAXYSTYILPXVXXEGDPXNXGF

SEQ ID NO: 76881 - protein, 59 aa, Artificial sequence
  protein pattern
  Variant (9)..(9): Xaa in position 9 is any amino acid
  Variant (12)..(12): Xaa in position 12 is any amino acid
  Variant (13)..(13): Xaa in position 13 is Ala or Asp
  Variant (16)..(16): Xaa in position 16 is Asn or Ser
  Variant (21)..(21): Xaa in position 21 is Asp or Arg
  Variant (28)..(28): Xaa in position 28 is Gly or Thr
  Variant (30)..(30): Xaa in position 30 is any amino acid
  Variant (31)..(31): Xaa in position 31 is Ile or Val
  Variant (34)..(34): Xaa in position 34 is Ile or Val
  Variant (41)..(41): Xaa in position 41 is Phe or Tyr
  Variant (46)..(46): Xaa in position 46 is Ile or Val
  Variant (49)..(49): Xaa in position 49 is Ala or Ser
  Variant (53)..(53): Xaa in position 53 is any amino acid
  Variant (56)..(56): Xaa in position 56 is Ala or Glu
  Variant (58)..(58): Xaa in position 58 is Ile or Met
EFMHSSVEXERXXVIXKLIAXFEKENPXIXXKQXPVEEDAXNTKVXTLXRSGXLPXVXE

SEQ ID NO: 76882 - protein, 59 aa, Artificial sequence
  protein pattern
  Variant (2)..(4): Xaa in position 2 to 4 is any or no amino acid
  Variant (7)..(7): Xaa in position 7 is Asn or Arg
  Variant (9)..(9): Xaa in position 9 is Asp or Lys
  Variant (10)..(10): Xaa in position 10 is Ala or Val
  Variant (13)..(13): Xaa in position 13 is Asp or Lys
  Variant (16)..(16): Xaa in position 16 is Phe or Leu
  Variant (23)..(23): Xaa in position 23 is Ala or Gln
  Variant (24)..(24): Xaa in position 24 is Asp or Gln
  Variant (25)..(25): Xaa in position 25 is Ile or Leu
  Variant (26)..(26): Xaa in position 26 is any amino acid
  Variant (27)..(27): Xaa in position 27 is Asp or Lys
  Variant (30)..(30): Xaa in position 30 is any or no amino acid
  Variant (32)..(32): Xaa in position 32 is Phe or Leu
  Variant (33)..(33): Xaa in position 33 is Asn or Thr
  Variant (34)..(34): Xaa in position 34 is Asp or Asn
  Variant (35)..(35): Xaa in position 35 is any amino acid
  Variant (37)..(37): Xaa in position 37 is Asp or Asn
  Variant (44)..(44): Xaa in position 44 is Ile or Leu
  Variant (50)..(50): Xaa in position 50 is Thr or Val
  Variant (51)..(51): Xaa in position 51 is Leu or Met
  Variant (52)..(52): Xaa in position 52 is Ser or Thr
  Variant (55)..(55): Xaa in position 55 is Ala or Ser
IXXXWYXKXXLAXAGXEEPKNWXXXXXVAXKXXXXAXKKYGIAXPTAESXXXEQXFSQF

SEQ ID NO: 76883 - protein, 59 aa, Artificial sequence
  protein pattern
  Variant (2)..(2): Xaa in position 2 is any amino acid
  Variant (7)..(7): Xaa in position 7 is Ala or Gly
  Variant (9)..(9): Xaa in position 9 is any amino acid
  Variant (14)..(14): Xaa in position 14 is Ala or Glu
  Variant (17)..(17): Xaa in position 17 is Glu or Thr
  Variant (18)..(18): Xaa in position 18 is Gln or Thr
  Variant (19)..(19): Xaa in position 19 is any amino acid
  Variant (20)..(20): Xaa in position 20 is Ala or Thr
  Variant (21)..(21): Xaa in position 21 is Trp or Tyr
  Variant (23)..(23): Xaa in position 23 is Asp or Glu
  Variant (25)..(25): Xaa in position 25 is Asp or Glu
  Variant (29)..(29): Xaa in position 29 is Ala or Ser
  Variant (30)..(30): Xaa in position 30 is Phe or Leu
  Variant (32)..(32): Xaa in position 32 is Asp or Glu
  Variant (36)..(36): Xaa in position 36 is Glu or Gln
  Variant (37)..(37): Xaa in position 37 is Ile or Leu
  Variant (38)..(38): Xaa in position 38 is Ala or Ile
  Variant (39)..(39): Xaa in position 39 is Ala or Gly
  Variant (40)..(40): Xaa in position 40 is Glu or Ser
  Variant (41)..(41): Xaa in position 41 is Phe or Leu
  Variant (42)..(42): Xaa in position 42 is Asn or Pro
  Variant (43)..(43): Xaa in position 43 is Asp or Asn
  Variant (49)..(49): Xaa in position 49 is Ala or Leu
  Variant (51)..(52): Xaa in position 51 to 52 is Asp or Gly
  Variant (55)..(55): Xaa in position 55 is Phe or Leu
  Variant (57)..(57): Xaa in position 57 is Lys or Arg
VXMSPGXAXPVNKXVVXXXXXKXNXVIKXXGXLPNXXXXXXXXIQVFGXVXXKNXTXMG

SEQ ID NO: 76884 - protein, 35 aa, Artificial sequence
  protein pattern
  Variant (5)..(5): Xaa in position 5 is Asp or Glu
  Variant (6)..(6): Xaa in position 6 is Glu or Gln
  Variant (10)..(10): Xaa in position 10 is Gln or Arg
  Variant (11)..(11): Xaa in position 11 is Asp or Lys
  Variant (14)..(14): Xaa in position 14 is any amino acid
  Variant (15)..(15): Xaa in position 15 is Ala, Glu or Thr
  Variant (18)..(18): Xaa in position 18 is Asp or Ser
  Variant (19)..(19): Xaa in position 19 is Asn or Ser
  Variant (23)..(23): Xaa in position 23 is Asp or Gly
  Variant (24)..(24): Xaa in position 24 is any amino acid
  Variant (25)..(25): Xaa in position 25 is Phe or Tyr
  Variant (27)..(27): Xaa in position 27 is Asp or Glu
  Variant (29)..(29): Xaa in position 29 is Ala or Val
  Variant (30)..(30): Xaa in position 30 is any amino acid
  Variant (31)..(31): Xaa in position 31 is Asn or Arg
  Variant (32)..(32): Xaa in position 32 is Ile or Leu
  Variant (35)..(35): Xaa in position 35 is Ser or Thr
VMDKXXLIDXXAVXXVIXXVGEXXXYXGXXXXVRX

SEQ ID NO: 76885 - protein, 43 aa, Artificial sequence
  protein pattern
  Variant (2)..(2): Xaa in position 2 is any amino acid
  Variant (3)..(4): Xaa in position 3 to 4 is any or no amino acid
  Variant (7)..(8): Xaa in position 7 to 8 is any or no amino acid
  Variant (13)..(13): Xaa in position 13 is any amino acid
  Variant (14)..(14): Xaa in position 14 is Leu or Val
  Variant (15)..(15): Xaa in position 15 is Ser or Thr
  Variant (16)..(16): Xaa in position 16 is Gly or Ser
  Variant (20)..(20): Xaa in position 20 is Ser or Thr
  Variant (23)..(23): Xaa in position 23 is any amino acid
  Variant (24)..(24): Xaa in position 24 is Asp or Lys
  Variant (25)..(25): Xaa in position 25 is Ala, Asp or Thr
  Variant (27)..(27): Xaa in position 27 is Glu or Gln
  Variant (28)..(28): Xaa in position 28 is any amino acid
  Variant (29)..(29): Xaa in position 29 is Glu or Lys
  Variant (31)..(31): Xaa in position 31 is Ala or Thr
  Variant (32)..(32): Xaa in position 32 is Glu or Lys
  Variant (36)..(36): Xaa in position 36 is Glu or Thr
  Variant (37)..(37): Xaa in position 37 is Phe or Tyr
  Variant (38)..(38): Xaa in position 38 is Leu or Met
  Variant (39)..(39): Xaa in position 39 is Glu or Ser
  Variant (41)..(41): Xaa in position 41 is Ala or Pro
  Variant (42)..(42): Xaa in position 42 is Asp or Glu
PXXXEKXXAVYGXXXXLTIXAGXXXEXXXAXXKFVXXXXQXXN

SEQ ID NO: 76886 - protein, 29 aa, Artificial sequence
  protein pattern
  Variant (2)..(2): Xaa in position 2 is Gly or Ser
  Variant (5)..(6): Xaa in position 5 to 6 is Ile or Val
  Variant (7)..(7): Xaa in position 7 is Ala or Ser
  Variant (8)..(8): Xaa in position 8 is Gln or Ser
  Variant (11)..(11): Xaa in position 11 is any or no amino acid
  Variant (13)..(13): Xaa in position 13 is any amino acid
  Variant (14)..(14): Xaa in position 14 is any or no amino acid
  Variant (17)..(17): Xaa in position 17 is any amino acid
  Variant (18)..(18): Xaa in position 18 is Ala or Gly
  Variant (20)..(20): Xaa in position 20 is Leu or Val
  Variant (22)..(22): Xaa in position 22 is Ala or Thr
  Variant (23)..(23): Xaa in position 23 is Asp or Thr
  Variant (25)..(25): Xaa in position 25 is any amino acid
  Variant (27)..(27): Xaa in position 27 is Ala or Ser
TXSGXXXXMVXNXXVGXXDXSXXLXAXQK

SEQ ID NO: 76887 - protein, 28 aa, Artificial sequence
  protein pattern
  Variant (3)..(5): Xaa in position 3 to 5 is any or no amino acid
  Variant (7)..(7): Xaa in position 7 is any or no amino acid
  Variant (9)..(9): Xaa in position 9 is any amino acid
  Variant (10)..(10): Xaa in position 10 is Ala or Val
  Variant (11)..(11): Xaa in position 11 is Leu or Val
  Variant (13)..(13): Xaa in position 13 is any amino acid
  Variant (14)..(14): Xaa in position 14 is Cys or Val
  Variant (15)..(15): Xaa in position 15 is Ala or Leu
  Variant (16)..(16): Xaa in position 16 is any amino acid
  Variant (17)..(17): Xaa in position 17 is Ala or Ile
  Variant (18)..(18): Xaa in position 18 is Ser or Val
  Variant (19)..(19): Xaa in position 19 is Gly or Leu
  Variant (20)..(20): Xaa in position 20 is Ala or Cys
  Variant (21)..(22): Xaa in position 21 to 22 is any amino acid
  Variant (23)..(23): Xaa in position 23 is Glu or Gly
  Variant (24)..(24): Xaa in position 24 is Gly or Asn
  Variant (26)..(26): Xaa in position 26 is Glu or Thr
  Variant (27)..(27): Xaa in position 27 is Asn or Ser
  Variant (28)..(28): Xaa in position 28 is Gly, Ser or Val
KSXXXLXLXXXVXXXXXXXXXXXXKXXX

SEQ ID NO: 76888 - protein, 17 aa, Artificial sequence
  protein pattern
  Variant (4)..(4): Xaa in position 4 is any amino acid
  Variant (8)..(8): Xaa in position 8 is Phe or Leu
  Variant (9)..(9): Xaa in position 9 is Asp or Asn
  Variant (11)..(12): Xaa in position 11 to 12 is any or no amino acid
  Variant (14)..(14): Xaa in position 14 is any amino acid
  Variant (15)..(16): Xaa in position 15 to 16 is any or no amino acid
LSNXANVXXAXXKXXXT

SEQ ID NO: 76889 - protein, 10 aa, Artificial sequence
  protein pattern
  Variant (2)..(2): Xaa in position 2 is any amino acid
  Variant (3)..(3): Xaa in position 3 is Ala or Ser
  Variant (4)..(4): Xaa in position 4 is Trp or Tyr
  Variant (5)..(5): Xaa in position 5 is any amino acid
  Variant (6)..(6): Xaa in position 6 is Ala or Gly
  Variant (7)..(7): Xaa in position 7 is Ala or Val
  Variant (9)..(9): Xaa in position 9 is Leu or Val
GXXXXXXPXS

SEQ ID NO: 76890 - DNA, 1374 bp, Escherichia coli; identical to SEQ ID NO: 65750
  CDS (1)..(1374): transl_table=11

SEQ ID NO: 76891 - protein, 457 aa, Escherichia coli; identical to SEQ ID NO: 65751

SEQ ID NO: 76892 - DNA, 1980 bp, Ciona intestinalis
  CDS (1)..(1980)
atgtttgacgacgattgggaaccagcacctttaaccgcccttggaaacacagattttcgaggtgcaagttcttttgataacccgtattccaagaaagatgatggtggttttggttcaggttttggtgatagccgtggaggtgcacgcagcaaaggttgttttaaatgtggagaagaaggtcatatgtccagagaatgcccgcagaacactggatcaggttttggtgatagccgtggaggtgcacgcagcaaaggttgttttaaatgtggagaagaaggtcatatgtccagagaatgcccgcagaacactggatcaggttttggtgatagccgtggaggtgcacgcagcaaaggttgttttaaatgtggagaagaaggtcatatgtccagagaatgcccgcagaacactggatcaggtggagatcacgctgctcaggaatatcataaggctggagacggagataaacctcgtcctcctctgtacattccccccccacctcctgaggatgaggttgaaatgtttgctagcatgcagcgaggaattaactttgggaagtacgatgccatccctgtggaggtgagcggactcaacgctccgaagtgcatttcaactttcgagatggcaaacctccaagaaacaatcctggtaaatgtgcagaaagcaggttatgacagacctacacctgtgcaaaaatacagcattcccattattaatgctgatcgtgacttgatggcatgtgcacagacaggatctggcaaaacggctgcgtttttgcttccggtccttactaagctggttgaatcgggtgtaaagtcgtctgaattcagtgaaaagaaaactccacaagcgattataattggcccaacaagagaacttgtaaaccagatttttctggaagcccgtaaattctcacgtagcaccattattcatccagtggttgtatatgggggcaccagtgttggttaccaaataagagctgtacaaaaaggttgtgacgtattgatcgcaacccctggtcgtctgatggattttattaaccgtggcttgattggtctggagaatgttcggttcattatcctcgatgaagcagatcggatgttggatatggggttcgaatctgagatcaggaagcttgtatctttaccagggatgccacagaagaacaatcgtcacacgcttatgttcagcgcgacatttccagatgaaatacaaaaacttgctcacgactttctccgggaggacttcctgttcctcacagtaggaagagtagggggagcatgctccgatgtcacgcaaacagtgatctccgtggagtggaaagacaaacgctccaaactactcgagcttattgcagatgttaatgaaaccaagagtcgtactcttgttttcgtagaaaccaagagaggagctgatttcctcgcttgtgttttatgccaagaagatttcccaaccacaagcatccatggagatcgtttacaacaagatagagagcaagcactccgtgatttcaaattagcagtttgtccaatacttgttgctacttcagttgctgcaagaggattagacataccaaaggtagagcatgtgattaactatgacatgccgagagaaatagatgaatatgtgcatcgaatcggacgtactggtcgttgtggtaacctgggacgcgcaactacattttttgacaacaaaaaagacgcaaatctggctcgctcacttgttaaaattctttccgaggctcaacaagaagttccaggttggttgggggaatgtgcagagtctgctgttggttcgaatttcggagcagaaaaaggaagatttggtggaaaagaccttcgggagagaggtggagaaggaattactggtttcggatcaatgggtggtggaagtggagcaaggagcactgctgattatgattataatgatggtggtggtttcgactgtgttggtgtgaatgacgatgatgactcgtgggattaa

SEQ ID NO: 76893 - protein, 659 aa, Ciona intestinalis
MFDDDWEPAPLTALGNTDFRGASSFDNPYSKKDDGGFGSGFGDSRGGARSKGCFKCGEEGHMSRECPQNTGSGFGDSRGGARSKGCFKCGEEGHMSRECPQNTGSGFGDSRGGARSKGCFKCGEEGHMSRECPQNTGSGGDHAAQEYHKAGDGDKPRPPLYIPPPPPEDEVEMFASMQRGINFGKYDAIPVEVSGLNAPKCISTFEMANLQETILVNVQKAGYDRPTPVQKYSIPIINADRDLMACAQTGSGKTAAFLLPVLTKLVESGVKSSEFSEKKTPQAIIIGPTRELVNQIFLEARKFSRSTIIHPVVVYGGTSVGYQIRAVQKGCDVLIATPGRLMDFINRGLIGLENVRFIILDEADRMLDMGFESEIRKLVSLPGMPQKNNRHTLMFSATFPDEIQKLAHDFLREDFLFLTVGRVGGACSDVTQTVISVEWKDKRSKLLELIADVNETKSRTLVFVETKRGADFLACVLCQEDFPTTSIHGDRLQQDREQALRDFKLAVCPILVATSVAARGLDIPKVEHVINYDMPREIDEYVHRIGRTGRCGNLGRATTFFDNKKDANLARSLVKILSEAQQEVPGWLGECAESAVGSNFGAEKGRFGGKDLRERGGEGITGFGSMGGGSGARSTADYDYNDGGGFDCVGVNDDDDSWD

SEQ ID NO: 76894 - DNA, 1743 bp, Tribolium castaneum
  CDS (1)..(1743)
atgtgcgacgacgatgattgggatacgccgacgagttcagcccctgcgttttctgagcagaggggtggcgtgatctccgaaggggttgcaagttctcttcaggtcgtggctttgttccagctgagcgaaacgacggcccctcgttcgattcatggggggacaacagtaacgataacggctacacaaacgggcgaaagcgagatgatggtggtaacgagtggggtgattccgggggtggcggtggattttcttggggaaaacaacgacgattcgggcggaggccgaggaggggggcgcgatggtgatcgcggagatggcgggggtgaagagaagaagagggaattttatattccacctgaagtcgaaaatgttgaggacttgtttaccagtggaataacaacaggagtcaattttatgaagttggacgaaattgaagtcaaggtgactggtaatgatgctccaccaccgatcacttctttcgaaacttcgggtttaagacctcacttgttagaaaatgtgaaaaaatctggatatacgaagccaacggcgattcagaaatatgcaattcctgtcatcttgagcggtcgggatcttatgagttgtgcacaaactggatctgggaaaactgctgcttttatgttaccaattattcataatctcttaagtgataagaatcctcctaacacagaaaacaattgtgcacagcctgtagttgtgataatgtcgcctactagagaattggcaatacagatcgccgaccaaggcaaaaaattcgcttacaattcgactgtgaaagttgctgttatttatggaggaacttcgacaaatcatcaacgtggccgcattctgggtggttgtcacattttggttgcgacacctggccgacttaaggattttgtaaatcgtggaaacgtatcattcaattctctcaagtattttgtccttgatgaagccgatcggatgttagacatgggtttccttggtgatgttgaagagatgctaagccatcagtcaatgcctgcgactggcgaacgtcaaactttgatgttttccgcaacatttcccgaagaagttcaacaactcgccgggaaatttcttctcaactacatctttattgccgtgggaatcgtcggcagtgcatgcaccgatgtcgaacagaaattcttccaagtcagtaaattcgacaagaggtcgaaactcgtttcgattttggaaaaagcgccaaacgaacgtacgctcatttttgtggagacgaagcgaaacgctgatttcttggccactttcctcagcgagcaaaatattcaatctactagcattcatggcgatcgataccaaagcgagagagaaaaggcattgctagatttcaagactggccatagaaaagttcttgtcgctactggagttgcggctagaggtctcgatatcaaagacgtccagcatgttattaactacgatttgcctaaatccattgatgaatacgtgcatagaattggaagaactggtcgtgttgggaataagggcaaagctacgagcttttttgatgaagaccaggatcggaatctcgcgtcggatcttgcgaaaatcctctcgcaagctaagcaagaaataccggaatggttgggtagtaaaagttacggcggttctgccgaccagtttggtggcagagatattcgaggtgatgattttgggcgtggacaagatttttccaatgccgctgctgttcaagaagaagaggtgtggtaa

SEQ ID NO: 76895 - protein, 580 aa, Tribolium castaneum
MCDDDDWDTPTSSAPAFSEQRGGVISEGVASSLQVVALFQLSETTAPRSIHGGTTVTITATQTGESEMMVVTSGVIPGVAVDFLGENNDDSGGGRGGGRDGDRGDGGGEEKKREFYIPPEVENVEDLFTSGITTGVNFMKLDEIEVKVTGNDAPPPITSFETSGLRPHLLENVKKSGYTKPTAIQKYAIPVILSGRDLMSCAQTGSGKTAAFMLPIIHNLLSDKNPPNTENNCAQPVVVIMSPTRELAIQIADQGKKFAYNSTVKVAVIYGGTSTNHQRGRILGGCHILVATPGRLKDFVNRGNVSFNSLKYFVLDEADRMLDMGFLGDVEEMLSHQSMPATGERQTLMFSATFPEEVQQLAGKFLLNYIFIAVGIVGSACTDVEQKFFQVSKFDKRSKLVSILEKAPNERTLIFVETKRNADFLATFLSEQNIQSTSIHGDRYQSEREKALLDFKTGHRKVLVATGVAARGLDIKDVQHVINYDLPKSIDEYVHRIGRTGRVGNKGKATSFFDEDQDRNLASDLAKILSQAKQEIPEWLGSKSYGGSADQFGGRDIRGDDFGRGQDFSNAAAVQEEEVW

SEQ ID NO: 76896 - DNA, 1893 bp, Apis mellifera
  CDS (1)..(1893)
atggctgatgactggggtaaaactgtttcttacaccaataaaaaagatgaatcttactttgatgaaggtggacgtagttatggaaaaggaagaggattcataatacaaaataacaataacgatgattggtctgtgggtaaaaaaaattccaatagtggaactataaatgaaagtgaattcaacgatgaaaattattggcaatgtaacgataaaaagaccgatattgaagaaactggtagaggtaaaggtagaggtcatggtaaaggaggatctagaggaagaggaggcaatcgtggaagaacaggatttaataataaaaataaagatggtgatgataataatgattacgaggataacgattatggtaatcaggataatagaaacgatagacgaaaaaaaacatttgctgctcgagaagataatgacgaagaagaagcacaaaagcctaaagaacaatatattccaccagaattacctaacgatgaaaagtcattatttgaaaatggtgtcgagataggcattaattttgataaatatgataatattcaggttaacgtgagtggagataatgtgcctcaaccgatagaaagtttcgaggcagctggccttagaaatattgttttagacaatataaaaaagtctggatataaaaaacctactcccgtacagaaacatgctttgccaattatcatgaatggtagagatttaatggcttgtgctcaaactggttcaggaaaaactgctgcgttcgcagtccctattataaatacattattagagagatctgtcgatttggttgtaacttcgacatattgcgaaccacaagttgtcatcgtgtcgcccactcgagaacttaccatacaaatatggcaacaaattgtcaaattttcgctcaattcaattttgaaaactgtagtcgcatatggtggaacatccgttatgcatcaaagaggaaagttgtctgctggttgccacatactcgtagcaacacctggaagattattagattttgtagaaaaaggaagagtaaaattttcttccgtacaatttctcgtattggatgaagctgaccgtatgttagacatgggatttttacctagtatcgaaaaaatggtggaccacgagactatggttcctttaggcgaaagacaaacgttaatgttttccgccactttcccggacgaagtgcaacatttggcaagaagatttttaaacaattatttgttccttgcggttggtatcgtaggtggagcttgttcagacgtggaacaaaacttttacgaagttgctagaaataagaaaaaagacttgctcaaagaaatattagaaagggaaaatgattcgggtacgttaggtggcactctagtattcgttgagatgaaaaagaaagccgattttattgccgttttcttatccgagaataattatcctaccaccagtattcatggcgatagattacagagacaaagggaagaagcattagccgatttcaaaagtggaaggatgtccattttagtagctacagcggtggctgcaagaggtttagacattaaaaatgtttcgcacgttataaattacgacttgccaaaagggattgacgagtacgttcatcgaattggaagaactggacgtgtaggaaatcgaggaagagcgacttctttcttcgatcctgaagaagatgcaccattgcgaggtgatcttgtcagaatattgaaacaagcaaatcaatccgtaccagattggatgatgggtggaaacgcgaataggaatttcatgcctggaagaggtataagcaaatttggaggtgaagatgttagagagtctgaagcattcgcggaagaatatacggaagaagcgtattccgtagcacaagaaccggaagaagaatggtag

SEQ ID NO: 76897 - protein, 630 aa, Apis mellifera
MADDWGKTVSYTNKKDESYFDEGGRSYGKGRGFIIQNNNNDDWSVGKKNSNSGTINESEFNDENYWQCNDKKTDIEETGRGKGRGHGKGGSRGRGGNRGRTGFNNKNKDGDDNNDYEDNDYGNQDNRNDRRKKTFAAREDNDEEEAQKPKEQYIPPELPNDEKSLFENGVEIGINFDKYDNIQVNVSGDNVPQPIESFEAAGLRNIVLDNIKKSGYKKPTPVQKHALPIIMNGRDLMACAQTGSGKTAAFAVPIINTLLERSVDLVVTSTYCEPQVVIVSPTRELTIQIWQQIVKFSLNSILKTVVAYGGTSVMHQRGKLSAGCHILVATPGRLLDFVEKGRVKFSSVQFLVLDEADRMLDMGFLPSIEKMVDHETMVPLGERQTLMFSATFPDEVQHLARRFLNNYLFLAVGIVGGACSDVEQNFYEVARNKKKDLLKEILERENDSGTLGGTLVFVEMKKKADFIAVFLSENNYPTTSIHGDRLQRQREEALADFKSGRMSILVATAVAARGLDIKNVSHVINYDLPKGIDEYVHRIGRTGRVGNRGRATSFFDPEEDAPLRGDLVRILKQANQSVPDWMMGGNANRNFMPGRGISKFGGEDVRESEAFAEEYTEEAYSVAQEPEEEW

SEQ ID NO: 76898 - DNA, 1806 bp, Bombyx mori
  CDS (1)..(1806)
atggatgatgactgggatgattcctgtgaagctgttgtggtgccacctcccccactacagaaccatgattctgtagatgaaggtcacagtctgtccagaggaagaggatttccttccttcaatgaggatgatgaaaaagagaatgggtatggtgagcgacggggtcgaggtggccgaggcggaggacgaggacgcggcggaagaggtggacgtggagggtcacgagaacagcacagcgactatgagactaatggtgaccatgatgataggggtcgtggcgaacgtggccgaggccgcggaaggggaggacgtggtggtggtagaggtggtggtggcggaggaggcgatagaaatgattatgaagataatgaaataggggaaaacggggaaacgaagaagccggtaacctatgtgcctccagaaccaacaaatgatgagacggaaatctttagcagtactataagctctggtattaactttgacaagtttgaccatattgcagtaaaagtcagtggtgagaatcctccaagacctatcgaaagtttcgaaactgcaaatctcagaaagtatgttctagataatgtacttaaggctggttatagaaaacccacacctattcagaaaaatgcaatcccaatcataatgagtggcagagatttgatgggttgtgcccagactggttcgggtaaaacggctgcttttttggtacccataattaatatgttattacaagatccaaaggatctgatctcagaaaatggctgcgcccagccacaggttataatagtatctccaacgcgagaactgactcttcaaatatttaatgaagctaggaaattctcatatggctcagttttgaaggttgcagttgcttatggtggcactgctgtgcgccatcaaggtgataacattgctagaggctgtcacatattggtagcaacaccaggccgtcttcatgattttgtggaaaggaatcgtgtatcatttggcagtgtaagatttgtcgtactggatgaggctgaccgtatgttagatatggggttcatgccaagcattgaaaaaatgatgttacatccaaccatggtggagaccacgaaaaggcaaactttaatgttttcggcaacattccctgaagacatccaacatttggctggtcgtttcctaaataattatctatttgtggcggttggtatcgtcggaggcgctagcactgacgtcgaacaaatcttcattgaagtcactaaatatgaaaaacggaacagtctaaaacaactcattgaggaaaatgatggtaaaagaatcttggtatttgtcgaaacaaaacgtaatgcagacttcatagcagccatgttgtcggaacagcaattgctcacatcttcaattcacggcgatcgcatgcaacgtgagcgcgaggaagcgttacagaattttaagagtgggaaacactgtatcttggttgcaacagctgtagctgcacgtggtttagacattaaaaatgtagacattgtagtgaattatgacctcccaaaaagcattgatgagtatgtgcacagaatagggcgtactggtcgcgtaggaaacagaggaaaagctgtatcgttttatgattctgatcaggatttagccctagtggctgatctttcaaaaatacttcgacaggcagatcaatctgtcccagacttcttaaagggaggtggcactgctacattcaagggcaataaatatggaggcagtgatgtcagaaatttcaacaatgccaacacagctgtagtagatcaagggcaggaacctgaagaagaatggtag

SEQ ID NO: 76899 - protein, 601 aa, Bombyx mori
MDDDWDDSCEAVVVPPPPLQNHDSVDEGHSLSRGRGFPSFNEDDEKENGYGERRGRGGRGGGRGRGGRGGRGGSREQHSDYETNGDHDDRGRGERGRGRGRGGRGGGRGGGGGGGDRNDYEDNEIGENGETKKPVTYVPPEPTNDETEIFSSTISSGINFDKFDHIAVKVSGENPPRPIESFETANLRKYVLDNVLKAGYRKPTPIQKNAIPIIMSGRDLMGCAQTGSGKTAAFLVPIINMLLQDPKDLISENGCAQPQVIIVSPTRELTLQIFNEARKFSYGSVLKVAVAYGGTAVRHQGDNIARGCHILVATPGRLHDFVERNRVSFGSVRFVVLDEADRMLDMGFMPSIEKMMLHPTMVETTKRQTLMFSATFPEDIQHLAGRFLNNYLFVAVGIVGGASTDVEQIFIEVTKYEKRNSLKQLIEENDGKRILVFVETKRNADFIAAMLSEQQLLTSSIHGDRMQREREEALQNFKSGKHCILVATAVAARGLDIKNVDIVVNYDLPKSIDEYVHRIGRTGRVGNRGKAVSFYDSDQDLALVADLSKILRQADQSVPDFLKGGGTATFKGNKYGGSDVRNFNNANTAVVDQGQEPEEEW

SEQ ID NO: 76900 - DNA, 2088 bp, Bombyx mori
  CDS (80)..(1699)
gcagtggtcaaggtggaccctgcgtcagaaagaatccatagtttaaataaacatcttcaactaaatccgaaaaataatcatgtctggtaactggaataatagccgtggaaacggtggttccaaatttggaggaggcaacaaattcggcgataattcgtctcgatttggcaacggtggcaatagatttggaggatctggaggatttggtgggaaaaaagaattctctggaggtcagaacatgcgtcgcccagattgggattctgtttcactccaacctttcaacaaaaacttttatgatccacatcctacagttctcaaaagatcaccatatgaagtcgaagagtacagaaataatcacgaggtaactgtaagtggcgttgaggttcataatcctattcaatactttgaagaagcaaattttcctgattatgtgcaacaaggtgtaaagacaatgggttacaaagaaccgacgcccattcaagctcaaggctggccgatagctatgtctggaaagaatttagttggcgtagcccaaacgggttccggcaaaacgttggcctacatcttgccagccattgtgcacataaacaaccaaccgcctattcggagaggtgatggtccgattgctttggtcttggcgcctaccagagagttagcacaacaaattcagcaagttgctgcagattttggacacacatcttatgttcgtaacacgtgtgtgtttggtggtgctcctaaaagagagcaagcccgggacttggagaggggagtagaaatagtcattgctactccaggtagattaattgatttcttggaaaagggcacaaccaacttacagcggtgcacatatttagttcttgatgaggctgatcgtatgttggatatgggatttgaaccacaaatcagaaaaatcattgagcaaatacgcccagacagacagactttgatgtggtcagctacttggcccaaagaagtgaagaaacttgctgaggattacttgggagattacattcagatcaatataggatcattacaactttccgcaaatcacaacattcttcaaattgtagatatttgtcaagaacatgaaaaagaaaataaattaaatgtattattgcaagaaattggacaaagtcaagaacctggtgcgaaaacaataatttttgttgaaaccaagagaaaagctgagaacatatcaaggaacataaggagatatggctggccagctgtttgtatgcatggcgataaaactcaacaagaaagagatgaagttctgtatcagttcaaggaaggtcgtgctagtattcttgtagcaactgatgttgcagctcgagggcttgatgttgatggtatcaaatatgtaataaattttgattatccaaattcgtcggaggattacatccatcgtattgggagaactggacgttcaaaatcaaaaggaacatcatatgctttctttaccccttcaaattcccgtcaagccaaagatttggtatctgttctacaagaagctaatcagattattagcccacaactgcagtcgatggccgaccgttgcggtggtggtggcggcgggtggaacaggaacagattcggcggaggtggacgaggtggtggcggctcttttaaacgcggaagcaattttggcaagagtagccaaagggggggcagtggttacaaacgatttgacgactattaaataagatttttgttggcatttctaagagggtgaatcctcgtaatatagataaatgttatgatttgtagatcctgtttggatattacagttgtggctagtttaatttatttattgtaatgtccactagcgacccaacattttataggtaacactatttatattatgttaaaactgtgatatttttttattgtgattctacccaagatttgcaaaatagtgcattcttactctgaaattttccaagtagaataaatgtcgtcaaattcatgtagaattttattaatatttagagcgttaagccgtcattccactcttgttacatttcattgtataattacattgtatgaataaataatttaagaatactaaaaaaaaaaaaaaaaaaaaaa

SEQ ID NO: 76901 - protein, 539 aa, Bombyx mori
MSGNWNNSRGNGGSKFGGGNKFGDNSSRFGNGGNRFGGSGGFGGKKEFSGGQNMRRPDWDSVSLQPFNKNFYDPHPTVLKRSPYEVEEYRNNHEVTVSGVEVHNPIQYFEEANFPDYVQQGVKTMGYKEPTPIQAQGWPIAMSGKNLVGVAQTGSGKTLAYILPAIVHINNQPPIRRGDGPIALVLAPTRELAQQIQQVAADFGHTSYVRNTCVFGGAPKREQARDLERGVEIVIATPGRLIDFLEKGTTNLQRCTYLVLDEADRMLDMGFEPQIRKIIEQIRPDRQTLMWSATWPKEVKKLAEDYLGDYIQINIGSLQLSANHNILQIVDICQEHEKENKLNVLLQEIGQSQEPGAKTIIFVETKRKAENISRNIRRYGWPAVCMHGDKTQQERDEVLYQFKEGRASILVATDVAARGLDVDGIKYVINFDYPNSSEDYIHRIGRTGRSKSKGTSYAFFTPSNSRQAKDLVSVLQEANQIISPQLQSMADRCGGGGGGWNRNRFGGGGRGGGGSFKRGSNFGKSSQRGGSGYKRFDDY

SEQ ID NO: 76902 - DNA, 1479 bp, Helicobacter pylori 26695; identical to SEQ ID NO: 65244
  CDS (1)..(1479): transl_table=11

SEQ ID NO: 76903 - protein, 492 aa, Helicobacter pylori 26695; identical to SEQ ID NO: 65245

SEQ ID NO: 76904 - DNA, 1992 bp, Vibrio cholerae O1 biovar eltor str. N16961
  CDS (1)..(1992): transl_table=11
ttggttggaaatggtaaagcacgtgggaccttggttatttcttcatttagtgggatccccatgcaagatactgcaattcaattcagtgatttagcactgaacagcgccatcctttctgccctaaccgaaatgggcttcgtatcaccaactcctatccaagcagcagcgattcctgttctgcttgaaggccgtgatgcactgggtaaagcgcaaacaggtacaggtaaaacagcggcattctctttgcctctgctcaacaaacttaatctatctcagtacaagccacaagctatcgttatggcgccaacacgtgagctggcgattcaggtagcagccgagatcaaaaacctaggccaaaatatcaaaggcctcaaggttcttgagatctacggtggtgcttcaattcttgatcaaatgcgcgctctgaaatctggcgctcacattgttgtgggtactccaggccgcgtaaaagatctgatcacgcgtgatcgtctacacctagacgaatgtcatactttcatcttggatgaagcagacgaaatgctcaaaatgggcttcgttgatgacgtgacttggatcatggagcaagctccagaatcagcacaacgcgtactgttctctgccactatgccgccaatggttaaagaaatcgttgagcgttttctacgtaatccagagtgtgttgacgtagccggttctaaccaaacggtcgcgaaagttgagcaacaatactgggtagtaaaaggtgtagagaaagatgaagcgatggctcgtctgcttgaaaccgaagaaaccgatgcttctatcgtattcgtacgtactcgtcaggatactgagcgtctagcggattggctgtgcgcgcgtggcttcaaagcagcggctctgcacggtgatatccctcagtctctgcgtgagcgtactgttgatcatatcaaacaaggtgtgattgatattctggttgcgaccgacgttgttgcacgtggtctggacgttcctcgtatcactcacgtatacaactacgatattccatttgatgtggaatcttacatccaccgtatcggccgtactggtcgtgctggacgtaaaggtaaggcgatcctgctggttcgtactaaccaaatccgcatgctacgcactatcgagcgtgtcactcgttcttcaatggaagagatccaactaccgcaccgcgataaagtggctgaatctcgtctgactaagctgggtcaagaactggcagcagataaagagttcagctcgctggaacgtttcgctgatttggttgaaaaactgcaagcgtcactggaaatcgatgcaacgactctggctgcaatcctgctgaaacgtcagcaaggcaagcgtccactgttttatgtcggcgctgatccaatgatcgaagcgatggagcgtgaaaaatcacgtcgtcgtgagcgtcgtgatgaccgccgcgatggtgatcgtcctgctcgtcgtgaattcggtggccgcgatcaagaaaaccacgattgggatacttaccaactgcaagttggccgtgaccaaggcgttcaagtgaaagacatcgttggtgctctcgcaaacgaactgggtctgactaaaggttctatcggtgcgatcaaactggctcaaggccatacgtttgttcagctaccaaaagccatgtcaaatgacgtttctagcaagctacgtaagctgcgtattcgccagaaagaagtgggtgctgtagtgtgtgacttcgatgacttccgcgaatctcgtggtggtgctcgtcgtgaaggtggtccacgtcgcgaaggtggtcgtcgtccagaaggcaaccgtgaaggcggtttccgtggtggtcgtgaaggcggccgcgaaggtggtcgtggccgtggtggcgaaggccgtcctttccgtgaaggtgagcgtcgttttgagcgcaaccgtagtggtgagagcagtggtagctaccgtggtgagcgtggccatagccgtcgtcgcgaagaagcataa

SEQ ID NO: 76905 - protein, 663 aa, Vibrio cholerae O1 biovar eltor str. N16961
MVGNGKARGTLVISSFSGIPMQDTAIQFSDLALNSAILSALTEMGFVSPTPIQAAAIPVLLEGRDALGKAQTGTGKTAAFSLPLLNKLNLSQYKPQAIVMAPTRELAIQVAAEIKNLGQNIKGLKVLEIYGGASILDQMRALKSGAHIVVGTPGRVKDLITRDRLHLDECHTFILDEADEMLKMGFVDDVTWIMEQAPESAQRVLFSATMPPMVKEIVERFLRNPECVDVAGSNQTVAKVEQQYWVVKGVEKDEAMARLLETEETDASIVFVRTRQDTERLADWLCARGFKAAALHGDIPQSLRERTVDHIKQGVIDILVATDVVARGLDVPRITHVYNYDIPFDVESYIHRIGRTGRAGRKGKAILLVRTNQIRMLRTIERVTRSSMEEIQLPHRDKVAESRLTKLGQELAADKEFSSLERFADLVEKLQASLEIDATTLAAILLKRQQGKRPLFYVGADPMIEAMEREKSRRRERRDDRRDGDRPARREFGGRDQENHDWDTYQLQVGRDQGVQVKDIVGALANELGLTKGSIGAIKLAQGHTFVQLPKAMSNDVSSKLRKLRIRQKEVGAVVCDFDDFRESRGGARREGGPRREGGRRPEGNREGGFRGGREGGREGGRGRGGEGRPFREGERRFERNRSGESSGSYRGERGHSRRREEA

SEQ ID NO: 76906 - DNA, 1833 bp, Pasteurella multocida subsp. multocida str. Pm70; identical to SEQ ID NO: 65248
  CDS (1)..(1833): transl_table=11

SEQ ID NO: 76907 - protein, 610 aa, Pasteurella multocida subsp. multocida str. Pm70; identical to SEQ ID NO: 65249

SEQ ID NO: 76908 - DNA, 1377 bp, Pseudomonas aeruginosa PAO1
  CDS (1)..(1377): transl_table=11
atgacctccaccgctttctcctcgctgccgctttccgcggacctcctggccaatctcgactccctcggttaccgggagatgacgccgatccaggcgcagagcctgccgctgatcctccagggccacgacctgatcgcccaggccaagaccggcagcggcaagaccgcggccttcggcctcgccctgctcagcccgctgaacccgcgctacttcggctgccaggcgctggtgctgtgcccgacccgcgaactggccgaccaggtcgccaaggagatccgccggctggcccgcgccgccgacaacatcaaggtcctgaccctctgcggcggcgtcccctacggcccgcaggtggcttcgctggagcacggcgcgcacgtggtggtcggcaccccggggcgcatccaggagcacctgcgcaagggcaccctggtcctcgacgggctcaataccctggtcctcgacgaagccgaccggatgctcgacatgggcttctacgacagcatcgccgagatcatcggccagctccccgagcgccggcagaccctgctgttctccgccacctacccggacggcatcgagaagctggcgaagaccttcatgcgcgatccgcgacaggtgagggtcgagtcgctgcacgccgacagccagatcgagcagcgcttcttcgagatcgatccgaaacagcgcatggacgccgtggtacgcctgctccagcatttccggccacagtcctgcgtggccttctgccagacccgccagcagtgccaggagctggccgacgcactgaaggcgcagcggatttccgccctggccctgcacggcgacctggagcagcgcgagcgcgaccaggtcctgacggtgttcgccaaccgcagttgcaacgtactggtggccaccgacgtggccgcccgcgggctggacatcgccgccctggaaacggtgatcaacgtcgagctggcgcgtgacccggaggtccacatccatcgcatcggacgcagcggtcgcgccggcgagaaaggcctggccctgtcgctggtggcgccggccgaggccagccgcgcgcaggccatcgaggacctgcagaagcagccgctggcctggtacgccctcggccagttgaaggccagcccggagccattgctgccgccgatgagcaccctgtgcatcgccggcggacgcaaggacaaggtgcgccccggcgacctgctcggtgccctcaccggcgacgccgggctgcccggcagcgcggtgggcaagatcgccatcttcgacttccaggccttcgtcgccatcgagcgcggcctcgcccaccaggccctcaagcgcctgagcgaaggcaagatcaagggtcgctcgttcaaggtccgcctgctttag

SEQ ID NO: 76909 - protein, 458 aa, Pseudomonas aeruginosa PAO1
MTSTAFSSLPLSADLLANLDSLGYREMTPIQAQSLPLILQGHDLIAQAKTGSGKTAAFGLALLSPLNPRYFGCQALVLCPTRELADQVAKEIRRLARAADNIKVLTLCGGVPYGPQVASLEHGAHVVVGTPGRIQEHLRKGTLVLDGLNTLVLDEADRMLDMGFYDSIAEIIGQLPERRQTLLFSATYPDGIEKLAKTFMRDPRQVRVESLHADSQIEQRFFEIDPKQRMDAVVRLLQHFRPQSCVAFCQTRQQCQELADALKAQRISALALHGDLEQRERDQVLTVFANRSCNVLVATDVAARGLDIAALETVINVELARDPEVHIHRIGRSGRAGEKGLALSLVAPAEASRAQAIEDLQKQPLAWYALGQLKASPEPLLPPMSTLCIAGGRKDKVRPGDLLGALTGDAGLPGSAVGKIAIFDFQAFVAIERGLAHQALKRLSEGKIKGRSFKVRLL

SEQ ID NO: 76910 - DNA, 1350 bp, Pseudomonas aeruginosa PAO1
  CDS (1)..(1350): transl_table=11
atgacgttcgcttccctcggtctgctcgaccccctgctcaaggccctcgaagggctcggccacggcacgcctacgccgatccaggcccaagccatacccccggcgctcaagggccgcgacctgctcgccgcagcacagaccggcaccggcaagaccgccggtttcgccctgccgttgctgcagcggctgaccctggaggggccgcaggtcgctgcgaactcggtgcgtgcactggtcctggtcccgacccgcgaactggccgagcaggtccacgccagcgtccgcgactacggccagcacctgccgctgcgtaccgcggtggcctacggtggggtcagcatcaacccgcagatgatgaagctgcgcaagggagtggatatcctcgtcgccactcccgggcggctgctcgacctgtatcggcagaacgcggtgaagttcgcccagctccaggcgttggtgctggacgaagccgatcgcatgctcgacctcggtttcgcccgcgagctggacgaactgttcgccgcgctgccgcgcaagcgccagaccctgctgttttccgcgaccttctccgacgccatccgcacgctggcccgtgaactgctgcgcgacccgctgtccatcgaggtcagtccgcgcaataccgcggcgaagagcgtcaggcaatggctggtgccggtggacaagaagcgcaaggccgagctgttctgccacctgttgcaggccaatcgctggcgccaggcgctggtcttcgccaagacccgcaagagcgtcgaggaactggtcggactgttgcagcggcagggtatcgccgccgactcgatccatggcgacaagccgcagccggcgcggctgcgcgccttgcagcggttcaaggccggcgaggtagacctgctggtagccaccgacgtggccgcgcgtggcctggatatcgaggaaatgccgctggtggtcaacttcgacctgccgatcgtcgccgaggactacgtgcatcgcatcggccgtaccggccgtgccggtgcctccggccaggcggtgtcgctggtctgcgccgacgaagtggagctgctggcggcgatcgaaacactgatcgggcagaccctgcaacgccgcgaggagcccgacttcgagccggagcaccgggtgccgcagaccgcaccgggcggcgtggtgctgaagaaaccgaagaagccgaagaaacccaaggccgcggagagcgtcggcaagcccggcaagatccacttgggcagttggttcgacagcagcgcgccgacggtcaaggcggtgcgcaaggcaccgggcttcggcgcgggtgcggcgggcaagccgaagaagcggccgtccggcaaatag

SEQ ID NO: 76911 - protein, 449 aa, Pseudomonas aeruginosa PAO1
MTFASLGLLDPLLKALEGLGHGTPTPIQAQAIPPALKGRDLLAAAQTGTGKTAGFALPLLQRLTLEGPQVAANSVRALVLVPTRELAEQVHASVRDYGQHLPLRTAVAYGGVSINPQMMKLRKGVDILVATPGRLLDLYRQNAVKFAQLQALVLDEADRMLDLGFARELDELFAALPRKRQTLLFSATFSDAIRTLARELLRDPLSIEVSPRNTAAKSVRQWLVPVDKKRKAELFCHLLQANRWRQALVFAKTRKSVEELVGLLQRQGIAADSIHGDKPQPARLRALQRFKAGEVDLLVATDVAARGLDIEEMPLVVNFDLPIVAEDYVHRIGRTGRAGASGQAVSLVCADEVELLAAIETLIGQTLQRREEPDFEPEHRVPQTAPGGVVLKKPKKPKKPKAAESVGKPGKIHLGSWFDSSAPTVKAVRKAPGFGAGAAGKPKKRPSGK

SEQ ID NO: 76912 - DNA, 1644 bp, Lactococcus lactis subsp. lactis Il1403; identical to SEQ ID NO: 65250
  CDS (1)..(1644): transl_table=11

SEQ ID NO: 76913 - protein, 547 aa, Lactococcus lactis subsp. lactis Il1403; identical to SEQ ID NO: 65251

SEQ ID NO: 76914 - DNA, 1389 bp, Neisseria meningitidis MC58
  CDS (1)..(1389): transl_table=11
atgtctattaaatttgccgatttgaaccttgataaaaacattttgtccgccgtcagcagcgagggttacgaaagcccgacgccgattcaggcgcaagccattccgtttgctttggaaggccgcgacatcatggcttcggcgcaaaccggctccggcaaaaccgccgcctttctgttaccgactttgcaaaaactgaccaaacgcagcgaaaaaccgggcaaaggcccgcgtgctttggtgttgaccccgacccgcgaactggcggctcaagtcgagaaaaacgcgctggcgtatgccaaaaatatgcgttggttccgcaccgtcagcatcgtcggcggcgcgtctttcggctaccaaacccgtgccctgagcaaaccggtcgatctgattgtcgccacgccgggccgtctgatggacctgatgcaaagcggcaaagttgattttgaacgtttggaagtgctgattttggacgaagccgaccgtatgttggatatgggctttatcgacgacatcgaaaccatcgtggaagcaacgccgagcgaccgtcagactttgttgttctccgccacttgggacggcgcggtcggcaaactggcgcgcaaactgaccaaagaccctgaaatcatcgaagtcgaacgcgtggacgatcaaggcaaaatcgaagaacaactgctgtactgcgacgatatgcgccacaaaaaccgcctgctcgatcatatcttgcgcgatgccaatatcgatcaatgcgtgattttcacgtccaccaaagccatgaccgaagtcattgcggatgaactgtacgaaaaaggtttcgccgcaaactgcctgcacggcgatatgccgcaaggctggcgcaaccgcacgctgatggatttgcgtaaaggccgctgcaaaattttggttgccaccgatgttgccgcacgcggtatcgacgtaccgaccattacccacgttatcaactacgacctgccgaaacaggcggaagactacgtccaccgcatcgggcgcaccggccgcgcaggccgcacgggtattgcgattacgtttgccgaagtgaacgaatacgtcaaagtccacaaaatcgaaaaatacattaaccgaaaactgcccgaactgaccatcgaaggcatggaaccgacccgcaaacgcaaatccgcaggcggcaagccgaaaggcaaaggcggctggggcgatcgtaaatccggcggttggcgcggcgatcataaaccgagcaaagaaggcttcggcggcaaaacgcgcggcgaaggtttcaagaaagaaggctttaagagagacggtttcaaaaaaaccggcgaaggcttcaaaggcaaacgcaaagccggcgattcttttgcaggcaaaggcgaacgccgttacaaagaccgctaa

SEQ ID NO: 76915 - protein, 462 aa, Neisseria meningitidis MC58
MSIKFADLNLDKNILSAVSSEGYESPTPIQAQAIPFALEGRDIMASAQTGSGKTAAFLLPTLQKLTKRSEKPGKGPRALVLTPTRELAAQVEKNALAYAKNMRWFRTVSIVGGASFGYQTRALSKPVDLIVATPGRLMDLMQSGKVDFERLEVLILDEADRMLDMGFIDDIETIVEATPSDRQTLLFSATWDGAVGKLARKLTKDPEIIEVERVDDQGKIEEQLLYCDDMRHKNRLLDHILRDANIDQCVIFTSTKAMTEVIADELYEKGFAANCLHGDMPQGWRNRTLMDLRKGRCKILVATDVAARGIDVPTITHVINYDLPKQAEDYVHRIGRTGRAGRTGIAITFAEVNEYVKVHKIEKYINRKLPELTIEGMEPTRKRKSAGGKPKGKGGWGDRKSGGWRGDHKPSKEGFGGKTRGEGFKKEGFKRDGFKKTGEGFKGKRKAGDSFAGKGERRYKDR

SEQ ID NO: 76916 - DNA, 1278 bp, Methanothermobacter thermautotrophicus str. Delta H
  CDS (1)..(1278): transl_table=11
atgaaaggattagaatttagtgagtttgatatctcaggggatataaacagggcccttgatgatatgggatttgagagcacaactccaatccaggcacttacactacctgttacacttgacggtatggacgttgttggtgaggcccagacagggaccggaaaaacagctgcattcgccatacccgtacttgagaaccttgaagccgagagggtgccccaggccctcataatctgtccgacacgcgagctctgtctccaggtctcagaggagatcaagaggataggtaaatacatgaaggtgaaggtcctcgcggtctatggtggtcagagtatcggtaaccagatagcacagctaaggaggggggttcatgtcatcgttgcaacccctggtagactgatagaccacatcgagagggggaccgttgatctgggaggtatatccaccgttgtccttgatgaggcagatgaaatgctgaacatgggattcattgatgacatagagcgtatactatcccatgtacctgagagaaggcagaccatgctcttctctgcaacggtttcaaagcccatactcaggattgcaaggaagtacatgaggaacccccaggttatgcgtgtggagaagaagcacagccccaagatagatgagttctacttcaaaaccagggaggaggataaggttgagctcctcgactggatactctcatcaaacaatatcaggatgggactcatattctgtaacaccaagagaagggtccagaggttgagaaggcagctgaaccgtatgggttactctgcagatgagatccacggtgatctttcacagtcaaagcgtgagcgtgtcatggagagattcagaaggggagatttcagtctccttgttgcaacggatgttgctgcccgtggtattcacgtacccgatgtcgaggccgttgtgaactatgacctgccctttgagaacgagtactacgttcaccgtataggccgtacagggcgagccggttcaagcgggaagtccttcaccctcgtcgttggaagtgaggttcaccgcctgagaaggatccagtcattcacaggtaagaggataaagcagagcaacatgccctcccctgaggagataaggaggggatatgagatggacctcagggagatcctcaggaggaacctggaatcaaagacttacagtgactctgaaatccttgagagccttgctggtgagggttacagtttcagggacatctcacacgcccttctggatgtactggaatcatccaaataa

SEQ ID NO: 76917 - protein, 425 aa, Methanothermobacter thermautotrophicus str. Delta H
MKGLEFSEFDISGDINRALDDMGFESTTPIQALTLPVTLDGMDVVGEAQTGTGKTAAFAIPVLENLEAERVPQALIICPTRELCLQVSEEIKRIGKYMKVKVLAVYGGQSIGNQIAQLRRGVHVIVATPGRLIDHIERGTVDLGGISTVVLDEADEMLNMGFIDDIERILSHVPERRQTMLFSATVSKPILRIARKYMRNPQVMRVEKKHSPKIDEFYFKTREEDKVELLDWILSSNNIRMGLIFCNTKRRVQRLRRQLNRMGYSADEIHGDLSQSKRERVMERFRRGDFSLLVATDVAARGIHVPDVEAVVNYDLPFENEYYVHRIGRTGRAGSSGKSFTLVVGSEVHRLRRIQSFTGKRIKQSNMPSPEEIRRGYEMDLREILRRNLESKTYSDSEILESLAGEGYSFRDISHALLDVLESSK

SEQ ID NO: 76918 - DNA, 1374 bp, Escherichia coli O157:H7 EDL933
  CDS (1)..(1374): transl_table=11
atgaccgctttttctaccctgaatgttttgcctcccgcccaactcacgaaccttaatgagttgggttatttaaccatgacgccggtgcaggccgccgcgcttccggcgatccttgccggaaaagatgttcgcgtgcaggcgaaaactggcagcggcaaaacggcggcttttggcctcggcttgttacagcaaattgatgcgtcgctatttcaaacccaggctttagtgctgtgtcctacgcgtgaactggcggatcaggtggcaggtgaattgcgtcggctggcgcgttttctgccaaataccaaaattttgacgttgtgcggtggtcaaccgttcggtatgcagcgtgattcgttgcaacatgcgccgcatattatcgtggcaacgccgggccgtttgctggatcacctgcaaaaaggcacggtatcactggatgcgctgaatactttggtgatggatgaggccgaccgcatgctggatatgggatttagcgatgccattgatgatgtcatccgttttgcgcctgcatctcgacagacgcttctgttttcggcaacctggccggaagccatcgccgcaatcagcggacgagtgcaacgcgatcctttggcgattgaaattgactcaacagatgctttgccacccattgaacaacaattttatgagacatccagcaaaggcaaaattcctctgttgcaacggttattaagcttgcatcagccatcctcttgcgtggtgttttgcaataccaaaaaagattgccaggctgtctgcgacgcgctgaatgaagtagggcaaagtgcattgtcattacacggcgatctggagcaacgcgatcgtgatcagaccctggtacgttttgctaacggtagcgcccgtgtactggtcgcgactgatgttgctgcgcgtggtctggatattaaatcgcttgagctggtggtgaactttgagctggcgtgggaccctgaagttcatgtacatcgcatcggtcgtacagctcgtgcaggaaatagcggtctggcgatcagtttctgtgctccggaagaagcacagcgggccaatatcatttctgacatgttgcagataaaacttaactggcaaacgccaccagctaatagttccattgtgacgctggaagcagaaatggcaacgttgtgtatcgatggcgggaaaaaagccaaaatgcgcccgggtgatgtattaggtgcactgacaggagatatcgggcttgatggcgcagatattggcaaaatcgccgtgcatccggcgcatgtctatgtcgcggtccgtcaggctgttgctcataaagcatggaaacagttacagggcgggaagattaaaggaaaaacgtgccgggtgcggttattaaaataa

SEQ ID NO: 76919 - protein, 457 aa, Escherichia coli O157:H7 EDL933
MTAFSTLNVLPPAQLTNLNELGYLTMTPVQAAALPAILAGKDVRVQAKTGSGKTAAFGLGLLQQIDASLFQTQALVLCPTRELADQVAGELRRLARFLPNTKILTLCGGQPFGMQRDSLQHAPHIIVATPGRLLDHLQKGTVSLDALNTLVMDEADRMLDMGFSDAIDDVIRFAPASRQTLLFSATWPEAIAAISGRVQRDPLAIEIDSTDALPPIEQQFYETSSKGKIPLLQRLLSLHQPSSCVVFCNTKKDCQAVCDALNEVGQSALSLHGDLEQRDRDQTLVRFANGSARVLVATDVAARGLDIKSLELVVNFELAWDPEVHVHRIGRTARAGNSGLAISFCAPEEAQRANIISDMLQIKLNWQTPPANSSIVTLEAEMATLCIDGGKKAKMRPGDVLGALTGDIGLDGADIGKIAVHPAHVYVAVRQAVAHKAWKQLQGGKIKGKTCRVRLLK

SEQ ID NO: 76920 - DNA, 1941 bp, Escherichia coli O157:H7 EDL933
  CDS (1)..(1941): transl_table=11
  misc_feature (1929)..(1929): w is a or t
atgatgagttatgtagactggccgccattaattttgaggcacacgtactacatggctgaattcgaaaccacttttgcagatctgggcctgaaggctcctatccttgaagcccttaacgatctgggttacgaaaaaccatctccaattcaggcggagtgtattccacatctgctgaatggccgcgacgtactgggtatggcccagacggggagcggaaaaactgcagcattctctttacctctgctgcaaaatcttgatcctgagctgaaagcaccacagattctggtgctagcaccgacccgcgaactggcggtacaggttgctgaagcaatgacggatttctctaaacacatgcgcggcgtaaatgtggttgccctgtacggcggccagcgttatgacgtgcaattacgcgccctgcgtcaggggccgcagatcgttgtcggtactccgggccgtctgctggaccacctgaaacgtggcactctggacctctctaaactgagcggtctggttctggatgaagctgacgaaatgctgcgcatgggcttcatcgaagacgttgaaactattatggcgcagatcccggaaggtcatcagaccgctctgttctctgcaaccatgccggaagcgattcgtcgcattacccgccgctttatgaaagagccgcaggaagtgcgcattcagtccagcgtgactacccgtcctgacatcagccagagctattggactgtctggggtatgcgtaaaaacgaagcactggtacgtttcctggaagcggaagattttgatgcggcgattatcttcgttcgtaccaaaaatgcgactctggaagtggctgaagctcttgagcgtaacggctacaacagcgccgcgctgaacggtgacatgaaccaggcgctgcgtgagcagacactggaacgcctgaaagatggtcgtctggacatcctgattgcgaccgacgttgcagcccgtggcctggacgttgagcgtatcagcctggtggttaactacgatatcccgatggattctgagtcttacgttcaccgtatcggtcgtaccggtcgtgcgggtcgtgctggccgcgcgctgctgttcgttgagaaccgcgagcgtcgtctgctgcgcaacattgaacgtactatgaagctgactattccggaagtagaactgccgaacgcagaactgctgggcaaacgccgtctggaaaaattcgccgctaaagtacagcagcagctggaaagcagcgatctggatcaataccgcgcactgctgagcaaaattcagccgactgcagaaggtgaagagctggatctcgaaactctggccgccgcactgctgaaaatggcacagggtgaacgtactctgattgttccgccagatgcgccgatgcgtccgaaacgtgaattccgtgaccgtgatgaccgtggtccgcgcgatcgtaacgaccgtggtccgcgtggcgaccgtgaagatcgtccgcgtcgtgaacgtcgtgatgttggtgacatgcagttgtaccgtattgaagtgggccgcgatgatggtgttgaagttcgtcatatcgttggtgcgattgctaacgaaggcgacatcagcagccgttacatcggtaacattaagctgtttgcttctcactccaccatcgaactgccgaaaggtatgccgggtgaagtgctgcaacactttacacgtactcgcattctgaacaagccgatgaatatgcaattactgggcgatgcacagccgcatactggcggagagcgtcgtggcggtggtcgtggtttcagtggcgagcgtcgtgaaggtggtcgtaacttcagcggtgaacgccgtgaaggtggtcgtggtgatggtcgtcgttttagcggcgaacgtcgtgaaggccgcgctccgcgtcgtgatgactctaccggtcgtcgtcgtttcggwggtgatgcgtaa

SEQ ID NO: 76921 - protein, 646 aa, Escherichia coli O157:H7 EDL933
MMSYVDWPPLILRHTYYMAEFETTFADLGLKAPILEALNDLGYEKPSPIQAECIPHLLNGRDVLGMAQTGSGKTAAFSLPLLQNLDPELKAPQILVLAPTRELAVQVAEAMTDFSKHMRGVNVVALYGGQRYDVQLRALRQGPQIVVGTPGRLLDHLKRGTLDLSKLSGLVLDEADEMLRMGFIEDVETIMAQIPEGHQTALFSATMPEAIRRITRRFMKEPQEVRIQSSVTTRPDISQSYWTVWGMRKNEALVRFLEAEDFDAAIIFVRTKNATLEVAEALERNGYNSAALNGDMNQALREQTLERLKDGRLDILIATDVAARGLDVERISLVVNYDIPMDSESYVHRIGRTGRAGRAGRALLFVENRERRLLRNIERTMKLTIPEVELPNAELLGKRRLEKFAAKVQQQLESSDLDQYRALLSKIQPTAEGEELDLETLAAALLKMAQGERTLIVPPDAPMRPKREFRDRDDRGPRDRNDRGPRGDREDRPRRERRDVGDMQLYRIEVGRDDGVEVRHIVGAIANEGDISSRYIGNIKLFASHSTIELPKGMPGEVLQHFTRTRILNKPMNMQLLGDAQPHTGGERRGGGRGFSGERREGGRNFSGERREGGRGDGRRFSGERREGRAPRRDDSTGRRRFGGDA

SEQ ID NO: 76922 - DNA, 1446 bp, Clostridium acetobutylicum ATCC 824; identical to SEQ ID NO: 65258
  CDS (1)..(1446): transl_table=11

SEQ ID NO: 76923 - protein, 481 aa, Clostridium acetobutylicum ATCC 824; identical to SEQ ID NO: 65259

SEQ ID NO: 76924 - DNA, 1509 bp, Agrobacterium tumefaciens str. C58; identical to SEQ ID NO: 65278
  CDS (1)..(1509): transl_table=11

SEQ ID NO: 76925 - protein, 502 aa, Agrobacterium tumefaciens str. C58; identical to SEQ ID NO: 65279

SEQ ID NO: 76926 - DNA, 1536 bp, Bacillus subtilis subsp. subtilis str. 168
  CDS (1)..(1536): transl_table=11
atggtaaatcacgacattactgaaacagcaattagaaggagtttgaataatttgactataacgtttcaagattttaatttaagttctgatctcatgaaagcaattaatcgtatgggatttgaagaagcaacaccgattcaggcacaaacgataccgctcggactttcaaataaagacgtcattggacaagcgcaaacaggtacaggtaaaacagctgcgtttggtataccccttgttgaaaaaattaaccccgagtctcctaatattcaagcaatcgtaatcgcgccaacccgtgaattagccattcaagtatctgaagaattgtataaaatcggacaagataaacgtgcgaaggttcttcctatttacggcggacaggatattggacggcaaatccgggcgttaaagaagaatccgaatattattgtcggaacacctggacgtcttcttgaccacatcaaccgccgcaccattcgtttaaacaatgtaaataccgttgtaatggatgaagcggatgaaatgctgaacatgggattcattgacgatattgaatctatcctttcaaacgtgccaagcgagcatcagacacttctgttctctgccacaatgcctgcgccgatcaaacgcattgcagagcgcttcatgactgagccggaacacgtaaaagtaaaagcgaaagaaatgacggtttctaacattcagcagttctatttggaagtgcaagaacgtaaaaaattcgatacactgactcgccttcttgatattcagtctcctgagcttgcgatcgtattcggacgtacaaaacgccgtgtcgatgagctggctgaagctctgaaccttcgcggatatgcagctgaaggtattcacggtgacttaacgcaggcgaaacgtatggttgcgcttcgtaaatttaaagaaggcgcaatcgaagttctagtcgcaactgatgttgccgctcgcggacttgatatctcaggtgttacacacgtatacaacttcgacgtgcctcaagatcctgaaagctacgttcaccgtatcggaagaacgggccgtgcaggaaaaacaggtatggcgatgacgttcattacaccgcgtgagaaaagcatgcttcgcgcaattgaacaaacaacaaaacgcaaaatggaccgcatgaaggagcctacacttgatgaagcgttagaaggtcagcaacaggttactgttgaacgtcttcgcacaacaatcagtgaaaacaacctgaacttctacatgacagcggcagctgagctgcttgaagatcatgatgcagtaacagtggttgcggcggctatcaaaatggctacaaaagagccagacgacacaccggttcgcttaacagacgaagcgccgatggtcagcaaacgctacaagaaccagcgctcttctaaacgcagagacggtcaaggcggcggctaccgcggcggaaaagggaaaagcaacaaccgttcttcctatgacaaaaagcgttcaaacgatcgccgttcttcaggtgacagacgccagaaaaaatcttactaa

SEQ ID NO: 76927 - protein, 511 aa, Bacillus subtilis subsp. subtilis str. 168
MVNHDITETAIRRSLNNLTITFQDFNLSSDLMKAINRMGFEEATPIQAQTIPLGLSNKDVIGQAQTGTGKTAAFGIPLVEKINPESPNIQAIVIAPTRELAIQVSEELYKIGQDKRAKVLPIYGGQDIGRQIRALKKNPNIIVGTPGRLLDHINRRTIRLNNVNTVVMDEADEMLNMGFIDDIESILSNVPSEHQTLLFSATMPAPIKRIAERFMTEPEHVKVKAKEMTVSNIQQFYLEVQERKKFDTLTRLLDIQSPELAIVFGRTKRRVDELAEALNLRGYAAEGIHGDLTQAKRMVALRKFKEGAIEVLVATDVAARGLDISGVTHVYNFDVPQDPESYVHRIGRTGRAGKTGMAMTFITPREKSMLRAIEQTTKRKMDRMKEPTLDEALEGQQQVTVERLRTTISENNLNFYMTAAAELLEDHDAVTVVAAAIKMATKEPDDTPVRLTDEAPMVSKRYKNQRSSKRRDGQGGGYRGGKGKSNNRSSYDKKRSNDRRSSGDRRQKKSY

SEQ ID NO: 76928 - DNA, 1995 bp, Yersinia pestis CO92
  CDS (1)..(1995): transl_table=11
atgactactgagcttgaaacctcttttgctgatctggggctgtccgctccaattctttccgctctgactgatcttggttatgaaaaaccatctcctatccagttggaatgtattccacacctgttaaacggccgtgatgttctcggtatggcgcaaacaggcagtggcaaaacagccgcgtttggtctgccgctgttacacaatattaaagctgatctgaagtcgccacaggttctggtgttggcaccaacccgtgaattggctgttcaggttgctgaagcgctgtccagtttctctaaacacattaatggcgtcaacgtggtggccctgtacggcggtcagcgttatgacgttcaattacgcgctttgcgccaggggccacaagttgttgttggtaccccaggtcgtctgttagaccacctgaaacgcggtacccttaacctgtccaacctgagcggtttagtgttggatgaagcagatgaaatgctgcgcatgggctttatcgaagacgttgaaacgattatggcgcagatcccggctgaacatcagaccgcgttgttctctgcaaccatgccagaagcgattcgtcgtattacgcgtcgcttcatgaaagaaccacaggaagtccgcattcaatctagcgtgacgacccgccctgacattagccagagctactggagagtgggtggcggttaccgtaaaaatgaagcgctggtacgtttcctggaagctgaagatttcgatgctgctattattttcgtacgtaccaaaaatgcgaccttggaagtagcagaagcccttgagcgtagcggctacaacagcgcggcactgaatggtgatatgaatcaggcactgcgtgagcagacgctggagcgtttgaaagatggccgtctggatattctgattgcaactgacgtagctgcccgtggcttggacgttgagcgtatcagcttggtcgtaaactatgatatccctatggattcagagtcttatgttcaccgtatcggtcgtactggccgtgcaggtcgtgcaggtcgcgcgttgctgttcgttgagaaccgtgaacgtcgtctgttgcagaacatcgaacgcacgatgaagctgacgatcccagaagttgagttgccaaacgcagatttgctgagcgaacgtcgtttagctaaattcgccgctaaggttagccaacaactggaaagcagtgatttggatatgtaccgcgcattgctggctaagctgcaaccggaagaagagtttgatatcgagactctggctgctgcactgctgaaaatggcgcagggcgaacgtcctctgatcctgccaccagaagccccacgccgtccgcagcgtgaattcaattcacgtgatgaccgtggtaacgatcgtggtagccgtgatcgtggtgacagccgtcgcgataaccgctctgacagccgttctgctgatagccgtgatggtggtgagcgtcctgctcgtcgtgaacgtcgtgatgttggcgagatggagctgtaccgcattgaagtgggccgtgatgatggtgttgaagttcgccatattgttggcgctatcgctaacgaaggtgatatcagcagccgttatatcggtaatatcaagttgtttgcttcccactcaacgattgaactgccaaaaggcatgccgggcgaaatgttatctcacttcacccgtacccgtatcctgaacaagccgctgaacatgcagctgttgggtgatgcacagccacatgaacgccgtgagcgtccagcgggtggtaacggtggtgagcgtcgtggcggtggccgtccattcagtggcgaacgtcgtgaaggcgcaggcgctcctcctcgtcgttcatttagcggcgatcgtgctcctaccggtggtggtgagcgtcgtggtaaccgcgatggtcagcgttctgcggccccacgtcgtgatgatgctgccgcacctgctgctgcagccgccgcaccagcccgtcgtcgcttcggtgatgcataa

SEQ ID NO: 76929 - protein, 664 aa, Yersinia pestis CO92
MTTELETSFADLGLSAPILSALTDLGYEKPSPIQLECIPHLLNGRDVLGMAQTGSGKTAAFGLPLLHNIKADLKSPQVLVLAPTRELAVQVAEALSSFSKHINGVNVVALYGGQRYDVQLRALRQGPQVVVGTPGRLLDHLKRGTLNLSNLSGLVLDEADEMLRMGFIEDVETIMAQIPAEHQTALFSATMPEAIRRITRRFMKEPQEVRIQSSVTTRPDISQSYWRVGGGYRKNEALVRFLEAEDFDAAIIFVRTKNATLEVAEALERSGYNSAALNGDMNQALREQTLERLKDGRLDILIATDVAARGLDVERISLVVNYDIPMDSESYVHRIGRTGRAGRAGRALLFVENRERRLLQNIERTMKLTIPEVELPNADLLSERRLAKFAAKVSQQLESSDLDMYRALLAKLQPEEEFDIETLAAALLKMAQGERPLILPPEAPRRPQREFNSRDDRGNDRGSRDRGDSRRDNRSDSRSADSRDGGERPARRERRDVGEMELYRIEVGRDDGVEVRHIVGAIANEGDISSRYIGNIKLFASHSTIELPKGMPGEMLSHFTRTRILNKPLNMQLLGDAQPHERRERPAGGNGGERRGGGRPFSGERREGAGAPPRRSFSGDRAPTGGGERRGNRDGQRSAAPRRDDAAAPAAAAAAPARRRFGDA

SEQ ID NO: 76930 - DNA, 1431 bp, Caulobacter crescentus CB15
  CDS (1)..(1431): transl_table=11
atgactcaattttccgaccttggcctggccaagccgctgctgaaggcgcttgctgaaaagggctacaaggaaccgaccccgatccaggcccaggccattccggtggtgctgcaaggcaaggacctgttgggcatcgcccagacgggcaccggcaagaccgccgccttcgccctgccgatcctgcaacgtctggccgaagaccgtaagcccgcgccgcgccgcggctgccgctgcctggtcctgtccccgacccgcgaactggcgacgcaaatcgccgagaacttcaaggcctacgccgtccacatgggcctgtcggtccacaccatctatggcggcgtgaagtacggcccgcagatgaaggccctggccggcggcatcgacgttctggtcgccacgcccggccgcctgatggaccacatggccgagaagtcggccattgtctcgggcaccgagatcttcgtgctcgacgaagccgaccagatgctggacctgggcttcgtggtgccgatccgcaagatcgccgcccagctgaccaagaaccgccagaacctgttcttctcggccaccatgccgagcgaaatcggcaagctggccggtgagctgctgaacaacccggtgcaggtctcggtcgcgccgcaggccaccacggtcgagcgcatcgaccagcgcgtgctgttcatcgaggcccagcgcaagcgtccgctgctggccgagctgttcgccgacacgagcttctcgcgcaccatcgtcttcacccgcaccaagcgcggcgcggaccgggtggccaagtatctgaacgcggccggtatcgaagccgcctcgatccacggcgacaagacgcagggtcagcgcgaacgcgcgctcgcggccttcaaggccggcgagatgcgggccctggtggccaccgacatcgccgcgcgcggcatcgacgtcaacgacgtcagccacgtgatcaactacgagctgcccaacgtgccggaggcctatgtccaccggatcggccgcaccgcccgcaagggcaaggacggcatcgccatcagcttctgcgccgatgacgagcgtaacctgctgaaggacatccagaaggccacccgccagacgatcccgtccttcgaccgtcgcaacgacaagcagctggccgccgccgccgccgtcgccgacaagctggtcccggccgagaagtatgtcgacccgcgcaaggccgacccgcgcaacaacgtcccgtcggaactgcgccgcaagcgtaaccgcaacggcggcggcggcggcggcggtcgcgccgaaggcgctcagaaggcgcaaggtcgcggccccggacagggcaaggccggcgccaagccgggccagaaggccggtcccggccagaacgagttccgcggtcccaagcgccagtcggccacggccgagaagcgctggtcgcctatcgactaa

SEQ ID NO: 76931 - protein, 476 aa, Caulobacter crescentus CB15
MTQFSDLGLAKPLLKALAEKGYKEPTPIQAQAIPVVLQGKDLLGIAQTGTGKTAAFALPILQRLAEDRKPAPRRGCRCLVLSPTRELATQIAENFKAYAVHMGLSVHTIYGGVKYGPQMKALAGGIDVLVATPGRLMDHMAEKSAIVSGTEIFVLDEADQMLDLGFVVPIRKIAAQLTKNRQNLFFSATMPSEIGKLAGELLNNPVQVSVAPQATTVERIDQRVLFIEAQRKRPLLAELFADTSFSRTIVFTRTKRGADRVAKYLNAAGIEAASIHGDKTQGQRERALAAFKAGEMRALVATDIAARGIDVNDVSHVINYELPNVPEAYVHRIGRTARKGKDGIAISFCADDERNLLKDIQKATRQTIPSFDRRNDKQLAAAAAVADKLVPAEKYVDPRKADPRNNVPSELRRKRNRNGGGGGGGRAEGAQKAQGRGPGQGKAGAKPGQKAGPGQNEFRGPKRQSATAEKRWSPID

SEQ ID NO: 76932 - DNA, 1512 bp, Sinorhizobium meliloti 1021
  CDS (1)..(1512): transl_table=11
ttgtccactttcaaagagcttggcctctccgagcacatcgtggcgacactctccgccaatggtttcgaaaagccgacgcccatccaggctcaagccattccgctggtcctgaaagaccatgacctcatcggtcttgcgcagacgggtaccggcaagaccgctgcgttcggcctgccgatgatcgaaaagctcgtagccgatggcagacgtcccgatccgcgcaacattcgcgctctcgtgctcgcacctacccgtgaactggtgaaccagatcgcggccaacctgaagcttttcgtaaagaagagcccgctcaagatcggcctcgtcgtcggtggcgtttcgatcaacaagcagaccgaacagctcgcccgtggcgtcgacattctcgtcgcgacccccggccgcctgctcgaccttgtttctcgcaaggcggtgacgctgacacaggctcgctacctcgttctcgacgaggctgaccagatgctcgatctcggcttcatccacgacctgcgcaagatttccaagctggtgccgaagaatcgtcagacgctgctcttctccgcaaccatgccgaagctgattgccgagcttgccggcgaatacctgaccgatccggtcaaggtcgaagtctcgcctccgggtaaggccgccgacaaggtcgaacaatatgtgcatttcgtccccggcaaggacctgaagacgacgatcctgaagcagacgctgactgccaatcccgatgggctgtcgctgattttcagccgcaccaagcatggcgccgagaagctgatgaagcatctcgaccatgtcggcttcaaggccgcctcgatccatggcaacaagagccagggccagcgggagcgcgcgctgaaggcattccgcgacggtgagatccgcgtgctcgtggcgacggatgtggccgctcgcgggatcgacattccaggcgtcacccacgtctacaactacgacctgccggaagtgcccgacgcctatgtgcaccgtatcggccgcacggcccgtaacggccgcgacggcatcgcgatcgcattctgtgcgccggacgaaatccgcctgctgcgtgacatcgaaaagctgatgggcatccagatcgccgtcgccagcggcgaagcgcccgccgaccaggcgcgcccctcgaagggacgtggcggtcgcggcaacggtcagcctcgtggtaacggccagcctcgcggcaatggcgcagggcagcgccagggcggaccccgccgcgatcggccgcagcgccaggcggcagctggcggattcgccggcgatgaactgctgcgcgacgagcgctcgcacgagcgccgcgaccagcgtgctgccgggcatggaccggcggacggacggccggaaggccaccgcaatcacaaggcgcagaagcaccatgggcggcccggaccgcagcaggcccgccgtgggagcgaacagtcaggcgaacgcaacggcggcggcaatcgaccgcagcgtgccgacggtcgcggccatcagcgctag

SEQ ID NO: 76933 - protein, 503 aa, Sinorhizobium meliloti 1021
MSTFKELGLSEHIVATLSANGFEKPTPIQAQAIPLVLKDHDLIGLAQTGTGKTAAFGLPMIEKLVADGRRPDPRNIRALVLAPTRELVNQIAANLKLFVKKSPLKIGLVVGGVSINKQTEQLARGVDILVATPGRLLDLVSRKAVTLTQARYLVLDEADQMLDLGFIHDLRKISKLVPKNRQTLLFSATMPKLIAELAGEYLTDPVKVEVSPPGKAADKVEQYVHFVPGKDLKTTILKQTLTANPDGLSLIFSRTKHGAEKLMKHLDHVGFKAASIHGNKSQGQRERALKAFRDGEIRVLVATDVAARGIDIPGVTHVYNYDLPEVPDAYVHRIGRTARNGRDGIAIAFCAPDEIRLLRDIEKLMGIQIAVASGEAPADQARPSKGRGGRGNGQPRGNGQPRGNGAGQRQGGPRRDRPQRQAAAGGFAGDELLRDERSHERRDQRAAGHGPADGRPEGHRNHKAQKHHGRPGPQQARRGSEQSGERNGGGNRPQRADGRGHQR

SEQ ID NO: 76934 - DNA, 1413 bp, Listeria monocytogenes EGD-e
  CDS (1)..(1413): transl_table=11
atgaataatttaaaattaagtgaagaaattaaaagagcgattaatgaactaggatatacagaagcaacacctgttcaaaaagcggtaattccagttgccttaacaggagaagatattgttgctaaatcacaaactggtagtgggaaaacagcagcatttgctattcccattgcagaacaggttgaatgggaagaaaataagccacaagcactaatcatcgttccaacacgagaacttgcaatgcaagtcaagacagaatgtacgaatatcggacgatttaaacgtgtcaaagctgcagcaatatatggacaatcaccatttgctaaacaaaaattagaactaagccaaaaaaatcatatagtcgttgggacccctggtcgcctacttgaccatattgaaaaaggatcactgaatgtcgacaaggttgcccatttagttttagatgaagtagatgaaatgttaagcatgggatttattgatcaagtggaagatatccttagccgcttaccaaaacagcgccaaaatctatttttctctgcaactatgccagaagaaatgcaagatttgatcaaacgttaccaagataatccaatggttatcgaaatggcatcagaaaaaacaaatcctatcttccacgtggagatgcaaacagataataaagaaaaaacgttaaaagatgttttaattacggaaaacccggatagtgcgattattttttgcaatacgaaaaatcaagtcgatgaactcactgatttacttgatgtaaaagctagtaaaattcatggtggcttaagacaagaagatcgttttcgggcaatggatgatttcaaaagtggcaaatcgcgtttcttaattgcgacagatgtggcagggcgcggaatagatgtggataatgtatcgttagtcattaactacgatttaccaattgaaaaagaaaattatgtgcatcgtatcggtcgtactggacgcgctggcaaaagtgggaaagctattagtttcgtgaaaacaaatgaaaatccacttttgcgtgatattgaagagatgctcgatgttacaattgaaaaaaaacgtaaaccgacagtgattgaagtgaaagtaaacgaagatgctttccgcaaaaaacaacaaaagcgcccaacaatcaaaaaagctcgtggggaaaaattaaataaaaacattatgaaactgtattttaacgggggcaaaaagaaaaaaatccgtgcggtagattttgtgggaactatttctaaattagaaggaattacggccgaagatattggaattattacgattgaagaccatgtttcttttgtcgaaattttaaatggaaaaggtccggcagtgctggaaatgatgcgctctcgtaaagtgaaaggtagacgcctgaaagtaaacgaggccagaaaacgataa

SEQ ID NO: 76935 - protein, 470 aa, Listeria monocytogenes EGD-e
MNNLKLSEEIKRAINELGYTEATPVQKAVIPVALTGEDIVAKSQTGSGKTAAFAIPIAEQVEWEENKPQALIIVPTRELAMQVKTECTNIGRFKRVKAAAIYGQSPFAKQKLELSQKNHIVVGTPGRLLDHIEKGSLNVDKVAHLVLDEVDEMLSMGFIDQVEDILSRLPKQRQNLFFSATMPEEMQDLIKRYQDNPMVIEMASEKTNPIFHVEMQTDNKEKTLKDVLITENPDSAIIFCNTKNQVDELTDLLDVKASKIHGGLRQEDRFRAMDDFKSGKSRFLIATDVAGRGIDVDNVSLVINYDLPIEKENYVHRIGRTGRAGKSGKAISFVKTNENPLLRDIEEMLDVTIEKKRKPTVIEVKVNEDAFRKKQQKRPTIKKARGEKLNKNIMKLYFNGGKKKKIRAVDFVGTISKLEGITAEDIGIITIEDHVSFVEILNGKGPAVLEMMRSRKVKGRRLKVNEARKR

SEQ ID NO: 76936 - DNA, 1551 bp, Listeria innocua Clip11262
  CDS (1)..(1551): transl_table=11
ttgacaaaattttcggagttcggactggacgaaaaaattgtaaaatcagtaaatcggatggggtttgaagaagcaacgccaatccaagaaaaaacaattccactaggactagcaggtaaagacttaatcggacaagcacaaacaggtactggtaaaacagccgcttttggtcttccaatgatccacaaaatcgaccaaaagagcaacaacgtacaagctttaattattgctccaacgcgtgaacttgcaatccaagtttcagaagagctttataaacttagctatgacaaacatgtacgtgtgctagcggtttacggtggtagtgatattagccgtcaaatccgttcacttaagaaaaacccacaaatcgtagttggtacgccaggacgtattttggatcatattaaccgtcgcacactcaaactagaccacgtggaaacacttgtactagatgaagcagacgaaatgctaaacatgggcttcattgatgatattgaaactatcttaaaagaagtaccagcagaacgtcaaacattactattttctgcaacaatgcctgatccgattcgccgtattggtgaacgtttcatgcacagcccagaacttattcgtattaaagcgaaagaaatgactgcactattaatcgaacaattcttcgtaaaagtgcacgaaaaagaaaaatttgacgtattatctcgtttattagacgttcaagcaccagaactagcaattgtttttggtcgtacgaaacgtcgtgtagacgaactatctcgcgcgcttgatatgcgtggttacgtggctgaaggtatccacggtgacttaacgcaagcaaaacgtatgagcgtactacgcaaatttaaagaaggaaaaattgatgttctagttgcaacagacgtagcagcacgtggacttgatatttccggcgtaacacatgtatataactatgatattccacaagatccagaaagctatgttcaccgtatcggtcgtactggtcgtgctggtaaagaaggtatggcgattactttcgtacaacctcgtgaaatgggttatctacgtattgttgaagaaactacgaaaaaacgtatgcaaccacttcaagctcctacttgggacgaagcatttgcaggccaattacgcgtagcaactgaaaaaattcaagaagcaattacagaagaaaacttagctgactataaaacgtttgctaacgaacttcttgaaaaatacgatgcaactgacatcgcagcagcaatgcttaaaatgttagcgaaagagccagacaaaactcctgtccatattactgaagagcgtccattaccatcccgtggtggcggtggctacaaaggtaaaaatggtaaaggcggtaaaggtggcggctatcgcggcggaagcggtaaaggcggaagctaccgcgatcgtaacaacagcggcaaaggtcgtcgtagcggcggcggaagcggttctggcggtggcggaaatcgtgatcgtcgtggtggcggagaacaacgcagcggcggcaacaaaggcaactactcacaaaaatctaaataa

SEQ ID NO: 76937 - protein, 516 aa, Listeria innocua Clip11262
MTKFSEFGLDEKIVKSVNRMGFEEATPIQEKTIPLGLAGKDLIGQAQTGTGKTAAFGLPMIHKIDQKSNNVQALIIAPTRELAIQVSEELYKLSYDKHVRVLAVYGGSDISRQIRSLKKNPQIVVGTPGRILDHINRRTLKLDHVETLVLDEADEMLNMGFIDDIETILKEVPAERQTLLFSATMPDPIRRIGERFMHSPELIRIKAKEMTALLIEQFFVKVHEKEKFDVLSRLLDVQAPELAIVFGRTKRRVDELSRALDMRGYVAEGIHGDLTQAKRMSVLRKFKEGKIDVLVATDVAARGLDISGVTHVYNYDIPQDPESYVHRIGRTGRAGKEGMAITFVQPREMGYLRIVEETTKKRMQPLQAPTWDEAFAGQLRVATEKIQEAITEENLADYKTFANELLEKYDATDIAAAMLKMLAKEPDKTPVHITEERPLPSRGGGGYKGKNGKGGKGGGYRGGSGKGGSYRDRNNSGKGRRSGGGSGSGGGGNRDRRGGGEQRSGGNKGNYSQKSK

SEQ ID NO: 76938 - DNA, 1413 bp, Listeria innocua Clip11262
  CDS (1)..(1413): transl_table=11
atgaataatttaaaattaagtgaagaaattaaaagagccattaatgaactaggatataaagaagctacccctgttcaaaaagcagtaattccagttgccttaacaggagaagatattgttgctaaatcacaaactggtagcgggaaaacagcagcatttgcgattccaattgcagaacaggttgtttgggaagaaaacaaaccacaagcgctaattatcgtaccaacgagagaacttgcaatgcaggttaagacagaatgtacgaatattggacgatttaaacgaattaaagcagcagcaatatatggacaatcaccttttgctaaacaaaaattagaattaagtcaaaaaaaccatattgttgttggaacgccggggcgattactggatcatatcgaaaaaggatcacttaatgtcgataaagtagcccatttagttttagatgaagtagacgaaatgttaagcatgggctttattgaccaagtagaagatattcttagccgtttaccaaaacagcgtcaaaacttatttttctcagcgacattacctgaagaaatgcaagatttaattaaacgctatcaagataatccaatggtaattgaaatggcttctgaaaaaacaaatccaatttttcatgtggaaatgcaaacggataataaagaaaaaacgttaaaagatgttttaattactgaaaatcctgacagtgcaattattttttgcaatacgaaaaatcaagtcgatgaactcaccgatttactcgatgtaaaagctagtaaaattcatggcggtttaagacaagaagatcgtttccgcgctatggatgatttcaaaagcggaaaatcacgtttcttaattgcgacagatgtagccggtcgaggaattgatgttgataatgtctcgcttgtaattaattacgatttaccaattgaaaaagagaactacgtgcaccgaatcggacgtactggccgtgctggaaaaagtggaaaagctatcagttttgttaaaacgaatgaaaatccgcttcttcgtgatatagaagaaatgctaaatattacgattgagaaaaagcggaaaccaactatcatcgaagtaaaagcaaatgaagaagctttccgtaaaaaacaacaaaaacgcccaaccataaagaaagctcgcggtgaaaaactaaataaaaatattatgaaactttattttaacggtggtaaaaagaaaaaaatccgtgcggtagattttgttggaaccatttctaaattagaagggattacagcggaagatattggtattattacgattgaagaccatgtatcctttgtcgaaattttaaacggaaaaggcccagctgtccttgaaatgatgcgctcacgaaaagtgaaaggcagacgtctcaaagtcaacgaagcaagaaaacgataa

SEQ ID NO: 76939 - protein, 470 aa, Listeria innocua Clip11262
MNNLKLSEEIKRAINELGYKEATPVQKAVIPVALTGEDIVAKSQTGSGKTAAFAIPIAEQVVWEENKPQALIIVPTRELAMQVKTECTNIGRFKRIKAAAIYGQSPFAKQKLELSQKNHIVVGTPGRLLDHIEKGSLNVDKVAHLVLDEVDEMLSMGFIDQVEDILSRLPKQRQNLFFSATLPEEMQDLIKRYQDNPMVIEMASEKTNPIFHVEMQTDNKEKTLKDVLITENPDSAIIFCNTKNQVDELTDLLDVKASKIHGGLRQEDRFRAMDDFKSGKSRFLIATDVAGRGIDVDNVSLVINYDLPIEKENYVHRIGRTGRAGKSGKAISFVKTNENPLLRDIEEMLNITIEKKRKPTIIEVKANEEAFRKKQQKRPTIKKARGEKLNKNIMKLYFNGGKKKKIRAVDFVGTISKLEGITAEDIGIITIEDHVSFVEILNGKGPAVLEMMRSRKVKGRRLKVNEARKR

SEQ ID NO: 76940 - DNA, 1281 bp, Nostoc sp. PCC 7120
  CDS (1)..(1281): transl_table=11
atgtctttttctcatctcggcttgtccaatgaaattatcaatgctgttactgagttggggtacaccaaacccacacccatccagatgcagtctattcctgctgtcttatcaggacgagatttgctagctggcgctcaaactggaactgggaaaactgccagctttactctccccctcctacatttattatcccaagatagtcttaaaagcgcctccaatgcttcctcacccattcgggcgctaattcttaccccgactcgtgaactcgccgcacaggtggagtcaagcgtgcgtgactacggcaagtacttgaagctgaactcaatggtgatgtttggtggagtcagcattaatccccaaaaacagcgtttaaagggtcgtgtagatattctggttgctaccccagggcgactgctagaccatgtgcagcagggaacggtaaacctttcacagattgagattctggtgctggatgaagccgaccggatgttggatatgggctttattcgtgatatccgtcgtatcctctccctgttgcccaaacagcgacaaaacttgctattcttcgctacattctcagacaaaatcaaggaactcgccgccggtctactgaatcgcccgcagatgatcgaagtagcacgccgtaacgttacagccgatactgtgacacaaaaagtctacaaaatagagcgcgatagaaaacgagatttactggctcacctgattcggaaagataattggtatcaagtactagtatttactcgtaccaagtatggtgctgaccgtctagttaaacaattaggccatgagcgcattcaagctctagctatccacggtaataagagccagtcggcgcgtacccacgctctggcaaagttcaaaaatggtagtttacaagttttagtagcaactgacattgctgcacgaggactggacatcagcgaattgccttatgtggtcaatttcgatttgccctatgtaccagaagattatgttcatcgtattggtcgcactggtcgcgctggtgcatcaggtgaggctgtatcgctggtgagcgccgatgaatatcatttgttggcagatattgaaaaactgattgaaaagcgattgccttttgaattggtagcgggtattggagctaattcccaagctaaacccgaaccaactcaggatgaacgcaagcaaaaacccaaagatagtcagcatcagcctcgctctgctgctcaaggtgtgccaaagaaatcagggaaaaaacgtttaactaattctggaaaaaggtaa

SEQ ID NO: 76941 - protein, 426 aa, Nostoc sp. PCC 7120
MSFSHLGLSNEIINAVTELGYTKPTPIQMQSIPAVLSGRDLLAGAQTGTGKTASFTLPLLHLLSQDSLKSASNASSPIRALILTPTRELAAQVESSVRDYGKYLKLNSMVMFGGVSINPQKQRLKGRVDILVATPGRLLDHVQQGTVNLSQIEILVLDEADRMLDMGFIRDIRRILSLLPKQRQNLLFFATFSDKIKELAAGLLNRPQMIEVARRNVTADTVTQKVYKIERDRKRDLLAHLIRKDNWYQVLVFTRTKYGADRLVKQLGHERIQALAIHGNKSQSARTHALAKFKNGSLQVLVATDIAARGLDISELPYVVNFDLPYVPEDYVHRIGRTGRAGASGEAVSLVSADEYHLLADIEKLIEKRLPFELVAGIGANSQAKPEPTQDERKQKPKDSQHQPRSAAQGVPKKSGKKRLTNSGKR

SEQ ID NO: 76942 - DNA, 1827 bp, Ralstonia solanacearum GMI1000
  CDS (1)..(1827): transl_table=11
atgacgcagcctcaaaacggcagcggcgcgattgcgcacgctgaatccgataccgataccctgatcgccaacgccgccacccaggccagcgcttttgccgcgctcggcctggacgaacgcatcgcccgcgcgctcggcgaactgaactacacccagccgacgccggtccaggcccaagcgattcccgcctgcctgtcgggccgcgacctgctggtcacgagccagaccggctcgggcaagaccgcggcgttcatgctgccggccatccagcgcatcagcgaacagcccgagccgcagcgcccgcgcgccgacggcccgcagcagcgcgtcaaaggccgccgtccgcgcccggcgccggccaagccgtcgctgctggtgctcacgcccacgcgcgaactcgccctgcaggtgacgaccgccaccgcacaatacggccgccacctgcgccgcatcgtctgcgcgagcatcctgggcggcatgccctaccccaagcagctcgacatgctggcgcgcatgcctgacatcatcatcgccacgccgggccgcctgctcgaccacatcgactccggccgcatcgacctgtcggcgctcgacatgctggtcttcgacgaggccgaccgcatgctcgacatgggcttcgccgacgacatcgaagccatcgtcggcgccacgccggcgtcgcgccagatgctgatgttctcggccaccatggaccgccgcatcgagcagctcgccgagcgcatgatgcgcgagccgcaacgcatcgagatcgccgccgcgcgtatcgaccaaagccatatcgaagagcgcctgcacttcaccgacgacctgtcgcacaagcagcagttgctcgaccacctgctgcgcgatgcgacgctcaagcaggccatcgtctttaccgccacgaagcgcgatgccgactcgctggccgagcgcctgaccgagaccggtttctccgccggcgccctgcacggcgacatgcaccaaggtgcgcgcaatcgtacgctgacggcgctgcgccgcggccaactgcgcgtgctggtggccaccgacgtggccgcgcgcggcatcgacgtgccggacatcacccacgtggtcaactttgacctgcccaagcaggctgaagactacgtgcaccgcatcggccgcaccggccgcgccggccgcagcggcatcgccatcaacctggtgaaccacggcgatacgttccaatggcgccgcatcgagcgctttgtcgaccgccgcatcgacgcgactgtcgtcgagggcctcgaaccgaagcgctcgcccaagccgcgcagcggcggcccgcgcgccggtggcgaccgcggcggctaccgtggcaatggcggcggcaactggcgtggccagcgtgacggctacgccgcgcgcacgggtaacggcggcaatggcggcaacagcgaaggccgcttccagcgcagcttcggcggtgaccgcgaaagcttcgccccgcgccgcgatgaccgtggcgaccgcggcaccggctatcaaggcggccaacaacgcgactggggcaaccgtgacaacgcggccccgcgccagtcgtacggccagcaaacccgcaacggcgaccgcttcgacccgcgccagccgcgcagccaggaaggccgcagcgattggcagcaacgcccggcacgcggcggttacggcaatagcaacggcaatggcagcagctacggcaaccgcgatggcgccccgcgccgcttcggtgacgacaacagcaacggcgcgccccgccgcagctatggcaacagcaatggcaacagctacggcagcaagggccgctcgcgcgatttcgatcgctga

SEQ ID NO: 76943 - protein, 608 aa, Ralstonia solanacearum GMI1000
MTQPQNGSGAIAHAESDTDTLIANAATQASAFAALGLDERIARALGELNYTQPTPVQAQAIPACLSGRDLLVTSQTGSGKTAAFMLPAIQRISEQPEPQRPRADGPQQRVKGRRPRPAPAKPSLLVLTPTRELALQVTTATAQYGRHLRRIVCASILGGMPYPKQLDMLARMPDIIIATPGRLLDHIDSGRIDLSALDMLVFDEADRMLDMGFADDIEAIVGATPASRQMLMFSATMDRRIEQLAERMMREPQRIEIAAARIDQSHIEERLHFTDDLSHKQQLLDHLLRDATLKQAIVFTATKRDADSLAERLTETGFSAGALHGDMHQGARNRTLTALRRGQLRVLVATDVAARGIDVPDITHVVNFDLPKQAEDYVHRIGRTGRAGRSGIAINLVNHGDTFQWRRIERFVDRRIDATVVEGLEPKRSPKPRSGGPRAGGDRGGYRGNGGGNWRGQRDGYAARTGNGGNGGNSEGRFQRSFGGDRESFAPRRDDRGDRGTGYQGGQQRDWGNRDNAAPRQSYGQQTRNGDRFDPRQPRSQEGRSDWQQRPARGGYGNSNGNGSSYGNRDGAPRRFGDDNSNGAPRRSYGNSNGNSYGSKGRSRDFDR

SEQ ID NO: 76944 - DNA, 1437 bp, Clostridium perfringens str. 13
  CDS (1)..(1437): transl_table=11
atgaaatttaatgaattaaatttaagtgaggatattattaaagcgcttaataatttaggatataaaaatccatcagaggttcaggaagcttctattccaaaattattaaagggtgaagatataatagttaaatctcaaactggtagtggtaaaactgcaagttttggaatacctgtttgtgaaaagataaatattgaagaaaaaaaggttcagtgtctagttttaacaccaactagagagttagcaattcaagttaaagatgaactttctaatataggaagaataaaaaaggttagatgtgcggctatatttgggaaacaaccttttaatgagcaaattagagagcttaaacaaagagtacatatagtagtaggaactccaggaagagtatttgatcatatggaaagaggaactttagacttaagtgaagttaactatgtagtcatagatgaagctgataaaatgctttcaatgggatttattgatcaaataaaggacatattaggagaattaagattaaataaaaccactgcattattttctgctacattttctaaggaaatagaggaaatatgtgaagagtatatgagaaatcctatgcttttagaggttaaatcaaaagtattcaatagggatagaatagaagaaagtgcaattgaaatagaggagaaaaataaggagaaagctttatggaaatgcctttatgcttatcatccagagagtgctatagtattttgtaatacaagaaataaggttaagtctgtttataaaatgcttaaggatgagggaataacttgtaatgagcttcatggcgatatggagcaaaagaagcgtattgaggttatggaaaactttagagataagcactttaaagttttagtttgtactgatatagcggctagaggaattcacgtagatagtatagaacttgttataaactatgaggttccaatggaaacagaaagctatgttcatagaataggaagaacaggtagagcaggaagagaaggaaaggctattacctttgtaaatcattatgagaagaaatatttagagaatgttgaagaatatattggttatgaaataaaaaaagtaagtcttccttctgatgaagaagttaaagctggaagaaaaatatttaaggaaagtcaaaaggttcaattaaaagagagtaaaaaacctaagaaagaagttcatggtgatatagttaaaatacatgttaatggcggaaagaaaaagaaaataagagcctttgatattgttggatgttttagtaacttaccaggtttaacaggagaagatattggaataatagatgttcaagatggtttctcttatgttgatatattaaatggaaaaggtgataaagttttaaaaagctttaaggaagttactataaagggtaaaaaagttaaaatacaaaaagcaagaaaataa

SEQ ID NO: 76945 - protein, 478 aa, Clostridium perfringens str. 13
MKFNELNLSEDIIKALNNLGYKNPSEVQEASIPKLLKGEDIIVKSQTGSGKTASFGIPVCEKINIEEKKVQCLVLTPTRELAIQVKDELSNIGRIKKVRCAAIFGKQPFNEQIRELKQRVHIVVGTPGRVFDHMERGTLDLSEVNYVVIDEADKMLSMGFIDQIKDILGELRLNKTTALFSATFSKEIEEICEEYMRNPMLLEVKSKVFNRDRIEESAIEIEEKNKEKALWKCLYAYHPESAIVFCNTRNKVKSVYKMLKDEGITCNELHGDMEQKKRIEVMENFRDKHFKVLVCTDIAARGIHVDSIELVINYEVPMETESYVHRIGRTGRAGREGKAITFVNHYEKKYLENVEEYIGYEIKKVSLPSDEEVKAGRKIFKESQKVQLKESKKPKKEVHGDIVKIHVNGGKKKKIRAFDIVGCFSNLPGLTGEDIGIIDVQDGFSYVDILNGKGDKVLKSFKEVTIKGKKVKIQKARK

SEQ ID NO: 76946 - DNA, 1857 bp, Arabidopsis thaliana; identical to SEQ ID NO: 65282
  CDS (1)..(1857)

SEQ ID NO: 76947 - protein, 618 aa, Arabidopsis thaliana; identical to SEQ ID NO: 65283

SEQ ID NO: 76948 - DNA, 1587 bp, Fusobacterium nucleatum subsp. nucleatum ATCC 25586
  CDS (1)..(1587): transl_table=11
atggaacaattagaaaaattaaaagaatttagagaattagggcttagtgaaaagatattaaaggtattatcaaaaaaaggatatgaatctcctacacctatacaaagattaacaatacctgctcttttaaaaaatgataaagacataataggacaagcacaaactggaacaggtaagactgctgctttttctttaccaataatagagaactttgaaaatttagaacatatacaagcaatcgttttaacaccaacgagagaattagctttacaagttgccgaagaaatgaatagtttaagtacaagtaaaaagatgaaagtaattcctgtctatggtggacaatcaatagatatccaaagaaaacttatcaaaactggtgtagatgtggttgtgggtactcctggtagagttatagatttaattgaaagaaaattattaaaattaaattcactaaaatatttcattttagatgaagcagatgaaatgcttaatatgggttttgttgaagatatagaaaaaatattaacttttacaaatgaagataaaaggatgttatttttctctgcaactatgcctgatgaaattatgaaagtcgctaaaaatcatatgaaagaatatgaagttttagctgttaaaagtagagaacttacaacagatttaacagaacaaatatattttgaagtaaatgaaagagataagtttgaagcactatgtagaattatagatttaacaaaagaattttatggaattattttttgtagaacaaagactgatgtaaatgaaattgttggaagattaaatgacagaggttatgatgctgaaggtctacatggagatataggtcaaaattatagagaagttactttaaaaagatttaaaactaaaaaaataaatattcttgttgcaacagatgtggctgcaagaggtatagacatcaacgatttaagccatgttataaactatgctattccacaagaagttgaaagttatgtacatagaataggtagaacagggcgtgctggtaaagaaggaactgccataacttttattactccacaggagtatagaagacttttacaaattcaaaaagcagttaaaaaggaaattaaaaaagaaaaattacctgatgttaaagatgttattcaagctaaaaaatttagaataatagatgatattggacaaattttaatagacaatgactatgataaatttaaaaaattagccaaagacttacttaaaatggaagatgcagaaaatattgtcgcctctcttttaaaattatcatatagtgatgttttagatgaaagcaattataatgaaatttctcctgttaaaatggaagatactggtaaaacaagattattcattgctatgggaagaaaagatggtatgactcctaaaaaattagttgaatttattatcaaaaaagcaaaaataaaacaaagctatattaaaaatgcagaagtttatgaaggattctcatttgtttctgtacctttcaaagaagcagaaataatagttgaggcttttgctaaaaatagaaaaggaaagaaaccattaatagaaaaagcaaaatctaagaaatag

SEQ ID NO: 76949 - protein, 528 aa, Fusobacterium nucleatum subsp. nucleatum ATCC 25586
MEQLEKLKEFRELGLSEKILKVLSKKGYESPTPIQRLTIPALLKNDKDIIGQAQTGTGKTAAFSLPIIENFENLEHIQAIVLTPTRELALQVAEEMNSLSTSKKMKVIPVYGGQSIDIQRKLIKTGVDVVVGTPGRVIDLIERKLLKLNSLKYFILDEADEMLNMGFVEDIEKILTFTNEDKRMLFFSATMPDEIMKVAKNHMKEYEVLAVKSRELTTDLTEQIYFEVNERDKFEALCRIIDLTKEFYGIIFCRTKTDVNEIVGRLNDRGYDAEGLHGDIGQNYREVTLKRFKTKKINILVATDVAARGIDINDLSHVINYAIPQEVESYVHRIGRTGRAGKEGTAITFITPQEYRRLLQIQKAVKKEIKKEKLPDVKDVIQAKKFRIIDDIGQILIDNDYDKFKKLAKDLLKMEDAENIVASLLKLSYSDVLDESNYNEISPVKMEDTGKTRLFIAMGRKDGMTPKKLVEFIIKKAKIKQSYIKNAEVYEGFSFVSVPFKEAEIIVEAFAKNRKGKKPLIEKAKSKK

SEQ ID NO: 76950 - DNA, 1293 bp, Xanthomonas axonopodis pv. citri str. 306
  CDS (1)..(1293): transl_table=11
atgtcattttccgatctctcgctgtcgccgcagctgcagccgttcttcgataccgcgctggccaaggccggtctgcgcacacccacgcccatccagcagcaggcgatcccgccgatgctggatgggcgcgatctgattgcgatggcgcaaaccggctcgggcaagaccctggcctatgccctgccgctgctgcagcagcgctgcctggcgcccgacaccgccccgcgcgtgctcggcgcgctggtgctggtgcccacgcgcgaactcgccgcgcaggtggaggacgcgctgcgccagctggccgcgcatctgccgcgtcgcctgaagagcgtggtcgccaccggcggtagttcgatcaatccgcagctattggcgctacgcggtggcgccgacctcgtggtggccacgcccggccggttgctggatctagtcgagcacaacgcgctgcgcctgaacggggtgaccacgctggtgctggacgaagccgaccgcctgctcgagctgggcttcggtgccgaactcgatcgcatcctggccttgctgccagcgcagcggcagaccgtgctgttttcagccacctttccgcccgccatcgcgtcgctggccaagcgtcgcctgcgcgacccgttgcgcgtcaccatcgacgccacgcccgaacaggcaccggcgatcgcgcaatgcgcgattgcggtagatgccggccagcgcacgcagctgctgcgtcatctgctgcaggaacacgcctggccgcagctgctggtgttcgtcgccagccgccacagcgcagacaaggtggccgaaaaactgagcaagaccggcatcgccgccttgccgctgcacggcgaattgagccagggccgccgcgaacgcacgctgcgcgccttcaaacaagcggacgtgcaggtgctggtcgccaccgacctggccgggcgcggcatcgatatcgacgccttgccggcggtgctcaactacgatctgccccgctccactgtcgactacacccatcgtatcggccgcaccgcacgcgccggtgccagcggcgtggcgatcagcttcgtcacggcagacagcgcccagcagtggcggctgatcgaaaaacgccagggtctgcgcgtgccgaccagcgtgatcgaaggcttcgagccgaccccggtcgaggcgcccgcctccgataatgcgcccggcacagcgatgcgtgcaccgaatgacaacggcggcatcaagggcaagcggccgagcaagaaagacaaactgcgcgccgcggcgcaggcgcagactggcaagccgggctga

SEQ ID NO: 76951 - protein, 430 aa, Xanthomonas axonopodis pv. citri str. 306
MSFSDLSLSPQLQPFFDTALAKAGLRTPTPIQQQAIPPMLDGRDLIAMAQTGSGKTLAYALPLLQQRCLAPDTAPRVLGALVLVPTRELAAQVEDALRQLAAHLPRRLKSVVATGGSSINPQLLALRGGADLVVATPGRLLDLVEHNALRLNGVTTLVLDEADRLLELGFGAELDRILALLPAQRQTVLFSATFPPAIASLAKRRLRDPLRVTIDATPEQAPAIAQCAIAVDAGQRTQLLRHLLQEHAWPQLLVFVASRHSADKVAEKLSKTGIAALPLHGELSQGRRERTLRAFKQADVQVLVATDLAGRGIDIDALPAVLNYDLPRSTVDYTHRIGRTARAGASGVAISFVTADSAQQWRLIEKRQGLRVPTSVIEGFEPTPVEAPASDNAPGTAMRAPNDNGGIKGKRPSKKDKLRAAAQAQTGKPG

SEQ ID NO: 76952 - DNA, 1377 bp, Xanthomonas axonopodis pv. citri str. 306
  CDS (1)..(1377): transl_table=11
atgaacgaattctccgcgctgccgctgtcgccggccctggcccccggcatcgacgcccttggctacaccgttttgactcccatccaggcgcatagcctgccgccgatcctgcaggggctcgatgtcatcgcgcaggcgccgaccggcagcggcaagaccgccgcgttcggactgggcctgctgcaaaagctcgaccccgcgctcacccgcgcacaggcgctggtgctctgccccacccgcgaattggccgaccaggtcggcaagcagctgcgtaagctcgccaccggtatccccaacatgaagctggtggtgctcaccggcggcatgccgctcgggccgcagctggcctcgctggaagcgcacgacccgcaagtggtggtgggtacgcccgggcgcatccaggagctggcccgcaaacgcgccctgcacctgggcggcgtgcgcacgctggtgctggacgaggccgaccgcatgctcgacatgggcttcgaagaacccatccgcgagatcgccagccgttgcgacaaacatcgtcagagcctgctgttttcggccacgtttccggacagcatccgcacgctcgcacgcgagctgttgaaagagcccgtcgagatcaccgtggaaggcgccgatagcgcaccggagatcgatcagcagttcttcgaggtcgacccgacctatcggcaaaaggccgtcgccggcctgctgctgcgcttcaatcccgaatccagcgtggtgttctgcaatacccgcaaggaagtggacgaggtggcgggttcgctgcaggaattcggcttctctgcacttgccttgcatggcgacatggaacagcgcgaccgtgacgaagtgctggtgcgcttcgtcaaccgcagctgcaacgtcctggtggccagcgacgtggccgcacgcgggctggacgtggaagacctttccgccgtggtcaactacgagctgcccaccgataccgaaacctatcgccaccgcattggccgtaccgcacgcgccggcaagcacgggctggcgctgagcctggttgccccgcgcgaaaccgcccgcgcgcaggcattggaaaccgaacaaggccagccgttgaaatggtcgcgtgcaccgctggccactgcgcgtccggcgcaactgccgcaggcggcaatgaccaccttgcgcatcgacggcggcaagaccgacaagctgcgcgccggcgacatcctgggcgccctgaccggcgaagccgggctctcgggcgcggcaatcggcaagatcgccatctaccctacccgctcctacgtggccattgcccgcgcgcaggtcgccaaggcgctggcacacctgcacgcaggcaagatcaagggacgccggtttcgggtcagcaagctctga

SEQ ID NO: 76953 - protein, 458 aa, Xanthomonas axonopodis pv. citri str. 306
MNEFSALPLSPALAPGIDALGYTVLTPIQAHSLPPILQGLDVIAQAPTGSGKTAAFGLGLLQKLDPALTRAQALVLCPTRELADQVGKQLRKLATGIPNMKLVVLTGGMPLGPQLASLEAHDPQVVVGTPGRIQELARKRALHLGGVRTLVLDEADRMLDMGFEEPIREIASRCDKHRQSLLFSATFPDSIRTLARELLKEPVEITVEGADSAPEIDQQFFEVDPTYRQKAVAGLLLRFNPESSVVFCNTRKEVDEVAGSLQEFGFSALALHGDMEQRDRDEVLVRFVNRSCNVLVASDVAARGLDVEDLSAVVNYELPTDTETYRHRIGRTARAGKHGLALSLVAPRETARAQALETEQGQPLKWSRAPLATARPAQLPQAAMTTLRIDGGKTDKLRAGDILGALTGEAGLSGAAIGKIAIYPTRSYVAIARAQVAKALAHLHAGKIKGRRFRVSKL

SEQ ID NO: 76954 - DNA, 1488 bp, Oceanobacillus iheyensis HTE831
  CDS (1)..(1488): transl_table=11
atgacaaaatttaacgaactaggtgtttccgccccaataatgaaagctttagaaaaaatggggtttgaggaagctacaccaattcaagcggaaactattccacatgcactagaaggccatgatgttattggccaagcacagacaggaacaggtaaaacagcagcattcggtattccgttaatcaataaaattaatgcaaaactaagaaaggtgcaaggtttaattgttgcaccaacacgtgaacttgctattcaagttgcagaagaaataaatcgtttagcgaaattcaagagtgttagagctcttgcaatatatggtggccaaccaatggaccgacagatccgagcactgaaagatggtccacagatcgtagtggctaccccgggtagattattagatcatatgcgcagaaaaacgattcgtattgatcaagtgcatacggccgttctagatgaagctgatgaaatgctaaacatgggctttattgatgatatacgtgagattctaaaagggattccagaagaaagacaaactctacttttctctgcgacaatgccaaaagaaatccgtaatatcgctactacgcttatgaaggaaccaaaagaagttaaagttaaagcgaaagaaatgaccgtagagaatattgatcagtatttcattgaaattcctgagaagtataaatttgatacactaaacaatcatttggatattaattcaccagaacttgcgattatttttgctcgtacgaagaagcgtgtggatgaagtagctgaaggattacaagcgagaggatatcgctcagaaggaatccacggtgatttaacacaaggaaaacgtatgtctgtactgaagaaatttaagcaaggtcgtgtagatgtattagtcgctacagatgtggcagcacgtggattagatatttctggtgtaactcatgtttataactttgatataccacaagatccagaaagttatgtacatcgtattggacgtacaggacgtgctggaaaaatgggtgaagcaatttctttcattaccccgagagaaatggctcatttaaatctaattgaacaaacgacaaagagtaaaatgaagcgtatggcaccaccgacaaatcaagatgctcgtcgtggccaacagcaagtaactattgaaaagctaaagaatgcaattaatgagaaagacttaaaagtatacgaagatgcagcgaaagaattattggatgagtatgattcaattactgttgtttcagctgctatcagcatgatgacaaaagagcgtcgtgatactccagttcgtatttcttctgtcgcaccaatcagcgtgaagaaagcgaaaaaccaaaaagataataaaactaaaggacgttctaataacaaacgtttctatggtggtcgtggacaaggtggacgaaaccaaggaggacgcggtcaaggcggtcgcaaccgaaaaggaaaaggtaactaccaacgacgtaatagagataattaa

SEQ ID NO: 76955 - protein, 495 aa, Oceanobacillus iheyensis HTE831; identical to SEQ ID NO: 65311

SEQ ID NO: 76956 - DNA, 1941 bp, Shigella flexneri 2a str. 301
  CDS (1)..(1941): transl_table=11
atgatgagttatgtagactggccgccattaattttgaggcacacgtactacatggctgaattcgaaaccacttttgcagatctgggcctgaaggctcctatccttgaagcccttaacgatctgggttacgaaaaaccatctccaattcaggcagagtgtattccacatctgctgaatggccgcgacgttctgggtatggcccagacggggagcggaaaaactgcagcattctctttacctctgctgcagaatcttgatcctgagctgaaagcaccacagattctggtgctggcaccgacccgcgaactggcggtacaggttgctgaagcaatgacggatttctctaaacacatgcgcggcgtaaatgtggttgccctgtacggcggccagcgttatgacgtgcaattacgcgccctgcgtcaggggccgcagatcgttgtcggtactccgggccgtctgctggaccacctgaaacgtggcactctggacctctctaaactgagcggtctggttctggatgaagctgacgaaatgctgcgcatgggcttcatcgaagacgttgaaaccattatggcgcagatcccggaaggtcatcagaccgctctgttctctgcaaccatgccggaagcgattcgtcgcattacccgccgctttatgaaagagccgcaggaagtgcgtattcagtccagcgtgactacccgtcctgacatcagccagagctactggactgtgtggggtatgcgtaaaaacgaagcactggtacgtttcctggaagcggaagattttgatgcggcgattatcttcgttcgtaccaaaaacgcgactctggaagtggctgaagctcttgagcgtaacggctacaatagcgccgcgctgaacggtgacatgaaccaggcgctgcgtgagcagacactggaacgccttaaagacggtcgtctggacatcctgattgcgaccgacgttgcggcccgtggcctggacgttgagcgtatcagcctggtggttaactacgatatcccgatggattctgagtcttacgttcaccgtatcggtcgtaccggtcgtgcgggtcgtgctggccgcgcgctgctgttcgttgagaaccgcgagcgtcgtctgctgcgcaacattgaacgtactatgaagctgactattccggaagtagaactgccgaacgcagaactgctgggcaaacgccgtctggaaaaattcgccgctaaagtacagcagcagctggaaagcagcgatctggatcaataccgcgcactgctgagcaaaattcagccgactgcagaaggtgaagagctggatctcgaaactctggctgcggcactgctgaaaatggcacagggtgaacgtactctgattgttccgccagatgcgccgatgcgtccgaaacgtgaattccgtgaccgtgatgaccgtggtccgcgcgatcgtaacgaccgtggcccgcgtggcgaccgtgaagatcgtccgcgtcgtgaacgtcgtgatgttggcgatatgcagctgtaccgcattgaagtgggccgcgatgatggtgttgaagttcgtcatatcgttggcgcgattgctaacgaaggcgacatcagcagccgttacatcggtaacatcaagctgtttgcttctcactccaccatcgaactgccgaaaggtatgccgggtgaagtgctgcaacactttacgcgcactcgcattctcaacaagccgatgaacatgcagttactgggcgatgcacagccgcatactggcggtgagcgtcgtggcggtggtcgtggtttcggtggcgagcgtcgtgaaggcggtcgtaacttcagcggtgaacgccgtgaaggtggtcgtggtgatggtcgtcgttttagcggcgaacgtcgtgaaggccgcgcaccgcgtcgtgatgactctaccggtcgtcgtcgtttcggtggtgatgcgtaa

SEQ ID NO: 76957 - protein, 646 aa, Shigella flexneri 2a str. 301
MMSYVDWPPLILRHTYYMAEFETTFADLGLKAPILEALNDLGYEKPSPIQAECIPHLLNGRDVLGMAQTGSGKTAAFSLPLLQNLDPELKAPQILVLAPTRELAVQVAEAMTDFSKHMRGVNVVALYGGQRYDVQLRALRQGPQIVVGTPGRLLDHLKRGTLDLSKLSGLVLDEADEMLRMGFIEDVETIMAQIPEGHQTALFSATMPEAIRRITRRFMKEPQEVRIQSSVTTRPDISQSYWTVWGMRKNEALVRFLEAEDFDAAIIFVRTKNATLEVAEALERNGYNSAALNGDMNQALREQTLERLKDGRLDILIATDVAARGLDVERISLVVNYDIPMDSESYVHRIGRTGRAGRAGRALLFVENRERRLLRNIERTMKLTIPEVELPNAELLGKRRLEKFAAKVQQQLESSDLDQYRALLSKIQPTAEGEELDLETLAAALLKMAQGERTLIVPPDAPMRPKREFRDRDDRGPRDRNDRGPRGDREDRPRRERRDVGDMQLYRIEVGRDDGVEVRHIVGAIANEGDISSRYIGNIKLFASHSTIELPKGMPGEVLQHFTRTRILNKPMNMQLLGDAQPHTGGERRGGGRGFGGERREGGRNFSGERREGGRGDGRRFSGERREGRAPRRDDSTGRRRFGGDA

SEQ ID NO: 76958 - DNA, 1302 bp, Shewanella oneidensis MR-1
  CDS (1)..(1302): transl_table=11
atgagatttgaatcttttagtttttgccccgagattttacgcgctatctcagattgcggttatcaaaaaatgacaccgattcagcagcaagcgatccccgccatccgccgcggccaagatgtgctcgccagcgcgcaaactggcacgggtaaaaccgccgccttcgcactgccgatactgcaaaaaatggttgaaaacccaagcgagaccttaaaatctaatacccgggtactcatcctcaccccaacacgcgaactggccgcccaagtagcggaaaacgttgaagcctacagcaagtatttaaatttcagcgtattaacgatttacggcggcgtaaaggttgagactcaagcccaaaagttaaaacgcggcgccgatattattgtcgcgaccccaggccgtttactcgaacacctcaccgcctgtaacttaagtctgtctagcgttgactttttagtcctcgatgaagccgatcgcatgctggatatgggctttagtgccgacatccaaaaaatcctccaagcggtcaataagaagcgtcaaaacctactgttttcggccaccttctccagcgcagtgaaaaaactggccaatgagatgatgatcaaaccccaagtgatcagcgccgataaacaaaacaccaccgccgatactgtaagccaagtggtttatccggtagagcagcgtcgtaaacgcgagctgttatctgagttgattggtaaaaagaactggcaacaagtgttggtctttaccgcgacccgcgatgcggcggatactctggttaaagaattaaacttagacggtattccctctgaagtggtacacggtgaaaaggcccaaggtagccgtcgccgtgcgctgcgtgagtttgtgtccggtaaagtgcgcgtattagtcgcgaccgaagtggccgcccgcggtttagacattcccagtcttgagtatgtggtgaacttcgacttacccttccttgccgaagattatgttcaccgtatcggccgtacaggtcgagcaggtaaaagtggcgtggcaatctcatttgtaagccgtgaagaagaacgcacccttgcggatattgaaaaactcatcggccaaaaaattcgccgcattaccgtacctggatatgaggtcggtagccgtgacttgctgttaaagcagctacaaacccgccgcagtttcgctaagaaacaacagcgacaggacaatgttagcgagcaaatgattgccgagaaaagcatgcagggccgccgcgttaaaatgaaagttggccaagcaccaagcaaagcgaaaaagctaaaataa

SEQ ID NO: 76959 - protein, 433 aa, Shewanella oneidensis MR-1
MRFESFSFCPEILRAISDCGYQKMTPIQQQAIPAIRRGQDVLASAQTGTGKTAAFALPILQKMVENPSETLKSNTRVLILTPTRELAAQVAENVEAYSKYLNFSVLTIYGGVKVETQAQKLKRGADIIVATPGRLLEHLTACNLSLSSVDFLVLDEADRMLDMGFSADIQKILQAVNKKRQNLLFSATFSSAVKKLANEMMIKPQVISADKQNTTADTVSQVVYPVEQRRKRELLSELIGKKNWQQVLVFTATRDAADTLVKELNLDGIPSEVVHGEKAQGSRRRALREFVSGKVRVLVATEVAARGLDIPSLEYVVNFDLPFLAEDYVHRIGRTGRAGKSGVAISFVSREEERTLADIEKLIGQKIRRITVPGYEVGSRDLLLKQLQTRRSFAKKQQRQDNVSEQMIAEKSMQGRRVKMKVGQAPSKAKKLK

SEQ ID NO: 76960 - DNA, 1284 bp, Shewanella oneidensis MR-1
  CDS (1)..(1284): transl_table=11
atgacccaagcttcttcctccgtcgccagctttgccgaacttggcattattgcaccgctaggtaatcgactaaccgagctcggttatgtttcacccacccctgtacaagcggccacgattccagccgtgctgagtgggcgggacgtattagcgggggcaaataccggctcaggaaaaaccgccgcttttgcactgcccttattgcagcgtttgagtgaagcaaaaagtgctgataagtcggccggtgttgtacgttgtttggtgctcgtgcctacgcgcgaattggcacagcaagttgccgatagctttttatcctatgcatcccacttcaatggccaacttaagattgtcgccgcttttggtggtgtgtctgtcaatctgcaaatgcaaagcctacgcgctggcgcggatgttctggttgcaacgcctgggcgtttactggatttattagcaagcaacgcgcttaagttaactcaagtgtctgcattcgtcctcgatgaagcggatcgcatgttaagccttggctttaccgaagagttagaacaagtgcttgcagcgttaccgcgtcaaaagcaaaccctattgttttcggcgaccttccccgaagaagtgcgtgcactgacaaccaaattactccatcaaccgcttgaatatcatctgcaaagtgagcaagaaagtaccattgagcagcgtgtgataaccgtgaaccgtgaacaaaaaacggcgttgttggcccacttgattaaacagcatcaatggtcacaggcattgatttttgtcagtgctaaaaatacctgtaatcatcttgcacaaaagctctcaaaacgtgggattagcgctgaagtattccatggcgataaagcccaaggtgcacgaactcgcgtgctcgatggttttaaaaatggtgaaattagtgtgctgattgcgaccgatatcgcagctcgtggtattgatattgataaactccccgtcgtgattaactttgatttgccaagaagcccggcagattatatgcaccgtattggtcgtagtggccgtgcgggggaggcgggtcttgcggtgaccttaatttcccatgaggaatatcatcactttggcgtgattgaaaagaaaaacaaaatcaaacttgtacgtgaacaaatccccggatttgaagccaatgccgaaataccgcttgaagtgttagcgcaggaaaaacctcaggccaagcctgaaggcactggcaagaaaaaacgtaagcagttacccgcagcgaatgttgaattttggggtaaaaagtcttaa

SEQ ID NO: 76961 - protein, 427 aa, Shewanella oneidensis MR-1
MTQASSSVASFAELGIIAPLGNRLTELGYVSPTPVQAATIPAVLSGRDVLAGANTGSGKTAAFALPLLQRLSEAKSADKSAGVVRCLVLVPTRELAQQVADSFLSYASHFNGQLKIVAAFGGVSVNLQMQSLRAGADVLVATPGRLLDLLASNALKLTQVSAFVLDEADRMLSLGFTEELEQVLAALPRQKQTLLFSATFPEEVRALTTKLLHQPLEYHLQSEQESTIEQRVITVNREQKTALLAHLIKQHQWSQALIFVSAKNTCNHLAQKLSKRGISAEVFHGDKAQGARTRVLDGFKNGEISVLIATDIAARGIDIDKLPVVINFDLPRSPADYMHRIGRSGRAGEAGLAVTLISHEEYHHFGVIEKKNKIKLVREQIPGFEANAEIPLEVLAQEKPQAKPEGTGKKKRKQLPAANVEFWGKKS

SEQ ID NO: 76962 - DNA, 1230 bp, Shewanella oneidensis MR-1
  CDS (1)..(1230): transl_table=11
atgtcttttagcgcgctttctttaaatacccaattagtggacaccttagctgaacttggctatcagcagccaacgcctattcaagtcgaggctattcccgcgatcttaacaaaacaagatgtcatggcgggggctcaaacaggaacggggaaaaccgcagcctttgccttaccgattctgcagttgttaatggctgataaccaaagcgatcacgcggcgaaagcaatccgcgccttagttttagtgccgacgagggagttggcactacaagttcagcaaagctttgtaaaatatgcgaaaggaacagatattcgtgtagggattgcctatggcggagtcagtattgaagcgcagcaagcggtgtttaacgcagggattgatgtcttgattgcaacccctggccgcttgcttgatcatttgcgtcaaggtgcacttaatcttaaccaattgaacacactggtatttgatgaagccgaccgtatgcttgatatgggatttatggatgaaatccaagccgtgctaaaacaagtgccagcccagagacaaaccctgctgttttccgccaccttggatgattcgatttttagttttagtaaaaatctcctgcgtgaccccaaacggattgaagtggctaaacctaatacgaccgcagcccagatagagcagcgggtctatgccattgatagcgatcgtaaaactgaatttgtcagtcatttagtccgcagcaaaaactggcagcaagtgttgatatttagccgcactaaacaaggggtcgataagttaacagcccaacttaataagctaggggtggcgacgcagtccttccacggcgatttatcccaaggtgcacgagaaaaagtattacaggaatttaaacaaggacttgtgcaagtcttagttgccaccgatgtggctgccagagggctcgatattgccgagctacagtatgtgattaatttcgaattgccgtttattgctgaagattatattcaccgtatcggtcgaactggccgggccggtagcgctggtttggcaattacgctttttagccaagaagatgcgctactgctagaagaggtcgagacactgctcgataaacgtctgccacaacaatggtatcccggctttgaacctgattttaacaaaatgctccccgagccgagacgcaatagcaaagccgctcaaaaacaacgggctaaaaaacgcgccttaggtggtaaaaagcgctaa

SEQ ID NO: 76963 - protein, 409 aa, Shewanella oneidensis MR-1
MSFSALSLNTQLVDTLAELGYQQPTPIQVEAIPAILTKQDVMAGAQTGTGKTAAFALPILQLLMADNQSDHAAKAIRALVLVPTRELALQVQQSFVKYAKGTDIRVGIAYGGVSIEAQQAVFNAGIDVLIATPGRLLDHLRQGALNLNQLNTLVFDEADRMLDMGFMDEIQAVLKQVPAQRQTLLFSATLDDSIFSFSKNLLRDPKRIEVAKPNTTAAQIEQRVYAIDSDRKTEFVSHLVRSKNWQQVLIFSRTKQGVDKLTAQLNKLGVATQSFHGDLSQGAREKVLQEFKQGLVQVLVATDVAARGLDIAELQYVINFELPFIAEDYIHRIGRTGRAGSAGLAITLFSQEDALLLEEVETLLDKRLPQQWYPGFEPDFNKMLPEPRRNSKAAQKQRAKKRALGGKKR

SEQ ID NO: 76964 - DNA, 1332 bp, Pseudomonas putida KT2440; identical to SEQ ID NO: 65330
  CDS (1)..(1332): transl_table=11

SEQ ID NO: 76965 - protein, 443 aa, Pseudomonas putida KT2440; identical to SEQ ID NO: 65331

SEQ ID NO: 76966 - DNA, 1386 bp, Pseudomonas putida KT2440
  CDS (1)..(1386): transl_table=11
atgaccaccgaatccaccgcctttgccaccttgccgctgtccactgccatgctggccaacctggaggcccttggctatgcctcgatgacgccgatccaggcccagagcctgcctgtcatcctcaaaggccaggacctgatcgcccaggccaagaccggtagcggcaagactgccgccttcggcatcggcctgctcaacccgatcaacccgcgctacttcggctgccaggcgttggtgctctgccctacccgcgaactcgccgaccaggtggccaaggagctgcgccgcctggcccgtgccgaggacaacatcaagatcctgaccctgtgcggcggcgtttcgctgggcccacagatcgcttcgctggagcacggcgcgcacatcatcgtcggcaccccagggcgcatccagcagcacctggacaaaggcaccctggtcctggacgggttgaacaccctggtgctggacgaagccgaccgcatgctcgacatgggcttcttcgacgccatcgccagcatcatcggcaagaccccgtcgcgccgccagaccctgctgttctcggccacctacccggccggcatcaagcaactggccgccgacttcatgcgcaaccctcagcaggtcaaggtcgaaagcctgcacaccgacaaccagatcgagcagcgtttcatcgagattgacccgcagcaacgcctggaagccgtcacccgcgtgctcggccattaccgcccgcagtcgtgcgtagcgttctgcttcaccaagcagcaatgcgaggacgtggttgcccacctgaccgccaagggcatcgtcgcccaggccctgcacggcgacctggagcagcgcgaccgtgaccaggtgctgaccatgttcgccaaccgcagcagctcggtgctggtggctaccgacgtggccgcgcgcggcctggacatcgatggcctggacatggtcatcaacgtggagctggcgcgtgatgccgaaatccacgtgcaccgcgtgggccgtaccggccgcgccggcgagaaaggcgttgcggtcagcctggtggcaccggccgaaggccaccgcgcccaggccatcgaagcgctgcagaatagcccgctgcgctgggaccagctggacagcctgaaaaacaagggcggcgagcccctgctgccggtgatgaccacactgtgcattgccgctggccgcaaggacaagctgcgccctggcgacatcctgggggccttgaccggtgatgccggcatcccgggcaagcaagtgggcaagatcgccatcttcgacttccaggcgtttgtggccgtggagcgggcgctggccaagcaggccatgcagcggctgaacagcggcaagatcaagggtcgcgccctgaaagtccgcattatctaa

SEQ ID NO: 76967 - protein, 461 aa, Pseudomonas putida KT2440; identical to SEQ ID NO: 65333

SEQ ID NO: 76968 - DNA, 1374 bp, Escherichia coli CFT073
  CDS (1)..(1374): transl_table=11
atgaccgctttttctaccctgaatgttttgcctcccgcccaactcacaaaccttaatgagttgggttatttaaccatgacgccggtgcaggccgccgcgcttccggcgatccttgccggaaaagatgttcgcgtgcaggcgaaaaccggcagcggcaaaacggcggcttttggcctcggcttgttacagcaaattgatgcgtcgctatttcaaacccaggctttagtgctgtgtcctacgcgtgaactggcggatcaggtggcaggtgaattgcgtcggctggcgcgttttctgtcaaataccaaaattttgacgttgtgcggtggtcaaccgttcggtatgcagcgtgattcgttacaacatgcgccgcatattatcgtggcaacgccgggccgtttgctggatcacctgcaaaaaggcactgtatcactggatgcgttgaatacgctggtgatggatgaggccgaccgcatgctggatatgggatttagtgacgccattgatgatgtcatccgttttgcgccagcatctcggcagacacttctgttttcggcaacctggccggaagccattgccgcaatcagcggaagagtgcaacgcgatcctttagcgattgaaattgactcaacagatgctctgccacctattgaacaacaattttatgagacatccagcaaaggcaaaattcctctgttgcaacggttattaagcttgcatcagccatcctcttgcgtggtgttttgcaataccaaaaaagattgccagtctgtctgcgacgcgctgaatgaagtagggcaaagtgcattgtcgttacacggcgatctggagcaacgcgatcgcgatcagaccctggtacgttttgctaacggtagcgcccgtgtactggtcgcgactgatgttgctgcgcgtggtctggatataaaatcgcttgagctggtggtgaactttgagctggcgtgggaccctgaagttcatgtacatcgcatcggtcgtacagctcgtgcaggaaatagcggtctggcgatcagtttctgtgccccggaagaagcacagcgggccaatatcatttctgacatgttgcagataaaacttaactggcaaacgctgccagcgaatagttccattgtgccgctggaagcagaaatggcaacgttgtgtatcgatggcgggaaaaaagccaaaatgcgcccgggtgatgtattaggtgcgctgacaggagacatcgggcttgatggcgcagatattggcaaaatcgccgtgcatccggcgcatgtttatgtcgcggtgcgtcaggctgttgctcataaaccatggaaacagttacagggcgggaagattaaaggaaaaacgtgccgggtgcggttattaaaataa

SEQ ID NO: 76969 - protein, 457 aa, Escherichia coli CFT073
MTAFSTLNVLPPAQLTNLNELGYLTMTPVQAAALPAILAGKDVRVQAKTGSGKTAAFGLGLLQQIDASLFQTQALVLCPTRELADQVAGELRRLARFLSNTKILTLCGGQPFGMQRDSLQHAPHIIVATPGRLLDHLQKGTVSLDALNTLVMDEADRMLDMGFSDAIDDVIRFAPASRQTLLFSATWPEAIAAISGRVQRDPLAIEIDSTDALPPIEQQFYETSSKGKIPLLQRLLSLHQPSSCVVFCNTKKDCQSVCDALNEVGQSALSLHGDLEQRDRDQTLVRFANGSARVLVATDVAARGLDIKSLELVVNFELAWDPEVHVHRIGRTARAGNSGLAISFCAPEEAQRANIISDMLQIKLNWQTLPANSSIVPLEAEMATLCIDGGKKAKMRPGDVLGALTGDIGLDGADIGKIAVHPAHVYVAVRQAVAHKPWKQLQGGKIKGKTCRVRLLK

SEQ ID NO: 76970 - DNA, 1305 bp, Vibrio vulnificus CMCP6
  CDS (1)..(1305): transl_table=11
atgacgccaattcaagctcagagcctaccattggtgctcgatggaaaggatgtaattggtcaaggaaaaacagggtcagggaaaaccgccaccttcgctttgggtctgctgagcaacctgaatgtctcgcgctttcgcgttcaatcgcttgttctttgccctacacgtgaattggcggatcaagtcgcaacggaaattcgtactttggctcgtggcattcacaacattaaagtgctgactttgtgtggtggcatgcctatggggccacaaattctttcgttggaacatggtgcacacatcttagttggcacaccggggcgcattctcgatcacttaagcaaaggccgtattgatcttgcagaactgaatacgttagtgcttgatgaagccgacagaatgttggaaatgggcttccaagatgcgattgatgccatcattgacgtcgcaccgactcaacgccagacgttacttttcagtgcgaccttcccagagcagattgaaaccatcgcaagcaaagtgatgcagaatccggaaatggtgaaagtcgagtctacacaccaaaagagcaccatcgaacaacgcttttatcagctcgagaacacagaagaacgtgacaacgctttggaagctctgctgcttacgcacagacctgaatctaccgtggtcttttgtaataccaagaaagaagtgcaaaacgtcaccgacgagctgaaccatcgtcgcttcagcgttatcgaactgcacggtgacatggaacagcgtgaacgtgaacgcgcgttaaccatgtttgccaacaaaagcatttctattttggtcgcaaccgatgttgccgctcgtggtttagacgtggacaacctagacgccgtgattaactttgagctttctcgtgaccctgaagtgcatgttcaccgcattggtcgtactggccgcgcgggtgcgaaagggattgcgatcagcttcttcagtgagaaagagctgtatcgagtagagcgtattgaagaatacatgggtattgatgtgcatccggccaaactgcctcaaccggaaaaccctaaaccttactacccttcaatgcgtacgattcaaattttgggtggcaaaaagcaaaaagtccgtgctggcgatatcttaggcagcctaaccaaagaagccggaattgatggtaagttgattggtaaaatcaatatcttacctatggtctcttatgttgctatcgataactctgtggccaaaatcgccgaacagcaactgcaaaacggcaaaatgaaagggcgtaactttaaagcccgaattatgaaaggttaa

SEQ ID NO: 76971 - protein, 434 aa, Vibrio vulnificus CMCP6
MTPIQAQSLPLVLDGKDVIGQGKTGSGKTATFALGLLSNLNVSRFRVQSLVLCPTRELADQVATEIRTLARGIHNIKVLTLCGGMPMGPQILSLEHGAHILVGTPGRILDHLSKGRIDLAELNTLVLDEADRMLEMGFQDAIDAIIDVAPTQRQTLLFSATFPEQIETIASKVMQNPEMVKVESTHQKSTIEQRFYQLENTEERDNALEALLLTHRPESTVVFCNTKKEVQNVTDELNHRRFSVIELHGDMEQRERERALTMFANKSISILVATDVAARGLDVDNLDAVINFELSRDPEVHVHRIGRTGRAGAKGIAISFFSEKELYRVERIEEYMGIDVHPAKLPQPENPKPYYPSMRTIQILGGKKQKVRAGDILGSLTKEAGIDGKLIGKINILPMVSYVAIDNSVAKIAEQQLQNGKMKGRNFKARIMKG

SEQ ID NO: 76972 - DNA, 1848 bp, Xylella fastidiosa Temecula1
  CDS (1)..(1848): transl_table=11
atgctctccggagttctcatgtcaaatccatcttctacaccgctgctgtttgcagatctcggcctctccgatgctgtgatgcaagccgtcacaaaaatcggctacgaaactccgtcgcccatccaggcggcgaccatcccagccttgcttgctgggcgcgatgtgctgggccaagcccagaccggcactgggaagactgccgcattcgcgctaccgttgctcacacgcaccgttctgaaccaggtcaagccgcaagtgctcgtactggcacccacccgcgaactggctatccaagttgccgaagcattccagcgctatgctgcctcgatctctggcttccgtgtcctacccgtgtacggcggccaatcctatggccaacaactggccgcactgaaacgcggtgtccatgtgatcgtcggtaccccgggccgggtgattgatcacctagagcgcggcaccctggatctatcggaattaaaaacgctggtcctcgacgaagccgacgaaatgctgcgtatgggtttcattgaggacgttgaagaagtcctacggaagttgcccgcttcacgccaggtcgctctgttctcggcaaccatgccaccacagatccgccgtatcgcacaaacctatctacaagatccgattgaagtcaccatcgccaccaaaaccacgaccgcagccaacatccgccaacgttactggtgggtcagcggcctccacaagctagatgcactcacacgcattcttgaggtggaaaccttcgacgcaatgattatcttcgtgcgcaccaaagctgccaccgaagaattggccgagaaattgcaggcacgtggcctgaccgccgcagcgatcaatggcgatatgcaacaagcgcaacgcgaacgcaccattcaccaactcaaagatggcaagctggatatcctcgttgccaccgacgtcgccgcacgtggtttggacgtagaacgtatcagccacgtgctgaactacgacatcccttacgacgttgagagctacgtccaccgtatcggacgcactgggcgtgccggtcgcagcggcgaagcaatcctctttgtgactccgcgcgaaaaaggcatgctgcgccagattgaacgtgccactcaccaaccgatcgaagccatgcaactgcccagtgtggatgcagtcaacgacacgcgcgtgaccaaatttttcggacgcatcagcaatgctctggtggtcggcgctgaaatcgacttctaccgcaaactgctacaacgtttcgagagcgagcacaatgtccctgccattgagatcgctgctgccctggcacgactccttcagggggatagccccttcctgctgagtgtcccgacgcgcccccaacgcgagcgcagcgagctggcatccgagcatcatgtcaaacgcccctcatccttcaagcagacagagcgtccaaacaacactgaacaccccaagcgcccccaacggaacgcacctgcccgcaatgtcccagagttcggtatggagtcttaccgcatcgaagtcggccgcatgcacggtgtgaagccagccaatatcgtcggcgctatcgccaacgaagctggattagagagccgctacattggccggattgacatccgtgacgatcactcggttctggatctccccgcagaaatgccacacgagatcctgcaacacctaaaaaaggtctgggtatcaggacagcaactacaaatgcgtcggatcgacacaaccgaaacaaccgcacctgcacgggaatttaagtcaaaaccgggtggcgctggcaaattcccgccgaaaccgcatcacaacaaatcaaccaaaccaaaaccaccatacagcggttga

SEQ ID NO: 76973 - protein, 615 aa, Xylella fastidiosa Temecula1
MLSGVLMSNPSSTPLLFADLGLSDAVMQAVTKIGYETPSPIQAATIPALLAGRDVLGQAQTGTGKTAAFALPLLTRTVLNQVKPQVLVLAPTRELAIQVAEAFQRYAASISGFRVLPVYGGQSYGQQLAALKRGVHVIVGTPGRVIDHLERGTLDLSELKTLVLDEADEMLRMGFIEDVEEVLRKLPASRQVALFSATMPPQIRRIAQTYLQDPIEVTIATKTTTAANIRQRYWWVSGLHKLDALTRILEVETFDAMIIFVRTKAATEELAEKLQARGLTAAAINGDMQQAQRERTIHQLKDGKLDILVATDVAARGLDVERISHVLNYDIPYDVESYVHRIGRTGRAGRSGEAILFVTPREKGMLRQIERATHQPIEAMQLPSVDAVNDTRVTKFFGRISNALVVGAEIDFYRKLLQRFESEHNVPAIEIAAALARLLQGDSPFLLSVPTRPQRERSELASEHHVKRPSSFKQTERPNNTEHPKRPQRNAPARNVPEFGMESYRIEVGRMHGVKPANIVGAIANEAGLESRYIGRIDIRDDHSVLDLPAEMPHEILQHLKKVWVSGQQLQMRRIDTTETTAPAREFKSKPGGAGKFPPKPHHNKSTKPKPPYSG

SEQ ID NO: 76974 - DNA, 1446 bp, Clostridium tetani E88
  CDS (1)..(1446): transl_table=11
atggaaaagttaagttttaaaagttttggaataagtgaagatatactagaggcactattaaaattagggtataaaaatccttcaaaggtacaacaaaaagttattccagtagctattaagaataaagatataatagtaaaatcaaaaactggaagtggtaaaacagcgtcatttggaattccaatatgtgaaaatgttaatttagaagagagaaagcctcaggcactagtgcttacacctacaagggaactttgtattcaagtaaaagaagatataaaaaatattggaaggtttaaaagaataaaatgttctgcaatctttggaaagcaaccctttaaaactcaagctctggagctaaaacaaagaactcacgtggtagttggaacaccgggtagaacattggatcacatagaaagaggaacaatagaccttgacaaaattaaatatttcattgtagatgaaggggatgaaatgtttaatatggggtttatagatcaagttgaaagtattatgagaaagttacctaaaaaaagagttaatatgcttttctctgctacaataccagaaaagatcgaaaaactatgtgaaaaatatatgaaatctcctattatgatagaagttaatccagaagaatttacagaggaaaaaatacagcatatatattatgaaattgaagataaaaataagtttgatcttctaaacaaaatattaattactgaaaatcctgatagctcaattatattttgtagaactcaagaaaatgtaaataagcttgcaaagctaatggaaaataaagattatccatgtaaggctcttcatggtggaatgatgcaagataaaagaatagatattatgaatagatttaaaagaggagaatttatgtttttagtagcaacggatcttgcagcgagaggcatagatgtagaaaatgtaacgcatataataaactatgatatccctatggaaaaggaaaattatgttcatagaactggcagaacaggaagagctggaagggaaggttgtgcaataagtttagttacaccttatgaagataggttctttaagcaaattgaagagtacataggctttaaaataaaattaggagatgaaattacaaaagaaagtgtagaaaatggagaaaaagcatttattgaaaaaattaaagctatgccaaaaattaaaaagcaaaaggctgataaattagataaggacataacaaaaatataccttagtgcaggtaaaaagaaaaaaataagaccaggagatatagttggaggaattacaaatatttctggtgttactccagaagatataggtataatagatatacaagatgtttgttcctatgtagatatattaaatgggaaaggaaaacttgtattagaaggattaaaatctacaactataaagggaaaaaagcttagagcagaaaaggcaactaagtaa

SEQ ID NO: 76975 - protein, 481 aa, Clostridium tetani E88
MEKLSFKSFGISEDILEALLKLGYKNPSKVQQKVIPVAIKNKDIIVKSKTGSGKTASFGIPICENVNLEERKPQALVLTPTRELCIQVKEDIKNIGRFKRIKCSAIFGKQPFKTQALELKQRTHVVVGTPGRTLDHIERGTIDLDKIKYFIVDEGDEMFNMGFIDQVESIMRKLPKKRVNMLFSATIPEKIEKLCEKYMKSPIMIEVNPEEFTEEKIQHIYYEIEDKNKFDLLNKILITENPDSSIIFCRTQENVNKLAKLMENKDYPCKALHGGMMQDKRIDIMNRFKRGEFMFLVATDLAARGIDVENVTHIINYDIPMEKENYVHRTGRTGRAGREGCAISLVTPYEDRFFKQIEEYIGFKIKLGDEITKESVENGEKAFIEKIKAMPKIKKQKADKLDKDITKIYLSAGKKKKIRPGDIVGGITNISGVTPEDIGIIDIQDVCSYVDILNGKGKLVLEGLKSTTIKGKKLRAEKATK

SEQ ID NO: 76976 - DNA, 1689 bp, Pseudomonas syringae pv. tomato str. DC3000; identical to SEQ ID NO: 65336
  CDS (1)..(1689): transl_table=11

SEQ ID NO: 76977 - protein, 562 aa, Pseudomonas syringae pv. tomato str. DC3000; identical to SEQ ID NO: 65337

SEQ ID NO: 76978 - DNA, 1380 bp, Pseudomonas syringae pv. tomato str. DC3000
  CDS (1)..(1380): transl_table=11
atgactaacaccgctttcaattctctgcctctgtctgctgccatgctggctaacctggagtcgcttggttatgccgaaatgacgccgattcaggcgcagagcctgccggtgatcctcaagggcatggacctgatcgcgcaagccaagaccggtagcggcaagaccgctgcgttcggcatcggcctgctcaacccgatcaacccgcgcttcttcggctgccaggcactggtcatgtgcccgacccgcgagctggcggatcaggtggccaaggaaatccgtcgtctggcccgctcggaagacaacatcaaagtgctgaccctttgcggcggtgtgtcttttggcccgcagatcggctcgctggagcacggcgcgcacatcatcgttggcacgccaggccgcattcagcagcatttgcgcaaaggctcgctggtgcttgacggcctgaacacgctgattctcgatgaagccgatcgcatgctggacatgggtttctacgattccatcgccgatatcatcgagcagaccccgcagcgccgccaaaccctgctgttttcggccacttacccggtcggtatcaagcaactgtcgtcgaagttcatgcgcgatccacagactgtcaaagtcgaagcgctgcacgccgacagccagatcgagcagattttctacgagatctcccccgagcagcgcctggaagccgtggtcaaggtactcggccatttccgtccaacgtcctgcgtcgcgttctgtttcaccaagcagcaggttcaggaagtggtcgaccacctgaccgccaaaggcatgtctgcggtcggcctgcatggcgatctggaacagcgtgaccgtgatcaggtgctggcgatgttcgccaaccgcagtacttcggtactggtcgccaccgacgtagccgcgcgcggtctggacatcgatgcactggatatggtgctcaacgtcgaactggcccgcgattcggaaatccacattcaccgtgtaggccgtaccggtcgcgcaggcgagacaggcatcgcggtaagcctcgtggcaccgtcggaaagccagcgcgcccgcgccatcgaagaattgcagaaagccccgttgaactggcagcagtacgacagcctgagcatcaaggaaggcggcaagctgctgcccgccatgaccacgctgtgcatcggttccgggcgcaaggacaaactgcgtccgggcgacatcctcggcgcactgaccggcgaagcgggtattgcgggcacccaggtcggcaagatcgcaatcttcgactttcaggcctacgtcgccgtcgaacgcagcatggccaaacaggcgctggagcgactgaacaacggcaagatcaaaggcaaatcgctgcgcgtacgaatcctctga

SEQ ID NO: 76979 - protein, 459 aa, Pseudomonas syringae pv. tomato str. DC3000
MTNTAFNSLPLSAAMLANLESLGYAEMTPIQAQSLPVILKGMDLIAQAKTGSGKTAAFGIGLLNPINPRFFGCQALVMCPTRELADQVAKEIRRLARSEDNIKVLTLCGGVSFGPQIGSLEHGAHIIVGTPGRIQQHLRKGSLVLDGLNTLILDEADRMLDMGFYDSIADIIEQTPQRRQTLLFSATYPVGIKQLSSKFMRDPQTVKVEALHADSQIEQIFYEISPEQRLEAVVKVLGHFRPTSCVAFCFTKQQVQEVVDHLTAKGMSAVGLHGDLEQRDRDQVLAMFANRSTSVLVATDVAARGLDIDALDMVLNVELARDSEIHIHRVGRTGRAGETGIAVSLVAPSESQRARAIEELQKAPLNWQQYDSLSIKEGGKLLPAMTTLCIGSGRKDKLRPGDILGALTGEAGIAGTQVGKIAIFDFQAYVAVERSMAKQALERLNNGKIKGKSLRVRIL

SEQ ID NO: 76980 - DNA, 1380 bp, Vibrio parahaemolyticus RIMD 2210633
  CDS (1)..(1380): transl_table=11
atgagcaaacaaacttttgaccaagtaggcctgaacccagcgctactagaaacgctggattcattgaactacacccatatgacgccaattcaagcgttaagcttaccggcgattttgaatcagcgtgacgtaattggtcagggtaaaacgggctcgggtaaaacagcggcgtttggtcttggcgtgctatcaaatctaaacgtaaaacgatttcgcgtgcaggctttggtgctgtgtccgactcgcgaactggcggatcaagttgctaaagaaattcgaacgctagggcgtggtatccataacattaaagtacttacgttgtgcggcggtatgccgatgggaccgcaaattggttcgttagagcatggtgcacatatccttgttggtactccggggcgtattctggatcaccttgagaaaggccgtattaacttggaagagctgaatacactggtgctggatgaagccgatcgtatgctagaaatgggcttccaagacgctttggatgcgattattaatgcggcgcctaaacagcgtcagacattgctgtttagcgcaacattcccagagaagatcgagaaaatcgctcagcgtattatgaaatcgccagagatgatcaaggttgaatcgactcacgatacttccagcattgctcaatacttctacaaagtagaaggaactgaagcgcgtgatgaggcgctagccaatcttcttttgacttaccaaccagagtcggcggtggtgttctgtaatacgaagaaagaagtgcaaaatgtcgcggatgaattacaccatcgcggctttagcgtgatcgatattcacggtgatcttgaacagcgtgaacgtgatcaagcactggtgcaatttgcgaacaagagcgtttctattcttgtggcaacggacgtggcggcacgaggtttggatgtggacaatcttgatgctgtgttcaactttgagctgtctcgtgacccagaggtacacgtgcaccgtattggccgtactggccgagcaggcagtaaaggtttggcgttcagcttttttggcgaaaaagacggtctacgtgttgctcgtatcgaagagtacttagagatggatgtggtacccgcgaccttgccagcgaaatcaaatcagcagccataccaagcgaagatggtgaccatcaacattgatggcggcaagaagcaaaaagttcgtcctggcgatattcttggttgtttgactggcaaaaatggcatcccaggtgcgcaagtgggcaagattcatttgttccctgtacgttcttacgttgctgtagaaaagtctgccgcgaagaaagcattgcaaattatcagtacgggtaagatgaaagggcgtcagttccgagcgcgtcttcttaaataa

SEQ ID NO: 76981 - protein, 459 aa, Vibrio parahaemolyticus RIMD 2210633
MSKQTFDQVGLNPALLETLDSLNYTHMTPIQALSLPAILNQRDVIGQGKTGSGKTAAFGLGVLSNLNVKRFRVQALVLCPTRELADQVAKEIRTLGRGIHNIKVLTLCGGMPMGPQIGSLEHGAHILVGTPGRILDHLEKGRINLEELNTLVLDEADRMLEMGFQDALDAIINAAPKQRQTLLFSATFPEKIEKIAQRIMKSPEMIKVESTHDTSSIAQYFYKVEGTEARDEALANLLLTYQPESAVVFCNTKKEVQNVADELHHRGFSVIDIHGDLEQRERDQALVQFANKSVSILVATDVAARGLDVDNLDAVFNFELSRDPEVHVHRIGRTGRAGSKGLAFSFFGEKDGLRVARIEEYLEMDVVPATLPAKSNQQPYQAKMVTINIDGGKKQKVRPGDILGCLTGKNGIPGAQVGKIHLFPVRSYVAVEKSAAKKALQIISTGKMKGRQFRARLLK

SEQ ID NO: 76982 - DNA, 1266 bp, Vibrio parahaemolyticus RIMD 2210633
  CDS (1)..(1266): transl_table=11
atgaggtttatcatgtccgttaattttgctgatcttggcattgaacaacagttagtcgaaacgttgaacaatatgaatattgtgacgccaacgccagtccaagaaaaatcgattccacacgtactggaaggcaaagatcttcttgcggctgcgcaaacgggtaccggtaaaacggcggcatttggtttgccgattattcaggcggtacagcaaaagaaacgtaatggcacacctcacgctctcatcctagttccaactcgtgaattggcgcagcaagtgtttgacaatttaacgcaatatgcggaacacacggatctacgtattgtttgtgtgtacggcggtacaagtattggcgtgcaaaagaacaagttggaagagggcgcggatattcttattgctacgccgggccgattgttagaccacttgtttaacggcaacgtaaacatttctaaaactggcgtgttggtgcttgatgaagctgaccgaatgttggacatgggtttttggcctgatctgcaacgcattcttcgtcgactaccgaatgacaaacaaatcatgctgttttcggcgacgtttgaaaaacgcattaaaaccatcgcttacaaactgatggattctcctgttgaggtggaagtgtctccagcgaatacaacggcagaaacggttaagcagatggtgtatccagttgataaaaagcgtaagcgtgagttgctagcgtatttaattggctcacgaaactggcaacaagtacttgttttcactaaaaccaaacaaggcagcgacgagcttgcaaaggagctcaaactggatggtatcaaagcggtttcgattaatggtgataaatcgcaaggtgctcgccagcgtgcacttgatgaattcaagcaaggtaaagttcgtgctttaattgcgacagatgtggcggctcgcggtctagatattcaagagcttgaacaagtggtgaactttgatatgccatttaaagccgaagactacgtacatcgtattggtcgtactggccgcgcgggtaaatccggtttggccgtttcattaatgagccgagatgaagaatatctgcttcgtgcgatcgaaacgttgttagaccagcgtttgcctcaagaatggctagaaggattcgaaccaagtctaatcgaagaggtagaacctgagcgtgatggtggcggtcgtcgtaagagtcgttcgtcagaaaagcgcaaactaaaagcaaaactcgcgattcataaaaatcgtggcaagcaccgcaagtaa

SEQ ID NO: 76983 - protein, 421 aa, Vibrio parahaemolyticus RIMD 2210633
MRFIMSVNFADLGIEQQLVETLNNMNIVTPTPVQEKSIPHVLEGKDLLAAAQTGTGKTAAFGLPIIQAVQQKKRNGTPHALILVPTRELAQQVFDNLTQYAEHTDLRIVCVYGGTSIGVQKNKLEEGADILIATPGRLLDHLFNGNVNISKTGVLVLDEADRMLDMGFWPDLQRILRRLPNDKQIMLFSATFEKRIKTIAYKLMDSPVEVEVSPANTTAETVKQMVYPVDKKRKRELLAYLIGSRNWQQVLVFTKTKQGSDELAKELKLDGIKAVSINGDKSQGARQRALDEFKQGKVRALIATDVAARGLDIQELEQVVNFDMPFKAEDYVHRIGRTGRAGKSGLAVSLMSRDEEYLLRAIETLLDQRLPQEWLEGFEPSLIEEVEPERDGGGRRKSRSSEKRKLKAKLAIHKNRGKHRK

SEQ ID NO: 76984 - DNA, 1611 bp, Enterococcus faecalis V583
  CDS (1)..(1611): transl_table=11
atgaagacacctgaaactaggaagaaatcgttctttccgaaacaaaatctaggaggatatcatttgaaatttaaagaacttggtttagcgccagaattattatcagcggtagaacgcgcaggcttcgaggaagcaacccctattcaatcagaaacaattccgttagcgttagcaggaaaagacgtaatcggacaagcacaaacaggaacagggaaaaccgctgcttttggcttaccaatgcttaacaaaattgacgcagacaatcgcgttattcaaggattagtcattgcaccaacccgtgagttggctatccaaacacaagaagagttattccgtttaggccgcgataaaaagattcgcgtccaagccgtttacggtggggctgatatcggtcgccaaatccgtggactaaaagatcgtccacatatcgttgtaggtacaccaggacgtttactagatcatattaatcgtcgtaccttgaaattagaaactgttgaaacattagttttagacgaagcagatgaaatgttaaacatgggcttcttggaagacattgaaaaaatcatctcacaagtgccagaacaacgtcaaacacttctattttcagcaactatgccgccagcaatcaagaatattggcgtgaaattcatgaaacaaccagaacatgtgaagattaaagccaaagaaatgacggctgatttaattgatcaatattatgtacgttcaaaagactttgaaaaatttgacattatgacacgtttactagacgtgcaaaccccagaattgaccattgtctttggtcggacaaaacgccgtgttgatgaacttgcccgcgggttagaagcgcgtggttacaaagcagaaggcatccatggcgacctatcacaacaaaaacggatgagcgttttacgttcattcaaaaatggtaacttagatatcttagtggcaacagatgtagcagcacgtgggttagatatttcaggtgtcactcatgtctataactacgatattccacaagatccagaaagttatgttcaccgtattggtcggacaggtcgtgctggtaaaggcggtatgtctgtgacgtttgtaacaccaaacgaaatgggttacttacatgtcatcgaaaacctaacgaaaaaacggatgacaccattacgtccaccaaccgaaaaagaagcatttaaaggacaattaagtgcagctgttgaaaccatcgaaagtgatctagaagaaaatggtttagacaaatatctagaatctgctgaagcgttattagaaaaatattcagcgacagacttagctgcgttattattaaaaacagtagcgaaagatccagcagatgcggttcctgtaaaaattaccccagaacgaccattgccttcaaataaaaaaggctttaacaaaaatggccgtggtggtggcggtgggaacaaccgtaatcgcaaccgtggtggcaatggtaaaggtggcagctatcgtggcaacaaaaaccataaagatggcgaccgtaattacaaaaatagcgaccgcaaaaataaagatcaacgtggcggcaaacgtcataacgataaaaaacgtggtttcgtcattcgcgaaaacgccaaataa

SEQ ID NO: 76985 - protein, 536 aa, Enterococcus faecalis V583
MKTPETRKKSFFPKQNLGGYHLKFKELGLAPELLSAVERAGFEEATPIQSETIPLALAGKDVIGQAQTGTGKTAAFGLPMLNKIDADNRVIQGLVIAPTRELAIQTQEELFRLGRDKKIRVQAVYGGADIGRQIRGLKDRPHIVVGTPGRLLDHINRRTLKLETVETLVLDEADEMLNMGFLEDIEKIISQVPEQRQTLLFSATMPPAIKNIGVKFMKQPEHVKIKAKEMTADLIDQYYVRSKDFEKFDIMTRLLDVQTPELTIVFGRTKRRVDELARGLEARGYKAEGIHGDLSQQKRMSVLRSFKNGNLDILVATDVAARGLDISGVTHVYNYDIPQDPESYVHRIGRTGRAGKGGMSVTFVTPNEMGYLHVIENLTKKRMTPLRPPTEKEAFKGQLSAAVETIESDLEENGLDKYLESAEALLEKYSATDLAALLLKTVAKDPADAVPVKITPERPLPSNKKGFNKNGRGGGGGNNRNRNRGGNGKGGSYRGNKNHKDGDRNYKNSDRKNKDQRGGKRHNDKKRGFVIRENAK

SEQ ID NO: 76986 - DNA, 1545 bp, Bacillus cereus ATCC 14579
  CDS (1)..(1545): transl_table=11
atgggctttgaagaggctacaccaattcaagctgaaacaattccacatgcattgcaaggtaaagatattattgggcaagcgcaaacaggtacagggaaaacagcagcattcggattaccactattagataaagtggatacacataaagaatcggttcaaggtattgttatcgcgccaacgcgtgaattagcaattcaagttggagaagaattatacaaaattggtaagcataaacgcgttcgtattttaccgatttatggtggtcaagatattaaccgccaaattcgtgctctaaaaaaacacccacacattattgttggtacgccgggtcgtattttagatcatattaaccgtaaaacacttcgtctgcaaaacgtagagacagttgttcttgacgaagcggatgaaatgttaaacatgggcttcattgaagacattgaagcaattttaacagatgtgccagaaacacatcaaacattactattctcagcgacaatgccggatccaatccgccgtattgctgagcgtttcatgactgagcctcaacacattaaagtaaaagcaaaagaagtaacaatgccaaacattcagcagttctatttagaagtgcaagaaaagaaaaagtttgacgtgttaacacgcttattagatattcaatctccagagcttgcaatcgtatttggtcgtacaaagcgtcgtgttgatgaattatcagaagcattaaacttacgtggttatgctgcagaaggtattcacggtgatttaactcaggcgaaacgtatgtctgtattacgtaaatttaaagaaggttctattgaagttcttgttgcaacagacgttgctgcgcgtggtcttgatatttcaggcgtaacgcacgtatataacttcgatattccacaagatccagaatcatacgttcaccgtatcggtcgtactggtcgtgcaggtaaaaaaggtattgcaatgctatttgtaacaccacgtgaatcaggacaattaaaaaatatcgagcgtacaacaaaacgtaaaatggaccgtatggatgcaccgacacttgacgaggcattagaaggtcaacaacgtttaatcgctgaaaagcttcaaagcacaattgaaaatgaaaacttagcatactacaagcgtattgcagaagaaatgttagaagaaaatgactctgtaacagtagtagctgctgctttaaaaatgatgactaaagagccggatacaactccgatcgctttaacatcagaaccacctgttgtttcaagaggcggcggttctaaaaaacgcggcggtaacggaggcggataccgtgatggtaaccgtaatcgtagtcgtgatggacgcggcggtggcgatggacgtaatcgtgaccgtaaccgtgatggacgtaatcgtgacggaaaccgtgatcgcaatcgtgatggtaaccgcgatcgtaatcgtgatggtggtagtcgtggtcgtagaggtgaaggccaaggtcgccctggttcttcaaatggacgcggcgaaagaaaacatcatagccgtccacaagcttaa

SEQ ID NO: 76987 - protein, 514 aa, Bacillus cereus ATCC 14579
MGFEEATPIQAETIPHALQGKDIIGQAQTGTGKTAAFGLPLLDKVDTHKESVQGIVIAPTRELAIQVGEELYKIGKHKRVRILPIYGGQDINRQIRALKKHPHIIVGTPGRILDHINRKTLRLQNVETVVLDEADEMLNMGFIEDIEAILTDVPETHQTLLFSATMPDPIRRIAERFMTEPQHIKVKAKEVTMPNIQQFYLEVQEKKKFDVLTRLLDIQSPELAIVFGRTKRRVDELSEALNLRGYAAEGIHGDLTQAKRMSVLRKFKEGSIEVLVATDVAARGLDISGVTHVYNFDIPQDPESYVHRIGRTGRAGKKGIAMLFVTPRESGQLKNIERTTKRKMDRMDAPTLDEALEGQQRLIAEKLQSTIENENLAYYKRIAEEMLEENDSVTVVAAALKMMTKEPDTTPIALTSEPPVVSRGGGSKKRGGNGGGYRDGNRNRSRDGRGGGDGRNRDRNRDGRNRDGNRDRNRDGNRDRNRDGGSRGRRGEGQGRPGSSNGRGERKHHSRPQA

SEQ ID NO: 76988 - DNA, 1446 bp, Bacillus cereus ATCC 14579
  CDS (1)..(1446): transl_table=11
atgagtaaaaaaagtttttctgattataaattaagtaaggaaattgtaagggcacttactgggttagggtatgatcatccaacagaagtacaaggtgaggttattccagttgcattacaaaagaaggatcttgttgtgaagtcccagactggaagtggaaaaacagcttcatttggtattccactttgtgaaatggtggagtgggaagagaataaaccacaagcattagttttaacaccaacgagagagcttgcggtacaggtaaaagaagatattacaaatataggtcgattcaaaaggattaaggctgcggcagtttatgggaaatctccatttgcacgtcaaaaattagaattaaagcaaaagacacatattgtagttgggactcctggtcgtgtgttggatcatattgagaagggtaccctttctttagagtgtttgaagtatttagttattgatgaagcagatgagatgctaaatatgggctttatcgatcaagtagaggcaattattgatgaattacctacaaaaagaatgacgatgttattttcagcaacacttccagaagatgttgagaaattgtctcgtacatatatgaattcaccaactcatattgaaattaaagcggctgggattacgacggataaaattgaacatactctttttgaggtgatagaagacgagaagctttcactacttaaagatgtaacaacgattgagaatcctgatagctgtattattttctgccgtacacaagaaaatgtagatcatgtatatagacaattaaaacgagctaactatccctgtgacaaaatacatggtggtatggtacaagaagatcgttttgaagtcatggatgattttagaaaaggaaaattccgttatttagtagcaacagatgtagctgcgagaggaattgatattgataatattacacatgttattaattatgatattccacttgaaaaagaaagctatgtacatcgtactggaagaacgggacgagctggaaatagtggaaaagctattacatttataacaccatatgaaaatagatttttagaagagattgaggagtatattggatttgaaattccaaaggcaattggaccttcaaaagaagaagttatgaaagagaaagctgcatttgaagaaaagctacatgctaaaccaattataaagaaagataaaaatgcagacatcaacaaaggcattatgaagctgtactttaatggcgggaagaaaaagaaaattagggcggtagatttcgtcggtacaattgctaaaattaaaggtgttacagcagaagatataggtattattacgatacaagataatgtttcttatgttgaaatattaaatggaaaaggaccactcgtcttgaaagtcatgaagactacaacgattaaagggaaacaactaaaagttcatgaagcaattaagtaa

SEQ ID NO: 76989 - protein, 481 aa, Bacillus cereus ATCC 14579
MSKKSFSDYKLSKEIVRALTGLGYDHPTEVQGEVIPVALQKKDLVVKSQTGSGKTASFGIPLCEMVEWEENKPQALVLTPTRELAVQVKEDITNIGRFKRIKAAAVYGKSPFARQKLELKQKTHIVVGTPGRVLDHIEKGTLSLECLKYLVIDEADEMLNMGFIDQVEAIIDELPTKRMTMLFSATLPEDVEKLSRTYMNSPTHIEIKAAGITTDKIEHTLFEVIEDEKLSLLKDVTTIENPDSCIIFCRTQENVDHVYRQLKRANYPCDKIHGGMVQEDRFEVMDDFRKGKFRYLVATDVAARGIDIDNITHVINYDIPLEKESYVHRTGRTGRAGNSGKAITFITPYENRFLEEIEEYIGFEIPKAIGPSKEEVMKEKAAFEEKLHAKPIIKKDKNADINKGIMKLYFNGGKKKKIRAVDFVGTIAKIKGVTAEDIGIITIQDNVSYVEILNGKGPLVLKVMKTTTIKGKQLKVHEAIK

SEQ ID NO: 76990 - DNA, 1446 bp, Bacillus anthracis str. Ames
  CDS (1)..(1446): transl_table=11
atgagtaaaaaaagttttagtaattatgcattaagtaaagaagtaagacgagcacttactggtttaggatatgagcatccaacagaagtacaaggagaggttattccagttgcattacaaaagaaggatcttgttgtaaagtcgcaaacaggaagtggaaaaacggcttcgttcggtataccactttgtgaaatggtagagtgggaagagaataaaccacaagcgttagttttaacaccaacgagagaacttgctgttcaagtaaaagaagatattacaaatatagggcgattcaaaagaattaaagctgctgcaatttatggtaaatcgccatttgcacgtcaaaaattagagttaaagcaaaagacgcatattgtagtaggaactccaggacgtgtgctagatcatattgaaaaagggactctttcattagaacgattaaaatatttagtgattgatgaagcagatgaaatgctaaacatgggctttatcgaccaagtagaggcaattattgatgaattacctacaaaaagaatgacaatgctattttcagcaaccttaccggaagatgttgaaaggttatcccgtacgtatatgaacgcaccaactcatattgaaattaaagctgctgggattacaacagataaaattgaacataccctttttgaagtgagggaagaagagaagttgtcacttcttaaagatgtaacaacaattgaaaatccagacagttgcattattttttgtcgtacacaagaaaacgtagatcatgtatatagacagctagatcgagttaattacccttgcgataaaatacatggtggcatggtgcaagaagatcgttttggggtgatggatgattttagaaaaggaaagttccgttatttagtagcaacggatgtagctgcgagaggaattgatattgataatattacacatgttattaattatgatattccattagagaaagaaagttatgtacaccgtacaggcagaacaggacgagctggtaatagcggaaaggccatcacatttataacgccttatgaagatcgatttttagaagagattgaggcgtacatcggttttgcaattccgaaggcaaacgccccttcaaaagaagaagttatgaaaggtaaagctgcatttgaagaaaaaatacaagctaaaccaactataaagaaggataaaagtgcggatataaataaaggaattatgaaattgtactttaatggcggaaagaaaaagaaaattagagcggtggattttgtcggtacaattgctaaaattcaaggtgtttctgctgaagatataggcattattacaatacaagataatgtttcgtatgttgaaatattaaatggaaaagggccacttgttttaaaggttatgagaaatacaacgataaaaggtaaacaattgaaagttcatgaggcaaataagtaa

SEQ ID NO: 76991 - protein, 481 aa, Bacillus anthracis str. Ames
MSKKSFSNYALSKEVRRALTGLGYEHPTEVQGEVIPVALQKKDLVVKSQTGSGKTASFGIPLCEMVEWEENKPQALVLTPTRELAVQVKEDITNIGRFKRIKAAAIYGKSPFARQKLELKQKTHIVVGTPGRVLDHIEKGTLSLERLKYLVIDEADEMLNMGFIDQVEAIIDELPTKRMTMLFSATLPEDVERLSRTYMNAPTHIEIKAAGITTDKIEHTLFEVREEEKLSLLKDVTTIENPDSCIIFCRTQENVDHVYRQLDRVNYPCDKIHGGMVQEDRFGVMDDFRKGKFRYLVATDVAARGIDIDNITHVINYDIPLEKESYVHRTGRTGRAGNSGKAITFITPYEDRFLEEIEAYIGFAIPKANAPSKEEVMKGKAAFEEKIQAKPTIKKDKSADINKGIMKLYFNGGKKKKIRAVDFVGTIAKIQGVSAEDIGIITIQDNVSYVEILNGKGPLVLKVMRNTTIKGKQLKVHEANK

SEQ ID NO: 76992 - DNA, 1593 bp, Helicobacter hepaticus ATCC 51449; identical to SEQ ID NO: 65340
  CDS (1)..(1593): transl_table=11

SEQ ID NO: 76993 - protein, 530 aa, Helicobacter hepaticus ATCC 51449; identical to SEQ ID NO: 65341

SEQ ID NO: 76994 - DNA, 1359 bp, Rhodopirellula baltica SH 1
  CDS (1)..(1359): transl_table=11
atgaacagaatgagaaatcaacgcccaccgcgtacaggacgcggatcacgaccagctcgcttcgaagaaccggtcgacacaattgctctgctagaatccgttggcccggtggaaacaccgccagaaatggattcctttgacgaattggatttgtcgccgatcatgcgtcgagcggtcaaagacgcgggcttcacaaccccgtcgccgattcaagccgcattgatcccacacgctttgaatggcaaagacgtgatcggccaggcacggacaggaaccggcaaaactgccgcgttcagcatcccgatcctcgagcagctcgattccctggaagattgtcgcgacccgcaagcgatcgtgatcgtcccaactcgcgaattggctgaccaagtcgccgccgaagccgaaaggctcgcccgcggggttccgacggaaatcgcagtgctgtcgggcggcaaaaacatgaaccgccagcttcgccaattggaaaatggcacccagctcgttgtcggcacccccggacgcgtgcacgatcacctgcaacgaggaacattgcgaaccaacaacgtgtggtgcgtggttctggacgaagccgaccgaatgctggacatcggattccggccgcaaatcgaacggatcatgcgaaagtgcccgcggaaccgacaaacattgctgctgtcggcaacgcttcctcccgtcgttcgccgcttggccgaaagctacatgcacgaaccagtcgtgattgactgctgccgtgacgaaatggcggtcgacacgatcgagcaacggtatttcaccatcgcgcaagacgacaaagtcagattgctggaatcgcttctgaaacgcgaaaaacctgaacaagcgatcatcttctgccgaaccaaacgcggaacggatcgcctgcaccggaagctctctcacgaatacgggagcgcatgcggtgcgattcatggtgatttgcagcaacgcgaacgcgaccgagtccttcaaaaactccgtgacggcaacctgaaattcctcgttgcaacggacgtcgtgggacgcggaattgacatcagtacgatctcacacatcgtcaactttgatgtcccgcaagattgcgacgattacgttcaccgcgttggccgaaccggccgaatgggtcgagacggtgtcgcgtacaccttcgtcgtccccggtgaaggcgacatcctgacgagcattgaacaacggatcaacaaattgctgattcgggacaaaatggacggttttgaatcgcccgccgagaaggctgcagcggttgccgcggcggcgcccgagcccgagaaagagctgcggcgcaccctcaatcctatgacacgaaaacgccctcgccggcgttga

SEQ ID NO: 76995 - protein, 452 aa, Rhodopirellula baltica SH 1
MNRMRNQRPPRTGRGSRPARFEEPVDTIALLESVGPVETPPEMDSFDELDLSPIMRRAVKDAGFTTPSPIQAALIPHALNGKDVIGQARTGTGKTAAFSIPILEQLDSLEDCRDPQAIVIVPTRELADQVAAEAERLARGVPTEIAVLSGGKNMNRQLRQLENGTQLVVGTPGRVHDHLQRGTLRTNNVWCVVLDEADRMLDIGFRPQIERIMRKCPRNRQTLLLSATLPPVVRRLAESYMHEPVVIDCCRDEMAVDTIEQRYFTIAQDDKVRLLESLLKREKPEQAIIFCRTKRGTDRLHRKLSHEYGSACGAIHGDLQQRERDRVLQKLRDGNLKFLVATDVVGRGIDISTISHIVNFDVPQDCDDYVHRVGRTGRMGRDGVAYTFVVPGEGDILTSIEQRINKLLIRDKMDGFESPAEKAAAVAAAAPEPEKELRRTLNPMTRKRPRRR

SEQ ID NO: 76996 - DNA, 1812 bp, Prochlorococcus marinus subsp. marinus str. CCMP1375; identical to SEQ ID NO: 65344
  CDS (1)..(1812): transl_table=11

SEQ ID NO: 76997 - protein, 603 aa, Prochlorococcus marinus subsp. marinus str. CCMP1375; identical to SEQ ID NO: 65345

SEQ ID NO: 76998 - DNA, 1464 bp, Candidatus Blochmannia floridanus
  CDS (1)..(1464): transl_table=11
atgttagactctgaaaattctttcgtagatttagggttaaatacatatattgtagatatgttaagtaatattggatatcaggctccgttgcctattcaaactcaatgtattcctttgctgttgaaaggatgtgatttattaggaatggctcatactggtagtggtaaaactgcggcgtttttattgcctttgttgcaaaatattgatattaaacaacgttttgttcaaggtttaattatagttccgactcgagaattagctattcaaataggtcatgtatgtatgtattttattaagtctttgagtcatataattaatattgcagttttatatggtggacaaaattatagaattcaatttaatgatttaaagaaaaatcctcatattatcataggaaccccaggtagattattagatcatttaagtcgaggattagatatatcaaaattaaaaactttgattatagatgaagctgatgaaatgttacgtatgggatttattgaagatatagaacatattattcgttatgttccaactcataggcagacagcattattttctgctactttacctgtgagtattagaaaattaagttataagtttatgtgtaatcctaaggaaatctatatcaatcctagtatttcagcatgtgctgatattaagcagagttattggttagtacatggtatatctaaacatgaagctttgatgcgttttttggaagtagaaaagtttgaagcagtaataatatttgtacgtactaaatctgcaaccttgcaaatttctgaaattttgcaacgttttggttataatagtgcggctttaaatggggatatgaatcaatctgtacgttgtaaaacaatatctcgtctacggtgtggtacgttggatatattgataaccactgatgttgccgctcgtggattggatattaatcgtattagttttgtaattaattatgatattccatgtaattataatgcttacgtacatcgtatcggaagaacaggtagagctggtcgttctggaaaatctttgttatttgtagaacgtcaagaatatcatttatttaattatgttattaaaagaagagtattaaattctaatattgtgaaagttaaatgtcctacatcgaatgatttggtacgttgtcgattaaaaaaatttactgataaagtagtaaataatttggaatctaaagatatagaacagtatcaatctttattagggaaaataaagattgacttggatataactatagaaaaattagctgccattttattaaaaatagcacaaggtagtcaatcattaataatatcatcagatgatcaaagaataaataaaaaaataatttattataataaatctgatttaaaaaaaaattctgcgcataaaaataaaagttattttgtacattctcgtcgatcaataaaatgtagcaatgtatattataaaaaaaaataa

SEQ ID NO: 76999 - protein, 487 aa, Candidatus Blochmannia floridanus
MLDSENSFVDLGLNTYIVDMLSNIGYQAPLPIQTQCIPLLLKGCDLLGMAHTGSGKTAAFLLPLLQNIDIKQRFVQGLIIVPTRELAIQIGHVCMYFIKSLSHIINIAVLYGGQNYRIQFNDLKKNPHIIIGTPGRLLDHLSRGLDISKLKTLIIDEADEMLRMGFIEDIEHIIRYVPTHRQTALFSATLPVSIRKLSYKFMCNPKEIYINPSISACADIKQSYWLVHGISKHEALMRFLEVEKFEAVIIFVRTKSATLQISEILQRFGYNSAALNGDMNQSVRCKTISRLRCGTLDILITTDVAARGLDINRISFVINYDIPCNYNAYVHRIGRTGRAGRSGKSLLFVERQEYHLFNYVIKRRVLNSNIVKVKCPTSNDLVRCRLKKFTDKVVNNLESKDIEQYQSLLGKIKIDLDITIEKLAAILLKIAQGSQSLIISSDDQRINKKIIYYNKSDLKKNSAHKNKSYFVHSRRSIKCSNVYYKKK

SEQ ID NO: 77000 - DNA, 1725 bp, Bordetella pertussis Tohama I
  CDS (1)..(1725): transl_table=11
atgcatatgcgccgctatatgcggcaaggaaaagctatgtctttcgaagacttgggcttggcgcccactattctctcggccctgagcgaggccggtttcaccgaacccacttcggtgcaagccgctgccattccccaggccatggccggcgccgacctgatggtctcttcgcaaaccggtagcggcaagaccgccgcgttcatgctgccggcgctcaaccgcatcgcccaccagcccggcaacaagggcgtcggcgtgcaagtgctggtgctgaccccgacgcgcgaactggcgctgcaggtcgccgacgccacggcgtcgtatggccgcaacctgcccggcctgcgcaccgccaccgtcgtgggcggcatgccctatggcgcgcagctcaaggcgctgtcgcgccgcgtcgacgtgctggtggccaccccaggccgcctgatcgaccacctgaaagccggccgcgtcaaactgaataccgtgcacaccctggtgctggacgaagccgaccgcatgctggacatgggcttcatcgaagatatcgaaaccatcatcgagcgcctgccgaaagagcgccagaccctgctgttctcggccaccctggacggcagcgtggcgcgcctggccgagcgcatgatgcgcgagccacagcgcatcgaaatcgccggccatcgccagaagcacgccaacatcacgcaaagcctgctgtacgccgacgacgccgcgcacaagatgcgcctgctggaccacgtgctgcgcgacgcgcgcctggaccaggccatcgtgttcacggccaccaagcgtggcgccgacgacctggcagaccgcctggccgaccagggctttgccgccgcggcgctgcatggcgacatgaaccagcgccagcgcacccgtacgctgggccagctgcaacgcggccagctgcgcgtgctggtggcgaccgacgtggccgcccgcggcatcgacgtgcaaggcatcagccacgccgtcaacttcgacctgcccctgcaggccgaggattacgtgcaccgcatcggccgcaccggccgtgccggccgcgacggccaggccttcacgctggccacgcacgccgaacgccacaaagtgcgccgcatcgagcactacatcggccagtcgatcaacgccgaagtcatcgccggcctggagccgcagcgcaccccgcgcccgagcacgggcggcccgcgccgcggcggcaagccgatgggcggcaagcgtcccggcggctacggcgcgccgcgcgagttcggcgatcggccccagcgcccctatggcgaccgtccgcaacgcgacttcggcgatcggccccaacgcgacgccagcgaccgcccgcagcgcagcttcggcgatcgtccccagcgcgatttcggtgaccggccccagcgcccctacggcgaccgtccgcaacgcgacttcggcgatcgtccgcaacgcgatttcggtgaccgtccccagcgcccctacggcgaccgtccgcagcgcgacttcggcgatcgcccgcagcgcagcttcggtgaccgtccgcaacgcgacgtcggtgaccgtccgcaacgcgacttcggcgaccgcccgcagcgcagcttcggcgaccatccccagcgcgaaggcggctggcatggcgccccgcgtgaaggccgttcgttcgacaagcgccccggcggccccgccaagcgctttgccaagccggccgcgccccgccgcggctaa

SEQ ID NO: 77001 - protein, 574 aa, Bordetella pertussis Tohama I
MHMRRYMRQGKAMSFEDLGLAPTILSALSEAGFTEPTSVQAAAIPQAMAGADLMVSSQTGSGKTAAFMLPALNRIAHQPGNKGVGVQVLVLTPTRELALQVADATASYGRNLPGLRTATVVGGMPYGAQLKALSRRVDVLVATPGRLIDHLKAGRVKLNTVHTLVLDEADRMLDMGFIEDIETIIERLPKERQTLLFSATLDGSVARLAERMMREPQRIEIAGHRQKHANITQSLLYADDAAHKMRLLDHVLRDARLDQAIVFTATKRGADDLADRLADQGFAAAALHGDMNQRQRTRTLGQLQRGQLRVLVATDVAARGIDVQGISHAVNFDLPLQAEDYVHRIGRTGRAGRDGQAFTLATHAERHKVRRIEHYIGQSINAEVIAGLEPQRTPRPSTGGPRRGGKPMGGKRPGGYGAPREFGDRPQRPYGDRPQRDFGDRPQRDASDRPQRSFGDRPQRDFGDRPQRPYGDRPQRDFGDRPQRDFGDRPQRPYGDRPQRDFGDRPQRSFGDRPQRDVGDRPQRDFGDRPQRSFGDHPQREGGWHGAPREGRSFDKRPGGPAKRFAKPAAPRRG

SEQ ID NO: 77002 - DNA, 1797 bp, Synechococcus sp. WH 8102; identical to SEQ ID NO: 65348
  CDS (1)..(1797): transl_table=11

SEQ ID NO: 77003 - protein, 598 aa, Synechococcus sp. WH 8102; identical to SEQ ID NO: 65349

SEQ ID NO: 77004 - DNA, 1419 bp, Chromobacterium violaceum ATCC 12472; identical to SEQ ID NO: 65350
  CDS (1)..(1419): transl_table=11

SEQ ID NO: 77005 - protein, 472 aa, Chromobacterium violaceum ATCC 12472; identical to SEQ ID NO: 65351

SEQ ID NO: 77006 - DNA, 1326 bp, Chromobacterium violaceum ATCC 12472; identical to SEQ ID NO: 65352
  CDS (1)..(1326): transl_table=11

SEQ ID NO: 77007 - protein, 441 aa, Chromobacterium violaceum ATCC 12472; identical to SEQ ID NO: 65353

SEQ ID NO: 77008 - DNA, 1263 bp, Chromobacterium violaceum ATCC 12472; identical to SEQ ID NO: 65354
  CDS (1)..(1263): transl_table=11

SEQ ID NO: 77009 - protein, 420 aa, Chromobacterium violaceum ATCC 12472; identical to SEQ ID NO: 65355

SEQ ID NO: 77010 - DNA, 1815 bp, Porphyromonas gingivalis W83
  CDS (1)..(1815): transl_table=11
atgaaaacatttgaagaattaggcattgccaaaccgtttttgaaagcaattgccgaattgggcttcgaacagcccatgcctgtgcaggaagaagtaataccctatctcctcggagaggacatcgacctgatcgctttggcacagaccggcacaggcaagactgccgctttcggccttccgctgctccagaaaattgatttgtcgggaggacgaccgcaggctttggtactctgcccgactcgcgaactgtgtctacagatagcagacgacttgaacagctattccaagtatttgtccgatgtgcacatcctacccgtttacggaggtacgcctatagatgcgcagatcagagccttgcgccgtggtgtgcaaatcgtcgtggcaacgcccggccgtctcctcgacctgatgcgccgtgaggccgtcagcctgtcggacattcatacggtagtattggatgaagcggatgaaatgctcaatatgggctttgcagaagatctggagcaaatcctcgcagatattccatccgaacgccatctgctattgttttcggctacgatgcccaaagagatctccaagatcgccacttcgtacatgaaggaccccaaggaaattgttatcggcaataagaatgagggcaatgccaatatcaagcatctatactacatggtctcggcgcgccataaatatcttgcgctaaagcgaattgccgactactatcccaatatctatggtattgttttctgtcgcacccgtaaggaaacgcaggagattgccgatcaactgattcaagacggctataacgcggattctcttcatggcgatctcagtcaggctcagcgcgactatgtgatgcagaagtttcgcgtccgcaaccttcaactgctcgttgccaccgatgtggctgcccgcggattggatgtgaacgatctgacccatgtgattcacttcggtcttcccgatgatgtagagagctacacccaccgcagcggtcgtacagctcgtgcagggaaaacaggtctttcgatcgccatctgccatgtcaaggagaaaggcaaaatcaagaatatagagcgcacgatgcagaagcagatcgaacgtgcacgcatcccttccggagcagagatatgcgaaaagcaactgttcaatctggccgatcgtatagaacgtgtggatatagagaacacaacggccatcgactctgtcttgaacgaagtgaacaagaagctcgaatggattgaaaaagacgaattgattcgtcgggtaatggcattggagttcaatcgcatgctcgactattaccaacgtgccgaagacgtggaagaagtggtcgagagaaaaaaagacgaggtttcgggagatcgtaaaaaccgaaaacgaggagccggcgaagcagaagaagggatgacccgtctgttcatcaattttggcaagatggatcaaatgtttcccaaccgactgatcgagctgatcaaccgttgtatcccggggcgtgtcaatatcggacggatcgacctgatgccccgattcgctttcttcgatgtagacgagttcgaagccaagaacgtagtagaaaccctcaatcggtacgaagtggatggtcgccgcatccatgtagagtatgcggataccaagaaagactatgccggggggaaaaaaggcggagataagaacttttccgctcgtcgcaaagatttcgacgggcgacgtagtgaaaatcccacttcacgcaaaaacaaaggtcgcaaagagaaaccgacggaaggacgtttctacgacaagttcgactccaaacagcgcaagcgtcggaagtaa

SEQ ID NO: 77011 - protein, 604 aa, Porphyromonas gingivalis W83
MKTFEELGIAKPFLKAIAELGFEQPMPVQEEVIPYLLGEDIDLIALAQTGTGKTAAFGLPLLQKIDLSGGRPQALVLCPTRELCLQIADDLNSYSKYLSDVHILPVYGGTPIDAQIRALRRGVQIVVATPGRLLDLMRREAVSLSDIHTVVLDEADEMLNMGFAEDLEQILADIPSERHLLLFSATMPKEISKIATSYMKDPKEIVIGNKNEGNANIKHLYYMVSARHKYLALKRIADYYPNIYGIVFCRTRKETQEIADQLIQDGYNADSLHGDLSQAQRDYVMQKFRVRNLQLLVATDVAARGLDVNDLTHVIHFGLPDDVESYTHRSGRTARAGKTGLSIAICHVKEKGKIKNIERTMQKQIERARIPSGAEICEKQLFNLADRIERVDIENTTAIDSVLNEVNKKLEWIEKDELIRRVMALEFNRMLDYYQRAEDVEEVVERKKDEVSGDRKNRKRGAGEAEEGMTRLFINFGKMDQMFPNRLIELINRCIPGRVNIGRIDLMPRFAFFDVDEFEAKNVVETLNRYEVDGRRIHVEYADTKKDYAGGKKGGDKNFSARRKDFDGRRSENPTSRKNKGRKEKPTEGRFYDKFDSKQRKRRK

SEQ ID NO: 77012 - DNA, 1518 bp, Wolinella succinogenes DSM 1740; identical to SEQ ID NO: 65360
  CDS (1)..(1518): transl_table=11

SEQ ID NO: 77013 - protein, 505 aa, Wolinella succinogenes DSM 1740; identical to SEQ ID NO: 65361

SEQ ID NO: 77014 - DNA, 1314 bp, Gloeobacter violaceus PCC 7421; identical to SEQ ID NO: 65362
  CDS (1)..(1314): transl_table=11

SEQ ID NO: 77015 - protein, 437 aa, Gloeobacter violaceus PCC 7421; identical to SEQ ID NO: 65363

SEQ ID NO: 77016 - DNA, 1935 bp, Photorhabdus luminescens subsp. laumondii TTO1; identical to SEQ ID NO: 65366
  CDS (1)..(1935): transl_table=11

SEQ ID NO: 77017 - protein, 644 aa, Photorhabdus luminescens subsp. laumondii TTO1; identical to SEQ ID NO: 65367

SEQ ID NO: 77018 - DNA, 1380 bp, Vibrio vulnificus YJ016
  CDS (1)..(1380): transl_table=11
atgactgcaccatttaacactctttctctcaagcctgaactgctatcgactcttgatagcttgggctatacagagatgacgccaattcaagctcagagcctaccattggtgctcgatggaaaggatgtgattggtcaaggaaaaacaggttcagggaaaaccgccacctttgctttgggtctgctgagcaacctgaatgtctcgcgctttcgcgttcaatcgcttgttctttgccctacacgtgaattggcggatcaagtcgcaacggaaattcgtactttggctcgtggcattcacaacattaaagtgctgactttgtgtggtggcatgcctatggggccacaaattctttcgttggaacatggtgcacacatcttagttggcacaccggggcgcattctcgatcacttaagcaaaggccgtattgatcttgcagaactgaatacgttagtgcttgatgaagccgacagaatgttggaaatgggcttccaagatgcgattgatgccatcattgacgccgcaccgactcaacgccagacgttacttttcagtgcgaccttcccagagcagattgaaaccatcgcaagcaaagtgatgcagaatccggagatggtgaaagtagagtctacacaccaaaagagcaccatcgaacaacgcttttatcagctcgagagcaccgaagaacgtgacaacgctttggaagctctgctgcttacgcacagacctgaatctaccgtggtcttttgcaataccaagaaagaagtgcaaaacgtcaccgacgagctgaaccatcgtcgcttcagcgttatcgaactgcacggtgacatggaacagcgtgaacgtgaacgcgcgttaaccatgtttgccaacaaaagcatttctattttggtcgcaactgacgttgccgctcgtggtttagacgtggataacctagacgccgtgattaactttgagctttctcgtgaccctgaagtgcatgttcaccgcattggtcgtactggccgcgcgggtgcgaaagggattgcgatcagcttcttcagtgagaaagagctgtatcgagtagagcgtattgaagaatacatgggtattgatgtgcatccggccaaactgcctcaaccggaaaaccctaaaccttactacccttcaatgcgtacgattcaaattttgggtggcaaaaagcaaaaagtccgtgctggcgatatcttaggcagcctaaccaaagaagccggaattgatggtaagttgattggtaaaatcaatatcttacctatggtctcctatgttgctatcgataactctgtggccaaaatcgccgaacagcaactgcaaaacggcaaaatgaaagggcgtaactttaaagcccgaattatgaaaggttaa

SEQ ID NO: 77019 - protein, 459 aa, Vibrio vulnificus YJ016
MTAPFNTLSLKPELLSTLDSLGYTEMTPIQAQSLPLVLDGKDVIGQGKTGSGKTATFALGLLSNLNVSRFRVQSLVLCPTRELADQVATEIRTLARGIHNIKVLTLCGGMPMGPQILSLEHGAHILVGTPGRILDHLSKGRIDLAELNTLVLDEADRMLEMGFQDAIDAIIDAAPTQRQTLLFSATFPEQIETIASKVMQNPEMVKVESTHQKSTIEQRFYQLESTEERDNALEALLLTHRPESTVVFCNTKKEVQNVTDELNHRRFSVIELHGDMEQRERERALTMFANKSISILVATDVAARGLDVDNLDAVINFELSRDPEVHVHRIGRTGRAGAKGIAISFFSEKELYRVERIEEYMGIDVHPAKLPQPENPKPYYPSMRTIQILGGKKQKVRAGDILGSLTKEAGIDGKLIGKINILPMVSYVAIDNSVAKIAEQQLQNGKMKGRNFKARIMKG

SEQ ID NO: 77020 - DNA, 1659 bp, Onion yellows phytoplasma OY-M; identical to SEQ ID NO: 65372
  CDS (1)..(1659): transl_table=11

SEQ ID NO: 77021 - protein, 552 aa, Onion yellows phytoplasma OY-M; identical to SEQ ID NO: 65373

SEQ ID NO: 77022 - DNA, 1455 bp, Lactobacillus johnsonii NCC 533; identical to SEQ ID NO: 65376
  CDS (1)..(1455): transl_table=11

SEQ ID NO: 77023 - protein, 484 aa, Lactobacillus johnsonii NCC 533; identical to SEQ ID NO: 65377

SEQ ID NO: 77024 - DNA, 1518 bp, Bdellovibrio bacteriovorus HD100
  CDS (1)..(1518): transl_table=11
atgacgacgactaaatttaccgaccttcctttgattgcccctcttcaattttcacttaaagaagcaggatacgaaactccaaccccgattcagttggcagcgatccctgttattcttgaagggcacgacctattgggcatcgcccagaccggcaccgggaaaactgcggcgttttctttgccgatcctgcaaaacctttccaaacacacacgcaagatcgaaccgaaatccccgcgttgcctgattttgactccgacccgcgagctggcgattcagattcacgaaaacatcgaggcttacagcaaacacctgaacatgaaacacgctgtgatcttcggcggcgtgggacaaaatccccaagtgcgcgccctgcaaggtggcgtggacattctgattgcgactccgggccgcctgatggacctgcacggacaaaagcacctgaagctggatcgcgtggaaatctttgtactggatgaagccgaccgcatgctggacatgggcttcatgcaggatattaaaaagatcctgcccctgcttccgcaaaaacgtcacaacctgttcttctctgcaaccatgccacacgagattcagactttggccaacaggattctggtgaatccgaaaaaagtggaagtgactccggtttcttcaacggctgaaaaagttgaacagcgtgtgatgttcgtagacaaacctcagaagctggatctattgctgcacattctgaaagacgaatctttgtccaaagtgctggtatttgtgcagatgaaatacggcgccaaccgcgtcgttgaccgactgacgaaggcgggcgttgcggccgccggcattcacggcgacaaatcccagaaccagcgtcagcgtgcgctggaagaattcaaaaacggcgatgtgcgtgtgttggtagcgactgacatcgccgcccgtggtattgatatcgacggcattactcacgtgatcaacctggagcttccgcacattccggaatcctacgttcaccgtatcggaagaaccgcgcgcgcaggcgctaccggtatttctatttccttctgcactgctgaagaaagatccttcctgtttgcgattgaaaaaaccacacgcacgaaagtcactgtggtcgaagatcatccgttccattccaccgaaattgccaacgctccggtgatgaccgtgggtaaagccaaagcgattctggaaggccagcgcctgcagaataaggctaaaaatcgcggtggcgggccaagacgtcaaggcggtggcgcccctcaaggcggtcatggcggaaagaaagcgggaggcaaacctcagggcggcaataagcctgatcatggtggcaagactcatactaaatccgagcacaaatctgaaggtgccgcttcccacaaaactcacagcaaacctgcgcacgcaaaaccggctcacaaacctgctcacaaaagtgaaggcaagtctgctggcaaaagtgagcacgctcccaagaagcgcagcttctggagccgtctgcgcaacaaggactaa

SEQ ID NO: 77025 - protein, 505 aa, Bdellovibrio bacteriovorus HD100
MTTTKFTDLPLIAPLQFSLKEAGYETPTPIQLAAIPVILEGHDLLGIAQTGTGKTAAFSLPILQNLSKHTRKIEPKSPRCLILTPTRELAIQIHENIEAYSKHLNMKHAVIFGGVGQNPQVRALQGGVDILIATPGRLMDLHGQKHLKLDRVEIFVLDEADRMLDMGFMQDIKKILPLLPQKRHNLFFSATMPHEIQTLANRILVNPKKVEVTPVSSTAEKVEQRVMFVDKPQKLDLLLHILKDESLSKVLVFVQMKYGANRVVDRLTKAGVAAAGIHGDKSQNQRQRALEEFKNGDVRVLVATDIAARGIDIDGITHVINLELPHIPESYVHRIGRTARAGATGISISFCTAEERSFLFAIEKTTRTKVTVVEDHPFHSTEIANAPVMTVGKAKAILEGQRLQNKAKNRGGGPRRQGGGAPQGGHGGKKAGGKPQGGNKPDHGGKTHTKSEHKSEGAASHKTHSKPAHAKPAHKPAHKSEGKSAGKSEHAPKKRSFWSRLRNKD

SEQ ID NO: 77026 - DNA, 1446 bp, Bacillus cereus ATCC 10987
  CDS (1)..(1446): transl_table=11
atgagtaaaaaagggttttttgagtataaattaagtaaagaaattgtaagggcacttactgggttagggtatgatcatccaacagaagtacaaggtgaggttattccagtcgcattacaaaagaaggatcttgttgtgaagtcccagacgggaagtggaaaaacagcttcatttggtattccactttgtgagatggtggagtgggaagagaataaaccacaagcattagttttaacaccaacgagagagcttgcggtacaggtgaaagaagatattacaaatatagggcgattcaaaagaattaaagccgccgcaatttatggtaagtccccatttgcacgtcaaaaattagagttaaagcaaaagacgcatattgtagtagggactccagggcgtgtattggatcatattgaaaaagggaccctttctttagagcgattaaaatatttagtgattgatgaagcagatgaaatgctaaacatgggctttatcgatcaagtagaggcaattattgatgaattacctacaaatagaatgacaatgttattttcagcaactttaccggaagatgttgaaaggttatcacgtacatatatgaatgcaccaactcatattgaaattaaagcggctgggattacgacggataaaattgaacataccctttttgaggcgatagaagacgagaagttttcactacttaaagatgtaacaacgattgagaatcctgatagctgtattattttctgccgtacacaagaaaatgtagatcatgtatatagacaattaaaacgagctaactatccttgtgacaaaatacatggtggtatggtacaagaagatcgttttgaagtcatggatgattttagaaaaggaaaattccgttatttagtagcaacagacgtagctgcgagaggaattgatattgataatattacacatgttattaattatgatattccacttgaaaaagaaagctatgtacatcgtactggaagaacaggacgagctggaaatagtggaaaagctattacatttataacaccatatgaaaatagatttttagaagagattgaggagtatattggctttgaaattccaaaggcaattggaccttcaaaagaagaagttatgaaagggaaagctgcatttgaagaaaagatacatgctaaaccaattataaagaaagataaaaatgcagacatcaacaaaggcattatgaagctgtactttaatggcgggaaaaaaaagaaaattagggcggtagatttcgtcggtacaattgctaaaattaaaggtgttacagcagaagatataggtattattacgatacaagataatgtttcttacgtcgaaatattaaatggaaaaggaccacttgtcttgaaagtcatgaagactacaacgattaaagggaaacaactaaaagttcatgaagcaattaagtaa

SEQ ID NO: 77027 - protein, 481 aa, Bacillus cereus ATCC 10987
MSKKGFFEYKLSKEIVRALTGLGYDHPTEVQGEVIPVALQKKDLVVKSQTGSGKTASFGIPLCEMVEWEENKPQALVLTPTRELAVQVKEDITNIGRFKRIKAAAIYGKSPFARQKLELKQKTHIVVGTPGRVLDHIEKGTLSLERLKYLVIDEADEMLNMGFIDQVEAIIDELPTNRMTMLFSATLPEDVERLSRTYMNAPTHIEIKAAGITTDKIEHTLFEAIEDEKFSLLKDVTTIENPDSCIIFCRTQENVDHVYRQLKRANYPCDKIHGGMVQEDRFEVMDDFRKGKFRYLVATDVAARGIDIDNITHVINYDIPLEKESYVHRTGRTGRAGNSGKAITFITPYENRFLEEIEEYIGFEIPKAIGPSKEEVMKGKAAFEEKIHAKPIIKKDKNADINKGIMKLYFNGGKKKKIRAVDFVGTIAKIKGVTAEDIGIITIQDNVSYVEILNGKGPLVLKVMKTTTIKGKQLKVHEAIK

SEQ ID NO: 77028 - DNA, 2328 bp, Nasonia vitripennis
  CDS (1)..(2328)
atgtacagcagcaacggttacaacgccaatcaaacttcacccaggggaaacagagagtacggtaacaagaaggggagtggaggaggaacgtattggaacagccaacaacagccccagaataattttggagctaacaagaaacagaaccagaagaaatctccaggtgaccttttgaagaaacctaactgggaagtcatggctctaccaatgatcaccaagaacctttacgtgccccacgtcaacatcatgagtcgtacacctgacgaagtcagcaagtactactcaggaaaagagatcaccgtcaaaggaaacaacactccctttccgatacaggcgttcgaggaaagcaactttcctgattatgtaatggaggagattaggaagcagggattcttggagcccactgctattcaagcccaaggctggccaattgccctgagtggccgagatatggttggcattgcgcaaactggatctggaaagactttagcttatattcttccggcaacagtgcacatcaataaccagccccgtctgtcgcgtggtgatggacccattgttctcgtacttgccccaactcgcgagttggcccaacaaattcagagcgtcgcacgagactttggctcgtcgtcatgcattcgcaacacttgcatcttcggaggttcaccgaaaggaccacaggcccgtgatttggaacgtggcgttgaaatctgcatagccacacccggcagacttattgattttctcgagcgaggcacaacgaatctgcgccgctgcacatatctcgtgctcgacgaagctgacaggatgctggacatgggctttgagcctcaaatcagaaaaatcattgaacagatcaggccagacagacaggttctcatgtggtctgctacgtggcccaaggaagttcaggctttggctgaagatttccttactgactatatccagatcaacatcggctcgctgaatctcgccgccaaccacaacatccgacaaatcatcgagatctgccaagaacacgagaaggaaaacaagctcgcagtactgctgagggaaatcggctgcgaacgtggaaacaagactatcatctttgtagagacaaagaaaaaggttgacgacatcaccaaggcaatcaagcgcaacggctggcccgcgatagctattcacggagacaagtcgcaacctgagcgtgattatgttctctctgaattcagaaacggaaagaccgcaattctcgtggcaactgatgtagcggctcgtggtttggacgttgaggatgtcaagtacgttgtcaatttcgattacccgaacagtagcgaggactatattcacagaataggaaggactggccgctgccagagcgccggaactgcttatgcctactttaccccgaacaatgctcgtcaagctaaagaattgatttccgtgctcgaagaagctggacaaatcatcaaccctcaactcgccgaaatggctaactcgcaaagaaaccagtatggcaaggccagacagcgctggaaccagggccgtggcaatgcgaacaacatgaaagataatcagatgggtaatagtagcccgcgaaataaccgcagcagcccgaaccataacaattggcagagccactttaatcaccagaaccacaagttgtctcagatggccaatggtacgaggccgatgatgcgccagcagaacggctaccaaaacaatcgccaaaacagctatcagaacaactaccagcaccaccagccttcgtctcccaacggccttcaaaatcatcagcagactttgcagcaagctgtctcgcctcatgcacactcgcagtctcctcagcaacagcagcaggttcagcataggcacagcaacggttaccagaacggtaccaccaccaccaccacaaccgcgtaccaagcaagctccactacagctcagaacggttacggccagaataatggcaatcagcagcagcgctaccagaactacaatagcaacggttatcagggcaacaatcgttacaacaaccgccagaacggatataccagcgggcagcagaacaggcagcagcagcaacaacagcagcagcagcagcaacagcagcaacagcagcagcagggcatgtattcgattccacaggcgttcatgctgccgtcgggcgcccacgctacggactccagcatccagagcctggtgaacaacaagttcttccagacgaaccggccaccaccaaccacggctaatccctgcgcctaccagtcggccatgggctatggtcaattccaagctgttccaccttatggctacccatacccgccgacgcctgtacaacagtga

SEQ ID NO: 77029 - protein, 775 aa, Nasonia vitripennis
MYSSNGYNANQTSPRGNREYGNKKGSGGGTYWNSQQQPQNNFGANKKQNQKKSPGDLLKKPNWEVMALPMITKNLYVPHVNIMSRTPDEVSKYYSGKEITVKGNNTPFPIQAFEESNFPDYVMEEIRKQGFLEPTAIQAQGWPIALSGRDMVGIAQTGSGKTLAYILPATVHINNQPRLSRGDGPIVLVLAPTRELAQQIQSVARDFGSSSCIRNTCIFGGSPKGPQARDLERGVEICIATPGRLIDFLERGTTNLRRCTYLVLDEADRMLDMGFEPQIRKIIEQIRPDRQVLMWSATWPKEVQALAEDFLTDYIQINIGSLNLAANHNIRQIIEICQEHEKENKLAVLLREIGCERGNKTIIFVETKKKVDDITKAIKRNGWPAIAIHGDKSQPERDYVLSEFRNGKTAILVATDVAARGLDVEDVKYVVNFDYPNSSEDYIHRIGRTGRCQSAGTAYAYFTPNNARQAKELISVLEEAGQIINPQLAEMANSQRNQYGKARQRWNQGRGNANNMKDNQMGNSSPRNNRSSPNHNNWQSHFNHQNHKLSQMANGTRPMMRQQNGYQNNRQNSYQNNYQHHQPSSPNGLQNHQQTLQQAVSPHAHSQSPQQQQQVQHRHSNGYQNGTTTTTTTAYQASSTTAQNGYGQNNGNQQQRYQNYNSNGYQGNNRYNNRQNGYTSGQQNRQQQQQQQQQQQQQQQQQQGMYSIPQAFMLPSGAHATDSSIQSLVNNKFFQTNRPPPTTANPCAYQSAMGYGQFQAVPPYGYPYPPTPVQQ

SEQ ID NO: 77030 - DNA, 2127 bp, Nasonia vitripennis; identical to SEQ ID NO: 65396
  CDS (1)..(2127)

SEQ ID NO: 77031 - protein, 708 aa, Nasonia vitripennis; identical to SEQ ID NO: 65397

SEQ ID NO: 77032 - DNA, 2284 bp, Anopheles gambiae str. PEST
  CDS (231)..(2021)
agttttaatccaagcgtatcccgtcgtggagtggttgtgtggctctgtgtgctctcatatcagttccagagtgaggtcgaaagagagtcgccgttagtcgcgcttcgagcaacggacacgttttttggttgaaaccaacagcttttttcatcttcgggagacacacagatctcgaatcgtacattcccataaggagaattgtcatcttccggtgaataaagaaaggaaacatgagcggagacggtgaatgggatgattgtgacgagggacgtagcttcgatcagcccaagtacgatgctaccgaaaatagtgttcaggacaacgatactaacgggttcgacaactatcagtccaacaatggtttcggtgacgagtatcaaagcaacgacaacggtggatatggcggcggtgacgatggatacggcggcggtggtcgtggaggccgtggaggccgaggtggcggacgaggtcgtggtcggggccgtggcgggcgcgatggtggcggtggcttcggtggcggtggctacggtgatcgaaacggcgatggcggccgacctgcctattctggcaacagcgatccaagcatggaccaggtgaagacggacaagccgagggagctgtacattccgccacttccgaccgaggacgaatcgctgatcttcgggtccggcatcagctccgggatcaattttgacaagttcgaggaaatccaggtgcgcgtgtcgggcgaaaatccaccggatcacgtggagagcttcgagcgctccggtttgcgcgaggaggtgatgacgaacgtgcgcaagtcgagctacacgaaaccgacgcccatccagcggtacgccatcccgatcatcctgaacgggcgcgacctgatggcctgcgcccagaccggttcgggcaagacggccgccttcatgctgccgatgatccaccatctgctggacaaggaagactcgctggagctgcgcacgcgcaacccgtacatcgtgatcgtggccccgacccgcgagctcgcgattcaaatccacgacgaggggcgcaagttcgcgcacggcaccaagctgaaggtctgcgtatcgtacggcggcacagccgtacagcaccagctgcagctgatgcgcggtggctgccacgtgctggtggcaacgcccggtcggctgctggacttcatcgaccgggggtacgtgacgtttgagaacgtgaacttcgtggtgctcgacgaagccgatcggatgctggacatgggctttctgccctcgatcgagaaggtgatgggacacgcgacgatgccggaaaagcagcagcggcagacgctcatgttttcggctacgttcccggccgaaatccaggagctggcgggcaagttcctgcacaactacatctgcgtgttcgtgggcatcgtcggcggagcgtgtgccgatgtggagcagacgatccatctggtggaaaagttcaagaagcgcaagaagctggaggagatcctgaacggcggcaatcccaagggtacgctcgtgttcgtggagacgaagcgcaatgcggactatctggcatcgctgatgtccgagacgcagttcccgaccacctccatccatggcgatcggttgcagcgggagcgcgagatggcgctgtacgatttcaagtccgggcggatggacgtgctgatcgcgacgtcggtagcggcccgcgggctggacattaaaaatgtgaaccacgtggtgaactacgatctgccgaagagcatcgatgattacgtgcaccgtatcgggcgaaccgggcgcgtcggtaacaagggccgagcgactagcttctacgacccggaggcggaccgggctatggcgagcgatctggtgaagattctcacccaggccgggcagtcggtgccggactttttgaaggatgctggcggctccggctcgtacatgggatcgtcccagttcggtggcaaggatatccgcgactcgtacggttcgcgtgtcgatgcccagccggttgccctcgagccggaggaagagtgggagtaacttggggtggggttgttatgtgttgcgaacgagagtggatctctctcgacatttccttattttttttttctattgttaacacttacaacgaaacttcggaagagaagtttcctcattcgaaacgaggagtcaaactcctttccttgcttttgtgacatgcatgattattctttcatttactgacgtaacgatgtaaaacacacagaagaagcatgacacacagcaaagaattgttcgttaataaaacgttgatgaaaactttg

SEQ ID NO: 77033 - protein, 596 aa, Anopheles gambiae str. PEST
MSGDGEWDDCDEGRSFDQPKYDATENSVQDNDTNGFDNYQSNNGFGDEYQSNDNGGYGGGDDGYGGGGRGGRGGRGGGRGRGRGRGGRDGGGGFGGGGYGDRNGDGGRPAYSGNSDPSMDQVKTDKPRELYIPPLPTEDESLIFGSGISSGINFDKFEEIQVRVSGENPPDHVESFERSGLREEVMTNVRKSSYTKPTPIQRYAIPIILNGRDLMACAQTGSGKTAAFMLPMIHHLLDKEDSLELRTRNPYIVIVAPTRELAIQIHDEGRKFAHGTKLKVCVSYGGTAVQHQLQLMRGGCHVLVATPGRLLDFIDRGYVTFENVNFVVLDEADRMLDMGFLPSIEKVMGHATMPEKQQRQTLMFSATFPAEIQELAGKFLHNYICVFVGIVGGACADVEQTIHLVEKFKKRKKLEEILNGGNPKGTLVFVETKRNADYLASLMSETQFPTTSIHGDRLQREREMALYDFKSGRMDVLIATSVAARGLDIKNVNHVVNYDLPKSIDDYVHRIGRTGRVGNKGRATSFYDPEADRAMASDLVKILTQAGQSVPDFLKDAGGSGSYMGSSQFGGKDIRDSYGSRVDAQPVALEPEEEWE

SEQ ID NO: 77034 - DNA, 2704 bp, Apis mellifera
  CDS (288)..(2393)
atttcggcgctcggccatttttgttgcgtcgacgtcaagtgtggccagaggcctttcatcgtagccagtcttcgaatttcctttgtatcgaattatcgacagataaaaactgtaattctaactacttggcttagtcgacaagtttcgtttgtagctcaggaagaaacgaaaggagaggaaaaaggattgaacaattgaaattttttgcttagtgattgtctaggcgaataatagttaaagagcttctgcggcagagccacgaaaaatacgcaccgaggcggagtaatatgagtaatgcagccaaccagaatggatcaggtctagagcagcagttagctggtctggacttgcagggctcccgccaaccaagtgggggtcgctacgtaccaccgcatttacgaaataaatctggaagtaacgcgccttctggcggagatcatcatttttcttccaactcaagaccatattctgatagagatagaggaagggatcgtgatcgcgaaagggaaagggaaagagatcgtgatagaggaagaggtggttcaggttatagagatacgcgctctcgtgatgtcgattttggaaatttcggaaatttcggtgggcgcactagacgtagtgccaatcaagaaaatggaagagattatagatattccaattcagaccgtgagcgagatcgagatcgcacggttaactctggaaatgatcgttggcaagaacctagaaacgatcgctggccagacaacagaaacgatcatagaatggggggcggtcgatggaaggacgacagagaaggaggtaggacgaattctgaaatcgactggacaatacccacttccagagatgagcgattggaggtggaattatttggtactggaaatactggcattaattttagtaaatatgaggatatcccagttgaggctaccggggataacatacctccacacatcacatcttttgacgaagttaagctgacggagataataaagaatagtattagtttggctggttatgataaacccacaccagtacagaagtatgcgataccgattattatcggacgccgtgatgttatggcctgtgcccaaacagggtctggtaaaacagcggcctttttagtgccaatattaaatcagatttatgaaagcgggccacgtccaccaccaattaattcttctggaaagcgcaaacatttccctcttggtctagtattagcacctacaagagagcttgctacgcaaatatatgacgaagcacggaaatttgcatacagatcacgtatgcgtcctgctgttgtctacggtggttcgaacatcgtagatcaaatgcgagaattggatcgtggatgtcatttacttgttgcaacacctggtcgccttgtagatatgttaggtcgtggtaaaatcggattacataattgtcgatatttagtattggacgaagctgatcgtatgttggatatgggtttcgagccacaaataagacgtatagttcaggaggatacaatgcctcccacgggagaaagacaaacgctcatgttttcagctacatttccaaaagaaattcaaatgctggcaagagattttcttagtaactatatctttttagctgtaggccgtgttggttctacgtctgaaaatattactcagaaaattgtatgggtggaggaacatgataagcgttcttatttgcttgatcttcttcaagctagcaatttttcagatccttctgccgaatcattgactctagtattcgtggaaacaaagaaaggtgcggatatgttagaagaatatttacatcaaatgggatatccggtcactagcatccatggtgatcgaacacagcgtgaacgagaagatgctttacgtcgttttcgagctggtaaagcgccaatacttgttgctactgctgttgctgcccgtggacttgatattccacatgttaaacatgtgataaatttcgatttacccggagatgtagaagaatatgttcatcggatcggtcgtacaggtcgtatgggaaatttaggtttagcaacatcatttttcaacaataagaatattaacttagtacgtgacttggtatctctcttagttgaagctaatcaagaacttccaccttggttagacgatatgtttagtgaagcaagatattccggaggtggatctcgtcgtgccggaagtactaaaggccgatttagcggtggatttggtgctagagattatcgtcagcaacctagctccgggtctgctcgcaataatggttcctccaataggcctggtagttatggaggaagttacggaaattatggaggtaactataacaattcatcgtataataattctgctaacaacgtcaacagtaatgatcctgattggtgggacaagtaaatcattatatcaccatctctattttcactcttttatcattattactactgtacacgtaaattcaaatatatgtaagaaagacacgtacgacatacatacatcggatacaacacgcacgtatttgcgcgtgtatattacgtatacaccaaaaaaaaaaaaaaaaaaaaaaaaaagacagtatcacgtatataattacaaatcacgttcgctgactgcctgtgcactacacaattttcaaactaaaaaggaaaaaaaaataattgtgtttattcaattccataaaaataaataatacttttattcgcgtgcga

SEQ ID NO: 77035 - protein, 701 aa, Apis mellifera; identical to SEQ ID NO: 65405

SEQ ID NO: 77036 - DNA, 2100 bp, Tribolium castaneum
  CDS (1)..(2100)
atgagtaatgcacccaaccaaaatggatcaggtctagagcagcagtttgctggtctggacttgcagagtcgcgcacccagcggccgttacgtgcccccgcacttgcgtaacaaacagagttcagccgaaagtagctacgatagagatagaggcgaatccagaggcggaagcggaagaagcaactacagcagtagaggcggcggaagagataaccgcgcaggagactactccagcttcaacactaggaatcgccgtgacaatttccagaatggcgagacctttgagcgagaggagtggggtcgaggtggcggcggcggcggcggcggtcgccaacaggagcgggagcgtgacttgccccgtaatgatcggtggcaggaaccagagaagcctcgcgaaggaggcggcggtcgttggagcgacaaccgcaacgagaatcgcggaggcggtggtggaggcggcggcggaggcggtcgttggaacgacaaccgagaccgtcacaacgagaacgattggaccgttccgatgccgagagacgaacgtctcgaacaggagctcttcggcacgggcaatacgggcatcaacttcagcaagtatgaagatatacctgttgaagcaaccggggacaaagtcccgcgccacattacatcttttgaggaagtacagttgactgagatcatacggaacaacataaacttagcacgttatgatactccgactccagtacaaaaatacgcaattccgataattgtgggcaagcgagatgtgatggcttgcgcccagactgggtctgggaagactgcagcgtttctagtgccgattttgaaccaaatgtacgaacatggacccccgaatattactcacggacgcagcagaaggaagcagtacccccttgggctggtattggcaccgacaagagaactcgccacccagatctacgacgagagcaagaagttcgcctacaggtcgcgcgtacgcccctgcgttgtttatgggggcgctcatattggcgaccagatgcgcgatttggaccgcggctgccacctcctggtggccacccccggccgcctcctcgacatgatcgaccgcggccgcatcggccttgactactgtcgttacttggtccttgacgaagccgatcgtatgctcgacatgggtttcgagttgcaaattcgtcgaatcgtcgagaaagaaacgatgccgaagaccggcgagcgtcaaaccctcatgttttcggcgactttcccctcgccaattcaaatgctcgcacgcgattttctcgacaattacattttccttgctgtgggtcgtgtcggctccacctccgagaacatcacccagaaggtggtttgggtcgaagagcacgacaagcgatcgttcctccttgatcttctcaatgcggccgaaatgagccaaccgtcggccgaaagcttgactcttgttttcgttgaaacgaaaaaaggggccgactctttggaggagttcctccactttgagggttatcccgtgacgtcgattcacggcgatcggagtcaaagagagcgtgaggatgctttgaggcaattccgttcggggaataccccgattttggtggcaacagccgtggcggcgagagggttggatatcccccatgtcaaacatgttatcaattttgatttgccttcggatatcgaagagtacgttcatagaattgggcgtacgggaagaatgggtaatttgggcttggcaacgtcgttcttcaatgatagaaacaggaatttggcgagtggtttattggatttgttgattgaggccaagcaggagtacccgagttggttggagggcgtagcagccgacgggcgaatgcccagttcgggacgcagaggcgggaagagccggtatggaggtgggggaggaagcagttttgggggaagagattataggcaacagtccggggggatgtcccgaaatcagagatctggaggcggtggaggatatggaaataacgggttcggaaacaatggaggtggccactacggcggcctcgaccgcggcggcaatttcggcggtaactacaactcgaactcgaactccaacagtcgcgacgactggtgggagaattag

SEQ ID NO: 77037 - protein, 699 aa, Tribolium castaneum
MSNAPNQNGSGLEQQFAGLDLQSRAPSGRYVPPHLRNKQSSAESSYDRDRGESRGGSGRSNYSSRGGGRDNRAGDYSSFNTRNRRDNFQNGETFEREEWGRGGGGGGGGRQQERERDLPRNDRWQEPEKPREGGGGRWSDNRNENRGGGGGGGGGGGRWNDNRDRHNENDWTVPMPRDERLEQELFGTGNTGINFSKYEDIPVEATGDKVPRHITSFEEVQLTEIIRNNINLARYDTPTPVQKYAIPIIVGKRDVMACAQTGSGKTAAFLVPILNQMYEHGPPNITHGRSRRKQYPLGLVLAPTRELATQIYDESKKFAYRSRVRPCVVYGGAHIGDQMRDLDRGCHLLVATPGRLLDMIDRGRIGLDYCRYLVLDEADRMLDMGFELQIRRIVEKETMPKTGERQTLMFSATFPSPIQMLARDFLDNYIFLAVGRVGSTSENITQKVVWVEEHDKRSFLLDLLNAAEMSQPSAESLTLVFVETKKGADSLEEFLHFEGYPVTSIHGDRSQREREDALRQFRSGNTPILVATAVAARGLDIPHVKHVINFDLPSDIEEYVHRIGRTGRMGNLGLATSFFNDRNRNLASGLLDLLIEAKQEYPSWLEGVAADGRMPSSGRRGGKSRYGGGGGSSFGGRDYRQQSGGMSRNQRSGGGGGYGNNGFGNNGGGHYGGLDRGGNFGGNYNSNSNSNSRDDWWEN

SEQ ID NO: 77038 - DNA, 2481 bp, Herminiimonas arsenicoxydans
  CDS (1)..(2481)
atgtctgacccatccttccccctattttccgaccttaacctgagcgaaccgctgctgcgcgtgctgaaagagctgggttacgaggcgccgtcgcctatccaggcggccacgatcccgctgttgctgaataacagcgatgtgctggggcaggcgcagaccggtaccggcaaaacggcggcttttgccctgcctatcctgtcgcgtatcgatatcaaacagaccacgccgcaggctttggtgctggcgcctacgcgtgagttggcgatccaggtggcggaggcttttcagcgttatgcgtcgcatattcccggttttcacgtgttgccgatttatggcggccagagttatggcgcgcaactgagcgccttgcgtcgtggcgtgcatgtggttgtcggtacgccgggtcgcgtgatcgaccatctggaaaaaggctcgctcgatctgtcgaaactgaaaacgatggtgctggatgaagccgacgagatgttgcgcatgggctttatcgacgatgtggaaacgatcctgcaaaaaacgccggaagcgcgtcagacagcgttgttctcggccaccatgccatccgccatcaagcgtatcgctaccacttatctgcgcgatccggagttgattaccgtcgcggccaagactggcaccgcagacaacattcgccagcgttactggctggtcagcggcatgcagaagctcgaagcgctgacgcgcatcctcgaagcggaaacttttgacggcatgatcatcttcgcgcgtaccaaattgggtaccgaagaactggccggcaaattgcaggcacgcggtttctccgctgcggcgatcaatggcgatattcaacagcagcaacgcgagcgcacgattcagcaactgaaggacggcaagatcgatattctggtggcgactgacgttgccgcccgcggtctggacgttgagcgcatcagccacgtcattaactacgacgtgccacacgatccggaaagctatacccatcgcatcggccgtaccggccgcgccggacgcagcggcgaagcgattctgtttatcgcgccgcgtgaacgcaatctgctgaaagccatcgagcgcgcgacgcgccagcctatcgccgtgctggacttgcctagcgtcgaggtcgtcaacgatgtgcgtatctcgaagttcaaggaccagattgcagaaacgattgcagccggtggactggaagtgttccattcgctgattgaagattacgaacgcgaacacaatgtgcctgcagtggaaatcgctgcagcactggccaagatggcgcgcggcgatgtgccgctgctgatcgataaaaacaaaccggcaccgcgtgagtcgtggggcagcgagaagcctgtatctggcggtcgctttgaacgtgcggaacgtttcgagcggaatgacagaccagagcgctcggaacgatttgagcgtcctgaacgtacagaacgttcggctgcgccgcgcaaggaacgtgtcccgcgtgcgccggatgaaggcatgcaaactttccgtatcgaagtcggccatgcgcacggcgtcaagccgggcaatatcgtcggcgcgattgcaaatgaagcgaatctcgactccaaatacataggtcgcatcgaaatctacgacgattacagcacgctcgatctgccgaacagcctgccgtccgacatgctcgatcacctgaaaaaagtctgggtcgccggtcagcaattgaacattactgccgatagcgaagccgcatccgcaccgacagccaaacctgcgccaaaaaaatcagagtcgcccgcacaagtgccattctccgaccgaccggcgcgcagcgattttgccgcgcattttgacaagcctgcgcagtcggaatcgagagaacgtcctgcacgcacggaacggccggcacctgcctcaccgctggcagcggcagccactccgaagaaggaacatttcgagagcgatgagccgttagtaaaagagccgggcgcgcaaaagagagaacgcactgcacagaaaaaagcgggcgcggtggatatggaagctttccgcatcgagatcggtcatgcgcacggcgtcaagccagccaacatcgtcggcgccattgccaatgaagcagggctggaagcgaagtacatcggccgcatcgagatttttgaaaagcacagcttgctggatctgcctgccggcatgccggacgaagtgttcgatcaactcaaaaatgtttccatcgccggtcagcctttgcgcatcagccattccggcttgcgcccgatggaagaaaagaccatggacaagcgcgtgaccctggcgccgccaagcaagggtggcgatcgccgcgtggccgacaaggcgcgtggcaacaagccggtatcgaaacgtgtcgccgtcgctagcggcaagtccttcgatgcaccgcgttctgcgtccaagccatcgaccggcccttccggcaagccgatgatcaagctgggcactaaaaggaagtaa

SEQ ID NO: 77039 - protein, 826 aa, Herminiimonas arsenicoxydans
MSDPSFPLFSDLNLSEPLLRVLKELGYEAPSPIQAATIPLLLNNSDVLGQAQTGTGKTAAFALPILSRIDIKQTTPQALVLAPTRELAIQVAEAFQRYASHIPGFHVLPIYGGQSYGAQLSALRRGVHVVVGTPGRVIDHLEKGSLDLSKLKTMVLDEADEMLRMGFIDDVETILQKTPEARQTALFSATMPSAIKRIATTYLRDPELITVAAKTGTADNIRQRYWLVSGMQKLEALTRILEAETFDGMIIFARTKLGTEELAGKLQARGFSAAAINGDIQQQQRERTIQQLKDGKIDILVATDVAARGLDVERISHVINYDVPHDPESYTHRIGRTGRAGRSGEAILFIAPRERNLLKAIERATRQPIAVLDLPSVEVVNDVRISKFKDQIAETIAAGGLEVFHSLIEDYEREHNVPAVEIAAALAKMARGDVPLLIDKNKPAPRESWGSEKPVSGGRFERAERFERNDRPERSERFERPERTERSAAPRKERVPRAPDEGMQTFRIEVGHAHGVKPGNIVGAIANEANLDSKYIGRIEIYDDYSTLDLPNSLPSDMLDHLKKVWVAGQQLNITADSEAASAPTAKPAPKKSESPAQVPFSDRPARSDFAAHFDKPAQSESRERPARTERPAPASPLAAAATPKKEHFESDEPLVKEPGAQKRERTAQKKAGAVDMEAFRIEIGHAHGVKPANIVGAIANEAGLEAKYIGRIEIFEKHSLLDLPAGMPDEVFDQLKNVSIAGQPLRISHSGLRPMEEKTMDKRVTLAPPSKGGDRRVADKARGNKPVSKRVAVASGKSFDAPRSASKPSTGPSGKPMIKLGTKRK

SEQ ID NO: 77040 - DNA, 1398 bp, Burkholderia vietnamiensis G4
  CDS (1)..(1398): transl_table=11
atgacgcagcccgccgccacgccgttcagcgcgctgccgctgacgcccgcgacgctcgcgaacctcactcagctcggctacgtcgacatgacgccgatccaggccgcgagcctgccgatcgcgctggccgggcacgacctgatcgcgcaggcgaagacgggcagcggcaagaccgccgcattctcgctcgcgctgctgtcgcgcctcgacgcgcgtcgcttcgacgtgcaggcgatgatcctgtgcccgacgcgcgagctcgccgaccaggtcgcgcaggaagtgcgccgcctcgcgcgcgccgaggagaacgtcaaggtgctgacgctgtgcggcggcacgccgatgcgtccgcaggcgcagagcctcgagcacggcgcgcacgtcgtcgtcggcacgccgggccgcatcatggaccacctcgagcgcggcaacctgaagctcgacgcgctgaacacgctcgtgctcgacgaagccgaccggatgctcgacatgggcttcttcgacgacatcgtgaaagtcgcacggatgtgcccggcgacgcgtcagacgctgctgttttccgcgacctatccggacggcatcgcgaagctgagccagcaattcctgcgcaacccgaaggaagtgaagctcgcggagcgccacgacgacagcaagatccgccagcgcttctacgaagtgacggacaccgagcgtctgcatgcggtcggccagttgctgaaccactaccggccggtcagcacgatcgcgttctgcaacaccaagcagcaatgccgcgacctgctcgacgtgctgcacgcgcagggcttccatgcgctcgcgctgcacggcgagctcgaacagcgcgaacgcgatcaggtgctgatccagttcgcgaaccgcagctgctcggtgctcgtcgcgaccgacgtcgccgcgcgcgggctcgacatcgcgcagctcgaggcggtgatcaacgtcgacgtgacgcccgaccccgaagtgcacgtgcaccggatcggccgcaccggccgggccgaccaggaaggctgggcgctgagcctggcgagcatggacgagatgggccgggtcggcgcgatcgagcaggcgcagaagcgcgacgtcgaatggcattcgctcgcggaactgaagcccgccgacgaaggcacgctgctgccgccgatggaaacgctgcagatcctcggcggacgcaaggacaagatccgcccgggcgacgtgctcggcgcgctgaccggcgatgccggcttcgacggcaagcagatcggcaagatcaacgtgacggagttctcgacctacgtcgcgatcgagtgcggcgtcgcgcgcgacgcgctgcgcaagctcaatgccgggaagatcaagggcaagcgcgtcaaggtgcgcctgatggacgacgaatga

SEQ ID NO: 77041 - protein, 465 aa, Burkholderia vietnamiensis G4
MTQPAATPFSALPLTPATLANLTQLGYVDMTPIQAASLPIALAGHDLIAQAKTGSGKTAAFSLALLSRLDARRFDVQAMILCPTRELADQVAQEVRRLARAEENVKVLTLCGGTPMRPQAQSLEHGAHVVVGTPGRIMDHLERGNLKLDALNTLVLDEADRMLDMGFFDDIVKVARMCPATRQTLLFSATYPDGIAKLSQQFLRNPKEVKLAERHDDSKIRQRFYEVTDTERLHAVGQLLNHYRPVSTIAFCNTKQQCRDLLDVLHAQGFHALALHGELEQRERDQVLIQFANRSCSVLVATDVAARGLDIAQLEAVINVDVTPDPEVHVHRIGRTGRADQEGWALSLASMDEMGRVGAIEQAQKRDVEWHSLAELKPADEGTLLPPMETLQILGGRKDKIRPGDVLGALTGDAGFDGKQIGKINVTEFSTYVAIECGVARDALRKLNAGKIKGKRVKVRLMDDE

SEQ ID NO: 77042 - DNA, 1539 bp, Burkholderia vietnamiensis G4
  CDS (1)..(1539): transl_table=11
atgagcgcaggcccggccggcctgacgcacgatgtccccgccgcgccttttgagcgaaacgccaccatgtccgattctgtcgccaagcctgccgacgcaaccttcgatcaattcggcctcgcgcccgatatcctgaaagccatcgtcgagcagggctatacgacgccgacgccgatccaggcgcaggccattccggtcgtgctcgccggccgcgacgtcatgggcgccgcgcaaacgggcaccggcaagaccgcgagtttctcgctgccgatcatccagcggctgctgccgcacgccagcacgagcgcgtcgccggcgcgccatccggtgcgcgcgctgatcctcacgccgacgcgcgagctcgccgaccaggtcgccgcgaacgtgcatgcgtacgcgaagcacacggcgctgcgcagcgcggtcgtgttcggcggcgtcgacatgaatccgcagatggccgagctgcgccgcggcgtcgagatcctgatcgcgacgccgggccgcctgctcgatcacgttcagcaaaagacggcgaacctcggccaggtccagatgctcgtgctcgacgaagccgaccggatgctcgacatgggcttcctgcccgacctgcagcgcatcctgaacctgctgccgaaggagcgtcagacgctgctgttctccgccacgttctcgccggaaatcaagaagctcgcgtcgacctacctgcgcaacccgcagacgatcgaagtcgcgcgcagcaactcgaccaacgcgaacgtcacgcagatcgtctacgacgtcgccgaaggcgacaagcaggcggccgtcgtgcagttgctgcgcgggcgcgggctcaagcaggtgatcgtgttctgcaacagcaagatcggcgcgagccggctcgcgcgcaatctcgagcgcgacggcgtggtggcctcggcgatccacggcgacaagtcgcagatcgagcggatgcaggcgctcgacgcgttcaagcgcggcgagatcgaggcgctggtcgcgaccgacgtggccgcgcgcgggctcgacatcgccgaactgccggccgtgatcaacttcgacctgccgttcaacgcggaagactacgtgcaccggatcggccgcacgggccgcgccggggcgacgggcgacgcgctgtcgctgtgcagcccgaacgagcgcaagcagctcgccgatatcgagaagctgatcaagcgtccgctcgaagtgcagacgctcgcactcgacaagccggcccgccatcgtcacgacgagcgcaatgagcgcggcgaacgtagcgagcgcggcggccgtcgcgaccgcgacgagcatcgcggcgcgtcggcgcgtcgttcaggcagcgccgagcgcggtggtcatcatcgccgccacgacgcgccggtcgacgattttttcctgaagccgtacgaaccgtcgacgccggcgcagcaacccgaggagacgacgtccgtccagcagcccgagaagaaagggccgaagcggcaggtcgccgcgctgctcggcgggttcggcatgccgcgcaagccttccgcataa

SEQ ID NO: 77043 - protein, 512 aa, Burkholderia vietnamiensis G4
MSAGPAGLTHDVPAAPFERNATMSDSVAKPADATFDQFGLAPDILKAIVEQGYTTPTPIQAQAIPVVLAGRDVMGAAQTGTGKTASFSLPIIQRLLPHASTSASPARHPVRALILTPTRELADQVAANVHAYAKHTALRSAVVFGGVDMNPQMAELRRGVEILIATPGRLLDHVQQKTANLGQVQMLVLDEADRMLDMGFLPDLQRILNLLPKERQTLLFSATFSPEIKKLASTYLRNPQTIEVARSNSTNANVTQIVYDVAEGDKQAAVVQLLRGRGLKQVIVFCNSKIGASRLARNLERDGVVASAIHGDKSQIERMQALDAFKRGEIEALVATDVAARGLDIAELPAVINFDLPFNAEDYVHRIGRTGRAGATGDALSLCSPNERKQLADIEKLIKRPLEVQTLALDKPARHRHDERNERGERSERGGRRDRDEHRGASARRSGSAERGGHHRRHDAPVDDFFLKPYEPSTPAQQPEETTSVQQPEKKGPKRQVAALLGGFGMPRKPSA

SEQ ID NO: 77044 - DNA, 1329 bp, Dichelobacter nodosus VCS1703A; identical to SEQ ID NO: 65440
  CDS (1)..(1329): transl_table=11

SEQ ID NO: 77045 - protein, 442 aa, Dichelobacter nodosus VCS1703A; identical to SEQ ID NO: 65441

SEQ ID NO: 77046 - DNA, 1200 bp, Synechococcus sp. WH 7803
  CDS (1)..(1200): transl_table=11
ttggaagcactccaggccaagggctactcccacccatccccgattcaggcgcaggcgattccggcagtgatcgatggcagggatgtgatggcagctgcacaaacgggtacggggaagacagctggtttcaccctgccggtgctggagagattgcgccatggcaagcgcgcaggacgggcccagattcgcgctcttgtgctgacgcccaccagggaacttgctgctcaggttttggagaacgtgaaggcctacagcaggcatctgcctctccgcagcgatgttgtgtttggtggcgtaaaggccaacccacagattgatcgcttgcgtgggggggttgatctgcttgtggccaccccagggcgtttgcttgatcttcaccaacagggtgctctgcgctttgaccagctcgaatgtctcgtgctggatgaagcggatcgcatgctcgatatgggcttcatccatgacatccgccgcctgatcaggctgatgcctgcgaagcgccaaacgcttcttttttcagccacgttcagtgcgccgatccgcaagttggcatctggcctcctccatgatcctgtgcatcttcaggtcacgcctgaaaatcaaacggcgcgatcggtggagcaagtggtgcacccctgcgacatggcgcgcaagagcgatttgttaagccacctcattcgcacgggcgaatggcgtcaggtgcttgtgttttcacgcacgaagcatggcgccaatcgggtggctgaccgtctcaacaaggaggggcttgcggcggcagccatccatggcaacaagagtcagggggcgcggacccgtgccttgcagggtttcaagcagggaagcgtccgcgtgcttgttgccacggatatcgccgccagaggcattgatatccagcagctcccccatgttgtgaacctcgatctgccgaatgtggcggaagactatgtgcatcgcattggccgtaccggccgtgccggggaaacggggcatgccgtgtcccttgtggccgccgaagaagcgctactgctgaaagcgatcgagcggctgacgggagaagagctgacgcgacagaccgttgatggctttgaacccaccgtgctcaaagctccccctctggatctcagcggaggccgcagacgctcacccgggaaacccagagcgcgcagggcaccctcacccgttcgtggtcgtcatcgttaa

SEQ ID NO: 77047 - protein, 399 aa, Synechococcus sp. WH 7803
MEALQAKGYSHPSPIQAQAIPAVIDGRDVMAAAQTGTGKTAGFTLPVLERLRHGKRAGRAQIRALVLTPTRELAAQVLENVKAYSRHLPLRSDVVFGGVKANPQIDRLRGGVDLLVATPGRLLDLHQQGALRFDQLECLVLDEADRMLDMGFIHDIRRLIRLMPAKRQTLLFSATFSAPIRKLASGLLHDPVHLQVTPENQTARSVEQVVHPCDMARKSDLLSHLIRTGEWRQVLVFSRTKHGANRVADRLNKEGLAAAAIHGNKSQGARTRALQGFKQGSVRVLVATDIAARGIDIQQLPHVVNLDLPNVAEDYVHRIGRTGRAGETGHAVSLVAAEEALLLKAIERLTGEELTRQTVDGFEPTVLKAPPLDLSGGRRRSPGKPRARRAPSPVRGRHR

SEQ ID NO: 77048 - DNA, 1548 bp, Candidatus Protochlamydia amoebophila UWE25
  CDS (1)..(1548)
atgacccaagattcaattattgagcaagatttagcttttgagcaatttggtttaaaagcccccattttacaagcattgcaagaagctggttttaaaatagcaagtcctattcaaaaacaagcaattcccgtcgtattagcagggcatgatgtagttgctcaggcgcacacaggaacaggaaaaacagctgcatttggtttgccagctttacacctaatccatgataacccaggctctcaacttttagtattaacccccacgcgtgaattagccagtcaagtaagtgatgagttatttcgtttagggaggcatttaggaattcgtacagcaacaatttgtggcggtaaatcctttagacctcaaattgaagctttacagcgcggggttcaagttattgtggctacacccggtcgattacaagatcttttagaatctgatagcttacctgattttcggcccgctattgtcgttttagatgaagcggatgaaatgttagacatgggatttttagaagcaatccaaagaatcttcacttttttaccagcaaagagacaaactttacttttttcggcgacaatgccctcagctatccaaaaattagctcaccaaatattaaaaaagcctattttcatcagcgtcacgcaaaaagagacgacaaataaagatatcaagcaagtttattatgttattcgtgaagatgaacgcgacgatgcaattttacgtttgttagacagtgaagaacctgctaaatcaattattttttgccgaacaaaaaaagatgttgatcgtttatcaacaacgttagtggctaatggctatcatgctcgaggtttacatggtgatatggaacaaccacaacgagaagaggttattcgccattttcgttctgaacaaattcgtgttttagtcgcaactgacgtggctgctagaggtttaagtgtttcagacgtttctcatgtctttaattaccatctcccttttgatcctgccagctatgttcatagaattgggcgtacaggtagagcgggaaataaaggggtggcgagtaccttcgtcacacttagagaatggcgagaatttcaaagatatgaaaaagtgactggtgctcctattaatcgagaaattattccaactcttgaagatgtaaaaaagttaaagagacaaaaacttgtaagtcgaattcaaaatcaaccccttcatcaagaaactgaattagttttagaattgatgaaagaagtcgatcattcaactttggtctctaagtttatttcatttgttttggagcaagagactattcaaggtccagatcgaattggtgtagagccaaggggtcaagaaagggatacgagagggcaacgcactgacaaatttaatgatgagcgtcgccgagctaatcgaccccaacaaaaatttgggaaagctaacgggttcaaaaaagagcatgataaaggctttaaaaaaacttttgggcaaaaaaatcgtgcaagtcacccaagtaaagtacccagttcagcagctggttttaaagaacgtacacgttctatttaa

SEQ ID NO: 77049 - protein, 515 aa, Candidatus Protochlamydia amoebophila UWE25
MTQDSIIEQDLAFEQFGLKAPILQALQEAGFKIASPIQKQAIPVVLAGHDVVAQAHTGTGKTAAFGLPALHLIHDNPGSQLLVLTPTRELASQVSDELFRLGRHLGIRTATICGGKSFRPQIEALQRGVQVIVATPGRLQDLLESDSLPDFRPAIVVLDEADEMLDMGFLEAIQRIFTFLPAKRQTLLFSATMPSAIQKLAHQILKKPIFISVTQKETTNKDIKQVYYVIREDERDDAILRLLDSEEPAKSIIFCRTKKDVDRLSTTLVANGYHARGLHGDMEQPQREEVIRHFRSEQIRVLVATDVAARGLSVSDVSHVFNYHLPFDPASYVHRIGRTGRAGNKGVASTFVTLREWREFQRYEKVTGAPINREIIPTLEDVKKLKRQKLVSRIQNQPLHQETELVLELMKEVDHSTLVSKFISFVLEQETIQGPDRIGVEPRGQERDTRGQRTDKFNDERRRANRPQQKFGKANGFKKEHDKGFKKTFGQKNRASHPSKVPSSAAGFKERTRSI

SEQ ID NO: 77050 - DNA, 1599 bp, Desulfovibrio vulgaris subsp. vulgaris str. Hildenborough; identical to SEQ ID NO: 65442
  CDS (1)..(1599): transl_table=11

SEQ ID NO: 77051 - protein, 532 aa, Desulfovibrio vulgaris subsp. vulgaris str. Hildenborough; identical to SEQ ID NO: 65443

SEQ ID NO: 77052 - DNA, 1560 bp, Listeria monocytogenes str. 4b F2365
  CDS (1)..(1560): transl_table=11
atgacattgacaaaattttcggagttcggactggacgaaaaaattgtaaaatcagtaaatcggatggggtttgaagaagcaacaccaatccaagaaaagacaattccactaggactagcaggtaaagacttaatcgggcaagcacaaacaggtactggtaaaacagccgcttttggtcttccaatgattcacaaaattgaccaaaagagtaacaacgtacaagctttaattattgctccaacacgtgaacttgcaatccaagtttctgaagagctttataaacttagctatgacaaacatgtacgtgtgctagcggtttacggtggtagcgatatcagccgtcaaatccgttcacttaagaaaaacccacaaatcgtagttggtacgccaggacgtattttggatcatattaaccgtcgcacactgaaactagaccacgtggaaacacttgtactagatgaagcagacgaaatgctaaacatgggcttcattgatgatatcgaaactattctaaaagaagtaccagcagaacgtcaaactttactattttctgcaacaatgcctgatccaattcgccgtatcggtgaacgtttcatgcatagcccagaacttattcgcattaaagcgaaagaaatgactgcactattaattgaacaattcttcgtaaaagtgcatgaaaaagaaaaatttgacgtattatctcgtttattagacgttcaagcaccggaactagctattgttttcggtcgtacgaaacgtcgtgtagacgaactatctcgcgcgcttgatatgcgtggttacgtggctgaaggtatccacggtgacttgacgcaagcaaaacgtatgagtgtactacgcaaatttaaagaaggaaaaattgatgttctagttgcaacagacgtagcagctcgtggacttgatatttccggcgtaacacatgtatataactatgatattccacaagatccagaaagctatgttcaccgtatcggtcgtactggtcgtgctggtaaagaaggtatggcgattactttcgtacaacctcgtgaaatgggttatttacgtattgtggaagaaactacgaaaaaacgtatgcaaccacttcaagctcctacttgggacgaagcatttgcaggccaattacgcgtagcaactgaaaaaattcaagaagcaatcacagaagaaaacttagctgactacaaaacgtttgctaacgaacttcttgaaaaatacgatgcaactgacatcgcagcagcaatgcttaaaatgttagcgaaagagccagacaaaactcctgtccatattactgaagagcgtccattaccatcccgtggtggcggtggctacaaaggtaaaaatggtaaaggcggcaaaggtggcggctatcgcggcggaagcggcaaaggcggaagctaccgcgatcgtaacaacagcggcaaaggtcgtcgtagcggcggcggaagcggttctggcggtggtggcaatcgtgatcgtcgtagtggcggcggagaacaacgcagcggcggcaacaaaggcaactactcacaaaaatctaaataa

SEQ ID NO: 77053 - protein, 519 aa, Listeria monocytogenes str. 4b F2365
MTLTKFSEFGLDEKIVKSVNRMGFEEATPIQEKTIPLGLAGKDLIGQAQTGTGKTAAFGLPMIHKIDQKSNNVQALIIAPTRELAIQVSEELYKLSYDKHVRVLAVYGGSDISRQIRSLKKNPQIVVGTPGRILDHINRRTLKLDHVETLVLDEADEMLNMGFIDDIETILKEVPAERQTLLFSATMPDPIRRIGERFMHSPELIRIKAKEMTALLIEQFFVKVHEKEKFDVLSRLLDVQAPELAIVFGRTKRRVDELSRALDMRGYVAEGIHGDLTQAKRMSVLRKFKEGKIDVLVATDVAARGLDISGVTHVYNYDIPQDPESYVHRIGRTGRAGKEGMAITFVQPREMGYLRIVEETTKKRMQPLQAPTWDEAFAGQLRVATEKIQEAITEENLADYKTFANELLEKYDATDIAAAMLKMLAKEPDKTPVHITEERPLPSRGGGGYKGKNGKGGKGGGYRGGSGKGGSYRDRNNSGKGRRSGGGSGSGGGGNRDRRSGGGEQRSGGNKGNYSQKSK

SEQ ID NO: 77054 - DNA, 1413 bp, Listeria monocytogenes str. 4b F2365
  CDS (1)..(1413): transl_table=11
atgaataatttaaaattaagtgaagaaattaaaagagcgattaatgaactaggatatacagaagcaacacccgttcaaaaagcggtaattccagttgccttaacaggagaagatattgttgctaaatcacaaactggtagtgggaaaacagcagcattcgctattcccattgcagaacagattgaatgggaagaaaataagccacaagcactaatcatcgttccaacacgagaacttgcaatgcaagtcaagacagaatgtacgaatattggacgatttaaacgtgtcaaagctgcagcaatatacggacaatcaccatttgcgaaacaaaaattagaactaagccaaaaaaatcatatcgtcgttggtacgccaggtcgcctactggaccatattgaaaaaggatcactgaatgtcgacaaggttgcccatttagttttagatgaagtagatgaaatgttaagcatgggatttattgatcaagtcgaagatattcttagccgtttaccaaaacagcgccaaaatctatttttctcagcaactatgccagaagaaatgcaagatttgattaaacgctaccaagatgatccaatggtaatcgaaatggcatcggaaaaaacaaaccctatcttccacgtggagatgcaaacagataataaagaaaaaacgctaaaagatgttttgattacagaaaatccggatagcgcaataatattttgcaatacgaaaaatcaagtcgatgaactcaccgatttacttgatgtaaaagttagtaaaattcatgggggtttaagacaagaagaccgtttccgagcaatggatgattttaaaagtggcaaatcccgtttcttaattgcgacagatgtggcagggcgcggaatagatgtggataatgtatcgttagtcattaactacgatttaccaattgaaaaagaaaattatgtacatcgtatcggtcgtactggtcgcgctggcaaaagtggtaaagctattagtttcgtgaaaacaaatgaaaatccacttttgcgtgacatagaagaaatgctcgatgttacaatcgaaaaaaaacgtaaaccgacagtgatagaagtgaaagctaacgaagaagctttccgcaaaaaacaacaaaagcgcccaacaatcaaaaaagctcgtggggaaaaattaaataaaaacattatgaaactgtattttaatggtggaaaaaagaaaaaaattcgtgcagtagattttgttggaactatttctaaattagaaggaattacggccgaagatatcggaattattacgattgaagaccatgtttcttttgttgaaattttaaatggaaaaggtccggcagtactggaaatgatgcgctctcgtaaagtaaaaggtagacgcctgaaagtaaacgaggccagaaaacgataa

SEQ ID NO: 77055 - protein, 470 aa, Listeria monocytogenes str. 4b F2365
MNNLKLSEEIKRAINELGYTEATPVQKAVIPVALTGEDIVAKSQTGSGKTAAFAIPIAEQIEWEENKPQALIIVPTRELAMQVKTECTNIGRFKRVKAAAIYGQSPFAKQKLELSQKNHIVVGTPGRLLDHIEKGSLNVDKVAHLVLDEVDEMLSMGFIDQVEDILSRLPKQRQNLFFSATMPEEMQDLIKRYQDDPMVIEMASEKTNPIFHVEMQTDNKEKTLKDVLITENPDSAIIFCNTKNQVDELTDLLDVKVSKIHGGLRQEDRFRAMDDFKSGKSRFLIATDVAGRGIDVDNVSLVINYDLPIEKENYVHRIGRTGRAGKSGKAISFVKTNENPLLRDIEEMLDVTIEKKRKPTVIEVKANEEAFRKKQQKRPTIKKARGEKLNKNIMKLYFNGGKKKKIRAVDFVGTISKLEGITAEDIGIITIEDHVSFVEILNGKGPAVLEMMRSRKVKGRRLKVNEARKR

SEQ ID NO: 77056 - DNA, 1446 bp, Bacillus thuringiensis serovar konkukian str. 97-27
  CDS (1)..(1446): transl_table=11
atgagtaaaaaaggttttagtaattatgcattaagtaaagaagtaagacgagcacttactggtttaggatatgagcatccaacagaagtacaaggagaggttattccagttgcattacaaaagaaggatcttgttgtaaagtcgcaaacaggaagtggaaaaacggcttcgttcggtataccactttgtgaaatggtagagtgggaagagaataaaccacaagcgttagttttaacaccaacgagagaacttgctgttcaagtgaaagaagatattacaaatatagggcgattcaaaagaattaaggcggctgcaatttatgggaaatccccatttgcacgtcaaaaattagaactaaagcaaaagacgcatattgtagtagggactccaggacgtgtgttggatcatattgaaaaagggaccctttcattagagcgattgaaatatttagtgattgatgaagcagatgaaatgctaaacatgggctttatcgaccaagtagaggcaattattgatgaattacctacaaaaagaatgacaatgctattttcagcaaccttaccggaagatgttgaaaggttatcccgtacgtatatgaacgcaccaactcatattgaaattaaagctgctgggattacaacagataaaattgaacataccctttttgaagtgagggaagaagagaagttgtcacttcttaaagatgtaacaacaattgaaaatccagacagctgcattattttttgtcgtacacaagaaaacgtagatcatgtatatagacagctaaatcgagttaattacccttgcgataaaatacatggtggcatggtgcaagaaaatcgttttggggtgatggatgattttagaaaaggaaagttccgttatttagtagcaacggatgtagctgcgagaggaattgatattgataatattacacatgttattaattatgatattccattagagaaagaaagttatgtacaccgtacaggaagaacaggacgagctggtaatagcggaaaggccattacatttataacgccttatgaagatcgatttttagaagagattgaggcgtacatcggttttacaattcggaaggtaaacgcaccttcaaaagaagaagttatgaaagggaaagctgcatttgaagaaaaaatacacgctaaaccaactatcaagaaggataaaaatgcggatataaataaaggaattatgaaattgtactttaatggcggaaagaaaaagaaaattagggcagtagatttcgtcggtacaattgcaaaaatccaaggtgtttctgctgaagatataggtattattacaatacaagataatgtttcgtatgttgaaatattaaacggaaaaggaccacttgttttaaaggttatgagaaatacaacgataaaaggtaaacaattgaaagtccatgaggcaaataagtaa

SEQ ID NO: 77057 - protein, 481 aa, Bacillus thuringiensis serovar konkukian str. 97-27
MSKKGFSNYALSKEVRRALTGLGYEHPTEVQGEVIPVALQKKDLVVKSQTGSGKTASFGIPLCEMVEWEENKPQALVLTPTRELAVQVKEDITNIGRFKRIKAAAIYGKSPFARQKLELKQKTHIVVGTPGRVLDHIEKGTLSLERLKYLVIDEADEMLNMGFIDQVEAIIDELPTKRMTMLFSATLPEDVERLSRTYMNAPTHIEIKAAGITTDKIEHTLFEVREEEKLSLLKDVTTIENPDSCIIFCRTQENVDHVYRQLNRVNYPCDKIHGGMVQENRFGVMDDFRKGKFRYLVATDVAARGIDIDNITHVINYDIPLEKESYVHRTGRTGRAGNSGKAITFITPYEDRFLEEIEAYIGFTIRKVNAPSKEEVMKGKAAFEEKIHAKPTIKKDKNADINKGIMKLYFNGGKKKKIRAVDFVGTIAKIQGVSAEDIGIITIQDNVSYVEILNGKGPLVLKVMRNTTIKGKQLKVHEANK

SEQ ID NO: 77058 - DNA, 1923 bp, Acinetobacter sp. ADP1
  CDS (1)..(1923): transl_table=11
atgaaactctctatgagcaaaaattttgccgatttctctctacatgaatctttacaacaagcactacaggatcttggttttactagcccaacacctgttcaagaacaagcgattcctgcagctttagaaggtaaagaccttttagtttcaagccaaactggttctggtaaaactgcagctttcttgctgccaacattacattcacttgctggtcaagacacgttccttccatttaaagaacgtatgcgtgcagtgactcaaccgaatattcttgtcatttcaccaacgcgtgaattggctcagcaagtgagtcaggacgcgattgcacttgtacgtcacatgaaaggtgttcgtattgctgcaattatgggtggtatgccatttgcaaaacagatccagcaattaaaaggcgctcaggttgttgttgcaaccccaggtcgtttacttgatttggtcaatcgtcgtcaaattaaattagataaagttgatgctttaatcgtagacgaagcagaccgtatgctggatcttggtttctctgaagatcttgaagcgattagcgagttggctgccaaccgtaaacaaactttgatgttctctgcaacatttgcagatcgtattattcgtcttgcagaatgcatgatgcaagatccaatgcgtattgccattgaaacaggtcattcaaccaacactgacatcacccagactttacactggactgatggttttgagcacaagaaaaaattgctgactcattggttaagtgatgaaagcatggatcaagcagtggtgtttgcaagcacacaagaagatacagatatgctcgctgaagagcttgctgaagctggtcattcagtggttgcactacatggtgcgatgccacaaactgtacgtaaccgtcgtttacgcagtattcgtgaaggtaaagctaaaatcctggttgcaactgacgttgcagcacgtggtctagatgtaccaaccatttctcacgtgatcaactttggcttgccaatgaaacacgaagactatgtacaccgtattggtcgtactggtcgtgcaggccgtactggtcaagcgattacactagcaacttatcgtgagcgcggtaaaattcgtgcgcttgaagactatttagaagcacgtttaagcgtatctgaaattgaaggtcttgagccatctccacctcctgcacgttctggtcgtgatggtggtggtcgtggtcgcggtggtaatggtggtggtcgtcgtgacggtggtcgcggtggtttcggtggtggtcgtcgttttgaaggcgaaagtaatttcaaacgtcgtgatggtggtcgtgatgaccgtccaaaacgtagtttcgatgataaaccacgtggtgaacgtcctgcattcggtggcgaagatcgtccacgtcgcgagtttaattctgatcgcccacgtcgtgaaggtggttttgaagaccgtccaaaacgtagctttggtggtgaagaccgtccgcgtcgcgagtttaattcagaccgcccacgtcgtgaaggtggctttgaagaccatccaaaacgtgattttggtgatcgtccagcacgtcgtgaaggtggtttcaatgataagccacgtttcgattctaatgacgacaaccgtggtaatcgtgtagattacaaaccacgtcgtgaaggtagcttcggtgatcgtccaaaacgtgatttcggtgatcgtccagcgccacgtcgtgaaggtagcttcggtgatcgtccaaaacgtgatttcggtgatcgtccagcacgtcgtgaaggtggctttggtgatcgtccacaacgttcttttggcgatgaccgtccaaagcgtagctttggtggcgaagatcgtccacgtcgcgcgacacaagaagaatttttcaatcgtgagtctggcgaccgtcgccgtaagaacgatcgttaa

SEQ ID NO: 77059 - protein, 640 aa, Acinetobacter sp. ADP1; identical to SEQ ID NO: 65445

SEQ ID NO: 77060 - DNA, 1914 bp, Erwinia carotovora subsp. atroseptica SCRI1043; identical to SEQ ID NO: 65446
  CDS (1)..(1914): transl_table=11

SEQ ID NO: 77061 - protein, 637 aa, Erwinia carotovora subsp. atroseptica SCRI1043; identical to SEQ ID NO: 65447

SEQ ID NO: 77062 - DNA, 1581 bp, Symbiobacterium thermophilum IAM 14863
  CDS (1)..(1581): transl_table=11
atgacggaaacgaagttgacatttcgtgatttagcgttgtccgagaaggtgctgaaggcactggacgatatggggtttgaggagccctcgccgattcaggcgcaggcgattcccgcactgctgcagggcaaggacgtgatcgggcaggcgcagaccggcacgggcaagaccgcggccttcggcgtgcccatcgtcgagcggctggttcccggtcagcgggccgtgcaggcgctggtcctcaccccgacccgtgagctggcgatccaggtcgcggaggagatcaccaagatcgggcgccacgcgcgcgtgaagaccatcgccatctacggcggccagtccatcgagcggcagatccgctcgctccggttcggggtggacgtggtcatcggcacgccgggccggatcctggatcacctcggccggagcaccctggacctgtcccaggtgcggatggtggtcctggacgaggccgacgagatgctggacatgggctttatcgaggacatcgagaagatcctgcagaacacgcccgcggagcggcagacgctgctcttctccgcgaccatgccgccggagatccggcgtctggccgggcggtacatgcgggacccgatcacgatctcggtgacgccccagcagctcaccgtcccgcagatcgaccagtacttctgcgaggtgcggccgtcgttcaagaccgaggcgctcacccgcatcctggacatcgagaacgtggagcgggggatctgcttctgccgcaccaagaagggcgtcgacgagctggtggaggctctgcaggcccggggctaccaggccgagggcatccacggcgacatgaaccaggcgcagcgcaaccgcgtgatgagccggttcaaggagggctatatcgagctgctggtcgcgacggacgtcgccgcccgcgggctggacatctccgacgtgacccacgtcttcaactacgacatcccgcaggacccggagagctacgtgcaccgcatcggccgcaccgggcgcgccgggcgcaccgggaccgccatcacgctggtgacgccccgggagttcccgcagctccggctgatcgagcgggtgatcaaggcccggctgcagcgccggcccgtgccgaccctgagcgacgtggcggagaagcagcgggagcagctgaaggagcggctgatcaagatcctcgaggaggataagctcggcgagttcagggagctggccgaggacctcctggccgagtacgaccccagcgacctggtggccgccgccctgaagctggtctcgggcgagggcaagcccgcccagcaggcgcagatggagttcggcgacaccggcgccgaggcggggatggtccgcttattcctgaacgtcggccgcgctcaggcgatccagccggcggacatcgtgcggaccatcgcgcaggaggccaacattccgggctcgtccatcggcatcatcaacatctatgaccggttcacgttcgtggaggtgcccaaggaggtcgccgcccaggtgatgcaggcgatgcagggcgccacgatccgcgggtaccaggtcaacatggagcccgcaaagccgcgctag

SEQ ID NO: 77063 - protein, 526 aa, Symbiobacterium thermophilum IAM 14863
MTETKLTFRDLALSEKVLKALDDMGFEEPSPIQAQAIPALLQGKDVIGQAQTGTGKTAAFGVPIVERLVPGQRAVQALVLTPTRELAIQVAEEITKIGRHARVKTIAIYGGQSIERQIRSLRFGVDVVIGTPGRILDHLGRSTLDLSQVRMVVLDEADEMLDMGFIEDIEKILQNTPAERQTLLFSATMPPEIRRLAGRYMRDPITISVTPQQLTVPQIDQYFCEVRPSFKTEALTRILDIENVERGICFCRTKKGVDELVEALQARGYQAEGIHGDMNQAQRNRVMSRFKEGYIELLVATDVAARGLDISDVTHVFNYDIPQDPESYVHRIGRTGRAGRTGTAITLVTPREFPQLRLIERVIKARLQRRPVPTLSDVAEKQREQLKERLIKILEEDKLGEFRELAEDLLAEYDPSDLVAAALKLVSGEGKPAQQAQMEFGDTGAEAGMVRLFLNVGRAQAIQPADIVRTIAQEANIPGSSIGIINIYDRFTFVEVPKEVAAQVMQAMQGATIRGYQVNMEPAKPR

SEQ ID NO: 77064 - DNA, 1842 bp, Mannheimia succiniciproducens MBEL55E; identical to SEQ ID NO: 65454
  CDS (1)..(1842): transl_table=11

SEQ ID NO: 77065 - protein, 613 aa, Mannheimia succiniciproducens MBEL55E; identical to SEQ ID NO: 65455

SEQ ID NO: 77066 - DNA, 1446 bp, Bacillus licheniformis ATCC 14580
  CDS (1)..(1446): transl_table=11
atgagcaaagccagttttagagactatgcattaagcggcgatattacgaaagcgctcgatcacttaggatataaggagccgactgcggtgcagagcgaagtgattcccgcggtgcttaaaaagcgggatgttgtggtgaaatcgcggacggggagcgggaagacggccgcgttcggaattccgctttgcgagctgaccgaatgggaagagaacaaaccacaagccttggttttgacaccgacgcgcgagcttgccgctcaggttaaggaggatttgacgaacatcggccgctataaaagaataaaagcagcggctgtttacgggaagtcatcctttgaacggcaaaaaacggagctcaagcaaaaatgccatatcgttgtcgggccgccgggccgcgtattggatcacattgaaaaaggaacccttccattagaaaaactgaaataccttgtcatcgatgaggccgatgaaatgctgaatatgggatttatcgatcaagtgggagcaatcatccgccatttgcctgaagaacggctgacaatgctgttttcagcaacttttccggaggatgtggagcatctatcccttcaatatatgaaagaccctttgaaaatcgagattaaagcaggcggtacgacaaccgcagacatcgagcatcaactgatcattgtaaacgaaaatgatccattttcgcttttagtggatctgttcattgttgaaaacccggacagctgcatcgtcttttgccgcacacaggagcaagtgaatgagttgcagtggcgcctatccgttttgggttatccgtgcgagaaaattcacggcggcatgcctcaggaggatcgttttgccgtgatgaaccgtttcagacggggagcgttccgctatttaatcgcgacagatgtggcggcaagaggcatcgacattgagaacatcacacatgtcatcaactatgagctgccattagatcaagaaagctatgtgcatcgtaccggaagaacaggccgagccggcagccggggaaaagcgattactcttgccagtgcgcgtgaaaagaggatgattgctgacattgaagactatatcggttttcatattcctattattgaggagccgtcaaaagaagaaattgcacgggcaaaagcggcgtttcaaaagaaaatcaataggaagccggagcttaaacaggacaagagcgaatcgttaaataaggaaatcatgaggctctactttaacgggggaaaaaagaagaagcttagagctgttgatttcgtcggaacgattgctaaaattgacggcgtctccgccgaggatatcgggattatcacgatccaggagcaaggttcattcgttgaaattttaaacggcaaaggtccgctcgtcttagatgcgatgaaaaacacgacagtgaaagggaaattgctgaaagtgcataaagcgaggaaataa

SEQ ID NO: 77067 - protein, 481 aa, Bacillus licheniformis ATCC 14580
MSKASFRDYALSGDITKALDHLGYKEPTAVQSEVIPAVLKKRDVVVKSRTGSGKTAAFGIPLCELTEWEENKPQALVLTPTRELAAQVKEDLTNIGRYKRIKAAAVYGKSSFERQKTELKQKCHIVVGPPGRVLDHIEKGTLPLEKLKYLVIDEADEMLNMGFIDQVGAIIRHLPEERLTMLFSATFPEDVEHLSLQYMKDPLKIEIKAGGTTTADIEHQLIIVNENDPFSLLVDLFIVENPDSCIVFCRTQEQVNELQWRLSVLGYPCEKIHGGMPQEDRFAVMNRFRRGAFRYLIATDVAARGIDIENITHVINYELPLDQESYVHRTGRTGRAGSRGKAITLASAREKRMIADIEDYIGFHIPIIEEPSKEEIARAKAAFQKKINRKPELKQDKSESLNKEIMRLYFNGGKKKKLRAVDFVGTIAKIDGVSAEDIGIITIQEQGSFVEILNGKGPLVLDAMKNTTVKGKLLKVHKARK

SEQ ID NO: 77068 - DNA, 1362 bp, Methylococcus capsulatus str. Bath
  CDS (1)..(1362): transl_table=11
atgtcatcagattcgaattctgccggcccggcgtttgccgatctcgggctggctcagccccttttgcgcgccgtttccgaagccggttacgtccatcccacacccatccaggcccaggcgatcccgcttctgctcgccggcggcgatctgctggcggcggcccagaccggaaccggcaagaccgcaggcttcaccttgccgattctgcacaggctgctggagaaacaagctccgcgccggccgaggcgcccgcgctgtctcattctcgcgcccacccgcgagctggcggcgcaggtcctggaatcggtcgaaggctacggcaagtacgtccccctgaaagccacggtcatgtttggcggggtggggctcaacccccaggtccgtgctctcgcggccggcgtcgatatcctcgtcgccacgccgggccgcctgctcgatcattgcggacagaacaccgtcgatctttccgccgtggaaatcttcgtactggacgaggcggaccgcatgctggacatggggttcatccgcgacatccggcggattctgggactgctgccgaagcagcggcagaacatgctgttttcggccacgttttcggatgaaatccgcacgctcgccgacggcttgctgaacaatccgggctacgtcgaggtggcgcgccgcaacgcggcttccgatctggtggaccagaccgtccatctggtcgcccaggaacacaagcgcgatctgcttacccacttgatccgccggcacgactggcgtcaggtgctggtattcacccggaccaaacacggcgcgaaccggctggcggagaaactggccgaggatggcattcctgccgcggcgattcacggcaacaaaagccagtcggcgcgtacccgggcgctggcggatttcaaggacggcacggtgccggtgctggtggctacggacatcgcggcacgcggtctggacatcgaccagcttccccacgtggtgaacttcgaattaccgaacgtgccggaggactacgtccatcggatcggccgcaccgggcgtgccgggcgcgccggctctgccgtgtcgctggtagcgaaagaggaactgaagctgctgggcagcatcgagcgtctgatcaaacgcccgatccagcggggaacggtggaaggtttcaacccgccgtcccgcccgcggatcgagcgtcgggacgaccgctcacggcggccgcaggaggtgcgggatggcggtggccgacagtctcctccgggccagcccaaggcgcgggcaggtctggggtcccgcagcgctgcccggcatgcgcagaagccgcaacagcggcaggcgggcaaccggctgcgcagccagggcggcaagcgcggataa

SEQ ID NO: 77069 - protein, 453 aa, Methylococcus capsulatus str. Bath
MSSDSNSAGPAFADLGLAQPLLRAVSEAGYVHPTPIQAQAIPLLLAGGDLLAAAQTGTGKTAGFTLPILHRLLEKQAPRRPRRPRCLILAPTRELAAQVLESVEGYGKYVPLKATVMFGGVGLNPQVRALAAGVDILVATPGRLLDHCGQNTVDLSAVEIFVLDEADRMLDMGFIRDIRRILGLLPKQRQNMLFSATFSDEIRTLADGLLNNPGYVEVARRNAASDLVDQTVHLVAQEHKRDLLTHLIRRHDWRQVLVFTRTKHGANRLAEKLAEDGIPAAAIHGNKSQSARTRALADFKDGTVPVLVATDIAARGLDIDQLPHVVNFELPNVPEDYVHRIGRTGRAGRAGSAVSLVAKEELKLLGSIERLIKRPIQRGTVEGFNPPSRPRIERRDDRSRRPQEVRDGGGRQSPPGQPKARAGLGSRSAARHAQKPQQRQAGNRLRSQGGKRG

SEQ ID NO: 77070 - DNA, 1527 bp, Azoarcus sp. EbN1
  CDS (1)..(1527): transl_table=11
atgacatcagaagcaaactttgccggtctcggactggccgaaccgctgctgcgcgcaatttccgaatccggctacacgacgccgacgccgatccaggcacaggcgatcccgctcgtgctcgccggcggcgatcttctcgccgccgcccagaccggcaccggcaagactgccggcttcacgctgccggtgctgcaccgcctgtccgccgccccggcagcgaacccgaaggccggccgcccgcgctgcctgatcctgactccgacgcgtgaactcgcggcgcaggtcgaggaatcggtccggacctacggcaagcacctgccgacgacgtcgatggtgatgttcggcggcgtcggcatcaacccgcagatccaggcgctgaaaaaacgcgtcgacatcctcgtcgcgaccccgggccggctgctcgaccacgtcggccagaagacgctcgacctgtcgggcgtcgagatcctgatcctcgacgaagcggaccgcatgctcgacatgggcttcatccgcgacatccgcaaaatcctcgcgctgctgccgaagcagcgccagaacctgctgttttcagcgactttctcggacgagatccgcagcctcgcgaacggactgctgcacaatccgggctgcgtcgaagtcgcgcggcgcaacaccgcgtccgaactcgtgcagcagtcagtctattcggtcgcgcagaagcaaaagcgcgacctcctggtgcatctcgtcaagcagaacgactggcatcaggtgctggtgttcacccgcaccaagcacggcgccaacaagctcgcggaatacctcgccaagcacggcatcccgtcggcggcgatccacggcaacaagagccagtcggcgcgtactcgcgcgctggccgaattcaaggacggctcgctgccggtgctggtggcgacggacatcgccgcgcgcggactggacatcgaccagttgccgcatgtcgtgaacttcgaactgccgaacgttcccgaagactacgtccaccgcatcggtcgcaccggccgcgcaggctcgagcggcgccgcggtgtcgttcgtcgactccgaagagcgccagcacctgacggcgatcgagcggctgatcaagcgcacgatcgaccgcgaagcgctgccggctttcgcgatcgcgccggtcgacccgaacgagagcgacgcgcgtcccccgcggcaaccgcgccagccgtcgcgacacaacaacgcgaacgcgccgcgccaggcgcggaccgatcgcccggccggcaggcaggcgacccctccgtctccttcccgtgcccccgtccggtcacgcgacgccgacaatttcggcaatcgcgccccgcgcagcgaggtcgaagccaagcgcggacaccccgacgcggacggcaaccgggcgctgcgcaacgccgggccgaacggcgcgccacgcagcagtgacagcgcccgcgcggcgccgcgccccgacggcaaccgtcgcccgcaatcgcgtccggcactgttcaacgccaagacggacgatcgcaaccgttga

SEQ ID NO: 77071 - protein, 508 aa, Azoarcus sp. EbN1
MTSEANFAGLGLAEPLLRAISESGYTTPTPIQAQAIPLVLAGGDLLAAAQTGTGKTAGFTLPVLHRLSAAPAANPKAGRPRCLILTPTRELAAQVEESVRTYGKHLPTTSMVMFGGVGINPQIQALKKRVDILVATPGRLLDHVGQKTLDLSGVEILILDEADRMLDMGFIRDIRKILALLPKQRQNLLFSATFSDEIRSLANGLLHNPGCVEVARRNTASELVQQSVYSVAQKQKRDLLVHLVKQNDWHQVLVFTRTKHGANKLAEYLAKHGIPSAAIHGNKSQSARTRALAEFKDGSLPVLVATDIAARGLDIDQLPHVVNFELPNVPEDYVHRIGRTGRAGSSGAAVSFVDSEERQHLTAIERLIKRTIDREALPAFAIAPVDPNESDARPPRQPRQPSRHNNANAPRQARTDRPAGRQATPPSPSRAPVRSRDADNFGNRAPRSEVEAKRGHPDADGNRALRNAGPNGAPRSSDSARAAPRPDGNRRPQSRPALFNAKTDDRNR

SEQ ID NO: 77072 - DNA, 1977 bp, Azoarcus sp. EbN1; identical to SEQ ID NO: 65462
  CDS (1)..(1977): transl_table=11

SEQ ID NO: 77073 - protein, 658 aa, Azoarcus sp. EbN1; identical to SEQ ID NO: 65463

SEQ ID NO: 77074 - DNA, 1416 bp, Silicibacter pomeroyi DSS-3
  CDS (1)..(1416): transl_table=11
atgacaaaattttctgaactgaatctcaaccccaaagttctcaaggccattgaagaggccggctatgaaacgccgactccgatccaggcaggcgccatcccgcccgcgctcgaaggccgagacgtgctgggcatcgcccagacaggcaccggcaagaccgccagtttcaccctgccgatgatcacccttctggcccgcggccgcgcccgcgcacggatgccgcgcagcctggtgctgtgcccgacgcgggaactggccgcccaggtggccgagaatttcgacacctataccaagcacctgaaactgaccaaggcgctgctcattggcggtgtcagcttcaaggagcaggatgcgctgatcgaccgtggtgtcgacgtgctgatcgccaccccgggccggctgctggatcatttcgagcgcggcaagcttctgttgaccggcgtgcagatcatggtggtggacgaggccgaccggatgctcgacatgggtttcatccccgatatcgagcgcatcttcagcctgacgccctttacccggcagaccctgttcttctcggccaccatggcgcccgagatcgagcggatcaccaacaccttcctcagcgcgcccgcgcgcatcgaggtggcccgccaggccaccgcgtccgagaccatcgaacagggcgtggtgctgttcaagggctcgcgccgcgaccgcgaggccagcgagaaacgcgccgttctgcgggcgctgatcgacgccgagggcgagaaatgcaccaacgcgatcatcttctgcaaccgcaagacggatgtggatatcgtcgcgaaatcgctgcagaaatacggctatgacgcggcgccgatccatggcgatctggaccagagccagcgcacccgtacgctggacggcttccgcgaaggcaaactgcgcctgctggtggcctcggacgtggccgcgcgcgggctggatgtgccctcggtcagccatgtgttcaacttcgacgtccccggccaccccgaggattacgtgcaccggatcggccgcaccggccgcgccggccgcgacggcaaggcgatcacgctgtgcatcccgcgcgacgaaaaggcgctcgatgcgatcgagaagctgatccagaaggatatcccgcgattggaaaacccggcccggaccgaggaaaagcccgaggcgaagccccgccgcgaggagaaaccggcccgcgccgacaaacccgcccgcagcgacgcggacaagcgtgaacccgtcaaacgcgaggcggacaagcgcgacccggtcaagcgtgaggcggacaagcgcgaccgcaagggtggcgagcgccgcgaccgcaaggacgaccgcggcgccagggtggtgggcatgggcgatcatctgcccagcttcatcgccctcagcttcgaggaacgccgcgccagctga

SEQ ID NO: 77075 - protein, 471 aa, Silicibacter pomeroyi DSS-3
MTKFSELNLNPKVLKAIEEAGYETPTPIQAGAIPPALEGRDVLGIAQTGTGKTASFTLPMITLLARGRARARMPRSLVLCPTRELAAQVAENFDTYTKHLKLTKALLIGGVSFKEQDALIDRGVDVLIATPGRLLDHFERGKLLLTGVQIMVVDEADRMLDMGFIPDIERIFSLTPFTRQTLFFSATMAPEIERITNTFLSAPARIEVARQATASETIEQGVVLFKGSRRDREASEKRAVLRALIDAEGEKCTNAIIFCNRKTDVDIVAKSLQKYGYDAAPIHGDLDQSQRTRTLDGFREGKLRLLVASDVAARGLDVPSVSHVFNFDVPGHPEDYVHRIGRTGRAGRDGKAITLCIPRDEKALDAIEKLIQKDIPRLENPARTEEKPEAKPRREEKPARADKPARSDADKREPVKREADKRDPVKREADKRDRKGGERRDRKDDRGARVVGMGDHLPSFIALSFEERRAS

SEQ ID NO: 77076 - DNA, 1482 bp, Bacillus clausii KSM-K16
  CDS (1)..(1482): transl_table=11
ttggcaaattttgaacaatttggcttggatgcttctgtcgtccaagcagtaacgaatatcggctttacggaagccacgccaatccaacaagagacgattgagctcgtactcgcaggcaaagatgtgattggccaagcccagacaggcactggcaaaacaggtgcttttggcattccattagtcaatcgcattgactcaagcaatcctcttgtccaaggtcttgtattggcgccaacgagggagctagccaaccaagttgagcaggcattgcgtcaatttgggcgtgtcaaaggtgtacgcacaaccgttgtatacggcggtgaagactttggcaaacaaatccgctccttgaaacagcgcccgcacattattgttgctacgccagggcgtttgcttgaccatatgcgtcgtaaaacaatccgccttgaatcgattgaaacggtcgtattggatgaagcggacgaaatgttgaacatgggttttattgaggacattgaaacgattttggcagagacacctcaagaaacacggcaaacattgcttttttcagcaacaatgccaaagcggatggagtcactagccagcaagtttatgaaaaacccaacacggatagctgtgaaagcaaaagaagtgacaatggaaaacattgcccagcagtttattgaagtccatgaacgggaaaaatttgatgtgctctgccgcctaattgatctagagacgcctgatctttccattgtgttcggacggactaaacggcgcgtcgatgagctagcggaagctcttattaaacgaggttaccgggctgaaggcttgcatggcgatttaaaccaagcgaaacgtaacagcgtcttgcgcaaatttaaagaaggtttaatcgatgtcctcgttgctaccgacgttgcagcgcgtggccttgatattagcggcgttacacacgtctttaactttgatttgcctcaagatccagaaagctacgtccatcgtatcggtcgtactggacgagcgggccgttctggcattgcgattacgctggcaacaaaaccagaacgtgagcacgtcaaattgattgaaagtgtctcgaaaagacggatgactcagcggccgaagccgacatatgaggaagcgcttgaaggtcaaaaacagtcaactttaaacgaacttcgtgaattggctgcaaagggcgagcaagacagctaccgagtagcagccaaagaactgctccaagaaacagatgcagtcacggccttggcggcggcgttgaaattgctgacaaaagagccagaccaaacgcctgtgaaactcacaagcgaagcgccactgcgtacgaaaaagcgccacggaaatgggggccgtgatggccgccgtcataatgatcgcgatcgtcgcccttgggggcaaaaacggggccgcgacggacggcgcagcggtcatcaacggaagtgggcttcatcgaacggcaaggcaggcaagcgtttatcgtaa

SEQ ID NO: 77077 - protein, 493 aa, Bacillus clausii KSM-K16
MANFEQFGLDASVVQAVTNIGFTEATPIQQETIELVLAGKDVIGQAQTGTGKTGAFGIPLVNRIDSSNPLVQGLVLAPTRELANQVEQALRQFGRVKGVRTTVVYGGEDFGKQIRSLKQRPHIIVATPGRLLDHMRRKTIRLESIETVVLDEADEMLNMGFIEDIETILAETPQETRQTLLFSATMPKRMESLASKFMKNPTRIAVKAKEVTMENIAQQFIEVHEREKFDVLCRLIDLETPDLSIVFGRTKRRVDELAEALIKRGYRAEGLHGDLNQAKRNSVLRKFKEGLIDVLVATDVAARGLDISGVTHVFNFDLPQDPESYVHRIGRTGRAGRSGIAITLATKPEREHVKLIESVSKRRMTQRPKPTYEEALEGQKQSTLNELRELAAKGEQDSYRVAAKELLQETDAVTALAAALKLLTKEPDQTPVKLTSEAPLRTKKRHGNGGRDGRRHNDRDRRPWGQKRGRDGRRSGHQRKWASSNGKAGKRLS

SEQ ID NO: 77078 - DNA, 1944 bp, Bacteroides fragilis NCTC 9343
  CDS (1)..(1944): transl_table=11
ttgcacccgaaaataaagatatacagagatttaatgaagacatttgaagagcttggcgtttctccggagatacgtaaagctattgaagagatgggatacgagaatcccatgccggtacaggaggaagtgattccatacctattaggagagaataatgatgtagtagctcttgcacagacagggacgggtaagaccgcagcgtttggcttgcccctcatccagaaaattaacgtaaaaaacagaatacctcaatcactcgttctttgccccacacgcgagctttgcctccagatagcaggcgacctgaacgactattccaaatacatcgacgggctgaaagtattgcccgtatacggcggttcatccatcgacagccagatacgcagcctgaaacggggtgtgcatatcattgttgccacaccggggcgactcctcgacctgatggaacgcaaaacggtatctcttgccactgtcacaaacgtagtgatggacgaagcggacgaaatgctcaatatgggctttacggacagtatcaatgccatcctggcagatgttccacaagaacgtaacacactgcttttctcggccactatgagcccggaaatagcccgtatttcgaagaactaccttcacaatgcaaaagagatcaccatcggacgcaagaacgaaagtacgagcaacgtgaagcatgtggtctataccgtacatgcaaaagataaatacgccgccctgaaacgcatcgtagactattatccgcagatttacggtatcatcttctgccgtacccgcaaagagacacaggaaattgccgataaactgatgcaggaaggttataacgctgactcgttgcacggagaactctcacaggcacagcgtgacacggtgatgcagaagtttcgcatccgcaacatccagattctggtagccaccgatgtagccgcacgcggactggacgtagacgacctgacacacgtcatcaactacggattgccggacgatacggaaagttatacgcaccgtagcggacgtacaggacgtgccggaaagacaggtacatccatcgccatcatcaatttgcgtgaaaaaggaaagatgcgcgaaatagaacgcatcatcggtaagaaattcattgccggtgaaatgcctaccggtaagcagatctgcgagaaacagcttctcaaagtgatagacgatcttgaaaaagtaaaggtaaacgaggaggatatcaatgatttcatgcctgagatttaccgtaaactggagtggctgagtaaagaagacctcatcaagcgcatggtatcgcatgagttcaaccggtttgtcgactattatcgcaaccgcgaagaaatagaggtgccgactgatagccgcagcgaacgcgccggaaaaagccgtgaaggaaaaagcagccgccaggcagaaccgggttacacccgccttttcatcaatctgggtaagatggataacttcttccctcacgaactgatcaccttgctcaacaataacacacgaggaagagtagaattgggacgcatcgacctgatgaagaatttctcgttcttcgaagtggaagagaaacaagcacaaaacgtcgtaaaggcgctgaaccggacaaactggaacggacgtaaagtcacagtagaggtagccggagaagaggcatctacagagcacaaaggacgtggaaagcggaatgaaggtaacgatcagggtggcagaggaagaagcagcgctccatctgccgaccgcaaagagagaggcaaaggcagcaaagacagcaaacaagccgacagccggaaaggcaaaaagccaagccgtgaggaacggggatattccgcagcccgcggccccaaaggcaaagatgaatggaaacagttctttaaagatgccgaacccgacttcagcgaagaaggatgggcaagaagaaagcctaaaaagagctaa

SEQ ID NO: 77079 - protein, 647 aa, Bacteroides fragilis NCTC 9343
MHPKIKIYRDLMKTFEELGVSPEIRKAIEEMGYENPMPVQEEVIPYLLGENNDVVALAQTGTGKTAAFGLPLIQKINVKNRIPQSLVLCPTRELCLQIAGDLNDYSKYIDGLKVLPVYGGSSIDSQIRSLKRGVHIIVATPGRLLDLMERKTVSLATVTNVVMDEADEMLNMGFTDSINAILADVPQERNTLLFSATMSPEIARISKNYLHNAKEITIGRKNESTSNVKHVVYTVHAKDKYAALKRIVDYYPQIYGIIFCRTRKETQEIADKLMQEGYNADSLHGELSQAQRDTVMQKFRIRNIQILVATDVAARGLDVDDLTHVINYGLPDDTESYTHRSGRTGRAGKTGTSIAIINLREKGKMREIERIIGKKFIAGEMPTGKQICEKQLLKVIDDLEKVKVNEEDINDFMPEIYRKLEWLSKEDLIKRMVSHEFNRFVDYYRNREEIEVPTDSRSERAGKSREGKSSRQAEPGYTRLFINLGKMDNFFPHELITLLNNNTRGRVELGRIDLMKNFSFFEVEEKQAQNVVKALNRTNWNGRKVTVEVAGEEASTEHKGRGKRNEGNDQGGRGRSSAPSADRKERGKGSKDSKQADSRKGKKPSREERGYSAARGPKGKDEWKQFFKDAEPDFSEEGWARRKPKKS

SEQ ID NO: 77080 - DNA, 1422 bp, Pseudomonas syringae pv. syringae B728a
  CDS (1)..(1422): transl_table=11
atgatacactacgcgacatttttgttttgcaggtccaccgtcgtgactaacaccgctttcaattccctgcctctgtccgctgccatgctggctaacctggagtcgcttggttatgccgaaatgacaccgattcaggcgcagagcctgccggtgatcctcaagggcatggacctgatcgcgcaagccaagaccggcagcggcaagaccgctgcgttcggcatcggcctgctcaacccgatcaacccgcgtttcttcggttgtcaggcactggtcatgtgtccgacccgcgaactggcggatcaggtggccaaggaaatccgccgtctggcgcgttccgaggacaacatcaaggtcctgaccctgtgtggcggcgtgtcctttggcccgcagatcggctcgctggaacatggcgcacacatcatcgtcggcactccgggtcgtatacagcagcacttgcgcaagggctcgctggtcctggacggcctgaacacgctgattctcgatgaagccgaccgcatgctggacatgggcttctacgacgccatcgccgacatcatcgagcagactccgcagcgccgtcagaccctgctgttctccgccacctacccggtcggcatcaagcagttgtcctcgaagttcatgcgtgatccgcagaccgtcaaggtcgaagcgctgcacgccgacagccagatcgagcagattttctacgagatctccccggagcagcgcctggaagcggtggtcaaggtactcggccatttccgtccgacgtcctgcgtggcgttctgcttcaccaagcagcaggtccaggaagtggtcgatcacctgaccgccaagggcatgtctgctgtcggcctgcatggtgatctggaacagcgtgaccgtgatcaggtactggcgatgttcgccaaccgcagtacctcggtactggtcgccacggacgtagccgcgcgcggtctggatatcgacgcgctggacatggtgatcaacgtcgagctggcgcgtgattcggaaatccacatccaccgcgtcggccgcaccggtcgtgccggcgagaaaggcatcgcggtcagcctcgtggccccgtcggaaagccagcgcgcccgtgccatcgaagaattgcagaaagcgccgttgaactggcagcaatacgacagactgagcatcaaggaaggcggcaagctgctgcccgccatgaccacgctgtgcatcggctcgggccgcaaggacaagctgcgtccaggcgacatcctcggcgcactgaccggcgaggcaggcattgcgggcactcaggtcggcaagatcgcgattttcgacttccaggcctacgttgccgtcgagcgcagcatggccaaacaggccctggagcgtttgaacaatggcaagatcaagggcaagtcgctgcgcgtgcggattttgtaa

SEQ ID NO: 77081 - protein, 473 aa, Pseudomonas syringae pv. syringae B728a
MIHYATFLFCRSTVVTNTAFNSLPLSAAMLANLESLGYAEMTPIQAQSLPVILKGMDLIAQAKTGSGKTAAFGIGLLNPINPRFFGCQALVMCPTRELADQVAKEIRRLARSEDNIKVLTLCGGVSFGPQIGSLEHGAHIIVGTPGRIQQHLRKGSLVLDGLNTLILDEADRMLDMGFYDAIADIIEQTPQRRQTLLFSATYPVGIKQLSSKFMRDPQTVKVEALHADSQIEQIFYEISPEQRLEAVVKVLGHFRPTSCVAFCFTKQQVQEVVDHLTAKGMSAVGLHGDLEQRDRDQVLAMFANRSTSVLVATDVAARGLDIDALDMVINVELARDSEIHIHRVGRTGRAGEKGIAVSLVAPSESQRARAIEELQKAPLNWQQYDRLSIKEGGKLLPAMTTLCIGSGRKDKLRPGDILGALTGEAGIAGTQVGKIAIFDFQAYVAVERSMAKQALERLNNGKIKGKSLRVRIL

SEQ ID NO: 77082 - DNA, 1335 bp, Pseudomonas fluorescens Pf-5
  CDS (1)..(1335): transl_table=11
atgacattcgccactcttggcctgatcgaacccctgctgcgcgccctcgaaaccctcggctaccagaccccgaccccggtgcaggcgcaagccattccggcagtgctgggcgggcgtgacctgatggccgcggcccagaccggcaccggcaagaccgccggtttcgctctgccgctgttgcagttgctgaccctggaagggccgaaagtcgatagcaactcggtacgcgcgctgatcctggtgccgacccgggaactggccgagcaggtccacgaaagcgtgcgccagtacgccgaacacctgccgctgcgcacctatgcggtgtacggcggggtcagcatcaacccgcaaatgatgaagctgcgcaaaggcgtggacctgctggtggcgactccggggcgtctgctggacctgttccgtcagaatgcggtgaagttcagccagttgcagaccctggtgctggatgaggccgatcgcatgctcgacctggggttctccgaagagctcaagagcatctacgcggccctgccgaagaaacgccagaccctgttgttctccgccaccttctccgacgccatccgccagctggccgggcagatgctcaacgatccgctgagcatcgaggtcagcccgcgcaacgtggccgccaatacggtcaagcaatgggtggtgccggtggacaagaagcgcaagccggagctgttcagccacctgctgcgcaagaatcgctggaagcaggtgctggtgttcgccaagacccgcaacggtgtggatgcgctggtggagaaactccagggccagggcgtgaacgccgacggcatccatggcgacaagccacaggccacgcgtcagcgcgccctggaccggttcaaggccagtgagatccagatcctggtggccaccgatgtggcggcccgcggcctggacatcgaagacctgccgctggtggtcaacttcgacctgccgatcgtggccgaggactacatccaccgcatcgggcgtaccggccgtgccggttccaccggcgaggcgatttccctggtgtgcgccgacgaggtgaacctgctctcggcgatcgagatgctcacccgccagaccctcaagcgccatgaggaacaggatttcgaacccgagcaccgggtgccggaaaccgacgccagtggccaggtggtgaaaaagccgaagaagcccaagaagccgaaaacctccggcggtggcggcaagcgcaacctgggcaagtgggtggacagtggcgaagtggctgaagctccggcggtgaaaccggtgcgcaaggtgccggctttcaacaccgggccgcgcaagcgcaaaccttga

SEQ ID NO: 77083 - protein, 444 aa, Pseudomonas fluorescens Pf-5
MTFATLGLIEPLLRALETLGYQTPTPVQAQAIPAVLGGRDLMAAAQTGTGKTAGFALPLLQLLTLEGPKVDSNSVRALILVPTRELAEQVHESVRQYAEHLPLRTYAVYGGVSINPQMMKLRKGVDLLVATPGRLLDLFRQNAVKFSQLQTLVLDEADRMLDLGFSEELKSIYAALPKKRQTLLFSATFSDAIRQLAGQMLNDPLSIEVSPRNVAANTVKQWVVPVDKKRKPELFSHLLRKNRWKQVLVFAKTRNGVDALVEKLQGQGVNADGIHGDKPQATRQRALDRFKASEIQILVATDVAARGLDIEDLPLVVNFDLPIVAEDYIHRIGRTGRAGSTGEAISLVCADEVNLLSAIEMLTRQTLKRHEEQDFEPEHRVPETDASGQVVKKPKKPKKPKTSGGGGKRNLGKWVDSGEVAEAPAVKPVRKVPAFNTGPRKRKP

SEQ ID NO: 77084 - DNA, 1386 bp, Pseudomonas fluorescens Pf-5
  CDS (1)..(1386): transl_table=11
atgaccaccattgccaccgcttttaatactttgcccctgtctcccgccatgctggctaacctcgactccctcggttatgcccagatgacgccgatccaggcgcagagcttgccggtgatcctcaagggcatggacctgatcgcccaggccaagaccggcagcggcaagaccgcggccttcggcatcggcctgctgaacccgatcaacccgcgctacttcggctgccaggccctggtgatctgcccgactcgcgagctggccgaccaggtggccaaggaagtgcgccggctggcccgcgccgaagacaacatcaaggtcctgaccctgtgcggcggcgtgtcgttcgggccacagatcgcctccctggagcacggtgcgcatatcatcgtcggcaccccagggcgtatccagcagcatctgcgcaagggttcgctggtgctcgacggcctgaacacgctggtgctcgacgaagccgaccgcatgctcgacatgggtttctacgacgccatcgaagacatcatcgaaaagaccccgtcgcgccgccagaccctgctgttctccgccacgtatccggtgggcatcaagcaactggcgtcgaaattcatgcgcgatccgcaaacggtgaaagccgaagcgttccacgacgacacgcagatcgaacagcgtttctacgagatttccccggaagaacgcatgagcgcagtgaccaaagtcctgcaccacttccgcccggcctcctgtgtggcgttctgcttcaccaagcagcaagtgcaggaaaccgtcgatcacctgaccgccaaaggcatttccgccgtcggcctgcacggcgacctggagcagcgtgaccgcgatcaggtgctggcgatgttcgccaaccgcagcacatcggtactggtcgccaccgacgtcgccgcccgtggtctggacatcgatgcgctggacatggtgatcaacgtcgagctggcccgcgattcggaaatccacattcaccgcgttggccgtaccggtcgcgctggcgagaaaggcatcgcggtcagcctcgtcgcaccgtccgaagcacatcgtgcgcaagccatcgaacaactgcagaaagccccgttgaactgggatcaggtcgataacctcaagtcccagggcggcgccccgctgcagccaccgatgagcacgttgtgcatcgccggcgggcgcaaggacaaggtacgtccgggggatattctcggcgcactgaccggcgacgccggcatcccgggcgcccaggtcggcaagatcgcgatcttcgacttccagtcgtatgtggcggttgaacgcaccgtggtcatgcaggcgctgcagcgcctgaacaacggcaagatcaagggccgttcgctgcgcgtgcgcgtcctttaa

SEQ ID NO: 77085 - protein, 461 aa, Pseudomonas fluorescens Pf-5
MTTIATAFNTLPLSPAMLANLDSLGYAQMTPIQAQSLPVILKGMDLIAQAKTGSGKTAAFGIGLLNPINPRYFGCQALVICPTRELADQVAKEVRRLARAEDNIKVLTLCGGVSFGPQIASLEHGAHIIVGTPGRIQQHLRKGSLVLDGLNTLVLDEADRMLDMGFYDAIEDIIEKTPSRRQTLLFSATYPVGIKQLASKFMRDPQTVKAEAFHDDTQIEQRFYEISPEERMSAVTKVLHHFRPASCVAFCFTKQQVQETVDHLTAKGISAVGLHGDLEQRDRDQVLAMFANRSTSVLVATDVAARGLDIDALDMVINVELARDSEIHIHRVGRTGRAGEKGIAVSLVAPSEAHRAQAIEQLQKAPLNWDQVDNLKSQGGAPLQPPMSTLCIAGGRKDKVRPGDILGALTGDAGIPGAQVGKIAIFDFQSYVAVERTVVMQALQRLNNGKIKGRSLRVRVL

SEQ ID NO: 77086 - DNA, 1869 bp, Pseudomonas fluorescens Pf-5
  CDS (1)..(1869): transl_table=11
atgtcctttgcttccctcggtctctccgaggctttagtcggcgccatcgaagccgccggctacacccagcctactccggtgcaacagcgggccattcccgccgtgttgcaaggtcgcgatctgatggtcgcggcacagacaggtactggtaaaaccggcggtttcgcccttccgatcctggaacggttgtttcccaacggtcatccggacaaatcccagcgtcatggcccgcgccaaccccgcgtactggtcctgacccccactcgcgagctggccgcgcaagtgcatgacagcttcaagctgtacgcccgcgacctgaagttcgtcagcgcctgcatcttcggcggcgtcggcatgaacccgcaggttcaggccatggcccgtggcgtcgatgtgctggtggcatgccccggccgtctgctggacctggctggccagggcagcgtcgacctgtcccacgtggaaatcctggttctcgacgaagccgaccgcatgctcgacatgggcttcgtccatgacgtcaagaaagtcctcgcccgcctgccggccaagcgccagaacctgctgttctccgcgaccttctccaaggacatcacggacctggccggcaagctgctgcacaaccccgagcgcatcgaagtgaccccgccgaacaccacggtggagcgtatcgagcagcgggtcttccgcctgccggccagccacaagcgtgccctgctggcgcacctgatcaccgccggcgcctgggaacaggtcctggtgttcacccggaccaagcacggcgccaaccgcctggccgagtacctggacaagcacggcctgagcgctgtggcgatccacggcaacaagagccagaacgcccgtaccaaagccctggccgacttcaaggccggcgaagtgcggatcctggtcgccaccgatatcgccgcccgcggcctggacatcgaccaactgcctcacgtggtcaacttcgaactgcctaacgtcgacgaagactacgtgcaccgtatcggccgtaccggccgtgccggtcgctccggcgaagccatctccctggtggctccggacgaagagaaactgctgaaaagcatcgagcgcatgaccaagcagaagatcgccgacggtgacctgatgggcttcgatgccagcgcagtggaagccgagaagccggaagtgcgcgagcgtccggacgtgcgcaacccgcgcaatccccgtggcccacgcggcgatggcccgaacggcggtggcggtggtggcggtcgcaaggacaagggcaaggacaagggcggcaaggaaaaacccgcccgtggcgaacgcccggcccgcgagcagaagcctcgtgaaggcaccccggcccgcgaacagcgtcaaccgacgccccgtgccgatcgcgcaccggacgagttcctcgacgacgacgtggacaacttcggtaaccgcgctgactacgtcagcccgtaccagaacaagaacaaccagggccgcggccgccgcccaggggctccggcccagggtgcaggcgctggcaatccgccacgcggcggtgccggtggtggccagggtcgctccggcaacccgcgcaacagcaacggcagcaccaccggcaccgcgccggccaagcgcagtggcggcccgcgcaacggcgcccctcgtgacagccagggccgtcgcgacgagccgcgcaatcgccgcccgaaccgtgacgatcagccacgccaggaaccggccgtgcagaatcctcggggcaaccagccgaagatcatgcacaaggaatccaaggccgatcgtttcccgacgcctgagcagctggatcagttgccaagccgtccacggggcgaaaagccggcgctgctgacccgcaaccgctga

SEQ ID NO: 77087 - protein, 622 aa, Pseudomonas fluorescens Pf-5
MSFASLGLSEALVGAIEAAGYTQPTPVQQRAIPAVLQGRDLMVAAQTGTGKTGGFALPILERLFPNGHPDKSQRHGPRQPRVLVLTPTRELAAQVHDSFKLYARDLKFVSACIFGGVGMNPQVQAMARGVDVLVACPGRLLDLAGQGSVDLSHVEILVLDEADRMLDMGFVHDVKKVLARLPAKRQNLLFSATFSKDITDLAGKLLHNPERIEVTPPNTTVERIEQRVFRLPASHKRALLAHLITAGAWEQVLVFTRTKHGANRLAEYLDKHGLSAVAIHGNKSQNARTKALADFKAGEVRILVATDIAARGLDIDQLPHVVNFELPNVDEDYVHRIGRTGRAGRSGEAISLVAPDEEKLLKSIERMTKQKIADGDLMGFDASAVEAEKPEVRERPDVRNPRNPRGPRGDGPNGGGGGGGRKDKGKDKGGKEKPARGERPAREQKPREGTPAREQRQPTPRADRAPDEFLDDDVDNFGNRADYVSPYQNKNNQGRGRRPGAPAQGAGAGNPPRGGAGGGQGRSGNPRNSNGSTTGTAPAKRSGGPRNGAPRDSQGRRDEPRNRRPNRDDQPRQEPAVQNPRGNQPKIMHKESKADRFPTPEQLDQLPSRPRGEKPALLTRNR

SEQ ID NO: 77088 - DNA, 1704 bp, Psychrobacter arcticus 273-4; identical to SEQ ID NO: 65466
  CDS (1)..(1704): transl_table=11

SEQ ID NO: 77089 - protein, 567 aa, Psychrobacter arcticus 273-4; identical to SEQ ID NO: 65467

SEQ ID NO: 77090 - DNA, 1263 bp, Colwellia psychrerythraea 34H
  CDS (1)..(1263): transl_table=11
ttggctaaacgaatgaccttttcttccttttctttggactcaacattgcttaaagcaataaccgaatctgcttatgatgaaccaacagaaatacaaaagcaaagtatccctcttattctagctaaacatgatgttatggcaagagctcaaacaggtacagggaaaacagctgcttttgcactgccaatacttcaacaattaatatcagttcaaccttgtaaaccagaactaagagcattggtgctaactccaacgagagaacttgctcagcaagtgcataaaagcttttgtcattacgggcaatttactgatgttacaattggtattgcgtacggcggcgttagtacaaaaaaacaaattagtgaattgaaagtgggtgttgatatattaattgcaacgccaggaagattattagatctgcttagaactgaatctgtcagcctatccaacatagaaacattagttttcgatgaagcagatcgtatgttagatatgggttttaaagaagaaatagatcagattactcaatatctaccaaaaacaaagcaaacactgctcttctcagctacattcgcggatgatatttacaaaatgagtaaaaacattttagttgaacctaaaatggttgagattgatgagaaaaacaaagctgctgatgatgtagagcaacttgtctatggtgttgatgctgatcgcaaacgagaactaacttcgtttttaattggatcaagaaattggaaacaagttttagtgttcactcgaactaagcagtgcgcagatgacctagcaaaagaaatgactaaagatggtgttaaatcattagctattcatggcgataaatctcaaggcgcacgtgaaaaagcattacatgagtttaaggaaggaaaagttcgcgcactaatagcaaccgacgttgctgcgcgtggtatcgatataaaaggtttatcacatgtgattaactatgaacttccttataacgcagaggattatgttcatcgtatagggcgtactgcaagagcgggtaattcaggattagctgtttctctggtcagtcctggagaagaatggttactaacagctatagaagaattacttgatatccagctattacaacaatggttaccaggttatgagttagatttgacgaaaattgctaattcaaataaaagaccaataaataaaaagaatgcacgcaaggatgcactatccgcaggtgataagtctaaagggcacagacctaatactagaaatagaagacgatag

SEQ ID NO: 77091 - protein, 420 aa, Colwellia psychrerythraea 34H
MAKRMTFSSFSLDSTLLKAITESAYDEPTEIQKQSIPLILAKHDVMARAQTGTGKTAAFALPILQQLISVQPCKPELRALVLTPTRELAQQVHKSFCHYGQFTDVTIGIAYGGVSTKKQISELKVGVDILIATPGRLLDLLRTESVSLSNIETLVFDEADRMLDMGFKEEIDQITQYLPKTKQTLLFSATFADDIYKMSKNILVEPKMVEIDEKNKAADDVEQLVYGVDADRKRELTSFLIGSRNWKQVLVFTRTKQCADDLAKEMTKDGVKSLAIHGDKSQGAREKALHEFKEGKVRALIATDVAARGIDIKGLSHVINYELPYNAEDYVHRIGRTARAGNSGLAVSLVSPGEEWLLTAIEELLDIQLLQQWLPGYELDLTKIANSNKRPINKKNARKDALSAGDKSKGHRPNTRNRRR

SEQ ID NO: 77092 - DNA, 1836 bp, Colwellia psychrerythraea 34H
  CDS (1)..(1836): transl_table=11
atgactgatcaaaaaactgaaactgtaacagaacctgaagctgtagcttttgcctctttaggcttacctgaaaacttattatctgccgttctttctattggctttacttctgctaccgatattcaagcactaactataccaccattacttgctggtaaagatgtgttaggtgaagctcaaacaggtacaggtaaaactgctgcctttggtttacctgcattagcaaaaattgatacttcaattaaaaaaccacaattaatggttttagcaccgactcgtgaattagcaatgcaagttgctgaagcaatcgaatctttcggtaaagacatgaaaggtttacgtgttgctacattatacggtggccaatcttatggaccacaatttcaacaactagagcgtggcgcacaagttgttgttggtactcctggtcgtttaatggaccacttacgtcgcaaaagccttaaattagatgaattacgtgtttgtgtgcttgatgaagcagatgaaatgttaaacatgggctttttagaagacatccagtggattttggatcatataccaaaaactgcacaaatgtgtttgttctctgcgaccatgccaccagcgattcgtaaaattgctaaccgtttcttaaaagatcctgagcacattaaagttgctgctgttaaaaaagcaaaagctaacattactcagtacgcatggaaagttagtggcatcactaaaatgactgcgttagagcgtattgctgaagtagttgaatacgatgcaatgattatctttgttcgtactcgtaacgatactgttgatattgctgaaaaattagaacgtgccggttaccctgcattagcactaaatggtgatttgaaccaagcacaacgtgaacgttgtattgaccaaatgaaatctggtaaatcatctatcctagttgctacagacgttgttgctcgtggtttggatattcctcgtatctctttggtaattaactatgacttaccgggcgataacgaagcatatgttcaccgtattggtcgtactggtcgcgctggtcgtgaaggtatgtcaattgcttttgtacgtccacgtgaaatgtactcaattcgtcattatgagcgtttaacgaatggtactgttcttaattacgatttaccaaatatccaagatattggtaaaatacgtattgagcgtactcgtgttgaagtagcaaaaattgttgctgataaagatatctcaagcatgcgtgaaattgttgaaggcatggctgctgaatctgaagtttctatgattgatcttgctgctgcattgcttttccaaaagcaaatgaagcaaccacttcaaccaaaagaagatcctaagcctcgtcgtgatgcacgtgaacgtactgatcgcaatgaccgtggtaacgaccgtaatagccgtggtaatgatcgcaatagccgtggtaatgatagccgtagtgctggtcgtgattcacgtggtggtgagaaccgtagtaaccgtgatgaaaaaccacgtaaagctaaagttaatcgcagtgatgttgattggcaaacttaccgcctagaagtcggtaaagaacatggcgctcgtccaggtgatattgttggcgctatcgctaatgaaatatcgcttgatagtagctacatcggtgctattaatttacatgacaaacatagttttgttcagttacctaaaggtatcccaactgacttgtttaaccagttgaaaggagtacgcgttcgtcgtcaacctctttcaatcactacttcagatgaagcagttgttagccaacaacagcgtccagctcgtcgtactgaaaaagcaccacgtcatacttaa

SEQ ID NO: 77093 - protein, 611 aa, Colwellia psychrerythraea 34H
MTDQKTETVTEPEAVAFASLGLPENLLSAVLSIGFTSATDIQALTIPPLLAGKDVLGEAQTGTGKTAAFGLPALAKIDTSIKKPQLMVLAPTRELAMQVAEAIESFGKDMKGLRVATLYGGQSYGPQFQQLERGAQVVVGTPGRLMDHLRRKSLKLDELRVCVLDEADEMLNMGFLEDIQWILDHIPKTAQMCLFSATMPPAIRKIANRFLKDPEHIKVAAVKKAKANITQYAWKVSGITKMTALERIAEVVEYDAMIIFVRTRNDTVDIAEKLERAGYPALALNGDLNQAQRERCIDQMKSGKSSILVATDVVARGLDIPRISLVINYDLPGDNEAYVHRIGRTGRAGREGMSIAFVRPREMYSIRHYERLTNGTVLNYDLPNIQDIGKIRIERTRVEVAKIVADKDISSMREIVEGMAAESEVSMIDLAAALLFQKQMKQPLQPKEDPKPRRDARERTDRNDRGNDRNSRGNDRNSRGNDSRSAGRDSRGGENRSNRDEKPRKAKVNRSDVDWQTYRLEVGKEHGARPGDIVGAIANEISLDSSYIGAINLHDKHSFVQLPKGIPTDLFNQLKGVRVRRQPLSITTSDEAVVSQQQRPARRTEKAPRHT

SEQ ID NO: 77094 - DNA, 1299 bp, Colwellia psychrerythraea 34H
  CDS (1)..(1299): transl_table=11
atgacaactgttacaacgcctgccacctttacagaacttggccttattacccccttattagcgcgattagctgagctggaatatcatcagccaacgcctattcaagcgcgagctatcccaagtgtattcgcgggacgtgacttaattgcaggggcaaataccggctcaggtaaaacagccacctttgcactgcctatgttgcagaaattacgcgaagacatttcatcgggcagcaaaaacagtaaaggtaactttgttactggactagttttagtacctactcgtgaactcgccaagcaagttgcagacagtattaaatcttatgcagtgcattttaatggcgaaattaaaacccttgctgtttttggtggcgtatcagtcaatattcaaatgctcgcattacgcggtggcgtcgatattttggtggcaacgccgggtcgattacttgatttaatttcaagtaatgccatcaagctcgataaggttaaaaccttagtacttgatgaagccgaccgcatgttaagcctaggttttactgaagaactaacagcgttgttggcattaacgccgaagaaaaaacaaaccttattattttcagcgacttttcctgaacaagtaacaacgttaacgcaagaactgcttaacaacccgattgaaatacaattacaaagtgcggatgccagcacgttagttcaacgtgtttttaccgtgaataagggtgaaaaaacagcggtattagcgcatttgattcagcaagagcaatggcgacaagcgcttattttcgttaatgccaaacaccattgtgaacacttagctgaaaaattagctaaacgtggtattaccgccgccgtgtttcatggcgataaaggtcaaagcgaacgtagtcgtgtgcttgatggctttaaagctggcgatattgaagtgttaattgctacggatattgctgcccgtggtttagacatcgaaaaactaccggtggtcatcaactttaacttaccaagaagtccatcagactacatgcaccgtattggtcgaagtggtcgtgctggcgaagtaggtttagccatatcgcttatcgaccatgaagattatcatcacttcagcgtgatcgaaaagaagaacaaatttaggcttaaacgtgagcaagttgaaggttttgaagccgctgaaattaccggtgattcaattttagccgttgagaaaccaatggcagcgcctgaaggtactggtaagaaaaaacgtaaaaagaaaacatcagtaaatgccgatatctggtcaggatattctaaaccagaataa

SEQ ID NO: 77095 - protein, 432 aa, Colwellia psychrerythraea 34H
MTTVTTPATFTELGLITPLLARLAELEYHQPTPIQARAIPSVFAGRDLIAGANTGSGKTATFALPMLQKLREDISSGSKNSKGNFVTGLVLVPTRELAKQVADSIKSYAVHFNGEIKTLAVFGGVSVNIQMLALRGGVDILVATPGRLLDLISSNAIKLDKVKTLVLDEADRMLSLGFTEELTALLALTPKKKQTLLFSATFPEQVTTLTQELLNNPIEIQLQSADASTLVQRVFTVNKGEKTAVLAHLIQQEQWRQALIFVNAKHHCEHLAEKLAKRGITAAVFHGDKGQSERSRVLDGFKAGDIEVLIATDIAARGLDIEKLPVVINFNLPRSPSDYMHRIGRSGRAGEVGLAISLIDHEDYHHFSVIEKKNKFRLKREQVEGFEAAEITGDSILAVEKPMAAPEGTGKKKRKKKTSVNADIWSGYSKPE

SEQ ID NO: 77096 - DNA, 1689 bp, Thermobifida fusca YX
  CDS (1)..(1689): transl_table=11
ttgacggagaagaccattacagaacagtttagtttcgccgaccttggcctccggccggaactgctcgatgccctcgccgaggtcggctacgaggagcccacggccatccaacgcgaggcgatcccctcgctgttggaaggccgtgacctgctcggccaggccgcaaccggtacggggaagaccgcagccttctccctgccgatcctgcaccggctgccggacagcgaccgcggggacactccctcggcgctcatcctggtgcccacccgggaactggccttgcaagtatcggaagcactccaccgctacggccgccacctgaaggcacgcatcctccccatctacggcggccagcccatcggccgccagttgcgggccctggaacgcggtgtcgacgtcgtcgtcgccaccccgggacgggccctcgaccacatcggccgcggcaccctcgtcctggacacggtgcgcacggtcgtcttggacgaagccgacgagatgctcgacatgggcttcgccgaagacatcgaggcgatcatcgaagaagtgccggagaaccgccagacagtgctgttctcggcaaccatgcccgaccgcatcgaaggcatcgcccgacgccacctcaccgacccggtgcgcgtacgcatcgcccgcacttctcccgcacccggagaagagccgaaagtccggcagaacgcctacatcgtggcccgcccctacaaacccgcggccctgggacgcgtcctcgacatggaatcccccaccgcggccctcgtgttctgccgcacccgtgaggaagtcgaccagctcaccgagacgctcaacgctcggggataccgcgctgaagcgctccacggcggcatgagccaggaacagcgcgaccgggtcatggcgcgcctccgcggaggaaccgccgacctcctcatcgccacggacgtcgccgcccgcggactcgacatcgaacacctcacccacgtggtcaactacaatgtgccgtcggcaaccgaaacctacgtgcaccgcatcggccgcgtggggcgggccggccgagaaggcgtcgcgatcaccctcgtcgagccgcgggaacaccggatgctcaaaaccattcagcgcagcacgagcggcccgatcagcgtcgagaagctccccaccgtcgcggacctgcgggcccgccgcgtcgaactgacccgtgctgcgctccacgaagctctgaaggaggaggacgacgaccgcgaggcgttccgcgtggtcgtggagtcgctcgccgaagagttcgacatcatggagatcgcgctggccgcggtgaaactggcgcatgaagccagcggcgccgtcaccgaagaggaggagatccccgaaccggtgctccgccccgagcggagcgaacgccgcgaacgccgtggacggcgcggcggaccgggccgcggtgaacggcgcggccgaggcccctccgacggcatgacccgcctcttcgtcggcattggacgcaacgcccgggtccgcccccaagaccttgtgggagcgatcgccggggagaccgcattgagcggacgggacatcggcgcgatcgaaatcgccgaccgcttctccctggtggaagtgcccgaatccactgccgacggtgtgatcgcggcactgaagaaaagcacgattaaaggacgccgcaccgtcgtacgccgcgaacgcttctaa

SEQ ID NO: 77097 - protein, 562 aa, Thermobifida fusca YX
MTEKTITEQFSFADLGLRPELLDALAEVGYEEPTAIQREAIPSLLEGRDLLGQAATGTGKTAAFSLPILHRLPDSDRGDTPSALILVPTRELALQVSEALHRYGRHLKARILPIYGGQPIGRQLRALERGVDVVVATPGRALDHIGRGTLVLDTVRTVVLDEADEMLDMGFAEDIEAIIEEVPENRQTVLFSATMPDRIEGIARRHLTDPVRVRIARTSPAPGEEPKVRQNAYIVARPYKPAALGRVLDMESPTAALVFCRTREEVDQLTETLNARGYRAEALHGGMSQEQRDRVMARLRGGTADLLIATDVAARGLDIEHLTHVVNYNVPSATETYVHRIGRVGRAGREGVAITLVEPREHRMLKTIQRSTSGPISVEKLPTVADLRARRVELTRAALHEALKEEDDDREAFRVVVESLAEEFDIMEIALAAVKLAHEASGAVTEEEEIPEPVLRPERSERRERRGRRGGPGRGERRGRGPSDGMTRLFVGIGRNARVRPQDLVGAIAGETALSGRDIGAIEIADRFSLVEVPESTADGVIAALKKSTIKGRRTVVRRERF

SEQ ID NO: 77098 - DNA, 1425 bp, Ralstonia eutropha JMP134
  CDS (1)..(1425): transl_table=11
atgaacacaagctccctgcccccgcaagccggcgctgccgcgcccgccgccgatttctccaccctgcccctggcgccggccacgctcgccacgctggcccagctcggctatgacgaaatgacgccgatccaggccgcgagcctgccgctgacgctcgccggccacgacctgatcgcgcaggccaagaccggcagcggcaagaccgctgccttcgcgctggcgctgctgcacaggctcgatgcgcgccgcttcgacgtccaggcgatggtgctgtgcccaacgcgcgagctggccgaccaggtcacgcaggaaatccgccgcctcgcacgggccgaagagaacgtgaaggtgctgacgctgtgcggcggctcgccgatgcgcccgcaggtggacagcctggtccacggcgcgcacgtcgtggtgggcacgccgggccgcatcctcgaccatatcgaccggggcagcctcgaactgtccgcgatcaacacactggtgctcgacgaagcggaccgcatgctcgacatgggctttttcgacgacatctcgtatgtggccagccgctgcccgcgcgaacgccagacgatgctgttttcggccacgtatccggcgggcatcgacaagctcagccagaagttcctgcgcaagccgcaggaggtgaagctggccgagaagcacgacagctcgagcatccgccagtatttctatgaagtcgatgagagcgagcgtctcagcgccgtgggccgcctgctcgaccatttccgcccggccagcacgctggccttctgcaataccaaggcgcgctgccgcgatctggtcgacctgctgcgcggacagggctttcaggcgctggccttgcacggcgacctggagcagcgcgaccgcgatcaggtgctcgtgcagttcgccaacggcagctgctcggtgctggtagcgacggacgtggccgcgcgcgggctggatatcgcccagctcgaagccgtgatcaacgtggaaatcacgcccgaccccgaagtgcatatccaccgcatcggccgcactggccgcgccggcgaggaaggccacgcgttcagcctggtcagcatggacgagatggggcgcgtaggcaacctggagcagcaccacggcggcgaattcgaatggcacccgctggccgaactgcgcgccgcgagcaccgagcgcctgctgccgccgatggtcacgctgcagatgctgggcggccgcaaggaaaagatccggcccggcgatatcctcggtgcgctgaccggcgaggccggcttcaccaaggaacagatcggcaagatcaatgtgatggagatgtcgacctacatcgcggtggatcgcgccatcgggcgagaagcggtgcgccggttgaacgcggggaaggtgaagggcaagaaggtgaaggtgaggatgctgaccgagtga

SEQ ID NO: 77099 - protein, 474 aa, Ralstonia eutropha JMP134
MNTSSLPPQAGAAAPAADFSTLPLAPATLATLAQLGYDEMTPIQAASLPLTLAGHDLIAQAKTGSGKTAAFALALLHRLDARRFDVQAMVLCPTRELADQVTQEIRRLARAEENVKVLTLCGGSPMRPQVDSLVHGAHVVVGTPGRILDHIDRGSLELSAINTLVLDEADRMLDMGFFDDISYVASRCPRERQTMLFSATYPAGIDKLSQKFLRKPQEVKLAEKHDSSSIRQYFYEVDESERLSAVGRLLDHFRPASTLAFCNTKARCRDLVDLLRGQGFQALALHGDLEQRDRDQVLVQFANGSCSVLVATDVAARGLDIAQLEAVINVEITPDPEVHIHRIGRTGRAGEEGHAFSLVSMDEMGRVGNLEQHHGGEFEWHPLAELRAASTERLLPPMVTLQMLGGRKEKIRPGDILGALTGEAGFTKEQIGKINVMEMSTYIAVDRAIGREAVRRLNAGKVKGKKVKVRMLTE

SEQ ID NO: 77100 - DNA, 1602 bp, Thiobacillus denitrificans ATCC 25259; identical to SEQ ID NO: 65472
  CDS (1)..(1602): transl_table=11

SEQ ID NO: 77101 - protein, 533 aa, Thiobacillus denitrificans ATCC 25259; identical to SEQ ID NO: 65473

SEQ ID NO: 77102 - DNA, 1281 bp, Anabaena variabilis ATCC 29413
  CDS (1)..(1281): transl_table=11
atgtctttttctcatctcggcttgtccaatgaaattattcgtgctgttactgagttggggtacaccaaacctacaccaatccagatgcagtccattcctgctgtcttgtcgggacgtgacttgctagctggcgctcaaactggaactgggaaaactgccagctttaccctcccactgctacatttattatcccaagatagtcttaaaagcgcctccagtccttcctcccccattcgggcgctgattctcaccccgactcgtgaacttgccgcacaggtggaatcaagcgtacgtgactacggcaagtacttgaacctcaactcaatggtgatgtttggtggagtcagtattaatccccaaaaacagcgtttaaagggtcgcgtggatattttggttgctaccccagggcgactcctagaccatgtgcagcagggaacggtaaacctttcacagattgagattctcgtgctggatgaagccgaccggatgttagatatgggctttattcgtgatatccgtcgtatcctctctttgctgcccaaacagcgacaaaatttgctattcttcgctacattctcagacaaaatcaaggaactagccgccggtctgctaaatcgcccacaaatgattgaagtagcacgccgtaacgttaccgccgatacggtgacacaaaaagtctacaaaatagagcgcgacaggaaacgagatttacttgctcacctgattcggaaagataattggtatcaagtactagtatttactcgcaccaagtatggtgctgaccgcctggtgaaacaattgggacatgagcgcattcaagctctagctatccacggcaataagagccagtcggcacgtacccacgctctggcaaagttcaaaaatggtagtttacaagttttagtggcaactgatatcgccgcgcgggggctggacatcagcgaattgccttatgtggtcaatttcgatttgccctatgtaccagaagattatgttcatcgcattggtcgcactggtcgtgctggtgcatcaggtgaggctgtatctttggtgagcgccgatgaatatcatttgttggcagatattgaaaaactgattgaaaaacgattgccttttgaattggtagcgggtattggagctaattcccaaactaaaccagaaccaagccaggatgaacgcaagcaaaaacccaaagatagtaagcatcagcctcgctctgctgctcaagctgtgccaaagaaatcagggaaaaaacgtttaactaattctgggaaaaggtaa

SEQ ID NO: 77103 - protein, 426 aa, Anabaena variabilis ATCC 29413
MSFSHLGLSNEIIRAVTELGYTKPTPIQMQSIPAVLSGRDLLAGAQTGTGKTASFTLPLLHLLSQDSLKSASSPSSPIRALILTPTRELAAQVESSVRDYGKYLNLNSMVMFGGVSINPQKQRLKGRVDILVATPGRLLDHVQQGTVNLSQIEILVLDEADRMLDMGFIRDIRRILSLLPKQRQNLLFFATFSDKIKELAAGLLNRPQMIEVARRNVTADTVTQKVYKIERDRKRDLLAHLIRKDNWYQVLVFTRTKYGADRLVKQLGHERIQALAIHGNKSQSARTHALAKFKNGSLQVLVATDIAARGLDISELPYVVNFDLPYVPEDYVHRIGRTGRAGASGEAVSLVSADEYHLLADIEKLIEKRLPFELVAGIGANSQTKPEPSQDERKQKPKDSKHQPRSAAQAVPKKSGKKRLTNSGKR

SEQ ID NO: 77104 - DNA, 1674 bp, Pseudomonas fluorescens PfO-1
  CDS (1)..(1674): transl_table=11
atgacccaggaaatcggcggcttcgccgctcttgaacttcatcccaatattgtcgctgcagtagtcgctaccggctatgaagagccttcggccattcagcagcagtcgatcccgatcatcctcgccggtcacgatatgattggtcaggcgcaaaccggtaccggtaaaaccgctgcctttgccctgcctatcctgcaccgcattgatccgtccaagcgcgagccgcaagctctgatcctggccccaactcgtgagttggcgctacaagttgcaaccgctttcgaaacctacgccaagcaaatgccgggcgtgactgttgtggctgtctacggcggcgcgccgatgggcccacaattgaaagcaatccgtaatggcgcacagatcgttgtcgccactccgggccgtctgtgcgaccacctgcgtcgcgacgaaaaagtgctgcagaccgtgaaccacctggttctcgacgaagcagacgaaatgctcaaactgggcttcatggacgacctcgaagtgatcttcaaggccatgccggaaacccgtcagaccgtattgttctcggcgaccctgccgcaatcgatccgtgccatcgccgagcgtcacctgcgcgatccaaagcacgtgaagatccagagcaagacccagaccgttaccgcgatcgaacaggctcacctgttggttcacgctgaccagaagacctctgccgttctcagcttgctggaagtggaagatttcgacgctctgatcatgttcgtgcgcaccaagcaagcgaccctggatctggccagcgccctcgacgccaaaggctacaaagccgccgcgctgaacggcgacatcgcccagaaccagcgtgagcgcgtgatcgactcgctcaaggatggccgtctggacatcgttgtggcgaccgacgttgccgcccgtggtctggacgttccgcgtatcacccacgtgttcaacgtggacatgccgtacgatccggaatcctacgtgcaccgtatcggccgtaccggccgtgccggtcgcgaaggccgcgcgctgctgctggtgacgccacgtgagcgccgcatgctgcaggtgatcgagcgtgtgaccggtcagaaagttgccgaagtgcgtctgcccgacgcccaggccgttcttgatgcccgcatcaagaaactgaccaacagcctgtcgccgctggtggctgacgccgaatcgactcacggtgatctgctggatcgcctgaccgctgatatcggttgcaccccacgcgccctggctgccgcactgctgcgcaaggccaccaatggtcaggcgctgaacctggcagcgatcgagaaggaacgtccactggtgccgaacagcgcgccacgtggcgaccgtcctgagcgttccggtgatcgtccggaccgtggtgaccgcgagcgtcgtgctccgatgccactgggcgaaggccgtgcccgttgccgtaccgcgctgggcgcgcgtgacggtatcgcggcgaaaaacctgctgggcgccatcctcaacgaaggtggtctggcacgtgaagccatcggtcgcatccaggtgcgtgacagcttcagcctcgtcgagctgccggaagatggtctggacaaactcctgaccaagctgaaggacactcgcgttgccggcaagcagctgaaactgcgtcgctaccgcgaagattga

SEQ ID NO: 77105 - protein, 557 aa, Pseudomonas fluorescens PfO-1
MTQEIGGFAALELHPNIVAAVVATGYEEPSAIQQQSIPIILAGHDMIGQAQTGTGKTAAFALPILHRIDPSKREPQALILAPTRELALQVATAFETYAKQMPGVTVVAVYGGAPMGPQLKAIRNGAQIVVATPGRLCDHLRRDEKVLQTVNHLVLDEADEMLKLGFMDDLEVIFKAMPETRQTVLFSATLPQSIRAIAERHLRDPKHVKIQSKTQTVTAIEQAHLLVHADQKTSAVLSLLEVEDFDALIMFVRTKQATLDLASALDAKGYKAAALNGDIAQNQRERVIDSLKDGRLDIVVATDVAARGLDVPRITHVFNVDMPYDPESYVHRIGRTGRAGREGRALLLVTPRERRMLQVIERVTGQKVAEVRLPDAQAVLDARIKKLTNSLSPLVADAESTHGDLLDRLTADIGCTPRALAAALLRKATNGQALNLAAIEKERPLVPNSAPRGDRPERSGDRPDRGDRERRAPMPLGEGRARCRTALGARDGIAAKNLLGAILNEGGLAREAIGRIQVRDSFSLVELPEDGLDKLLTKLKDTRVAGKQLKLRRYRED

SEQ ID NO: 77106 - DNA, 1341 bp, Pseudomonas fluorescens PfO-1
  CDS (1)..(1341): transl_table=11
atgactttcgccacccttggcctgatcgaacccttgctgcgctccctcgagaagctcggctaccagaccccgacgccggtgcaggcgcaagctattccggtcgtgctggccggtcgcgacctgatggccgcggcccagaccggcaccggcaagaccgccggttttgctttgccgctgctgcaactgctggcgatggaagggccgaaagtcaccgccaactcggtgcgcgcgctgattctggtgccgacccgcgagctggccgagcaagtccacgaagccgtgcgccagtacgctgagaacctgccattgcgcacttacgcggtgtacggcggcgtcagcatcaacccgcagatgatgaagctgcgcggcggtgtcgatctgttggtcgcgaccccgggccgtctgctcgacctgttccgccagaacgcgctgaagttcaaccagctgcaaactctggtgctggacgaagccgaccgcatgctcgacctgggcttttccgaggagctggcgaacatttaccgcgcgctgccgaagaagcggcagacgctgctgttctccgcgacgttctccgatgacatccgcctgctggccgggcagatgctcaacgatccgcagagcatcgaagtcagcccgcgcaacgtggccgccaacaccgtcaagcagtgggtggtgacggtggacaagaagcgcaagccggaactgttcgtgcacttgatgcgcaagaacaagtggaagcaggtgctggtgtttgccaagacccgtaatggtgtggacgcgttggtcgagaaacttcagggcctgggcgtgaacgccgacggcatccacggcgacaagccgcaagcgacccggcagcgggcactggaccgtttcaaactgagcgaagtgcagattctggtggccactgatgttgctgcccgtggtctggatatcgaagatttgccgctggtggtcaactttgatctgccgatcgtggccgaggattacattcaccgtatcggccggactggccgcgcgggttcgaccggtgaggcgatttcgctggtgtgcgctgatgaagtgaacatgttgtcggcgattgaaatgctcacccgcagcaccttgaagcgcgagatcgaaccggactttgtgcccgagcaccgcgtgccggacaccgatgccagtggtcaggtgatcaagaaaccgaagaaaccgaagaaaccgaaagcttccggtggcggtggtggcaagcgcaatctgggcaagtgggtggacagcggcgagactcaggcgccggagccttcgatcaagcctgtgcgcaaggtgccggtgttcaataccgggccgcgcaagcgtaagccttaa

SEQ ID NO: 77107 - protein, 446 aa, Pseudomonas fluorescens PfO-1
MTFATLGLIEPLLRSLEKLGYQTPTPVQAQAIPVVLAGRDLMAAAQTGTGKTAGFALPLLQLLAMEGPKVTANSVRALILVPTRELAEQVHEAVRQYAENLPLRTYAVYGGVSINPQMMKLRGGVDLLVATPGRLLDLFRQNALKFNQLQTLVLDEADRMLDLGFSEELANIYRALPKKRQTLLFSATFSDDIRLLAGQMLNDPQSIEVSPRNVAANTVKQWVVTVDKKRKPELFVHLMRKNKWKQVLVFAKTRNGVDALVEKLQGLGVNADGIHGDKPQATRQRALDRFKLSEVQILVATDVAARGLDIEDLPLVVNFDLPIVAEDYIHRIGRTGRAGSTGEAISLVCADEVNMLSAIEMLTRSTLKREIEPDFVPEHRVPDTDASGQVIKKPKKPKKPKASGGGGGKRNLGKWVDSGETQAPEPSIKPVRKVPVFNTGPRKRKP

SEQ ID NO: 77108 - DNA, 1437 bp, Pseudomonas fluorescens PfO-1
  CDS (1)..(1437): transl_table=11
atggccagaggctgctacactgcgcgacattttgttttgcaggccagtcccgtgaccaccatcgccaccgcttttaatactttgccgctgtccgccgccatgctggctaacctcgactccctcggttatgcccagatgacgccgatccaggcgcagagcttgccggtgatcctcaaggggatggacctgatcgcccaggccaagaccggcagcggcaagactgccgcgttcggtatcggcctgctgaacccgatcaatccgcgctacttcggttgccaggcgctggtaatttgcccgactcgcgaactggctgaccaggtcgccaaggaaatccgccgtctggcccgtgccgaagacaacatcaaggtcctgaccctgtgcggcggcgtgtccttcggcccgcagatcggctcgctggagcacggcgcgcacatcatcgtcggcaccccgggccgcatccagcagcacctgcgcaagggttcgctggtcctcgacggcctcaacacgctgatcctcgacgaagccgaccgcatgctcgacatgggtttctacgacgccatcgaagacatcatcgagcagaccccggcccgtcgtcagaccctgctgttctcggcgacctacccggtgggcatcaagcaactggcgtcgaagttcatgcgcgatccgcaaacggtcaaggccgaagcgttccacgacgatacccagatcgagcagcgcttctacgagatttctccggaagagcgcatgagtgcggtgaccaaggttctgcaccacttccgtccggcctccaccgtggcgttctgcttcaccaagcagcaagtgcaggaaactgtcgatcacctgacctccaaaggcatttccgccgtcggcctgcacggcgatctggagcagcgtgaccgcgatcaggtgttggcgatgttcgccaaccgcagtacttcggtactggttgccaccgacgttgccgcccgtggtctggacattgatgcactggacatggtgatcaacgtcgaactggcccgcgactcggaaatccacattcaccgtgttggccgtaccggtcgtgccggcgagaaaggcatcgcggtcagcctggtggcgccgtccgaagcgcaccgcgcgcaagccatcgaacaactgcagaagaccccgctgaactgggatcaggtggacaacctcaagtcccagggcggtgccccgctgcaaccgccgatgagcacgctgtgcatcgctggcggccggaaagacaaggtacgtccgggcgacattcttggcgcactgaccggtgaggccggcattccgggcgcccaggtcggcaagatcgcgatctttgacttccagtcctatgtggccgtcgagcgcaccgtggtcatgcaggcgctgcagcgtttgaacaacggcaagatcaagggtcgttcgctgcgcgtccgggttttgtaa

SEQ ID NO: 77109 - protein, 478 aa, Pseudomonas fluorescens PfO-1
MARGCYTARHFVLQASPVTTIATAFNTLPLSAAMLANLDSLGYAQMTPIQAQSLPVILKGMDLIAQAKTGSGKTAAFGIGLLNPINPRYFGCQALVICPTRELADQVAKEIRRLARAEDNIKVLTLCGGVSFGPQIGSLEHGAHIIVGTPGRIQQHLRKGSLVLDGLNTLILDEADRMLDMGFYDAIEDIIEQTPARRQTLLFSATYPVGIKQLASKFMRDPQTVKAEAFHDDTQIEQRFYEISPEERMSAVTKVLHHFRPASTVAFCFTKQQVQETVDHLTSKGISAVGLHGDLEQRDRDQVLAMFANRSTSVLVATDVAARGLDIDALDMVINVELARDSEIHIHRVGRTGRAGEKGIAVSLVAPSEAHRAQAIEQLQKTPLNWDQVDNLKSQGGAPLQPPMSTLCIAGGRKDKVRPGDILGALTGEAGIPGAQVGKIAIFDFQSYVAVERTVVMQALQRLNNGKIKGRSLRVRVL

SEQ ID NO: 77110 - DNA, 1557 bp, Rhodobacter sphaeroides 2.4.1; identical to SEQ ID NO: 65474
  CDS (1)..(1557): transl_table=11

SEQ ID NO: 77111 - protein, 518 aa, Rhodobacter sphaeroides 2.4.1; identical to SEQ ID NO: 65475

SEQ ID NO: 77112 - DNA, 1293 bp, Carboxydothermus hydrogenoformans Z-2901
  CDS (1)..(1293): transl_table=11
atggaagagtttaaaaaattgggattaatcacaccgcttttaaaagcggtgaacgacctggggtttgaaatgcctactcccattcaaaaggaggctattccacttattttagaaggacataacctggtgggtcaggctcctaccggaaccggaaaaaccgctgcttaccttttaccggtgttacaaagaattcagcggggaaagaaagctcaagtgttgatcgttactccgacccgggagctggcactgcaggtggccgatgaagtggccaaactcggaaaatatcttaaagtccgggctctggcggtatacggcggccaggctattgagcggcaaatccggggacttcgccagggggtagaagtgattgtggggaccccgggacgaatcttagaccatatcggccggaagacttttccggcggcagagatcaaaatcgttatcctggacgaagccgatgaaatgctggatatgggttttatcgatgatatcgaggcaattttaaataccctgaccaaccgccagcaaaccttgcttttctcggcaacgctgccggctccaataaaaaccataattaaaaagtttttaggggggtataaaacggttaaactggttggcagggaaaaaaccgtgccggcgattcgccaggtatattacgagcttccggaaacggaaaaaatcgagggacttgtcagtatcttaaacagcgagctacccatccaggctattgtgttttgtcgcaccaaaaagcgggttgatgaggtagtagagcaattaaactttcggggttatgcagctaaaggattgcacggggatatgagccagcgggaacgcactcagaccattaaaagctttaaagccgggaaaaccgaacttttggtggctaccgatgtagccgcccggggccttgacattcccgatgtttcccatgtcatcaatttcgatattccccagaacccggaaagctatatccaccgtattggacgtaccggccgggcgggcagggaaggaaaggccattaccctgattaactaccgggaaagaaagcttttaaaagccatagaagaggcaataaataagcgcttaaagcgggaaatactgccggagccggtggatttggaagaagccagattcaaaaaaattgccaagaaaattctggataccattaccaaaggggtaccggctttgtatctggaaatggcggccagacttttagaagaggaagagtcggagcagcttttaggggcaactttgtatcttctggaagatcggtctttacagaatgatttttag

SEQ ID NO: 77113 - protein, 430 aa, Carboxydothermus hydrogenoformans Z-2901
MEEFKKLGLITPLLKAVNDLGFEMPTPIQKEAIPLILEGHNLVGQAPTGTGKTAAYLLPVLQRIQRGKKAQVLIVTPTRELALQVADEVAKLGKYLKVRALAVYGGQAIERQIRGLRQGVEVIVGTPGRILDHIGRKTFPAAEIKIVILDEADEMLDMGFIDDIEAILNTLTNRQQTLLFSATLPAPIKTIIKKFLGGYKTVKLVGREKTVPAIRQVYYELPETEKIEGLVSILNSELPIQAIVFCRTKKRVDEVVEQLNFRGYAAKGLHGDMSQRERTQTIKSFKAGKTELLVATDVAARGLDIPDVSHVINFDIPQNPESYIHRIGRTGRAGREGKAITLINYRERKLLKAIEEAINKRLKREILPEPVDLEEARFKKIAKKILDTITKGVPALYLEMAARLLEEEESEQLLGATLYLLEDRSLQNDF

SEQ ID NO: 77114 - DNA, 1446 bp, Burkholderia sp. 383
  CDS (1)..(1446): transl_table=11
atgtcttttgcctcgcttggcctgatcgatcccttgctgcgtaacctgcaggacctcaattaccaggcccctacgccggtgcaggccaaggcgattcctgccgtgctcggcggcaaggacgtgatggcgggtgcccagaccggcacgggcaagacggcgggttttgcgctgccgctgttgcagcggctggtgcaacatggccccgcggtgtccagcaaccgcgcacgtgttctggtgctggtgcctacgcgtgaactggctgaacaggtgctgcaaagcttcatcgcgtacggcaagggcctcgatttgcgatttctggccgcttacgggggcgtgagtatcaatccgcagatgatgaagctgcgcaagggcgtggatgtgctcgtggccacgccgggccgtttgctggatctcaaccgccagaatgcggtgcagttcgatcaggtgcagacgctggtgctggacgaggccgaccgcatgctggatctcggttttgcgcgcgagctcaacgccgtcttcgccgcgctgcccgcgcagcgccagaccttgctgttctcggccacgttttcagacgatatccgcgcgatggcggcgaccattctgcgcggcccggtcaacatcagcgtcagcccgcccaatgccacggccagcaagatcaagcagtgggtggtgacggtggacaagcggaacaagcccgaccttttcatgcacctcgtggccgagaacaagtgggagcatgcgctggtattcgtcaagacgcgcaacggcgtggattacctggcggccatgctggacgaagccggctatgcggtcgacaccattcatggcgataagccgcaaccggcgcgcctgcgtgcgctggagcgcttcaagacgggcgaagtacagatgctggtggccaccgatgtggcggcgcgcgggctggatatcgacgacttgccgctggtgatcaacgtggacctgccgatcgtggcgcaagactatgtgcaccgtattggccgtaccggccgcgcgggcgccagcggtgtggcggtgtccctggtgtgtgcggacgaagcgccgcaactggccgcgatcgaagcgctgatcaagcaaacgctgcgccgtgaagaagagccgggtttcgaggccgaacaccgcgtgccggaaaccagcgcgacgggcgagatcatcaagaaacccaaaaagcccaagaagccgaaggtgccgcccgctgtggcgggtgccatgccggtgccgggtaaaaagccgcgtccgcagaatggcgaaaacaagcggaagcctgcggcggtgcacgcgaaaccggctggtaacggaccggactacaccattggcagtccgttcagcgtgcagaagccgcgtggtaaatctgccgccaagccagcggcgggagcgcgcaagccggctggcaaacccgctggtgggcgagggaaacgtccgtcctga

SEQ ID NO: 77115 - protein, 481 aa, Burkholderia sp. 383
MSFASLGLIDPLLRNLQDLNYQAPTPVQAKAIPAVLGGKDVMAGAQTGTGKTAGFALPLLQRLVQHGPAVSSNRARVLVLVPTRELAEQVLQSFIAYGKGLDLRFLAAYGGVSINPQMMKLRKGVDVLVATPGRLLDLNRQNAVQFDQVQTLVLDEADRMLDLGFARELNAVFAALPAQRQTLLFSATFSDDIRAMAATILRGPVNISVSPPNATASKIKQWVVTVDKRNKPDLFMHLVAENKWEHALVFVKTRNGVDYLAAMLDEAGYAVDTIHGDKPQPARLRALERFKTGEVQMLVATDVAARGLDIDDLPLVINVDLPIVAQDYVHRIGRTGRAGASGVAVSLVCADEAPQLAAIEALIKQTLRREEEPGFEAEHRVPETSATGEIIKKPKKPKKPKVPPAVAGAMPVPGKKPRPQNGENKRKPAAVHAKPAGNGPDYTIGSPFSVQKPRGKSAAKPAAGARKPAGKPAGGRGKRPS

SEQ ID NO: 77116 - DNA, 1398 bp, Burkholderia sp. 383
  CDS (1)..(1398): transl_table=11
atgacccagccgaccgccacgccgttcagcgcgctgtcgttgacgcccgccacgctcgccaacctcgcgcagctcggctatgtcgacatgacgccgatccaggccgcgagcctgccgatcgcgctggccggccaggacctgatcgcgcaggcgaagacgggcagcggcaagaccgccgcgttctcgctcgcgctgctggcccgcctcgacgcgcgccgcttcgacgtgcaggcgatgatcctgtgcccgacgcgcgaactcgccgatcaggtcacgcaggaagtgcgccgcctcgcgcgcgccgaggaaaacgtgaaggtgctgacgctgtgcggcggcacgccgatgcgcccgcaaacgcagagcctcgagcacggcgcgcacatcgtcgtcggcacgccgggccgcatcatggatcacctcgatcgcggcaacctgaagctcgacgcactgaatacgctggtgctcgacgaagccgaccggatgctcgacatgggcttcttcgacgacatcgcgaaggtcgcgcggatgtgcccgaccacgcgccagacgctgctgttctccgcgacctacccggacggcatcgcgaagctgagccagcagttcctgcgcaacccgaaggaagtgaaactcgcggagcgccacgacgacagcaagatccgccagcgcttctatgaagtgacggaagacgagcggctgcatgcggtgggccagctgctgaaccactaccggccggtgagcacgatcgcgttctgcaacaccaagcagcagtgccgcgacctgctcgacgtgctgcacgcgcagggcttccacgcgctcgcgctgcacggcgagctcgaccagcgcgagcgcgaccaggtgctgatccagttcgcgaaccgcagctgctcggtgctggtggcaactgacgtcgccgcgcgcgggctcgacatcgcgcagctcgaggcggtgatcaacgtcgacgtgacgcccgaccccgaagtgcacgtgcaccgcatcggccgcaccggccgcgcggatcaggacggctgggcgctgagcctcgcgagcatggacgaaatgggtcgcgtcggcgggatcgagcaggcgcagaagcgcgaggtcgaatggcatccgctcgcggagctgacgccgaccggcaccgacacgctgctgccgccgatggaaacgctgcagatcctcggcgggcgcaaggacaagatccgcccgggcgacgtgctcggcgcgctgaccggcgacgccgggttcgacggcaagcagatcggcaagatcaacgtgaccgagttctcgacctatgtcgcgctcgagcgcggcgtggcgcacgacgcgctgcgcaagctcaatgccgggaaaatcaaaggcaagcgggtcaaggtccggttgatggacgaagagtga

SEQ ID NO: 77117 - protein, 465 aa, Burkholderia sp. 383
MTQPTATPFSALSLTPATLANLAQLGYVDMTPIQAASLPIALAGQDLIAQAKTGSGKTAAFSLALLARLDARRFDVQAMILCPTRELADQVTQEVRRLARAEENVKVLTLCGGTPMRPQTQSLEHGAHIVVGTPGRIMDHLDRGNLKLDALNTLVLDEADRMLDMGFFDDIAKVARMCPTTRQTLLFSATYPDGIAKLSQQFLRNPKEVKLAERHDDSKIRQRFYEVTEDERLHAVGQLLNHYRPVSTIAFCNTKQQCRDLLDVLHAQGFHALALHGELDQRERDQVLIQFANRSCSVLVATDVAARGLDIAQLEAVINVDVTPDPEVHVHRIGRTGRADQDGWALSLASMDEMGRVGGIEQAQKREVEWHPLAELTPTGTDTLLPPMETLQILGGRKDKIRPGDVLGALTGDAGFDGKQIGKINVTEFSTYVALERGVAHDALRKLNAGKIKGKRVKVRLMDEE

SEQ ID NO: 77118 - DNA, 1359 bp, Geobacter metallireducens GS-15
  CDS (1)..(1359): transl_table=11
atgacgtttgctgaactgaacctcctcccccccattctcaaggcggtcgccgcctgcggctacaccgacccgaccccgatccaggcccaggcgattcccagggcactggagggccgcgaccttctcgccacggcccagaccggcaccggcaagaccgcagcctttgtccttccagccctccagcgtctggctcggccggcccaaaagcccggtcggggaccccgcgtcctggtcctcacccccacccgggaactggcccaacaggtaaccgacgcggtccgctcctacggtaagttcctgcggatacgcagcggcgccatccttggcggcatgccctaccgggagcagctccggctcctctcggcgccggtggacctgatcgtggccacaccggggcgcctcgtggacctgctggaccggagaagcctcgacctctcccgcctggagttgctgattctcgacgaggcagaccggatgctcgacatgggtttcagcgatgatgtcgaccgggtcgccgccgcctccccctccgaccgccagaccctcctcttcaccgccaccatggacgccaccatggcgcgcctggcggggcggctcctgaacgaaccggagcgcatcgaggtcgcgggcaccaagacgacccatgagcatatcgagcagcgcctccacgtggctgacgacctctcccacaagaacaggctgcttcagcatctgatcaccgatggcgatgtccggaaggcgatcatcttctccgccaccaagcgcgatgccgaaaacatggctatcgaactcaggagccaggggcactccgccgcggcactccacggcgacatgccccagagtgcacgcaaccggaccatcgccgccatgaagcaggggagaatccggctcctggtggctactgacgtggcagcccggggcctcgacgtctccggcatcagccatgtgatcaacttcgacctgcctaaattcgccgaggattacgtccatcgcatcggccgcaccggccgggcaggggcatcggggatcgccatctccttcgcctccctcaatgaggtcagctacctggcccggatcgagcgctacatcggccaaacccttcccgagcaccagattccgggtctggagccccgccggccccttcaccgtgtttctaccggcaggggaagcaggccggggaactccaccggcggtccccggaaaagttacggaaaccgcgacgctgccaagacgggcggcaggcccggcaacgccaagcgttccccctggggcaagcacaccacttccaacggtccagtcgttgaatatcgcagctccaagggacgcgaggggagcggccaaccccgccgacagtcctga

SEQ ID NO: 77119 - protein, 452 aa, Geobacter metallireducens GS-15
MTFAELNLLPPILKAVAACGYTDPTPIQAQAIPRALEGRDLLATAQTGTGKTAAFVLPALQRLARPAQKPGRGPRVLVLTPTRELAQQVTDAVRSYGKFLRIRSGAILGGMPYREQLRLLSAPVDLIVATPGRLVDLLDRRSLDLSRLELLILDEADRMLDMGFSDDVDRVAAASPSDRQTLLFTATMDATMARLAGRLLNEPERIEVAGTKTTHEHIEQRLHVADDLSHKNRLLQHLITDGDVRKAIIFSATKRDAENMAIELRSQGHSAAALHGDMPQSARNRTIAAMKQGRIRLLVATDVAARGLDVSGISHVINFDLPKFAEDYVHRIGRTGRAGASGIAISFASLNEVSYLARIERYIGQTLPEHQIPGLEPRRPLHRVSTGRGSRPGNSTGGPRKSYGNRDAAKTGGRPGNAKRSPWGKHTTSNGPVVEYRSSKGREGSGQPRRQS

SEQ ID NO: 77120 - DNA, 1719 bp, Desulfovibrio desulfuricans G20; identical to SEQ ID NO: 65480
  CDS (1)..(1719): transl_table=11

SEQ ID NO: 77121 - protein, 572 aa, Desulfovibrio desulfuricans G20; identical to SEQ ID NO: 65481

SEQ ID NO: 77122 - DNA, 1782 bp, Prochlorococcus marinus str. MIT 9312; identical to SEQ ID NO: 65482
  CDS (1)..(1782): transl_table=11

SEQ ID NO: 77123 - protein, 593 aa, Prochlorococcus marinus str. MIT 9312; identical to SEQ ID NO: 65483

SEQ ID NO: 77124 - DNA, 1182 bp, Rhodospirillum rubrum ATCC 11170
  CDS (1)..(1182): transl_table=11
atgaccgaatttgcttcgctcgacttgatcgagccgcttgcccgcgccgtcacggcgctgggctataccgttgcgactcccattcaggcgggggctatccctccgcagctgttgggacgcgacgtgctgggcattgcccaaaccgggaccggcaagaccgcgtccttcgtcctgcccctgcttcagcgcctgaccaaggacccccagccccgggttcccggccggccgcgcgcccttatcctgacgccgacccgcgaactggcccagcagatcaccgaaagcatcggcgaccttggccggacgctgtcggccattcgctgcggcgtggtggttggcggggtcgatatcctgcgccagacccgcatggttcagcgcggcttggaaatcctggtggcgacgcccggccgcctgcaagatctgatgaaccgcaaggccgtcgacctgcgcgccatcgaagttctggtgcttgacgaagccgaccgcatgctcgacatgggcttcgcccccgccgtcaagaagatcgccgccgttctgccgcgcaagcgccagacggtgatgttctcggccaccctgcccaatgaagtgaccgggctggtcgccagcctgatgaacgatccggtgcgcgttgaagtcgctccggcggccagcgtcgccaatcgcatcgaccagcgcgtgctgttcgtcgaacagaccaacaagcgtaagctgttgcttgatctgctcggcgacgcccgcaaggtcgaacgcgccatcgtcttcacccgcaccaagcacggcgccaacaagctgggcatcttcttgctggaatacggcgtcaaaagcgacgtgatccacggcaacaagtcgcaaggcgcccgtcagcgcgcgcttaacgacttcaagtcgggcaaggtccgcgccctggtcgccaccgatatcgccgcgcgcggcatcgatgtcgacggcatcacccatgtcatcaacttcgacctgcccaacgagcccgagagctacgtccaccgcatcggccgcacggcgcgggccggcgccgcgggcatcgcgctttcgctctgcgccccccaggaaatgccctatctgaaggcgatcgaaaaggtcatcaaaagccggatcgacgtggattccacccacgccttccatacgccgtcgatggcccgcgcccacggcagccacggccaccgttaa

SEQ ID NO: 77125 - protein, 393 aa, Rhodospirillum rubrum ATCC 11170
MTEFASLDLIEPLARAVTALGYTVATPIQAGAIPPQLLGRDVLGIAQTGTGKTASFVLPLLQRLTKDPQPRVPGRPRALILTPTRELAQQITESIGDLGRTLSAIRCGVVVGGVDILRQTRMVQRGLEILVATPGRLQDLMNRKAVDLRAIEVLVLDEADRMLDMGFAPAVKKIAAVLPRKRQTVMFSATLPNEVTGLVASLMNDPVRVEVAPAASVANRIDQRVLFVEQTNKRKLLLDLLGDARKVERAIVFTRTKHGANKLGIFLLEYGVKSDVIHGNKSQGARQRALNDFKSGKVRALVATDIAARGIDVDGITHVINFDLPNEPESYVHRIGRTARAGAAGIALSLCAPQEMPYLKAIEKVIKSRIDVDSTHAFHTPSMARAHGSHGHR

SEQ ID NO: 77126 - DNA, 1689 bp, Burkholderia thailandensis E264
  CDS (1)..(1689): transl_table=11
atgcgtacatcccgggcgcggccgacatcgcgtcggggccgaaccagtacgtcgtgcggctcgcgctgctgcaccagttctgaccggcgcggccgcgcgcggcgtcgcgcggcgtcgcgcggtgatgcggcgcgatgcggcgcgatgccgtgcgcggccgcgatctcgcgcccgcgacaagggccgcatgtccgacatcggaatttctcgccggacgatcgatcgctaggtccagccggcatagggcatgtacgatacatgccctatgtcaacagcccccgaccccacgccatgacccagcaatccaccgccacgccgttcagcgcgctgccgctgacacccgcgacgctcgcgaatctcgcgcagctcggctacaccgtcatgacgccgatccaggccgcgagcctgccgatcgcgctcgccggccacgacctgatcgcgcaggcgaaaaccggcagcggcaagacggccgcgttctcgctcgcgctgctcgcgcgcctcgatgcgcgccgcttcgacgtgcaggcactggtgctgtgcccgacgcgcgaactggccgaccaggtcgcgcaggaagtccgccgcctcgcgcgcgcggaggagaacgtcaaggtgctgacgctgtgcggcggcacgccgatgcgtccgcagacgcagagcctcgaacacggcgcgcacatcatcgtcggcacgcccgggcgcatcatggaccatctcgaccgcggccacctgacgctcgacgcgctgaacacgctcgtgctcgacgaagcggaccggatgctcgacatgggattcttcgacgacatcgcgaaagtcgcacggctatgcccgccgacgcgccagacgctgctgttctccgcgacctacccggacgggatcgcgaagctgagccagcagttcctgcgcaatccgaaggaagtgaagctcgaagagcgccacgacgacagcaagatccgccagcgcttctacgaagtgaccgaggacgagcggctgcacgcggtcggcctgctgctgaagcactatcgcccggtcagcacgatcgcgttctgcaacacgaagcagcagtgccgcgacctgctcgacgtgctgcacgcacagggattccacgcgctcgcgctgcacggcgagctcgagcagcgcgagcgcgaccaagtgctgatccagttcgcgaaccgaagctgctcggtgctcgtcgcgaccgacgtcgccgcgcgcggcctcgacatcgcgcagctcgaagcggtgatcaacgtcgacgtgacgcccgatcccgaagtgcacgtgcaccgcatcggccgcacgggccgcgcggaccaggaaggctgggcgctcagcctcgcgagcatggacgagatggggcgcgtgggcgcgatcgagcaggcgctcgggcgcgacgtcgaatggcatccgctcgccgagctgaaggccgacggcaacgagccgctgctgccgccgatggagacgctgcagatcctcggcggccgcaaggacaagatccgccccggcgacgtgctcggcgcgctgacgggcgacgcgggcttcagcggctcgcagatcggcaagatcaacgtgaccgagttctcgacctacgtcgcgctcgagcgcggcatcgcgcgcgacgcgctgcgcaagctcaacgcgggcaagatcaagggcaagcgggtgaaagtccggctgatggacgaatga

SEQ ID NO: 77127 - protein, 562 aa, Burkholderia thailandensis E264
MRTSRARPTSRRGRTSTSCGSRCCTSSDRRGRARRRAASRGDAARCGAMPCAAAISRPRQGPHVRHRNFSPDDRSLGPAGIGHVRYMPYVNSPRPHAMTQQSTATPFSALPLTPATLANLAQLGYTVMTPIQAASLPIALAGHDLIAQAKTGSGKTAAFSLALLARLDARRFDVQALVLCPTRELADQVAQEVRRLARAEENVKVLTLCGGTPMRPQTQSLEHGAHIIVGTPGRIMDHLDRGHLTLDALNTLVLDEADRMLDMGFFDDIAKVARLCPPTRQTLLFSATYPDGIAKLSQQFLRNPKEVKLEERHDDSKIRQRFYEVTEDERLHAVGLLLKHYRPVSTIAFCNTKQQCRDLLDVLHAQGFHALALHGELEQRERDQVLIQFANRSCSVLVATDVAARGLDIAQLEAVINVDVTPDPEVHVHRIGRTGRADQEGWALSLASMDEMGRVGAIEQALGRDVEWHPLAELKADGNEPLLPPMETLQILGGRKDKIRPGDVLGALTGDAGFSGSQIGKINVTEFSTYVALERGIARDALRKLNAGKIKGKRVKVRLMDE

SEQ ID NO: 77128 - DNA, 1449 bp, Burkholderia thailandensis E264
  CDS (1)..(1449): transl_table=11
atgtctttcgcatctctcggtctcgccgaaccgctcgtgcgggccgtcaacgagctgggctatacgcagcccacgccaatccaggctcaggccattcccgccgtactgggcggcggcgatcttctcgccggcgcgcagacgggcaccggcaagaccgccggcttcacgctgccgatcctgcaacgcctgcacgcgttctacgcggaaaaccgcggcgcgcgccgcgcggtgcgcgcgctcatcctcacgccgacgcgcgagctcgccgcgcaagtcgaggaaagcgtgcgcgcgtacagcaagtacgtgaagctgcgctcgaccgtgatgttcggcggcgtcagcatcaatccgcagatcgacgcgttgaagcgcggcgtcgacatcgtcgtcgcgacgccggggcgcctgctcgatcacatgcagcagaagacgatcgacgtatcgagcctcgacatcctcgtgctcgacgaagccgaccggatgctcgacatgggcttcatccacgacatcaagcgcgtgctcgcgaagctgccggcgaagcgccagaacctgctgttctcggccaccttctccgacgagatcaagtcgctcgcggacagcctgctcgattcgcccgcgctgatcgaggtcgcgcgccgcaacacgacggccgagacgatcgcgcagaagatccacccggtcgatcgcgatcgcaagcgcgaactgctcacgcatctgatccgcgagcacaactggttccaggtgctcgtgttcacgcgcacgaagcacggcgcgaaccggctggccgagcaactgacgaaggacggcatcagcgcgatggcgatccacggcaacaagagccagtcggcgcgcacgcgcgcgctgtccgagttcaagaactgcacgctgcaggtgctcgtcgcgaccgacatcgccgcgcgcgggatcgatatcgatcaattgccgcacgtcgtgaacttcgatctgccgaacgtccccgaggactacgtgcaccgaatcggccgcaccggccgcgcgggcgcgaacggcgaggcggtgtcgctcgtgtgcgtcgacgaaaagcagttgctgcgcgacatcgaacggctcatcaagcgcgagatttcgcaggaagtgatcccgggcttcgagccggacccgaacgcgaagccggagccgatccagcggcgcgggcagcgcggcggtaacggcggcggcgctaacggcggtaacggcggcggtagcgcaggaaacgccggccgcggcaatcgcgcaccgcgcgcggcgagccagccgcaggcgcagcagggtcagcccgccgcgcggcgagacggcggcacgcaggcaaaggccgccaagccgcaggcacgcggcggcggacggccggcgggcaatggcgcttcgaacggcggcggcgcgcatgcgaaccgcaaccgttcgtcgcgcagcggccagcgcggccgctga

SEQ ID NO: 77129 - protein, 482 aa, Burkholderia thailandensis E264
MSFASLGLAEPLVRAVNELGYTQPTPIQAQAIPAVLGGGDLLAGAQTGTGKTAGFTLPILQRLHAFYAENRGARRAVRALILTPTRELAAQVEESVRAYSKYVKLRSTVMFGGVSINPQIDALKRGVDIVVATPGRLLDHMQQKTIDVSSLDILVLDEADRMLDMGFIHDIKRVLAKLPAKRQNLLFSATFSDEIKSLADSLLDSPALIEVARRNTTAETIAQKIHPVDRDRKRELLTHLIREHNWFQVLVFTRTKHGANRLAEQLTKDGISAMAIHGNKSQSARTRALSEFKNCTLQVLVATDIAARGIDIDQLPHVVNFDLPNVPEDYVHRIGRTGRAGANGEAVSLVCVDEKQLLRDIERLIKREISQEVIPGFEPDPNAKPEPIQRRGQRGGNGGGANGGNGGGSAGNAGRGNRAPRAASQPQAQQGQPAARRDGGTQAKAAKPQARGGGRPAGNGASNGGGAHANRNRSSRSGQRGR

SEQ ID NO: 77130 - DNA, 1449 bp, Burkholderia thailandensis E264
  CDS (1)..(1449): transl_table=11
atgagcgatgccggcgacgccgcgccggacgaaccgacgttcgcgtcgctcggcctgtcgccggagatcgtctccgcgctgcaggcggccggctacgtgaagccgacgcccgtgcagcagcgcgcgattccggccggcatcgccggccgcgacctgctcgtgtcgagcccgacgggctccggcaagacggccgcgttcatgctgcccgcgatcgagcgcttcgcgcagttgcaaaaagcgcaggcgcagcagccgcgcgcgccgcgcgaagcgcagccgggcgagcgtcgcggccgccgcccgcaacccgtcgcgcgcccgggcctcctcgtcctcacgccgacgcgcgagctcgcgatgcaggtgacgacggccgcgtcgacgtacggcaagcacctgcgccgcctgcgcacggtcagcatcctcggcggcgtcgcgtacggccagcaactgatgctgctcgcgaagaaccccgagatcctcgtcgcgacgccgggacgcctgctcgaccacctcgagcgcggccgcatcgatttgtccgaactgaagatgctcgtgctcgacgaagccgaccgcatgctcgacatgggcttcatcgacgacatcgacacgatcgtcgcggcgacgcccgcgtcgcgccagacgatgctgttctcggcgacgctcgacggcaagatcggctcgctcacgaaccgcctgctgaaagacccggagcgcatcgagatcacgcagaagatcgaatcgcgctcgaacattgcgcagaccgtgcactacgtcgacgaccgcgatcacaaggaccgtctgctcgaccacctgctgcgcgacaccgcgctcgaccaggcgatcatcttcaccgcgacgaagatcgacgccgaccagctcgccggccggctcgccgacgccggcttccagtccgccgcgctgcacggcgatctgccgcagggcgcgcgcaaccgcacgattcgcgcgttgcgcgagcgccgcgtgcgcgtgctcgtcgcgaccgacgtcgccgcgcgcgggatcgacatccccggcatcacgcacgtgttcaactacgacctgccgaagttcgccgaggactacgtgcaccggatcggccgcacgggccgcgcgggccgctcgggcaccgcggtgagcctcgtgcatcacgcggagcaaggggcgctcaagcgcatcgagcgcttcgttcgcgcgccgctgccggtgaacgtcgtcgaaggcttcgagccgcgcaaggcgccgccgccgcgcaacgatcgcggcaacggccgcggccgtccgggcggcaacggcggccgccggttcggcggcaagccgggcggcggtcatggcggcggccgctcgggcggctggagcggcaagcctggcggcaatcgcgaaggctatggcgcgcgccgcagcgacggccagcgcggcggcccgcggcgcggcaactcggcagcgtaa

SEQ ID NO: 77131 - protein, 482 aa, Burkholderia thailandensis E264
MSDAGDAAPDEPTFASLGLSPEIVSALQAAGYVKPTPVQQRAIPAGIAGRDLLVSSPTGSGKTAAFMLPAIERFAQLQKAQAQQPRAPREAQPGERRGRRPQPVARPGLLVLTPTRELAMQVTTAASTYGKHLRRLRTVSILGGVAYGQQLMLLAKNPEILVATPGRLLDHLERGRIDLSELKMLVLDEADRMLDMGFIDDIDTIVAATPASRQTMLFSATLDGKIGSLTNRLLKDPERIEITQKIESRSNIAQTVHYVDDRDHKDRLLDHLLRDTALDQAIIFTATKIDADQLAGRLADAGFQSAALHGDLPQGARNRTIRALRERRVRVLVATDVAARGIDIPGITHVFNYDLPKFAEDYVHRIGRTGRAGRSGTAVSLVHHAEQGALKRIERFVRAPLPVNVVEGFEPRKAPPPRNDRGNGRGRPGGNGGRRFGGKPGGGHGGGRSGGWSGKPGGNREGYGARRSDGQRGGPRRGNSAA

SEQ ID NO: 77132 - DNA, 1578 bp, Syntrophus aciditrophicus SB
  CDS (1)..(1578)
atgcctatggaccccacattgaacgatcaagaacccgaatcgacaccgcctgcagaccagaatttcaatgatcccggggaggagccgatcctggagccgaccgacgccctgcccgaggtcgctctggagtgtttgcccccgacgataagggatgctgccacccgcgcggggtggacgaaactgatggacgttcaggccaaggcgattccctatatcctggcccggcgggatctcatgatccagtcgaaaacgggcagtggaaagacgggagcctatctcctgcccatactgggacgtcttgacccgcggaaggccgcctgccaggccatgattcttgtgccgactcgggaactggcccttcaggtgtcgagggaagccctcctgctgagcgccgactccggaatccgcacagccgttgcctacggcggcgttgggtatcacgcccagctcgaggccttccgggaaggggcgcagctcgtcatcggaacaccagggcggatcctggatcatctgatccggagttccctgtcgctgaaagccttgtcgattctggttttcgatgaggcggatcgcatgctgtccatgggattctatccggacatgaagcgcattcaggaattcattccccgcgagatcaatgcctatctgctgtcggccacgtttccgtcccatgttctccgccttgccggagaatttctgagaaaaccggaattgctgagcctcagtcgggatcagattcacgtgacggaaacggagcatgtgtactatctcgttccgggaatgggcaaggaacggtctcttgtccggatcatcgaagcggaaaatcccgtttccgccattatcttctgcaacaccaaagccacggtccatttcgtgagcgtcgtactgaaacgtttcggttatgacgcggacgaattgagttccgaactgtcccagaaggcacgggaaaaagtcatggcgcggattaggagcggattactccgttttctggtggccacggatgtggcagccagaggcatcgatatcccggacctgtcccatgtcattcaatatgaaccgccggaagatcccgaggcttacatccaccgggcgggccgcaccggccggaaaggcgccagcggcgtcgccatttccctggttgccgggatggagcagtttcggctgcgggacatcgcgaagtccttcagtatcgatattcaggaacggtccctgccaaaagatgaagaagtggaaacgaccgtgtcccagcgagtgatcgctctgctggaggccaagatgagaatgcgtgaccgactgcaggtggaacatatgcagcgtttcattcctctggtcaaaagtctgttgcagaatgaagaagaaatggacctgatcgccatgctggttgatgatttctatatggcgactctgaatacgcctcctccccagccgccggaagtgcagaagtcgtcagtgtccgctggggggcctgaggctgcctccggggcaaaaaagaaacgccgccatcgcaaatcttcccgcagcatggccggaagccgatcggacagcggcgaatccacgggagaaacggaaggggattaa

SEQ ID NO: 77133 - protein, 525 aa, Syntrophus aciditrophicus SB
MPMDPTLNDQEPESTPPADQNFNDPGEEPILEPTDALPEVALECLPPTIRDAATRAGWTKLMDVQAKAIPYILARRDLMIQSKTGSGKTGAYLLPILGRLDPRKAACQAMILVPTRELALQVSREALLLSADSGIRTAVAYGGVGYHAQLEAFREGAQLVIGTPGRILDHLIRSSLSLKALSILVFDEADRMLSMGFYPDMKRIQEFIPREINAYLLSATFPSHVLRLAGEFLRKPELLSLSRDQIHVTETEHVYYLVPGMGKERSLVRIIEAENPVSAIIFCNTKATVHFVSVVLKRFGYDADELSSELSQKAREKVMARIRSGLLRFLVATDVAARGIDIPDLSHVIQYEPPEDPEAYIHRAGRTGRKGASGVAISLVAGMEQFRLRDIAKSFSIDIQERSLPKDEEVETTVSQRVIALLEAKMRMRDRLQVEHMQRFIPLVKSLLQNEEEMDLIAMLVDDFYMATLNTPPPQPPEVQKSSVSAGGPEAASGAKKKRRHRKSSRSMAGSRSDSGESTGETEGD

SEQ ID NO: 77134 - DNA, 1497 bp, Novosphingobium aromaticivorans DSM 12444
  CDS (1)..(1497): transl_table=11
atgtcgtatttttccgacctcggccttgccgaacccatcctgcgcgccctcgaaacgaagggctacaacgacccgacgccgatccagcgccaggccattcccgccctgctcgaaggccgcgaccttcttggcatcgcgcagaccggcaccggcaagaccgccgcgttcgcgctgccgtcgctccatcgccttgccgcgaacccgcagccacgcaagccggcctcgtgccgcatgctcgtcctctcgcccacgcgtgagctggccgcccagatcgcggacaacatgaagggctatgcccggaacctgaacctgatcgtcgattgcgtgttcggcggcgtgcccatcggcaagcaggcccgtcgcctggtgcccggcgtcgacattctcgtcgccacccccggccgcctgcttgacctgatcgacaaccgggcgctgacgcttggccgcaccgagatcttcgtgctcgacgaagccgaccagatgatggacctcggcttcatccatgcgctcaagcgcgtggcgaacctgctgcccaagacccgccagagcctgttcttctcggcgaccatgcccaaggccatcgaggacctcggcaagcagttcatcgtcaatcccgtgcgcgtcgaggtcgccccgaactcgaccaccgcagaacgcgtcgaacagtacgtcaccttcatcaaccaggccgagaagcaggcgctgctgaccctgcgcatccgcgatctgctcaagaccaaggaactcgaccgcgcgctggtgttcacccgcaccaagcacggcgcggaccgcgtcgtgcgccacctctcgtcggccggcatcgatgcccgcgcgatccacggcaacaagagccaggcgcagcgtaccgccgcgctcgaggccttccgccagggatcgtgcccggtcctcgtcgcgaccgacatcgcggcgcgcggcatcgacgtctcgggcgtgagccacgtgttcaacttcgaactgcccaacgtgcccgaacagtacgtccaccgcatcggtcgcaccgcgcgcgccggcgccgatggcatcgccatcagcttctgtgcgccggatgagaagccctatctcaaggacatcgagcgcctgaccagggtcaaggtcgacgccctccccctgcccgagaacttcaccgccgaagcggccaagctccccgcgccgagccgcaagccggccgagcaggagcaggacgcccgccgcgatgcgcgtgacgcgcgcggcaacggcggtcgcggcggacagggtcgcggccaggcccacggtggccgtgcccagggtcgcgacggccgcccgcgcgacgccagcccgcgccaggaccgccgcgaaggcgatcgcggtccggtgcgcaacccgctccacaccgaccgcaccgaccgccccgagcgtatcgagggcgagcgtgacggcaacaagccgcgccgcttccgtccgcgcggcgcccccggcgtcggcgcgcaccgcaacaaggtccgccgcgcaagctga

SEQ ID NO: 77135 - protein, 498 aa, Novosphingobium aromaticivorans DSM 12444
MSYFSDLGLAEPILRALETKGYNDPTPIQRQAIPALLEGRDLLGIAQTGTGKTAAFALPSLHRLAANPQPRKPASCRMLVLSPTRELAAQIADNMKGYARNLNLIVDCVFGGVPIGKQARRLVPGVDILVATPGRLLDLIDNRALTLGRTEIFVLDEADQMMDLGFIHALKRVANLLPKTRQSLFFSATMPKAIEDLGKQFIVNPVRVEVAPNSTTAERVEQYVTFINQAEKQALLTLRIRDLLKTKELDRALVFTRTKHGADRVVRHLSSAGIDARAIHGNKSQAQRTAALEAFRQGSCPVLVATDIAARGIDVSGVSHVFNFELPNVPEQYVHRIGRTARAGADGIAISFCAPDEKPYLKDIERLTRVKVDALPLPENFTAEAAKLPAPSRKPAEQEQDARRDARDARGNGGRGGQGRGQAHGGRAQGRDGRPRDASPRQDRREGDRGPVRNPLHTDRTDRPERIEGERDGNKPRRFRPRGAPGVGAHRNKVRRAS

SEQ ID NO: 77136 - DNA, 1383 bp, Methylobacillus flagellatus KT
  CDS (1)..(1383): transl_table=11
atgaacgctcaacccgaagacaacgtgaatacagacactatcagttttgcatcgctcaatctggcgcccgagttactgaaggcgctggatgagtcaggctataccacgccaaccccgattcaggcccaggcgattcctgtcgtgctggaaggcagcgacctgatggccggcgcacagaccgggaccggcaaaacagccgcctttactttgcccttactgcagaagctgctgccattggccagcagtagtgcctcgcccgcaaggcatccggtgcgggccttgatcctgaccccgacccgggaactggcaatccaggtggaagaaagtgtcaagacgtatgccaagcatacgccgctacgttcgctggttgtcttcggtggagtggatatcaaatcccagacgcccaccctcatgaaaggagtggagatattggtagccactccagggcgcctgctggaccatgtcgaacagcgcacagtgcagctgggccaagtgcagatgctagtgctcgatgaagcagaccgcatgctggacatgggcttcatgccagatctcaagcgcattctcgcactgctgccgaaacaacggcagaacctgatgttttccgcaacattctcacctgaaatcaagaagctttccgaagagttcctgaccaagcctgtactgatcgaagtcgcccgcagcaatgcgacatcagaaaacgtcacgcaaaaaatcctgctggtggaaagcgagcacaagcagcacgtgctggccgacttgttgcgcaaggaagcaacacaggtcatcgtcttcaccaagaccaagctttccgcaagccgcctggcgcgccatcttgagcgcgaaggcattgccgccggcgccattcatggcgacaagagccagcttgagcgtattcaggcgctggatgccttcaagcaaggcaaaatcacagcactcgtggcgaccgatgtggccgcacgcggcctggatatcgaccagctccccatggtggtcaattacgagttgcccagcgccgccgaggactacgtacaccggatcggccgcactggtcgcgccggtgcttccggcatcgccatttccctggtatccagtgaggaggagaagttcctcaaggaaatcgaaaagctcatcaagcgggaattgccaaaagaacaggcgaatgctccccagcctgtacgccgcgggcaggatacccaacgacagaaggctccggcaagtattgctccgcgccaacggcatgctggccgcaacaaggaagacgaatggtttttcaagccgtatgagccttccacagatgcgccggcgcccaagcccatgcattcccgggaaaaatcgaaaaaggaaattcccgccctgctcggcgggttgaaccgcaaataa

SEQ ID NO: 77137 - protein, 460 aa, Methylobacillus flagellatus KT
MNAQPEDNVNTDTISFASLNLAPELLKALDESGYTTPTPIQAQAIPVVLEGSDLMAGAQTGTGKTAAFTLPLLQKLLPLASSSASPARHPVRALILTPTRELAIQVEESVKTYAKHTPLRSLVVFGGVDIKSQTPTLMKGVEILVATPGRLLDHVEQRTVQLGQVQMLVLDEADRMLDMGFMPDLKRILALLPKQRQNLMFSATFSPEIKKLSEEFLTKPVLIEVARSNATSENVTQKILLVESEHKQHVLADLLRKEATQVIVFTKTKLSASRLARHLEREGIAAGAIHGDKSQLERIQALDAFKQGKITALVATDVAARGLDIDQLPMVVNYELPSAAEDYVHRIGRTGRAGASGIAISLVSSEEEKFLKEIEKLIKRELPKEQANAPQPVRRGQDTQRQKAPASIAPRQRHAGRNKEDEWFFKPYEPSTDAPAPKPMHSREKSKKEIPALLGGLNRK

SEQ ID NO: 77138 - DNA, 1404 bp, Burkholderia xenovorans LB400
  CDS (1)..(1404): transl_table=11
atgaacagtccccataccgcgggcgcgccgtttagccagctatcgctgccgcccgcgacgctcgccaacctgacgcagctcggctacgtcgagatgacgccgattcaggccgcgagcctgcccatcgcgcttgccggccatgatctgatcgcccaggcgaaaaccggcagcggcaagactgcggcgttttcgctggcgctgctggcgcgcctcgacgtgcgcaactttgccgtgcaggcaatggtgctgtgcccgacgcgcgaactcgccgaccaggtcacgcaggaaatccggcgcctcgcgcgcgccgaagaaaacatcaaggtgctgacgttgtgcggcggcacgccgatgcgtccgcaaacggcgagtctcgaacacggcgcgcacatcgtggtgggcacgccgggccgcatcatggatcacctggagcgcggcagcctgccgctgcagtcgctcaatacgctggtgctcgacgaagcggaccgcatgctcgacatgggtttcttcgacgatatcgccaccgtcgtgaagcaatgcccgaaggaacggcaaacgctgctgttctcggcgacgtatcccgaaggcatcgtcaaactgagccagcaattcctgcgcaatccgaaagaagtcaaactcgcggaacggcacgacaacaccaagatccgtcagcgcttctatgaagtgaccgaagacgagcgtctgcacgcggtcggtctgctgttgaaccactatcgtccggtgagcacgctggcgttctgcaataccaagcagcaatgccgcgatctgctcgacgtgctgcgcgcgcagggttttcatgcgctcgcgctgcatggcgagctcgaccagcgtgaacgcgatcaggtgctgatccagttcgccaatcgcagctgctcggtgctggtggccaccgacgtcgccgcgcgcggtctcgacatcgcgcaactcgaagccgtgatcaacgtcgacgtgacgccggacccggaagtgcatgtgcaccgcatcggccgcacgggccgcgccgatcaggaaggctgggctttgagtctggcgagcatgaacgagatgggccgtgtcggcagtctcgaacaggcgcaaaagcgcgacgtcgaatggcacaagctgtccgaactcacggcgacgagcaatgaaccgctgttgccgcctatggaaacgttgcagattctcggcggccgtaaggaaaagatccgtcccggcgacgtgctcggcgcgctgaccggtgaagcgggtttcgccggctcgcagatcggcaagatcaacgtgacggaaatgtccacctacgtggcggtggagcgcagcgtcgcccgtgaggccgtgcgcaagctcagcgcaggcaaggtgaagggcaagaaggtcaaagtccgcctgatggacgacgcctga

SEQ ID NO: 77139 - protein, 467 aa, Burkholderia xenovorans LB400
MNSPHTAGAPFSQLSLPPATLANLTQLGYVEMTPIQAASLPIALAGHDLIAQAKTGSGKTAAFSLALLARLDVRNFAVQAMVLCPTRELADQVTQEIRRLARAEENIKVLTLCGGTPMRPQTASLEHGAHIVVGTPGRIMDHLERGSLPLQSLNTLVLDEADRMLDMGFFDDIATVVKQCPKERQTLLFSATYPEGIVKLSQQFLRNPKEVKLAERHDNTKIRQRFYEVTEDERLHAVGLLLNHYRPVSTLAFCNTKQQCRDLLDVLRAQGFHALALHGELDQRERDQVLIQFANRSCSVLVATDVAARGLDIAQLEAVINVDVTPDPEVHVHRIGRTGRADQEGWALSLASMNEMGRVGSLEQAQKRDVEWHKLSELTATSNEPLLPPMETLQILGGRKEKIRPGDVLGALTGEAGFAGSQIGKINVTEMSTYVAVERSVAREAVRKLSAGKVKGKKVKVRLMDDA

SEQ ID NO: 77140 - DNA, 1623 bp, Ralstonia metallidurans CH34
  CDS (1)..(1623): transl_table=11
atgtctttttccgaactcggcttgtccgacaagctggtgcgtgccgtggccgaacagggctacaccacgccgaccccgattcaggcgcaagccattcccgcaattctcaaaggtggcgatcttcttgccggtgcgcaaaccggcaccggcaagacggcaggtttcacgctgccgatgctgcaattgctctccgaaaccgccgcgcgcgccaatggcggcaatgcgccccgcggcgcgcgcccgaacgtgcgtgcgctggtgctgacgcccacgcgtgaactggccgcgcaggtcgaagagagcgtgcgcaactatggcaagtatctgaagctgcgttcgatggtgatgttcggcggcgtcggcatcaatccgcagatcgaggcgctcaggcgcggtgtcgatatcgtggtggccacgcctggccgtctgctggaccacgtggcgcagcgcacgatcgacctctcgcacgttgaactgctggtgctcgatgaagccgaccgcatgctcgacatgggcttcatccacgatatccgcaaggtcctgaacgttctgccgcccaagcgccagaatctacttttctcggccacgttctcggacgatatccgcgcgctggccgatcgcctgctggacaacccggcgtcgatcgaagtggcacgccgcaataccacggcggaaaccgtggcgcagcgcgtgttcccggtcgaccgggaacgcaagcgcgaactgctggcccatctggtgcgccagcacgactggcatcaggtgctggtgttcacgcgcaccaagcatggcgccaaccggctggccgaacaattgaccaaggacggcctctcagcgctggcgatccacggcaacaagagccagtcggcccgcacgcgcgcgctgaccgagttcaaggccggcacgctgcgcctgctggtggccaccgacatcgccgcacgtggcatcgacatcgaccagctcccgcacgtggtcaacttcgatctgcccaacgtgcccgaggactacgtgcaccgtatcggccgtactggccgtgccggcgccgaaggcgaggcgatctcgctggtttgcgtggacgaacatggcctgttgcgcgatatcgagcgcctgatcaagcgccagatcgagcaggtgctgctgcccggtttcgaagtcgatccgagcatcaaggccgagccgatccagaagggccggcagcagcagcgtggcggtcagccgcgcggcaacggccaggggaatgccggcaacggtggcgagcgccgccagccgcgcgccgcgcaaggcgagcgtcaggaagcgccgcgccaaccgcgtccggcacagccggcgcgtggcgaggcccgtaacggcaacgccggaggcagtggtaatgcgccgcgtaccgggcagggaggtgggcgcggcaacggccacgccaatagcaccgccaagggcacggccaagggcacggccaagggcaatgcgcagggcaatgcgcagggcaatgcgaacgccaggggtgcgaacccgcgtccgcagcaagcgcgtccggctcaggacaacactgccgcgccgcccgctcgcaatcgtcggccggccccgcaggcggccctgctcggcggtggccgcaagcccgcccactga

SEQ ID NO: 77141 - protein, 540 aa, Ralstonia metallidurans CH34
MSFSELGLSDKLVRAVAEQGYTTPTPIQAQAIPAILKGGDLLAGAQTGTGKTAGFTLPMLQLLSETAARANGGNAPRGARPNVRALVLTPTRELAAQVEESVRNYGKYLKLRSMVMFGGVGINPQIEALRRGVDIVVATPGRLLDHVAQRTIDLSHVELLVLDEADRMLDMGFIHDIRKVLNVLPPKRQNLLFSATFSDDIRALADRLLDNPASIEVARRNTTAETVAQRVFPVDRERKRELLAHLVRQHDWHQVLVFTRTKHGANRLAEQLTKDGLSALAIHGNKSQSARTRALTEFKAGTLRLLVATDIAARGIDIDQLPHVVNFDLPNVPEDYVHRIGRTGRAGAEGEAISLVCVDEHGLLRDIERLIKRQIEQVLLPGFEVDPSIKAEPIQKGRQQQRGGQPRGNGQGNAGNGGERRQPRAAQGERQEAPRQPRPAQPARGEARNGNAGGSGNAPRTGQGGGRGNGHANSTAKGTAKGTAKGNAQGNAQGNANARGANPRPQQARPAQDNTAAPPARNRRPAPQAALLGGGRKPAH

SEQ ID NO: 77142 - DNA, 1404 bp, Ralstonia metallidurans CH34
  CDS (1)..(1404): transl_table=11
atgacttcttcagcccctacctcattcgccacgctgccgctgtccgcggccatgcaggctaccctcgtccagctcggctacgacgccatgacgccgatccaggccgccagcctgccgctcgcgctggctggtcacgacctcatcgcccaggcccgcaccggcagcggcaagaccgcagcgttcgcgctctcactgctgcatcgtctcgatccgcgtccgctcgacgtacaggcgctggtgctctgtcccacacgtgaactggccgatcaggtcacacaggagatccgtcgtctcgcccgcgcggaggacaacgtcaaggtgctgacgctcagtggcggcacgccaatccggccgcaggtggagagccttgttcacggcgcgcacgttgtcgtaggcacgccgggccgcatcatcgatcacctcgatcgcggaagcctgaatatcgatgcgatcaacacgctggtgctcgatgaagcggaccgcatgctcgacatgggctttcacgatgacatcgcatttatcgccagccacgcaccgaaggaccggcagacgctgctgttctcggccacctatccggctgccatcgacaagctcgcccatcgcttcctgcgccagccgaagacggtgaaggtggaggaggcgcacgacgcggccaccatcacccaacgcttctacgaggtggaggagggcgatcgtctcaacgccgtcggccgattgctcgaccatttccgcccggccaccacactcgccttctgtaatacgaaggcgcgctgccgcgatctggccgacctgctgcgcgcgcagggatatgccgcgcttgaactgcacggtgacctcgatcagcgcgatcgcgaccaggtgctggtgcagtttgctaaccggagctgctcggtgctggtagctaccgacgtggccgcacgcgggctcgacatcgcgcagctggaagccgtgatcaacgtggacgtgacgcccgaccccgaggtccatgtccaccgcgtcggccgtaccggacgcgctggcgaagcaggctcggccttcagcctcgtcagcctggatgaaatgggtcgcgtcggcaacatcgagcagcaccagggcggtgagttcgaatggcacgcgcttgacgaactgaagccgtcaggcggcggacgtctgctgccgccaatggtcacgctgcagatgctgggtgggcgcaaggagaagatccggcccggcgacatcctcggcgcgctgaccggagaggctggcttcacaaaggagcagatcggcaagatcagcgtgatggagatgtcgacctatatcgccgtggaccgcgccatcggtcgcgaggcggtgaaacggctgaacgaaggcaaggtgaagggccgcaaggtgagagtgagaatgctgacgaccgatcagcggtaa

SEQ ID NO: 77143 - protein, 467 aa, Ralstonia metallidurans CH34
MTSSAPTSFATLPLSAAMQATLVQLGYDAMTPIQAASLPLALAGHDLIAQARTGSGKTAAFALSLLHRLDPRPLDVQALVLCPTRELADQVTQEIRRLARAEDNVKVLTLSGGTPIRPQVESLVHGAHVVVGTPGRIIDHLDRGSLNIDAINTLVLDEADRMLDMGFHDDIAFIASHAPKDRQTLLFSATYPAAIDKLAHRFLRQPKTVKVEEAHDAATITQRFYEVEEGDRLNAVGRLLDHFRPATTLAFCNTKARCRDLADLLRAQGYAALELHGDLDQRDRDQVLVQFANRSCSVLVATDVAARGLDIAQLEAVINVDVTPDPEVHVHRVGRTGRAGEAGSAFSLVSLDEMGRVGNIEQHQGGEFEWHALDELKPSGGGRLLPPMVTLQMLGGRKEKIRPGDILGALTGEAGFTKEQIGKISVMEMSTYIAVDRAIGREAVKRLNEGKVKGRKVRVRMLTTDQR

SEQ ID NO: 77144 - DNA, 1482 bp, Silicibacter sp. TM1040
  CDS (1)..(1482): transl_table=11
atgacaaaattcaccgatctgaacctcaatccgaaggtcctcaaagccatcgaggaagccggatacgaaagccccaccccgattcaggcaggcgcaattcccgccgcattggaagggcgcgatgtcctcggaatcgctcagaccggcaccggcaaaaccgcctctttcaccctgccgatgatcacccgccttgcgcgtggccgcgcccgggcgcgcatgccgcgctcgctggtgctctgcccgacgcgcgaactcgctgcgcaggtggctgaaaacttcgacacctacgccaaacacgtcaagctcaccaaagccctcctgatcggcggcgtttccttcaaggaacaggacgccgcaatcgaccgtggtgtagacgtgctgatcgccacaccgggccgtctgctcgatcatttcgagcgcggcaagctcctgctgaccgggatcgagatcatggtggtcgatgaggctgaccggatgctggacatgggcttcatccccgacatcgagcgcatcttctcgctgacccccttcacccgtcagacgctgtttttctccgccaccatggcgccggaaatcgagcggatcaccaatacgtttctctccggccccgagcgggtcgagatcgcccgtcaggccaccacctccgagaatatcgaacaggccgtggtgatgttcaaagcctcccgcaaggatcgcgaaggcagcgaaaaacgccgggttctgcgcgagctgatcaaccaggaaggtgaggccgtgcagaacgccatcatcttctgcaaccgcaagaccgatgtggacatcgtcgccaagtccttgaaaaaatacggctatgacgccgcgccgatccacggcgacctggatcagagccagcgcaccaagaccctcgacgggttccgcgacggcacactcaagatccttgtggcctccgatgtggccgcccgcggtctggacgttccctccgtgagccatgtgttcaactttgatgtgccgggtcatgccgaggactacgtccaccggatcggccgcaccggccgcgcaggtcgcgatggcaaggccatcaccctgtgcagcccgcgtgacgaaaaggcgctcgatgctgtcgaaggtctggttcaaaaagaaatcactcgccttgaaaacccggtaaagccgacgccgcgcaaaactgcgaccaaggacgaggatgcaggcgacaagcccaaacccgcccgtcgcagccgcagcaaagccgcctccgccaagaccgacgcgacaccaacgcccgaggcggcaaatgacgcagccccgcaggtcgaagcccctcagcagcagccccaagagcccaaggagacccgggccgagcaaccgtctgctggcgccaaatcgggcaagtcccgtggtcgtggacgccgcgatgatcgtcgcgacgacaaagtagtgggcatgggcgaccatatgccaagcttcatcgcgctgagctttgacgagcgccgcgccagctga

SEQ ID NO: 77145 - protein, 493 aa, Silicibacter sp. TM1040
MTKFTDLNLNPKVLKAIEEAGYESPTPIQAGAIPAALEGRDVLGIAQTGTGKTASFTLPMITRLARGRARARMPRSLVLCPTRELAAQVAENFDTYAKHVKLTKALLIGGVSFKEQDAAIDRGVDVLIATPGRLLDHFERGKLLLTGIEIMVVDEADRMLDMGFIPDIERIFSLTPFTRQTLFFSATMAPEIERITNTFLSGPERVEIARQATTSENIEQAVVMFKASRKDREGSEKRRVLRELINQEGEAVQNAIIFCNRKTDVDIVAKSLKKYGYDAAPIHGDLDQSQRTKTLDGFRDGTLKILVASDVAARGLDVPSVSHVFNFDVPGHAEDYVHRIGRTGRAGRDGKAITLCSPRDEKALDAVEGLVQKEITRLENPVKPTPRKTATKDEDAGDKPKPARRSRSKAASAKTDATPTPEAANDAAPQVEAPQQQPQEPKETRAEQPSAGAKSGKSRGRGRRDDRRDDKVVGMGDHMPSFIALSFDERRAS

SEQ ID NO: 77146 - DNA, 1809 bp, Myxococcus xanthus DK 1622
  CDS (1)..(1809): transl_table=11
atgaagacgtgcaaacacgggcccaactgttcagggagtggcctccccccattctgggagcgcaccaaaccattgctggtggtacaagcccgggccgtgaaagccccccagccccccgcccccgttgaggccaccttcgattccctgggcttgaagcccgcgctcgtcgaggcgctcagcgcgctcggctacgaggagcccacccccatccaggccgccgccctcccgccactgctcgcggggaaggacctgctcggcatcgccgccaccggcaccggcaagacggccgccttcgccctgcccctgctcaaccacgtggagcccggcgcgtgccggcccaacaccacgtccgcgctggtgctggtccccacgcgcgagctggccatgcaggtctccgaggccatccaccgctacggccagaagctcggcatctccgtgctgcccctgtacggcggccaggtcattggccagcagctccgcgtcctcaagcgcggcgtggacgtcgtcgtcgccacgccgggccgcgcgctggaccacctgcgccgtggcacgttgcagctcgatgacgtgcgcgtcgtcgtgctcgacgaggccgacgagatgctcgacatgggcttcgccgaggacctggaggccatcctctccggcacgcccgaggaccggcagacggccctcttctccgccacgctcccgccgcgcatcgccagcatcgccgagcgtcacctgcacgagcccgtgcgcgtgaagatcgcccgcgagaaggtggaacagggggagattccccgcgtccggcagacggcctacgtcgtgccgcgcgccttcaagatcgccaccctgggccgcctgctcgacgtggagtcgcccaccgcggccatcatcttctgccgcacgcgcacggaggtggacgacctcaccgtctccctcaacggccgtggctggcgcgcccacgccctgcatggcggcatgacgcaggagcagcgagaccgcgtcatcaagcagctcaagtcccagggcaccgacctgctcgtggccaccgacgtcgcggcgcgcggcctggacatcccccgcctgtcccacgtggtgaacttcgacgtccccaacgcgcccgaggcctacgtgcaccgcatcggccgcacgggccgcgccggccgcgagggcgtggccatcaccctggtggagccccgcgagcaccggttgctgcgcaacatcgagcgcgtcaccggccagcgcatcgaagtggccaccgtgcccaccgtcgcggacatgcgcgagaagcggcaggagatgctgcgcgcatccctgcgcgagacgctggtgaccggtgagtacgactccctccgcaacgtggtggagagcctggccagcgagttcgacgccatggacatcgccgccgccgccgtgaagctcctccatgaggcccaggacgagggccgcgacacggaggagacggagatccccgtcgtcgcgccgccgcaggagcgccgtgagcgcacgggcaagttcggagcgcccacggggcgtccaggccggccggagcgcggcccgaaggcccgcggtggcccgccgacgtgggacgtcacccgcctgtggattggcgccggccgtcacgccggcgtacgccccgccgacctggtgggcgccatcgccggggaagcgggcgtcgagtcctccaagattggcgccatccagattggcgacgccttctccctggtggaggtgccggagtccgacgccaaccgcatcatcgccgcgttgaagaacgccaccctgcgcggcaagaaggtgctcgtccgcaaggaccggagctga

SEQ ID NO: 77147 - protein, 602 aa, Myxococcus xanthus DK 1622
MKTCKHGPNCSGSGLPPFWERTKPLLVVQARAVKAPQPPAPVEATFDSLGLKPALVEALSALGYEEPTPIQAAALPPLLAGKDLLGIAATGTGKTAAFALPLLNHVEPGACRPNTTSALVLVPTRELAMQVSEAIHRYGQKLGISVLPLYGGQVIGQQLRVLKRGVDVVVATPGRALDHLRRGTLQLDDVRVVVLDEADEMLDMGFAEDLEAILSGTPEDRQTALFSATLPPRIASIAERHLHEPVRVKIAREKVEQGEIPRVRQTAYVVPRAFKIATLGRLLDVESPTAAIIFCRTRTEVDDLTVSLNGRGWRAHALHGGMTQEQRDRVIKQLKSQGTDLLVATDVAARGLDIPRLSHVVNFDVPNAPEAYVHRIGRTGRAGREGVAITLVEPREHRLLRNIERVTGQRIEVATVPTVADMREKRQEMLRASLRETLVTGEYDSLRNVVESLASEFDAMDIAAAAVKLLHEAQDEGRDTEETEIPVVAPPQERRERTGKFGAPTGRPGRPERGPKARGGPPTWDVTRLWIGAGRHAGVRPADLVGAIAGEAGVESSKIGAIQIGDAFSLVEVPESDANRIIAALKNATLRGKKVLVRKDRS

SEQ ID NO: 77148 - DNA, 2427 bp, Myxococcus xanthus DK 1622
  CDS (1)..(2427): transl_table=11
atgagcgacatccaagagccaaacgcgccggggagtccggcgcctgacgaagccccgacacgtcccgccgagtacatcgcggacatcggcttcgacgacatgaacctgtcagagcccatccgcctcgccctggcggagcgcggttataccaaccccacccctgtccaggcccgcgccttccggcccgccatcgagggaaaagacctcatcgttcgcagcaagacgggcaccggcaagacggcggcgttcggcctgcccctgctcgaaaagattcccgccgacgagcgccgcgtccgagcgctcatcctctgccccacccgcgagctggcccttcaggtggcggacgagctgaagatgctcgccaagcacaagggcctgaaaatcgcggccatctacggcggcgcctccatgaagcagcaggaggacgcgctggaggaaggcacccccatcatcgtcggcacgccgggacgcgtgttcgaccacatcaaccgcggcaacctgaagctcgacgcgtgtgaccacgccgtcctggatgaagcggatgagatgctgaaccagggcttctacgaggaagtcacgcgcatcctcgaccgccttcccaagacgcgccaggtgctgctcttcagcgccaccgtccccacggacatccagaacctcatcgcgcgctacacgacgaacgcggagacgctgctgctgtcgggcgacgtcttcacggtggagcacatccaccacatccgctacgacgtgtcggacgccttccccaagccgcgcaacctcatctacgtgctggagaaggaggagccgcagaacgccatcatcttctgcaacacgcgggatgacacggccctggtgacggcggtgctcaaccgcaacggcttcgacgcggagctgctcaatggcgacctgccgcagaaggagcgcgagcgggtcatgggcaaggtgaagcgcggcgaggtggccttcatggtcgccacggacatcgcggcgcgcggcatcgacatctccggcctggagtacgtcatcaactactcgctgccggaggacccggcggtgtacctgcaccgcgtgggccgcaccggccgcatcggcaacaagggcaccgccatcaacctcttctccgggcgcgagctggccacgtacacctcgctggagaagaagtacggcatcaagttcgacaagcgtgagatgccggccccggaagaggccatgcgcctgtggacggagcgccacgtgcgcgaaatccaggaggccgcgggcggctccgtcttcgagggcttcctgccgctggccgcgcagctcaagccccgcgcggacgccgacgacctcatcgccttcctgctgaagtacttcttcagccacctgcgcatggagaaggccgccgcggcgatggcggcggaagggcgtgagcctccgcaagagcgcaagttcgagagccgcgagggcggccggcgcgagcgcggcgagcggaaggagcgtggcgagcgccgagaccgtgagcgcgacgaccggcgcgagaagcgcggcgagtcctccgagcgcgagcgcgagcgccggccccgccgtgacgacgcgcggcgcgagcgcggcgctgagagtggccgcggcgcggcggcgctggaggccggtccgggcgaggcgaagctgtgggtgaacctggggaccgcggatggcctggggccgggcagcatcgccacggcgctggaagacgccggcgccccggtgggcaaggtcgtgcgcgccgagctgcgccccaccttcgcctatgtcttcgtggcggaggaggacgccgccgccttcgagaccatcaacggcaagcagcacggcgccaagacgctgcgcgtggagaagagcaagccgcgcacggagcgtgacgccacgccccgcccgcccccgtccccggacgcgggccccggcgaggcgaagctgtggatcaacctgggcatggacgacggcatggacgaggcgaagctgcccgccgcgctggaggccgcgggcgctccggccggcaaggtgctgcgcaccctgctgcgccccacctacggctacgcctacgtggccgaggaggacgcgcccggcttcgaggccgtcaacggcaagccccacggcgagaaggcgctgaaggtggagcgtcaccgtccgcggggcgcacgcccggagcgccgtccccgcacggaggccctgccggaggttcccggccagacgcgcctgtgggtgggtctgggcaagcaggacgggctggacgaggcgggcgtcgccgccgcgctggaggccgcgggcgctccggccggcaaggtgctgcgcacggacctgcgccccacctacgcctatgtcttcgtcgccgacgaggacgtggcggccttcgaagccacgcacggcaagccccacggcgagcgcacgctcaaggtggagcaggccaagcggaagtag

SEQ ID NO: 77149 - protein, 808 aa, Myxococcus xanthus DK 1622
MSDIQEPNAPGSPAPDEAPTRPAEYIADIGFDDMNLSEPIRLALAERGYTNPTPVQARAFRPAIEGKDLIVRSKTGTGKTAAFGLPLLEKIPADERRVRALILCPTRELALQVADELKMLAKHKGLKIAAIYGGASMKQQEDALEEGTPIIVGTPGRVFDHINRGNLKLDACDHAVLDEADEMLNQGFYEEVTRILDRLPKTRQVLLFSATVPTDIQNLIARYTTNAETLLLSGDVFTVEHIHHIRYDVSDAFPKPRNLIYVLEKEEPQNAIIFCNTRDDTALVTAVLNRNGFDAELLNGDLPQKERERVMGKVKRGEVAFMVATDIAARGIDISGLEYVINYSLPEDPAVYLHRVGRTGRIGNKGTAINLFSGRELATYTSLEKKYGIKFDKREMPAPEEAMRLWTERHVREIQEAAGGSVFEGFLPLAAQLKPRADADDLIAFLLKYFFSHLRMEKAAAAMAAEGREPPQERKFESREGGRRERGERKERGERRDRERDDRREKRGESSERERERRPRRDDARRERGAESGRGAAALEAGPGEAKLWVNLGTADGLGPGSIATALEDAGAPVGKVVRAELRPTFAYVFVAEEDAAAFETINGKQHGAKTLRVEKSKPRTERDATPRPPPSPDAGPGEAKLWINLGMDDGMDEAKLPAALEAAGAPAGKVLRTLLRPTYGYAYVAEEDAPGFEAVNGKPHGEKALKVERHRPRGARPERRPRTEALPEVPGQTRLWVGLGKQDGLDEAGVAAALEAAGAPAGKVLRTDLRPTYAYVFVADEDVAAFEATHGKPHGERTLKVEQAKRK

SEQ ID NO: 77150 - DNA, 1743 bp, Cytophaga hutchinsonii ATCC 33406; identical to SEQ ID NO: 65498
  CDS (1)..(1743): transl_table=11

SEQ ID NO: 77151 - protein, 580 aa, Cytophaga hutchinsonii ATCC 33406; identical to SEQ ID NO: 65499

SEQ ID NO: 77152 - DNA, 1488 bp, Trichodesmium erythraeum IMS101; identical to SEQ ID NO: 65500
  CDS (1)..(1488): transl_table=11

SEQ ID NO: 77153 - protein, 495 aa, Trichodesmium erythraeum IMS101; identical to SEQ ID NO: 65501

SEQ ID NO: 77154 - DNA, 1377 bp, Shewanella sp. MR-4
  CDS (1)..(1377): transl_table=11
atggctttctcgactcttaagctaaaacccgaactgcttgagaaccttaccactatgggctattacgaaatgacgccgattcaggcgcagagtctgccagccattttagcgggcgaggatgtgattggtcagggcaagacgggttcgggtaaaacggcggccttcggtttaggcttgttgaacaagttagatgtgaagcgttttcgcattcaaaccttagtgctgtgtccaacccgcgaactggctgaccaagtagcgcaggagatccgcacactggcgcgtggtattcacaacgtaaaagtgcttaccctctgtggcggcgtgcccatggggccgcaaatcggttcgctcgagcatggcgcccacattatcgttggtacgccggggcggattgtcgatcacttagagcgtaaccgtttagacctaagcaacctgaatatgctcgtgcttgacgaagccgaccgtatgctggaaatgggcttccaaccccagctcgatgcgattatcgagcagtcgccacgcgagcgccaaaccttgctgtttagcgcaaccttccccgagcagatccagtcgattgccaagcaaattatgtacgaccctgtgatggtgaaagtggccgtgacccacgaaaagagcaccattgagcagcatttctaccacttggatgacgacaaggcgcgcatgcaggcgctgcaattattgctgctggatcgcaagcccgagagtgcggtggtgttttgtaataccaagcgcgaaacccaaaaagtggccgatgaactcagcgatgcaggctttagcgttatcgccctgcacggcgacttagagcagcgtgaccgggatgaaaccctgctgcaatttgccaacaagagcgcctgtgtgttggtcgcaaccgatgtggctgcccgtggcctcgatatcgacgcactggacgcggtatttaactaccatgtggcctatgataccgaagtgcatattcaccgtattggccgtaccggccgtgcgggcagtaagggcgcggcttttaccttctttaacgatcaagatggctacaaaattgcgttattagaagagtacttagagcgcgatattcagagcgaagccttaccatcattaagtttgctgggcactgcgcccaatgcgccaaccatgatcaccctgcaaatcgatggcggtaaaaaagagaaactccgccccggtgatatcctcggcgccctcactggtgagaatggtatcgaaggctcgcaggtcggcaaaatccttgtgaccgattaccgcgcctatgtggcggtgaatcgtaaagtcgctaaaaaggcactgagtaagatcaccagcggccgcattaaaggcaagtcctaccgcgcgtggttaatgaaataa

SEQ ID NO: 77155 - protein, 458 aa, Shewanella sp. MR-4
MAFSTLKLKPELLENLTTMGYYEMTPIQAQSLPAILAGEDVIGQGKTGSGKTAAFGLGLLNKLDVKRFRIQTLVLCPTRELADQVAQEIRTLARGIHNVKVLTLCGGVPMGPQIGSLEHGAHIIVGTPGRIVDHLERNRLDLSNLNMLVLDEADRMLEMGFQPQLDAIIEQSPRERQTLLFSATFPEQIQSIAKQIMYDPVMVKVAVTHEKSTIEQHFYHLDDDKARMQALQLLLLDRKPESAVVFCNTKRETQKVADELSDAGFSVIALHGDLEQRDRDETLLQFANKSACVLVATDVAARGLDIDALDAVFNYHVAYDTEVHIHRIGRTGRAGSKGAAFTFFNDQDGYKIALLEEYLERDIQSEALPSLSLLGTAPNAPTMITLQIDGGKKEKLRPGDILGALTGENGIEGSQVGKILVTDYRAYVAVNRKVAKKALSKITSGRIKGKSYRAWLMK

SEQ ID NO: 77156 - DNA, 1284 bp, Shewanella sp. MR-4
  CDS (1)..(1284): transl_table=11
atgacccaagcttcttcctccgttgccagctttgccgaacttggcattattgcgcccctgtgtaatcgactcactgagctgacctatgcggcgcctacgcccatacaagcggcgactattccggccgtgctcagtggacgggacgtattagcgggggcgaatacgggctctggcaaaacggccgcctttgccgtgccgttattacagcgcctgtttgaggcgaaaaccgcggagaagtcggcaggccaagtgcgttgtttggtactcgtgccaacccgcgaattggcgcagcaagttgccgatagctttttatcctatgcctctcacttcaatggccaacttaagatagttgcggcgtttggcggcgtgtctgtcaatctgcaaatgcaaagcttacgtgcgggcgccgatgtgctggtggcaacgccaggccgtttattggatttattagccagcaatgcgcttaagttaaatcgcgttttggccttagtgctggatgaagcggaccgcatgctaagccttgggtttactgatgaattaaatcaagtgcttgaggcgcttcccgccaagaaacaaaccttattatattcggcgacattccctgaagaagtgcgtgcactcacggccaaattactccatcaaccgcttgaatatcatctgcaaagtgagcaagaaagcaccattgagcagcgcgttatcacagtcaaccgtgaacaaaaaacggcgctgttggcacacttgattaaacagcatcagtggtctcaggcgcttatttttgttagcgctaaaaacacctgtaatcacctcgcacagaagctgtctaaacgtgggatcagtgccgaagtctttcatggcgataaggcgcaaggcgcgcggactcgggtgctcgatggctttaaaagtggcgacatcagtgtgctgattgcgaccgatatcgcagcccgcggtattgatattgataaactcccagtggtgattaacttcgatttgccaagaagtccggccgattatatgcaccgtattggccgtagcggccgcgcgggagaggcgggtttggcggtgaccttgatttcccatgaggaatatcaccacttcggtgtgattgagaagaaaaacaaaatcaagcttgaacgagaacaagtcccggggtttgaagcgaatgccgaaatgccgctcgaagtgttagcgcaggaaaaacctcaagccaagcccgaaggcaccggcaagaaaaagcgtaagcagttacccgcggcgaaccttgaattttggggtaaaaagtcttaa

SEQ ID NO: 77157 - protein, 427 aa, Shewanella sp. MR-4
MTQASSSVASFAELGIIAPLCNRLTELTYAAPTPIQAATIPAVLSGRDVLAGANTGSGKTAAFAVPLLQRLFEAKTAEKSAGQVRCLVLVPTRELAQQVADSFLSYASHFNGQLKIVAAFGGVSVNLQMQSLRAGADVLVATPGRLLDLLASNALKLNRVLALVLDEADRMLSLGFTDELNQVLEALPAKKQTLLYSATFPEEVRALTAKLLHQPLEYHLQSEQESTIEQRVITVNREQKTALLAHLIKQHQWSQALIFVSAKNTCNHLAQKLSKRGISAEVFHGDKAQGARTRVLDGFKSGDISVLIATDIAARGIDIDKLPVVINFDLPRSPADYMHRIGRSGRAGEAGLAVTLISHEEYHHFGVIEKKNKIKLEREQVPGFEANAEMPLEVLAQEKPQAKPEGTGKKKRKQLPAANLEFWGKKS

SEQ ID NO: 77158 - DNA, 1302 bp, Shewanella sp. MR-4
  CDS (1)..(1302): transl_table=11
atgagatttgaatcttttagtttttgccccgagattttacgcgctatctcagattgcggttatcaaaaaatgacacctattcagcagcaagcgatccccgccatccgccgcgggcaagatgtgctcgccagcgcgcaaacgggcactggtaaaacggcggcattcgcattacctatactgcaaaagatggcagaaaatcccagcgagaccttaaaatcgaacgcgcgggtattaatcttaacgccgactcgcgagctcgcagctcaagttgccgacaacgttgaagcctacagcaagtatttaaatttcagcgtgttaaccatttacggcggtgtaaaggttgagactcaggcgcaaaaacttaaacgcggtgccgatattattgtcgcgacgccagggcgtttgctcgagcaccttaccgcctgtaatttaagtctctctagcatcgactttttagtgctcgatgaagccgaccgtatgttagacatgggctttaatgcggatattcaaaaaatcctccaagcggtgaataagaagcgtcaaaacctattgttctcggccaccttctccagcgcggtgaaaaaactggccaacgagatgatggtcaagcctcaagtcatcagcgccgataagcaaaacaccaccgcagataccgtgagccaagtggtgtatccggttgagcagcgccgtaagcgcgaactcttatccgaactgattggtaagaagaactggcaacaagtgttggtctttaccgcgacgcgtgatgcggccgacaccttagtgaaagaattgaatttagacggcattccgtctgaagtggtgcacggagagaaggcgcaaggtagccgtcgccgcgcactgcgtgagtttatgtcgggtaaggtacgcgtcttagtcgcgaccgaagtcgccgcccgcggcttagatattcccagccttgagtatgtggtcaacttcgacttacccttcctcgccgaagactatgtacaccgtattggccgtaccggtcgcgcgggtaaatctggggtcgcgatttcatttgtgagccgtgaagaagagcgcaccttagcggatattgaaaagcttatcggccaaaaaattcgtcgtattaccgttcccggatacgaagttggtagccgcgacttgctgttaaagcagctacaaacccgtcgcagttttgccaagaaacaacagcgactcgacaacgtcagcgagcagattgtcgccgagaaaagcatgcagggccgccgcgtgaaaatgaaagttggccaagccccaagcaaggcgaaaaagctgaaataa

SEQ ID NO: 77159 - protein, 433 aa, Shewanella sp. MR-4
MRFESFSFCPEILRAISDCGYQKMTPIQQQAIPAIRRGQDVLASAQTGTGKTAAFALPILQKMAENPSETLKSNARVLILTPTRELAAQVADNVEAYSKYLNFSVLTIYGGVKVETQAQKLKRGADIIVATPGRLLEHLTACNLSLSSIDFLVLDEADRMLDMGFNADIQKILQAVNKKRQNLLFSATFSSAVKKLANEMMVKPQVISADKQNTTADTVSQVVYPVEQRRKRELLSELIGKKNWQQVLVFTATRDAADTLVKELNLDGIPSEVVHGEKAQGSRRRALREFMSGKVRVLVATEVAARGLDIPSLEYVVNFDLPFLAEDYVHRIGRTGRAGKSGVAISFVSREEERTLADIEKLIGQKIRRITVPGYEVGSRDLLLKQLQTRRSFAKKQQRLDNVSEQIVAEKSMQGRRVKMKVGQAPSKAKKLK

SEQ ID NO: 77160 - DNA, 1650 bp, Shewanella sp. MR-4
  CDS (1)..(1650): transl_table=11
atgagtttttcctccctaggtttatctgcaccgatccaaaaagccgtgactgaacaaggttatgacacaccctctcctattcaagcacaggcgattcccgccgtactgacgggtaaagacgtgatggctgcggcccaaacggggacaggaaaaaccgcaggctttaccctgccgttgctcgaattactctctaaaggcaataaagccaaggtgggacaaatccgcgccctagtgctaacccccacgcgcgagttagcggctcaagtaagcgaaagcgttgaaacctatggtaaatatctgccattgcgctcagcggtcgtctttggtggcgtgccaattaatccccaaattcaaaagctacgccacggggtagatgtactggtcgccacacctggacgattattagatcttgagcagcaaaaagcggtgaagtttaatcaactcgaagtcttagtgctggatgaagcggatcgcatgctcgacatgggttttatccgcgatatcaaaaagatcctcgccatgttgcccgctaaacgacaaaacctgatgttttcggcgaccttctccgatgaaatccgcgagctggccaaaggcctagtgaatcaaccagtagaaatttcagttacgccacgcaacgccgcggcaaacacagtcaaacaatggatttgccccgtcgataagaatcaaaaatcggcgctgctaattcagctcatcaagcaggaaaactggcagcaagtcttagtgttttcacgcactaaacacggcgccaacagactggctaagagtcttattcaagccgagatcagcgccgccgctatccacggcaataagagccaaggcgcacgcaccaaagccttagccgactttaagagtggcgaagtgcgcgtgctagtggcgaccgatattgcggcgcgcgggctcgatatcgaccaattaccacaagtagtgaacttcgatctgcccaatgtccccgaggattacgtacaccgcattggccgcaccggccgtgctggcgccttaggccaagccgtatccttagtcagtagcgaagaaactaagctgctcagggacattgagcgtttgatcaatcgcgtgcttgaaaggcaggaggttgaaggcttcagccctgtgcatgcgctccccgaatcgaccttaaatgcccatggtaaagagaacaaaatcaaagccgtggcgagccaacgtaagcatcgcagcgcgggtaaaccctcgccaagagccggtacaggccgcgatggtcgtaaaacgccagacagcagcgacggcgctgcgcagcaaaagaactcaaatccaaaccaaggccagcgcaataatcaggggcagcataagcgtcctcaagcgccaaaaaacgctgagcataaaaacacgcactcaagtaccgaagctggccgcacgccaaaaccacaggataaacgtcctccgcgcggcaaaggcccggctaatagcgaacataaagccaaaggccagcctcattcagcggcgcaacaacttagtccacaggctcgcagcgaaaaacaacattctgactcacgccgccaaggccgcgctcagccgaatgctaatcccgccagcggtgaacacaaaaagccctcgcatcgacccgataaccgccctaatcgcgtaaaatcctaa

SEQ ID NO: 77161 - protein, 549 aa, Shewanella sp. MR-4
MSFSSLGLSAPIQKAVTEQGYDTPSPIQAQAIPAVLTGKDVMAAAQTGTGKTAGFTLPLLELLSKGNKAKVGQIRALVLTPTRELAAQVSESVETYGKYLPLRSAVVFGGVPINPQIQKLRHGVDVLVATPGRLLDLEQQKAVKFNQLEVLVLDEADRMLDMGFIRDIKKILAMLPAKRQNLMFSATFSDEIRELAKGLVNQPVEISVTPRNAAANTVKQWICPVDKNQKSALLIQLIKQENWQQVLVFSRTKHGANRLAKSLIQAEISAAAIHGNKSQGARTKALADFKSGEVRVLVATDIAARGLDIDQLPQVVNFDLPNVPEDYVHRIGRTGRAGALGQAVSLVSSEETKLLRDIERLINRVLERQEVEGFSPVHALPESTLNAHGKENKIKAVASQRKHRSAGKPSPRAGTGRDGRKTPDSSDGAAQQKNSNPNQGQRNNQGQHKRPQAPKNAEHKNTHSSTEAGRTPKPQDKRPPRGKGPANSEHKAKGQPHSAAQQLSPQARSEKQHSDSRRQGRAQPNANPASGEHKKPSHRPDNRPNRVKS

SEQ ID NO: 77162 - DNA, 1230 bp, Shewanella sp. MR-7
  CDS (1)..(1230): transl_table=11
atgtcttttagcgcgctttccttacattctcagctagttaataccttagccgagcttggctatctgcagcccacacctatccaagttgaagccattcccgctattttggcaaaacaggatgtgatggcgggcgcacaaacgggaacagggaaaaccgcagcctttgctctcccgattttgcagcaattactcctcgataacgaaagccaagatgcccctaaagatattcgagccttagtgctagtgccgactcgtgagttagctgtgcaagtgcagcagagttttgtgaaatatgccaaaggcacggatattcgtgtcgggattgcctacggcggcgtgagtattgaggcccagcaagccgaatttaaagctggcgtcgatgtgcttatcgcgacgccagggcgcctgctcgatcatctgcgtcaaggtgtgcttaaccttaagtatttgagtgtgctggtatttgatgaagccgaccgtatgctcgatatgggatttatggatgaaatcaaggcggtgctcaagcaagtgcccgcgcagcgacagacactgctgttctcggccaccttagacgattcgattttcggtttcagtaaaaatcttttgcgtgatcctaagcttatcgaagtcgcgaaacgcaataccacggccgcacaggtggagcagcgggtttatgccatcgacagtgaccgtaaaaccgagtttgtcagccatttagtacgcagtaaaaattggcagcaagtgctgatctttagccgcactaagcagggtgtcgataagctgaccactcagcttaatcaactcggggtggcaacgcaggcatttcacggtgacttatcccaaggcgcaagggagaaggttttaaaggattttaaacaaggactagtgcaggttttagtcgcgaccgatgttgccgctcgtggcctcgatattgccgacttacagtatgtgattaacttcgaactgccctttattgccgaagattatatccatcgtatcggtcgcactgggcgtgcgggtagtgctggtttggcgattacgctctttagccaagaggatgcactgctgctcgaagaggtagaagcattgctcgataaacgcttgccgcagcaatggtatcccggctttgagcctgattttaataagatggaacccgagccaagacgcaatagtaaagcggctcaaaaacagcgagctaagaagcgcgccttaggcggcaagaaacggtaa

SEQ ID NO: 77163 - protein, 409 aa, Shewanella sp. MR-7
MSFSALSLHSQLVNTLAELGYLQPTPIQVEAIPAILAKQDVMAGAQTGTGKTAAFALPILQQLLLDNESQDAPKDIRALVLVPTRELAVQVQQSFVKYAKGTDIRVGIAYGGVSIEAQQAEFKAGVDVLIATPGRLLDHLRQGVLNLKYLSVLVFDEADRMLDMGFMDEIKAVLKQVPAQRQTLLFSATLDDSIFGFSKNLLRDPKLIEVAKRNTTAAQVEQRVYAIDSDRKTEFVSHLVRSKNWQQVLIFSRTKQGVDKLTTQLNQLGVATQAFHGDLSQGAREKVLKDFKQGLVQVLVATDVAARGLDIADLQYVINFELPFIAEDYIHRIGRTGRAGSAGLAITLFSQEDALLLEEVEALLDKRLPQQWYPGFEPDFNKMEPEPRRNSKAAQKQRAKKRALGGKKR

SEQ ID NO: 77164 - DNA, 1440 bp, Shewanella sp. MR-7
  CDS (1)..(1440): transl_table=11
atgccagcgcgggttacccaccacaggatattcgccttgagcaattcagacactcagccttcaatggctttctcgactcttaagctaaaacccgaactgcttgagaaccttaccactatgggctatcacgaaatgacgccaattcaggcgcagagtctgccagccattttagcgggcgaggatgtgattggtcagggtaagacgggttcgggtaaaacggcggccttcgggctaggtctgctgaacaagttagatgtgaagcgttttcgcattcaaaccttagtgctgtgtccgacccgtgaactggccgaccaagtggcgcaggagatccgcacactggcgcgtggtattcacaacgtaaaagtgctcaccctctgcggcggcgtgcctatggggccgcaaattggttcactcgagcatggcgcccacattatcgtcggtacgccggggcggattgtcgatcacttagagcgtaaccgtttagacctaagcaacctgaatatgctcgtgcttgacgaagccgaccgtatgctggaaatgggcttccaacctcagctcgatgcgattatcgaacagtcgccacgcgagcgccaaactctgttgtttagcgcaaccttccccgagcagattcagtcgattgctaagcaaatcatgtacgaccctgtgatggtgaaagtggccgtgacccacgaaaagagcaccatcgagcagcatttctaccacttggatgacgacaaggcgcgcatgcaggcgctgcaattattgctgctggatcgtaagccagagagtgcggtggtgttttgtaataccaagcgcgaaacccaaaaagtggccgatgaactgagcgatgcaggctttagcgttatcgccctgcacggcgacttagagcagcgtgaccgggatgaaaccctgctgcaatttgctaacaagagtgcctgtgtgttggtggctaccgacgtggccgcccgtggtttagatatcgatgcgctagatgcggtatttaactaccatgtggcctttgacaccgaagtgcatattcaccgtattggccgtaccggccgtgcgggcagtaagggcgctgcttttaccttctttgacgatcaagatggctacaaaattgcgttattagaagagtacttagagcgcgatattcagagtgaagccttaccatcattaagtttgctgggtactgcgcccaatgcgccaaccatgatcaccctgcaaatcgatggcggtaaaaaagagaagcttcgccccggcgatatcctcggtgccctcactggggagaatggtatcgaaggctcgcaggtcggcaaaatccttgtgaccgattaccgcgcctatgtggcggtgaatcgtaaagtcgctaaaaaggcgctgagcaaaatcaccagtggccgcattaaaggcaagtcctaccgcgcgtggttaatgaaataa

SEQ ID NO: 77165 - protein, 479 aa, Shewanella sp. MR-7
MPARVTHHRIFALSNSDTQPSMAFSTLKLKPELLENLTTMGYHEMTPIQAQSLPAILAGEDVIGQGKTGSGKTAAFGLGLLNKLDVKRFRIQTLVLCPTRELADQVAQEIRTLARGIHNVKVLTLCGGVPMGPQIGSLEHGAHIIVGTPGRIVDHLERNRLDLSNLNMLVLDEADRMLEMGFQPQLDAIIEQSPRERQTLLFSATFPEQIQSIAKQIMYDPVMVKVAVTHEKSTIEQHFYHLDDDKARMQALQLLLLDRKPESAVVFCNTKRETQKVADELSDAGFSVIALHGDLEQRDRDETLLQFANKSACVLVATDVAARGLDIDALDAVFNYHVAFDTEVHIHRIGRTGRAGSKGAAFTFFDDQDGYKIALLEEYLERDIQSEALPSLSLLGTAPNAPTMITLQIDGGKKEKLRPGDILGALTGENGIEGSQVGKILVTDYRAYVAVNRKVAKKALSKITSGRIKGKSYRAWLMK

SEQ ID NO: 77166 - DNA, 1611 bp, Hyphomonas neptunium ATCC 15444
  CDS (1)..(1611)
ttgactgagacaacatttgcggatttcggcctggccgaaaacatcctcaaagccgtgaccgagtccggctacaccatccccaccccgatccagcgcgaagccattccgcatatcctgatgggtggcgacgtaaccggcgtagcccagacgggcaccggcaagacggccgctttcgtgctgccgatgatccagcgcctttccacaggccgcgcccgcgcgcggatgccgcgctgcctgatcctctgcccgacgcgcgagcttgccgcgcaggttgccgagaatttcgagaagtatggcaaatacctcaagctgacgatggcgctgctgattggcggcgtcagcttcaaggaacaggaaaccctgctccagcgcggcgtggacgtgctgatcgcgacgccgggccgcctgatggaccagttcgatcgcggcaagctactgatgatgggcgttgagacgctgatcatcgacgaagccgaccggatgctcgacatgggcttcatccccgacatcgagaagatctgcgccaagctgccggcaaaccgccagacgctgctgttctccgcgaccttcccgacggacattcagcgccttgccaagaccttccagaaagatcccaagaagatcgaagtcacccggccggcacagaccgccgagacgatttcgcaattcgtggtcaagctgccgaccaatgatggcaaggcccgccgcacggcgctgcgccgcgtgatcgaagcgaccaatgtgaagaacggtatcgtgttctgtaaccgcaaggtcgaggtcgacatcgttgctgcctcgctgaccaagcatggccatgacgctgcgccgatccatggcgacctgccgcagagcgtgcggtccgaaacgctccagcgtttccgtgatggcaagctgaaactgctcgtcgcgtctgacgtggccgcgcgcggcctcgatattccggatgtgggccatgtgttcaatttcggcccaccgccgaaggatgaagattacgtccaccgcatcggccgcacgggccgcgccggacgcaccggcgagagctatacggttgtgacgcctgcggacgataagtcctggggcttcgtggtgaagatgatcaagaaggacgttccggaattcatgccggagggccttctggaagaactcgaaacgttgcccccggaagaaaagcgcgaccgcaagacgggcggacgtggcggagaccgcgaccgcggtggccgcagcgcccgtggccgtaccgagcggaccgagcagagcgaccggagcgaacgcgccccgcgccgccgccgcgagaaggaagacggcgatgtggccgtcgccgatgcgccggttgagacggttgccaccgaaacagtggaggctgcagagcccgccgccgtgcaggaaaagcccaagcgcgaacgcgcgccgcgcggcgaaaaacgccgtgaacgcacagaagaaacgccccagccccgcgccgaaaaacgcgagcgcagcggcggtgaccgcgaacgcgaacgtccgcaacgcgactataagcgcaaggatgacgatctgatcctggagccggcgcctgaccgtgtggtcggctttggcaatgatgtgcccaacttcctgaaacgctaa

SEQ ID NO: 77167 - protein, 536 aa, Hyphomonas neptunium ATCC 15444
MTETTFADFGLAENILKAVTESGYTIPTPIQREAIPHILMGGDVTGVAQTGTGKTAAFVLPMIQRLSTGRARARMPRCLILCPTRELAAQVAENFEKYGKYLKLTMALLIGGVSFKEQETLLQRGVDVLIATPGRLMDQFDRGKLLMMGVETLIIDEADRMLDMGFIPDIEKICAKLPANRQTLLFSATFPTDIQRLAKTFQKDPKKIEVTRPAQTAETISQFVVKLPTNDGKARRTALRRVIEATNVKNGIVFCNRKVEVDIVAASLTKHGHDAAPIHGDLPQSVRSETLQRFRDGKLKLLVASDVAARGLDIPDVGHVFNFGPPPKDEDYVHRIGRTGRAGRTGESYTVVTPADDKSWGFVVKMIKKDVPEFMPEGLLEELETLPPEEKRDRKTGGRGGDRDRGGRSARGRTERTEQSDRSERAPRRRREKEDGDVAVADAPVETVATETVEAAEPAAVQEKPKRERAPRGEKRRERTEETPQPRAEKRERSGGDRERERPQRDYKRKDDDLILEPAPDRVVGFGNDVPNFLKR

SEQ ID NO: 77168 - DNA, 1731 bp, Rhizobium leguminosarum bv. viciae 3841
  CDS (1)..(1731): transl_table=11
atgcgttccggcgatagtcgttgtggcgccccgaaaggttttgccttgactaattttgaatcgcttggtgtctccaagccgatcgtcgctactttgttccagctcggcatcgaaacgccgacgccgatccaggaacattcaattcctctcctcctcgaaggccgcgacctgatcggccttgcccagaccggcaccggcaagacggccgctttcggcctgccgctgatcgaaaagctgctcgccgacgaacggcgtcccgacaaccgcacgacgcggacgctgatccttgcgccgacccgcgaactggtgaaccagatcgccgagagcctgaagaagttcatccgcaagtcgtcgctgcgcatcaatgtcgtcgtcggcggggtctcgatcaacaagcagcagcttcagcttgaaaagggcaccgacattctcgtcgccacgccgggccgcctgctcgaccttatcaatcgccgcgcgatcacgctgactgcggttcgctatctcgtgctcgacgaagccgaccagatgctcgacctcggcttcgtccacgatctgcgcaagatcgccaagatggtgccgaaaaagcgtcagaccatgctgttctcggccaccatgccgaaggcaatcgccgatcttgccggcgaatatctcgtcgatcccgtcaaggtcgaagtcacgccccccggcaaggctgccgataaggtcgaacagtacgtccattttgtcggcggcaagaacgacaagacggaactgctccgcaagtcgctgaccgaaaatcctgatggccgcgcgatggtcttcctgcgcaccaagcacggtgcggagaagctgatgaagcatctcgagaatatcggctattccgtcgcctcgatccacggcaacaagagccagggccagcgcgaacgggcgctgaaggccttccgcgacggcagcatcaagacgctgattgccacagacgtcgccgcccgcggcatcgacatccccgctgtcagccacgtctacaactacgacctgcctgaggtgcctgacgcctatgtccaccgcatcggccgcacggcgcgcgccggccgcgacggtatcgccatcgctttctgcgctcctgacgaagccaagctactgcgtgatatcgagcgcctgatgggcatcgacatcactgtcgcaagcggcgaagcgccggcaaatatcggcggcggaccccgccgtgccaacggcaatggtaacaaccgtaatcgcaatggcggccagggtcgcgaaggccagggtcgtggcgaaggccgtggcgaccagaaccgttcggagcatcgcggcagccgtcaggaacgccgcccgcgccgcgaaggtgaaggcagcgaagtccgcgccggcggcgaggagcgtcgtccgcgtccggagcgcccgaccagccgcaacgaggacttccgcggtcagcgccgcggtgaagcgaccccggatctcggccctgacaacgatctggcctcgacctccgacttccgtgcctctgcaaagccacagcgtccggctcatcacggcgcccatgccaatggtgagccgagcggtcatcaccgcggcaacagccgccatgcacacggccgcccggcccgcaagcatggcgaggaccgcggcccgcagcaggcccaggccggcgaaccgcgccgcgacggcaacggcggcaaccgccgcggtggctccggctcccgcaacggcggcggccagcggcgcgaacgcgcctga

SEQ ID NO: 77169 - protein, 576 aa, Rhizobium leguminosarum bv. viciae 3841
MRSGDSRCGAPKGFALTNFESLGVSKPIVATLFQLGIETPTPIQEHSIPLLLEGRDLIGLAQTGTGKTAAFGLPLIEKLLADERRPDNRTTRTLILAPTRELVNQIAESLKKFIRKSSLRINVVVGGVSINKQQLQLEKGTDILVATPGRLLDLINRRAITLTAVRYLVLDEADQMLDLGFVHDLRKIAKMVPKKRQTMLFSATMPKAIADLAGEYLVDPVKVEVTPPGKAADKVEQYVHFVGGKNDKTELLRKSLTENPDGRAMVFLRTKHGAEKLMKHLENIGYSVASIHGNKSQGQRERALKAFRDGSIKTLIATDVAARGIDIPAVSHVYNYDLPEVPDAYVHRIGRTARAGRDGIAIAFCAPDEAKLLRDIERLMGIDITVASGEAPANIGGGPRRANGNGNNRNRNGGQGREGQGRGEGRGDQNRSEHRGSRQERRPRREGEGSEVRAGGEERRPRPERPTSRNEDFRGQRRGEATPDLGPDNDLASTSDFRASAKPQRPAHHGAHANGEPSGHHRGNSRHAHGRPARKHGEDRGPQQAQAGEPRRDGNGGNRRGGSGSRNGGGQRRERA

SEQ ID NO: 77170 - DNA, 1704 bp, Pseudomonas aeruginosa UCBPP-PA14; identical to SEQ ID NO: 65506
  CDS (1)..(1704): transl_table=11

SEQ ID NO: 77171 - protein, 567 aa, Pseudomonas aeruginosa UCBPP-PA14; identical to SEQ ID NO: 65507

SEQ ID NO: 77172 - DNA, 1581 bp, Pediococcus pentosaceus ATCC 25745; identical to SEQ ID NO: 65508
  CDS (1)..(1581): transl_table=11

SEQ ID NO: 77173 - protein, 526 aa, Pediococcus pentosaceus ATCC 25745; identical to SEQ ID NO: 65509

SEQ ID NO: 77174 - DNA, 1566 bp, Oenococcus oeni PSU-1; identical to SEQ ID NO: 65510
  CDS (1)..(1566): transl_table=11

SEQ ID NO: 77175 - protein, 521 aa, Oenococcus oeni PSU-1; identical to SEQ ID NO: 65511

SEQ ID NO: 77176 - DNA, 1587 bp, Leuconostoc mesenteroides subsp. mesenteroides ATCC 8293
  CDS (1)..(1587): transl_table=11
ttgaaatttagtgaattaggtttgtcacaagacattttggatgctattacaacgcatggatatgttgaagctacaccaatccaagaaaagacaattccattaacattagcaggacgtgatgtaattggacaagcacaaacaggaactggtaaaacagcagcatttggtttgccaatcttggagcacattgatttaaataataaaaacattcaagcattgattgtatcaccaacgcgtgaattagcaattcaaacagctgaagaattaaaaaagttgggacgcgacaagcgagttgatgtacaggttgtctttggtggtgctgatattcgccgtcagatccaaaatttgaagtcacatccacaaatcctagttggtacacctggtcgtttacttgatcacattaaccgtaagactgtaaaaattgataatgttcgtacattagtattggatgaagctgatgaaatgttaaatatgggcttcttagacgatattgaggcaattatttcaaagacaccagcagagcgtcaaacactgttgttctcagcaacaatgccaccagcaattaagcgtattggtgtcaagttcatgacgaaccctgaacatattcaaatcgaagcaaaagaattaacaactgatttggttgatcaatactttgttcgtatgcgcgaaaacgaaaagtttgatactatgacgcgtatctttgatgtgcaggcaccaaaattggcgatcgtcttcggtcgtacaaagcgtcgcgttgaagaattatcacgaggattagaagcacgtggttaccacgctgctggtttgcatggtgatttaacacaacaaatgcgttcacgtgtgttggctcaatttaagtcacatgaaattaatattttagttgcaacagacgttgctgcacgtggtttggatgtgaaggacgtatctcacgtttataactttgatattccgcaagatccagaatcttatgttcaccgtattggacgtactggtcgtgctggagctaagggtgtatctgtcactttcgttgcaccaaacgaaatggattacttacgtgctgttgaagatttgactaagaagcgcatgacgcctcttgaaccagcatctctaaaggacgctcgtattggaaagattaacaatgctgctggtgaagttgctaagttaattgatacaactgaggtttcagaaattcaatctcaggtagatgcgttgacagcaaagtatagtgctgaacaattagctgctgctgtattatctagcgttgctgatttagaaaagcaaaatacaccagttgaaattactcgtgaacgtccattaccacgtcgtaagggtggtaatggtggctcacgcggtggttcacgtaatggcggcggacgtcgtaatggtggtggcggtggttaccgtggcaatcgcgaacgtcgtggtaatggtgacacccgcggtaatgatcgccgtcgaggcagtggcgctgcttctagcgaacgccgttttggagattacaagcgtcgtgacggtcgctcaactgaaagtcgtcgcaacagtagtggcggatcacgtcgcgaatttactgtacgtgaaaaagattaa

SEQ ID NO: 77177 - protein, 528 aa, Leuconostoc mesenteroides subsp. mesenteroides ATCC 8293
MKFSELGLSQDILDAITTHGYVEATPIQEKTIPLTLAGRDVIGQAQTGTGKTAAFGLPILEHIDLNNKNIQALIVSPTRELAIQTAEELKKLGRDKRVDVQVVFGGADIRRQIQNLKSHPQILVGTPGRLLDHINRKTVKIDNVRTLVLDEADEMLNMGFLDDIEAIISKTPAERQTLLFSATMPPAIKRIGVKFMTNPEHIQIEAKELTTDLVDQYFVRMRENEKFDTMTRIFDVQAPKLAIVFGRTKRRVEELSRGLEARGYHAAGLHGDLTQQMRSRVLAQFKSHEINILVATDVAARGLDVKDVSHVYNFDIPQDPESYVHRIGRTGRAGAKGVSVTFVAPNEMDYLRAVEDLTKKRMTPLEPASLKDARIGKINNAAGEVAKLIDTTEVSEIQSQVDALTAKYSAEQLAAAVLSSVADLEKQNTPVEITRERPLPRRKGGNGGSRGGSRNGGGRRNGGGGGYRGNRERRGNGDTRGNDRRRGSGAASSERRFGDYKRRDGRSTESRRNSSGGSRREFTVREKD

SEQ ID NO: 77178 - DNA, 1320 bp, Magnetococcus sp. MC-1
  CDS (1)..(1320): transl_table=11
atgtctgattttgcttcgttgaatcttgttaaacccctccttaatgccttaactcaagctggttacaccaccccaacccccattcaagcacaggctattccgcatctgttggcaggtcgggatctgctgggcattgcccagaccgggacaggtaaaaccgcagcttttgcactacccatactcaataagttgagccaaattaaaggtcgccccgcgcccaatgcgccccgcgccttgatccttaccccaacccgtgagctcgcttcacaaatcggcaacagcatcgccgtttatggtaagcatgtgccaaccacccacaccgttgtatttggtggcgtgggcaaacagccacagattcgcgccctctcccgtggcgttgatattttggtcgctacccctggccgcttactggatcttatgggggagcgccatgttcgcctggatcagattcaggtttttgtactggatgaggccgaccgcatgctggacatgggctttatccatgatatccgtcgcatcattaaggtgatcccagctaagcgccatacgctgctcttttctgccaccatgcccaaggatattgcagagctggcagagggcttattgaccaatcccgccaaggttgaggtcacgccagaatccacgacggttgagcgtattacgcaaaaggtgctgtttgtcgataaacagaacaagcgttctttgctcaaaaatgtgcttgagcatgagtctattgagcaggttttggtctttacccgcaccaagcatggggccaaccgggtggcggagtatcttgacaaacaccgcattgcctctgcggcgattcatggcaacaaatcccaaagcgcccgcgaaaaggcactggatggctttcgcaaaggcaagttaaaggttttggtagcgacagatattgcggcgcggggaattgatgtggcgggcattagccacgtgatcaattttgacctgcccaatgagtcggaaagctacgtgcaccgcataggccgcacagcgcgcgctgggcgggatggcaatgccatctctttttgcgatgctgaagagcgcggctatctgctggatattgaaaagaccatccgccagaccgtgccggttgatattgaccatgaattccattgcgaagtggttgccaacgcagccccaatcaaacccagccgcaaacgcagcagcggccatggtgccggtggtggcaatccccatggtgggggacatcgtcgcggcaaccccagtaccgccagcaaaccacgtcagcatagcggacgtcgcaccccatccagcaagggtcgtagcggtagcgtagcgtaa

SEQ ID NO: 77179 - protein, 439 aa, Magnetococcus sp. MC-1; identical to SEQ ID NO: 65513

SEQ ID NO: 77180 - DNA, 1230 bp, Shewanella sp. ANA-3
  CDS (1)..(1230): transl_table=11
atgtcttttagcgcgctttccttacattctcagttagtgaataccttagccgaacttggctatcagcagcccacgcccatccaaattgaagccattcccgctattttggcaaaacaggatgtgatggcgggcgcacaaacgggaacgggaaaaaccgcagcctttgctctcccaattttgcaacaattactcatcgataacgaaagccaagatgcccctaaagatgttcgagccctagtgctagtgccgactcgtgagttggcggtgcaagtgcagcagagttttgtgaaatatgccaaaggcacggatattcgtgttgggattgcctacggcggcgtgagtatcgaggctcagcaagccgaatttaaggctggcatcgatgtgcttatcgcgacgcctgggcgcctgctcgatcacctgcgtcaaggtgcacttaaccttaagcgtttgagtgtgctggtatttgatgaagccgaccgtatgctcgatatgggatttatggatgaaatcaaagcggtgctcaagcaagtgcccgcgcagcgacagacactgctgttctcggccaccttagacgattcgattttcggttttagtaaaaatctgctccgtgatcctaagcttatcgaagtcgcgaaacgcaataccacggccgcacaggtggagcagcgggtctatgccatcgacagtgaccgtaaaaccgagtttgtcagccatttagtgcgcagtaaaaattggcagcaagtgctgatctttagccgcactaagcagggtgtcgataagctgaccactcagctcaatcaactcggggtggcaacgcaggcatttcacggtgacttatcccaaggcgcaagggagaaggttttaaaggattttaaacaaggactagtgcaggttttagtcgcgaccgatgtcgccgctcgtggcctcgatattgctgacttgcagtatgtaattaatttcgaactgccctttattgccgaagattatatccaccgtatcggtcgcactgggcgtgcgggtagcgctggtttagcgattacgctctttagccaagaggatgcactgctgcttgaagaggtagaagcattgctcgataaacgcctgccgcagcaatggtatcccggctttgaacctgattttaataaaatggagcccgagccaagacgcaatagtaaagcggctcaaaaacagcgagctaagaagcgcgccctaggcggcaagaaacggtaa

SEQ ID NO: 77181 - protein, 409 aa, Shewanella sp. ANA-3
MSFSALSLHSQLVNTLAELGYQQPTPIQIEAIPAILAKQDVMAGAQTGTGKTAAFALPILQQLLIDNESQDAPKDVRALVLVPTRELAVQVQQSFVKYAKGTDIRVGIAYGGVSIEAQQAEFKAGIDVLIATPGRLLDHLRQGALNLKRLSVLVFDEADRMLDMGFMDEIKAVLKQVPAQRQTLLFSATLDDSIFGFSKNLLRDPKLIEVAKRNTTAAQVEQRVYAIDSDRKTEFVSHLVRSKNWQQVLIFSRTKQGVDKLTTQLNQLGVATQAFHGDLSQGAREKVLKDFKQGLVQVLVATDVAARGLDIADLQYVINFELPFIAEDYIHRIGRTGRAGSAGLAITLFSQEDALLLEEVEALLDKRLPQQWYPGFEPDFNKMEPEPRRNSKAAQKQRAKKRALGGKKR

SEQ ID NO: 77182 - DNA, 1284 bp, Shewanella sp. ANA-3
  CDS (1)..(1284): transl_table=11
atgacccaagcttcttcctccgttgccagctttgccgaacttggcattattgcgcccctgtgtaatcgactctctgagctgacctatgcggcgcctacgcccatacaagcggcgactattccggccgtgctcagtggacgggacgtattagcgggggcgaatacgggctcaggcaaaacggccgcctttgccgtgccgttattacagcgcctgtttgaggcgaaaaccgcggaaaaatcggcaggccaagtgcgttgtttggtactcgtgccaacccgcgaattggcgcagcaagttgccgatagctttttatcctatgcctctcacttcaatggccaacttaagatagttgcggcgtttggtggcgtgtctgtcaatctgcaaatgcaaagcttacgcgcgggagccgatgtgttggtggcaacgcctggccgtttattggatttattagccagcaatgcgcttaagttaaatcgcgtctcggccttagtgttggatgaagcagaccgaatgctaagccttgggtttactgatgaattaaatcaagtgcttgaggcgctgccgtccaagaaacaaaccttattatattcggcgacattccctgaagaagtgcgtgcactcacggccaaattactccatcaaccgcttgaatatcatctgcaaagtgagcaagaaagcaccattgaacagcgcgttatcacagtcaaccgtgaacaaaaaacggcgctgttggcacacttgataaaacagcatcagtggtcgcaggcgcttatttttgtcagtgctaaaaacacctgtaatcacctcgcacagaagctgtctaaacgtgggatcagtgccgaagtcttccatggcgataaggcgcaaggtgcgcgaactcgagtactcgatggttttaaaagtggtgaaatcagtgtgttgattgcgaccgatatcgcagcccgcggtattgatattgataaactcccagtggtgattaacttcgatttaccaagaagtccggccgattatatgcaccgtattggccgtagcggccgcgcgggagaggcgggtttggcggtgaccttgatttcacatgaggaatatcatcacttcggcgtgatagaaaagaaaaacaaaatcaaacttgtacgtgaacaaatcccaggatttgaagcgaatgccgagatgccactcgaagtgttagcgcaggaaaaaccgcaggctaaacccgaaggcaccggcaagaaaaagcgtaaacagttacccgcggcgaaccttgaattttggggtaaaaagtcttaa

SEQ ID NO: 77183 - protein, 427 aa, Shewanella sp. ANA-3
MTQASSSVASFAELGIIAPLCNRLSELTYAAPTPIQAATIPAVLSGRDVLAGANTGSGKTAAFAVPLLQRLFEAKTAEKSAGQVRCLVLVPTRELAQQVADSFLSYASHFNGQLKIVAAFGGVSVNLQMQSLRAGADVLVATPGRLLDLLASNALKLNRVSALVLDEADRMLSLGFTDELNQVLEALPSKKQTLLYSATFPEEVRALTAKLLHQPLEYHLQSEQESTIEQRVITVNREQKTALLAHLIKQHQWSQALIFVSAKNTCNHLAQKLSKRGISAEVFHGDKAQGARTRVLDGFKSGEISVLIATDIAARGIDIDKLPVVINFDLPRSPADYMHRIGRSGRAGEAGLAVTLISHEEYHHFGVIEKKNKIKLVREQIPGFEANAEMPLEVLAQEKPQAKPEGTGKKKRKQLPAANLEFWGKKS

SEQ ID NO: 77184 - DNA, 1464 bp, Shewanella sp. ANA-3
  CDS (1)..(1464): transl_table=11
atggaaccaagctgcacgcagcggttttgcattcacacttcgcactcacaaaaaagagcttttatgaaatttgacacactcggcttatcttcccctattttgaatgcgatagctgagtgtggctatctgcagctcacgcaagtgcagcagcaggtgatccccctcgcgctcgaaggaaaagacattatggcctgcgcccaaacgggcacgggcaaaaccgcatcctttgccttacccgtgcttgagcaactgtcaaaacagccaaatgataagcctctgctgcgtgcgctagtgatgacaccgacacgggaactggcgattcaagtttgcgctaacattcagaaatacagtcagtttttacccctgaaaaccttagccgtttatggcggcgcgaacatgaatccgcagcgaaaaggggtggagcagggcgtggatattctggtggcaacaccagggcgactattcgacattattggccagttccatttagacctctctagtgtgaccactttagtgatcgacgaagcggaccgcatgctcgatttaggctttgtgcgcgacattgaaaaggtaaaacgccttatcgccactgagcatcaaaccatgttgttttcagccacctatagcgatgcggtaaagcagctttcccataagatgctcaatcaacccgagtgggtgaatgtggccgaaaataccacggcatccacggttgagcagttggtctatcgagtcgataaacgccgcaaggccgagttattgtctgagcttgtcgggcgcaacaattggcgtcaggtgctggtgtttgccagcaccaaggaatgcgccgagcatctattgcaggagctcaccctcgatgggatcagcgcgggcgtgttccacggcgataaaacccaaggcgcgcgtaatcgtgtgctcgatgattttaaagcgggcaaattgcgagtgctggtggcgaccgatgtggcggcgcgcggcttagatattcaagcgttgcccttagtgattaacctcgaattgccattccttgcggaagactatgtgcaccgtattggtcgtactggccgtgcgggactttcggggcgcgcgatatcatttgtgtctccagccgatgatgagatgttggccgagatagaggccttgattggccaaaccttgccagtgacggtacagcccggttacgaggaaggcacaccgctgccagcgcgttaccgtgaggcgcctacggacaccactaagaccgctaagtggaattacaagagcagtcgcaatacgggggctaaaggggcgggcggcaatggcacgaaagctaatggctcgaaaggcaacggcgcgcgaggtaagggtggctttggcggcaacgccggatttggtcaatcgagcgaaagccaggcgcgggcgcgtaaatcgccagcccgtgaaggtaaatacgctaaaaataagccgaatactcaaaagggtaaataa

SEQ ID NO: 77185 - protein, 487 aa, Shewanella sp. ANA-3
MEPSCTQRFCIHTSHSQKRAFMKFDTLGLSSPILNAIAECGYLQLTQVQQQVIPLALEGKDIMACAQTGTGKTASFALPVLEQLSKQPNDKPLLRALVMTPTRELAIQVCANIQKYSQFLPLKTLAVYGGANMNPQRKGVEQGVDILVATPGRLFDIIGQFHLDLSSVTTLVIDEADRMLDLGFVRDIEKVKRLIATEHQTMLFSATYSDAVKQLSHKMLNQPEWVNVAENTTASTVEQLVYRVDKRRKAELLSELVGRNNWRQVLVFASTKECAEHLLQELTLDGISAGVFHGDKTQGARNRVLDDFKAGKLRVLVATDVAARGLDIQALPLVINLELPFLAEDYVHRIGRTGRAGLSGRAISFVSPADDEMLAEIEALIGQTLPVTVQPGYEEGTPLPARYREAPTDTTKTAKWNYKSSRNTGAKGAGGNGTKANGSKGNGARGKGGFGGNAGFGQSSESQARARKSPAREGKYAKNKPNTQKGK

SEQ ID NO: 77186 - DNA, 1440 bp, Shewanella sp. ANA-3
  CDS (1)..(1440): transl_table=11
atgccagcgcgggttacccaccacaggatattcgccttgagcaattcagacactcagccttcaatggctttctcaactcttaagctaaaacccgaactgcttgagaaccttaccactatgggctatcacgaaatgacgccgattcaggcgcagagtctgccagccattttagcgggcgaggatgtgattggtcagggcaagacgggttcgggtaaaacggcggccttcggtttaggtctgctgaacaagttagatgtgaagcgttttcgcattcaaaccttagtgctgtgtccaacccgcgaactggccgaccaagtggcgcaggagatccgcacactggcacgtggtatccacaacgtaaaagtgcttaccctctgtggcggcgtgcccatggggccgcaaattggttcgctcgagcatggcgcccacattatcgttggtacgccggggcggattgtcgatcacttagagcgtaaccgtttagacctaagtaacctgaatatgctcgtgctagacgaagccgaccgtatgctggaaatgggctttcagccacagctcgatgcgattatcgagcagtcgccacgcgagcgccaaaccctgctgtttagtgcgaccttccccgagcaaattcagtcgattgctaagcaaattatgtacgacccagtgatggtgaaagtggccgtgacccacgaaaagagcaccatcgagcagcatttctaccacttggatgacgacaaggcgcgcatgcaggcgctgcaattattgctgctggatcgtaagcccgagagcgccgtggtgttttgtaataccaagcgcgaaacccaaaaagtggccgatgaactaagtgatgctggctttagcgttatcgccctacatggggatttagagcagcgcgaccgggatgaaaccctgctgcaatttgccaacaagagtgcctgtgtgttggtggcaactgatgtggccgcccgtggcctcgatatcgacgcgctggacgcggtgtttaactaccacgtggcttacgataccgaagtgcatattcaccgtattggccgtaccggccgtgcgggcagtaagggcgcggcttttaccttctttgacgatcaagatggctacaaaattgcgttattagaagagtacttagagcgcgatattcagagcgaagccttaccatcattaagtttgctgggcacagcgcccaatgcaccaaccatgatcaccctgcaaatcgatggcggtaaaaaagagaagcttcgccccggtgatatcctcggggccctcactggggagaatggcatcgaaggctcgcaggtcggcaaaatccttgtgaccgactaccgcgcctatgtggcggtgaatcgcaaagtcgctaaaaaggcactgagcaaaatcaccagcggccgcattaaaggtaagtcctaccgcgcgtggttaatgaaataa

SEQ ID NO: 77187 - protein, 479 aa, Shewanella sp. ANA-3
MPARVTHHRIFALSNSDTQPSMAFSTLKLKPELLENLTTMGYHEMTPIQAQSLPAILAGEDVIGQGKTGSGKTAAFGLGLLNKLDVKRFRIQTLVLCPTRELADQVAQEIRTLARGIHNVKVLTLCGGVPMGPQIGSLEHGAHIIVGTPGRIVDHLERNRLDLSNLNMLVLDEADRMLEMGFQPQLDAIIEQSPRERQTLLFSATFPEQIQSIAKQIMYDPVMVKVAVTHEKSTIEQHFYHLDDDKARMQALQLLLLDRKPESAVVFCNTKRETQKVADELSDAGFSVIALHGDLEQRDRDETLLQFANKSACVLVATDVAARGLDIDALDAVFNYHVAYDTEVHIHRIGRTGRAGSKGAAFTFFDDQDGYKIALLEEYLERDIQSEALPSLSLLGTAPNAPTMITLQIDGGKKEKLRPGDILGALTGENGIEGSQVGKILVTDYRAYVAVNRKVAKKALSKITSGRIKGKSYRAWLMK

SEQ ID NO: 77188 - DNA, 1344 bp, Azoarcus sp. BH72; identical to SEQ ID NO: 65518
  CDS (1)..(1344): transl_table=11

SEQ ID NO: 77189 - protein, 447 aa, Azoarcus sp. BH72; identical to SEQ ID NO: 65519

SEQ ID NO: 77190 - DNA, 1485 bp, Azoarcus sp. BH72; identical to SEQ ID NO: 65520
  CDS (1)..(1485): transl_table=11

SEQ ID NO: 77191 - protein, 494 aa, Azoarcus sp. BH72; identical to SEQ ID NO: 65521

SEQ ID NO: 77192 - DNA, 1674 bp, Mycobacterium sp. KMS; identical to SEQ ID NO: 65496
  CDS (1)..(1674): transl_table=11

SEQ ID NO: 77193 - protein, 557 aa, Mycobacterium sp. KMS; identical to SEQ ID NO: 65497

SEQ ID NO: 77194 - DNA, 1452 bp, Neisseria meningitidis FAM18
  CDS (1)..(1452): transl_table=11
ttgttaatccactatatttccccgtcctatcggtttcccgtttcagacgacataaggtctgaaagaaagactacaattatgagtaatccattttcctctttaggtttgggtacggaactcgtttccgcactgaccgcgcaaggttacgaaaacccgacgcccatccaagccgccgccattcccaaagcactcgccggtcatgatttgctagccgccgcgcaaaccggcacaggcaaaaccgccgcctttatgctgcccagtctggaacgcctcaaacgttacgccaccgccagcacctcgcccgcgatgcaccccgtgcgtatgctcgtccttacccccacgcgcgaacttgccgaccaaatcgaccaaaacgtgcagtcctacatcaaaaacctgccgcttcgccacaccgtcttgttcggcggtatgaatatggacaaacagaccgccgatttgcgtgccggctgcgaaatcgtcgtcgccaccgtcggacggctgctcgaccacgtcaaacaaaaaaacatcagtttgaacaaagtcgaaatcgtcgttctggacgaagcagaccgcatgttggatatggggtttatcgacgacatccgcaaaatcatgcagatgctgcccaaacaacgccaaaccctgctcttttccgctaccttctccgcaccgatacgcaaactggcgcaagacttcatgaacgcgcccgaaaccgtcgaagtcgccgcgcaaaacaccaccaacgccaacgtcgaacaacacatcatcgccgtcgataccattcagaagcgcaacctgctcgaacggctgattgtcgatttgcatatgaaccaggtcatcgtgttctgcaaaaccaaacaaagcgtcgaccgcgtaacgcgcgaactggtgcgccgcaacctgtccgcacaggcgatacacggcgaccgttcccaacaaagccggctcgaaacactcaacgccttcaaagacggcagcctgcgcgtcctcgtcgccaccgacatcgccgcgcgcgggctggacattgccgaactgcccttcgtcatcaattacgaaatgcccgcccagcccgaagactacgtccaccgcatcgggcgcacggggcgcgcgggcgcggacggcgtggcgatttccctgatggacgaatccgaacagaaaatgtttgaatccattaaagagctgaccggcaacaagctgctcatcgagcgcatcgagggcttcgagccgcaatggtgggaacagggcggcgcaaaaccggaaaaaaccgaaatgcgcgaaccgagacaacgcaaccgctacgaatccgccagggctcagcgcgaaaaaaatacccgaccggaaaccacggcaaacgatgcgggcgcggcttgcggaaaaattgccggacgcagccgccgaagccgtcgggaacaccggacgtgcgccctgctccaaccgcgttacggcgtaaaataa

SEQ ID NO: 77195 - protein, 483 aa, Neisseria meningitidis FAM18
MLIHYISPSYRFPVSDDIRSERKTTIMSNPFSSLGLGTELVSALTAQGYENPTPIQAAAIPKALAGHDLLAAAQTGTGKTAAFMLPSLERLKRYATASTSPAMHPVRMLVLTPTRELADQIDQNVQSYIKNLPLRHTVLFGGMNMDKQTADLRAGCEIVVATVGRLLDHVKQKNISLNKVEIVVLDEADRMLDMGFIDDIRKIMQMLPKQRQTLLFSATFSAPIRKLAQDFMNAPETVEVAAQNTTNANVEQHIIAVDTIQKRNLLERLIVDLHMNQVIVFCKTKQSVDRVTRELVRRNLSAQAIHGDRSQQSRLETLNAFKDGSLRVLVATDIAARGLDIAELPFVINYEMPAQPEDYVHRIGRTGRAGADGVAISLMDESEQKMFESIKELTGNKLLIERIEGFEPQWWEQGGAKPEKTEMREPRQRNRYESARAQREKNTRPETTANDAGAACGKIAGRSRRSRREHRTCALLQPRYGVK

SEQ ID NO: 77196 - DNA, 1806 bp, Haemophilus somnus 2336
  CDS (1)..(1806): transl_table=11
atgactgaaacaacaattacttttaatgatttagggttacctgaattcatccttaatgcagtgtccgaaatgggcttttcaactccttccccaattcaacaggcttgtatcccgcatctattaaatgggcatgatgtgcttggcatggcacaaaccggtagtggaaaaacagcggcattttctttgccattattggcgaaaattgatactaatgaaaaatatccacaaatgttagtaatggcaccaacccgtgagttggctattcaagttgctgatgcttgtgaacagtttgtgaagttttctaagggggtgcgtattgttactctgtacggcggacaacgttacgatattcaattaagagctttaaaacaaggtgctcaagtggtcgtcggaacaccggggcgtattttagatcatattcgtcgtggtacattggatctgtcaaatttacagtctattgtattagatgaagcggatgaaatgctacgcatgggatttattgatgatgttgaaaccgtcatggcggagcttccagagcaacaccagaccgcacttttctctgcaacgatgcctgctccaattaaacgaattacaaaacgctttatgcacaatccgcaagaagtaaaaattcagtcaacacaacgtactgcaccggatattacgcaaagctgttggtatgttcgcggttttcgtaaaaatgaagcattgttgcgtttcttagaagtggaagattttgatgctgcaattatttttactcgaactaaaacagctacattagatgtcactgaattattggaaaaacacgggtttcgtgcagctgcattaaatggagacatgacacagcaattacgtgagcaaacattagatcgtcttcgcaatggaagtcttgatattttagtggcgactgatgttgcggctcgtggcttagatgttgaacgtattagtttagttgttaattatgatattccgctggatgcggaaagttatgttcaccgtattgggcgtacaggccgagcaggtcgtgcgggccgtgcgattttgtttgttgagcctaaagagcgtcgtttattggggaacattgaacgcttaatgaaaaaagcaattgaagaagtggaaatgcctaaccatcttgctttacaagaatgtcgccgtaaaaacttcgtggctaaaatcactaagcaattagaacatcatgatctagaacaatatcgtagcttattggaagatttatttacggcagatcaggatcaggaagacattgcggcagctatgttgatgttattacaaggcaaacaaaaacttattcttcctgaagatccggtgtttgaaaaacattcacgacgtaatgatcgtagagagagaggggagcgtcgtggtaaagaaaatccacgttctgagcgtcatgggtatggtattccgcaaccaatggatttatatcgtattgaagtcggtagatgtgatggtgtcgaggttcgtcatattgtaggtgcaattgcaaatgaaggggatattcaaagtcgttatattggacatattaaactttatgacacttattcaacgattgaattgccacagggcatgccaaaagaattgttacaagtatttgctaaaacgcgtgtattaaataaacagatgcgtatgtctttcgtaagtgcggtcaattctgaggaagagtttgaagctggctcaggtggtaaacgaaaagggcgttatgaacgtgagtttcgtggtggacgtaaatttaatgaaaaaagtaaccgctctttttctgaacagcgtaaagaacgcagagaaagaaagagataa

SEQ ID NO: 77197 - protein, 601 aa, Haemophilus somnus 2336
MTETTITFNDLGLPEFILNAVSEMGFSTPSPIQQACIPHLLNGHDVLGMAQTGSGKTAAFSLPLLAKIDTNEKYPQMLVMAPTRELAIQVADACEQFVKFSKGVRIVTLYGGQRYDIQLRALKQGAQVVVGTPGRILDHIRRGTLDLSNLQSIVLDEADEMLRMGFIDDVETVMAELPEQHQTALFSATMPAPIKRITKRFMHNPQEVKIQSTQRTAPDITQSCWYVRGFRKNEALLRFLEVEDFDAAIIFTRTKTATLDVTELLEKHGFRAAALNGDMTQQLREQTLDRLRNGSLDILVATDVAARGLDVERISLVVNYDIPLDAESYVHRIGRTGRAGRAGRAILFVEPKERRLLGNIERLMKKAIEEVEMPNHLALQECRRKNFVAKITKQLEHHDLEQYRSLLEDLFTADQDQEDIAAAMLMLLQGKQKLILPEDPVFEKHSRRNDRRERGERRGKENPRSERHGYGIPQPMDLYRIEVGRCDGVEVRHIVGAIANEGDIQSRYIGHIKLYDTYSTIELPQGMPKELLQVFAKTRVLNKQMRMSFVSAVNSEEEFEAGSGGKRKGRYEREFRGGRKFNEKSNRSFSEQRKERRERKR

SEQ ID NO: 77198 - DNA, 1842 bp, Haemophilus influenzae R2846
  CDS (1)..(1842): transl_table=11
atgactgacaaaattacttttaatgacttaggcttacctgagttcatcttaaaagctgtttctgacttaggttttgaaacaccttctccaattcaacaatcttgtatcccgcatttgctcaatggcaatgatgtgctaggtatggcacaaacaggtagtggtaaaaccgctgcctttgcactgcctttactcgcgcaaattgatccaagtgaaaaacatccacaaatgttagtgatggcacccactcgcgaacttgctattcaagttgccgatgcgtgcgaacaatttgttaaatatgcacagggcactcgcattgttaccttatatggtggccaacgttatgacatccaacttcgtgcattaaaacaaggcgcacaagtgattgtgggtacaccaggtcgtattcttgatcatattcgtcgcggaacattaaatctttctgaacttcgttttatcgtattagatgaagccgatgaaatgctacgcatgggtttcattgatgatgtagaaaccgtcatggctgaattaccagaaaatcatcaaactgcgttattctctgcaacaatgcctgaaccgatccgtcgtattacgaaacgttttatgaatgatccacaagaagtgaagatcaaggttaataacgaaaatgccccagatattgagcaaagttgttggtatgtgcacggcgtgcgtaaaaatgaagcgcttcttcgtttcttagaagtggaagattttgatgctgcgattatttttgctcgcactaaaacaggtactttagatattacagaactacttgaaaaaaatggtttccgttctgccgcacttaatggtgatatgacacaacaattacgcgaacaaaccctcgatcgcttacgtaacggcagtttagatattgttgtggcaaccgatgtggccgcacgcggtattgatattgaacgtatcagccttgtggtgaactacgacattccgcttgatgcagaatcttatgtacaccgaattggccgtactggtcgtgctggtcgttctggtcgtgctttattatttgttgaacctcgcgagcgtcgtttacttcgtaatattgaacacctaatgaaaaaaggtatcaatgaagtagaattgccaaatcatcttgtgttacaagaatgccgccgcaaaaaatttgtcgccaaaattacgaaacaactcgagcatcacgatttagagcaatatcgtagtttattagaagacttattcacagccgatcaggatcaagaaaatattgctgcagcaatgttgatgctgcttcaaggcaaacaaaaactcattcttccacctgatccaccaatggaaaaacgtcgtcgtgaacgtaatgatcgcggtgatcgccgtgaaaatccacgttcagctgaacgtcgtggcgaatgtaaaggctatggaaatccacaaccaatggatttatatcgtatcgaagtcggtcgtgcagatggtgtagaagttcgccatatcgttggtgcgattgctaacgaaggcgatattaacagccgttatattggtcatattaaactttatgatgattacactaccgttgaattgccacaaggtatgccgaaagaattattgcaacaattcggaaaaacacgagtattgaataaacaaatgcaaatgtctttcttaggtgcagtaaaatccgataattcccgtggcagcgatgattttaacggtaaacgtaaaggtcgtggtggcgatttccgtggagagcgcggacgtgaacgcggcaatgataatcgtggaaatcgtaaatttaatgaaaaaagtaaccgcacttttagcgataaaccacgccgtgatcgtagatcatcattctaa

SEQ ID NO: 77199 - protein, 613 aa, Haemophilus influenzae R2846
MTDKITFNDLGLPEFILKAVSDLGFETPSPIQQSCIPHLLNGNDVLGMAQTGSGKTAAFALPLLAQIDPSEKHPQMLVMAPTRELAIQVADACEQFVKYAQGTRIVTLYGGQRYDIQLRALKQGAQVIVGTPGRILDHIRRGTLNLSELRFIVLDEADEMLRMGFIDDVETVMAELPENHQTALFSATMPEPIRRITKRFMNDPQEVKIKVNNENAPDIEQSCWYVHGVRKNEALLRFLEVEDFDAAIIFARTKTGTLDITELLEKNGFRSAALNGDMTQQLREQTLDRLRNGSLDIVVATDVAARGIDIERISLVVNYDIPLDAESYVHRIGRTGRAGRSGRALLFVEPRERRLLRNIEHLMKKGINEVELPNHLVLQECRRKKFVAKITKQLEHHDLEQYRSLLEDLFTADQDQENIAAAMLMLLQGKQKLILPPDPPMEKRRRERNDRGDRRENPRSAERRGECKGYGNPQPMDLYRIEVGRADGVEVRHIVGAIANEGDINSRYIGHIKLYDDYTTVELPQGMPKELLQQFGKTRVLNKQMQMSFLGAVKSDNSRGSDDFNGKRKGRGGDFRGERGRERGNDNRGNRKFNEKSNRTFSDKPRRDRRSSF

SEQ ID NO: 77200 - DNA, 1842 bp, Haemophilus influenzae R2866
  CDS (1)..(1842): transl_table=11
atgactgacaaaattacttttaatgacttaggcttacctgagttcatcttaaaagctgtttctgacttaggttttgaaacaccttctccaattcaacaatcttgtatccctcatttgctcagtggcaatgatgtgctaggtatggcacaaacgggtagtggtaaaactgctgcctttgcactgcctttactcgcgcaaattgatccaagtgaaaaacatccacaaatgttagtgatggcacctacacgcgaacttgctattcaagttgccgatgcgtgcgaactatttgttaaatatgcacagggcactcgcattgttaccttatatggtggccaacgttatgacatccaacttcgtgcattaaaacaaggtgcacaagtggttgtgggtacaccaggtcgtattcttgaccatattcgtcgcggaacattaaatctttctgaacttcgttttatcgtattagatgaagccgatgaaatgctacgcatgggttttattgatgatgtagaaaccgtcatggcagaattaccagaaaatcatcaaactgcgttattctctgcaacaatgcctgaaccgatccgtcgtattacgaaacgttttatgaatgatccacaagaagtgaagatcaaagtgaataacgaaaatgccccagatatcgaccaaagttgttggtatgtacacggcgtgcgtaaaaacgaagctcttcttcgtttcttagaagtggaagattttgatgcagcgattatttttgctcgtactaaaactggcacgttagacattacagaactacttgaaaaaaatggtttccgttctgccgcacttaatggcgatatgacacaacaattacgcgaacaaaccctcgatcgcttacgtaacggcagtttagatattgttgtggcaacagatgtggctgcacgcggtattgatattgaacgtatcagccttgtggtgaactacgacattccgctggatgcagaatcttatgtacatcgaattggccgtactggtcgtgcaggtcgttctggtcgtgctttattattcgttgaacctcgtgagcgtcgtttacttcgtaatattgaacacctaatgaaaaaaggtatcaatgaagtagaattgccaaatcatcttgtgttacaagaatgccgccgcaaaaaattcgttgcaaaaattacgaaacaactcgagcatcacgatttagagcaatatcgtagtttattagaagacttattcacagccgatcaagatcaagaggatattgctgctgcaatgttgatgctgcttcaaggcaaacaaaaactcattcttcctcctgatccgccaatggagaaacgtcgtcgtgaacataatgaacgaggcgatcgccgtgaaaatccacgttcagctgaacgtcgtggcgaacgtaaaggctacggaaatccacgaccaatggatttatatcgtatcgaagtcggtcgtgcagatggtgtagaagttcgccatatcgttggtgcaattgctaacgaaggcgatattaacagccgttatattggtcatattaaactttatgatgattacactaccgttgaattgccacaaggtatgccgaaagaattattgcaacaattcggtaaaacacgcgtattgaataaacaaatgcaaatgtctttcttaggtgcagtaaaatctgataattcccgtggcggcgatgattttaacggtaaacgtaaaggtcgtggtggcgatttccgtggagaacgaggacgtgaacgcggcaatgataatcgtggaaatcgtaaatttaatgaaaaaagtaaccgcacttttagcgacaaaccacgccgtgatcgtagatcatcattctaa

SEQ ID NO: 77201 - protein, 613 aa, Haemophilus influenzae R2866
MTDKITFNDLGLPEFILKAVSDLGFETPSPIQQSCIPHLLSGNDVLGMAQTGSGKTAAFALPLLAQIDPSEKHPQMLVMAPTRELAIQVADACELFVKYAQGTRIVTLYGGQRYDIQLRALKQGAQVVVGTPGRILDHIRRGTLNLSELRFIVLDEADEMLRMGFIDDVETVMAELPENHQTALFSATMPEPIRRITKRFMNDPQEVKIKVNNENAPDIDQSCWYVHGVRKNEALLRFLEVEDFDAAIIFARTKTGTLDITELLEKNGFRSAALNGDMTQQLREQTLDRLRNGSLDIVVATDVAARGIDIERISLVVNYDIPLDAESYVHRIGRTGRAGRSGRALLFVEPRERRLLRNIEHLMKKGINEVELPNHLVLQECRRKKFVAKITKQLEHHDLEQYRSLLEDLFTADQDQEDIAAAMLMLLQGKQKLILPPDPPMEKRRREHNERGDRRENPRSAERRGERKGYGNPRPMDLYRIEVGRADGVEVRHIVGAIANEGDINSRYIGHIKLYDDYTTVELPQGMPKELLQQFGKTRVLNKQMQMSFLGAVKSDNSRGGDDFNGKRKGRGGDFRGERGRERGNDNRGNRKFNEKSNRTFSDKPRRDRRSSF

SEQ ID NO: 77202 - DNA, 1413 bp, Listeria monocytogenes str. 1/2a F6854
  CDS (1)..(1413): transl_table=11
atgcataatttaaaattaagtgaagaaattaaaagagcaattaacgaactaggatatacagaagcaacgcctgttcaaaaagcagtaattccagttgccttaacaggggaagatatcgttgctaaatcacaaactggtagtgggaaaacagcagcattcgctattcctattgctgaacaagtcgaatgggaagaaaataaaccgcaagcactaatcatcgttccaacgcgagaacttgcaatgcaagtcaaaacagaatgtacgaatatcgggcgatttaaacgcgtcaaagctgcagcaatatacggacaatcaccatttgcgaaacaaaaattagaactaagccaaaaaaatcatatcgtcgttgggacgcctggtcgcctactggatcatattgaaaaaggatctctgaatgtcgataaagtagctcacttagttttagatgaagtagacgaaatgttaagtatgggctttattgatcaagtagaagatattcttagccgtttaccaaaacagcgccaaaatctatttttctctgcaactatgccagaagaaatgcaaggtttaatcaaacgctatcaagacgatccaatggttatcgaaatggcatcagaaaaaacaaatcctatcctccacgtggagatacaaacagataataaagaaaaaacgctaaaagatgttttaattacggaaaatccagatagcgcaattattttttgcaacacgaaaaatcaagtcgatgaactcactgatttacttgatgtaaaagctagtaaaattcatggtggcttaagacaagaagatcgttttcgggcaatggatgatttcaaaagtggcaaatcgcgtttcttaattgcgacagatgtggcagggcgtggaattgatgtggataatgtctcattagttattaactatgatttaccaatcgaaaaagaaaactatgtgcatcgtatcggccgtactggtcgcgctggcaaaagcgggaaagccattagcttcgtgaaaactaatgaaaatccacttttgcgtgatatagaagaaatgctcgacgttacaattgaaaaaaaacgtaaaccgacagtgattgaagtgaaagcaaacgaagatgctttccgcaaaaaacaacaaaagcgcccaacaatcaaaaaagctcgtggggaaaaattaaataaaaacattatgaaactgtattttaacgggggcaaaaagaaaaaaatccgtgcggtagattttgtgggaactatttctaaattagaaggaattacggccgaagatattggaattattacgattgaagaccatgtttcttttgtcgaaattttaaatggaaaaggtccggcagtgctggaaatgatgcgctctcgtaaagtgaaaggtagacgcctgaaagtaaacgaggccagaaaacgataa

SEQ ID NO: 77203 - protein, 470 aa, Listeria monocytogenes str. 1/2a F6854
MHNLKLSEEIKRAINELGYTEATPVQKAVIPVALTGEDIVAKSQTGSGKTAAFAIPIAEQVEWEENKPQALIIVPTRELAMQVKTECTNIGRFKRVKAAAIYGQSPFAKQKLELSQKNHIVVGTPGRLLDHIEKGSLNVDKVAHLVLDEVDEMLSMGFIDQVEDILSRLPKQRQNLFFSATMPEEMQGLIKRYQDDPMVIEMASEKTNPILHVEIQTDNKEKTLKDVLITENPDSAIIFCNTKNQVDELTDLLDVKASKIHGGLRQEDRFRAMDDFKSGKSRFLIATDVAGRGIDVDNVSLVINYDLPIEKENYVHRIGRTGRAGKSGKAISFVKTNENPLLRDIEEMLDVTIEKKRKPTVIEVKANEDAFRKKQQKRPTIKKARGEKLNKNIMKLYFNGGKKKKIRAVDFVGTISKLEGITAEDIGIITIEDHVSFVEILNGKGPAVLEMMRSRKVKGRRLKVNEARKR

SEQ ID NO: 77204 - DNA, 1446 bp, Bacillus cereus G9241
  CDS (1)..(1446): transl_table=11
atgagtaaaaaaagctttagtaattatgcattaagtaaagaagtaaggcgagcacttactggtttaggatatgagcatccaacagaagtgcaaggagaggttattccagtcgcattacaaaagaaggatcttgttgtaaagtcgcaaacaggaagtggaaaaacagcttcgttcggtataccactttgtgaaatggtagagtgggaagagaataaaccacaagcgttagttttaacaccaacgagagaacttgctgttcaagtgaaagaagatattacaaatatagggcgattcaaaagaattaaagctgctgcaatttatggtaaatccccatttgcacgtcaaaaattagagttaaagcaaaagacgcatattgtagtagggactccaggacgtgtattggatcatattgaaaaagggactctttcattagaacgattgaaatatttagtgattgatgaagcagatgaaatgctaaacatgggctttatcgatcaagtagaggcaattattgatgaattacctacaaaaagaatgacaatgctattttcagcaacattaccggaagatgtcgaaaggttatcccgtacatatatgaacgcaccaactcatattgaaattaaagctgctgggattacaacagataaaattgaacataccctttttgaagtgagggaagaagagaagttgtcacttcttaaagatgtaacaacaattgaaaatccagacagttgcattattttttgtcgtacacaagaaaacgtagatcatgtatatagacagttaaatcgagttaattacccttgcgataaaatacatggtggtatggtgcaagaagatcgttttggagtgatgaatgattttagaaaaggaaagttccgttatttagtagcaacggatgtagcggcgagaggaattgatattgataatattacacatgttattaattatgatattccattagagaaagaaagttatgtacaccgtacaggaagaacaggacgagctggtaatagcggaaaggccattacatttataacaccttatgaagagcgatttttagaagagattgaggcatacatcggttttgcaattccgaaggcaaacgcaccttcaaaagaagaagttatgaaagggaaagctgtatttgaagaaaaaatacatgctaaaccaactataaagaaggataaaaatgcggatataaataaaggaattatgaaattgtactttaatggcggaaagaaaaagaaaattagagcggtggatttcgtcggtacaattgctaaaattcaaggtgtttctgctgaagatataggtattattacaatacaagataatgtttcttatgtagaaatattaaatggaaaaggaccacttgttttaaaggttatgagaaatacaacgataaaaggtaaacaattgaaagtccatgaggcaaataagtaa

SEQ ID NO: 77205 - protein, 481 aa, Bacillus cereus G9241
MSKKSFSNYALSKEVRRALTGLGYEHPTEVQGEVIPVALQKKDLVVKSQTGSGKTASFGIPLCEMVEWEENKPQALVLTPTRELAVQVKEDITNIGRFKRIKAAAIYGKSPFARQKLELKQKTHIVVGTPGRVLDHIEKGTLSLERLKYLVIDEADEMLNMGFIDQVEAIIDELPTKRMTMLFSATLPEDVERLSRTYMNAPTHIEIKAAGITTDKIEHTLFEVREEEKLSLLKDVTTIENPDSCIIFCRTQENVDHVYRQLNRVNYPCDKIHGGMVQEDRFGVMNDFRKGKFRYLVATDVAARGIDIDNITHVINYDIPLEKESYVHRTGRTGRAGNSGKAITFITPYEERFLEEIEAYIGFAIPKANAPSKEEVMKGKAVFEEKIHAKPTIKKDKNADINKGIMKLYFNGGKKKKIRAVDFVGTIAKIQGVSAEDIGIITIQDNVSYVEILNGKGPLVLKVMRNTTIKGKQLKVHEANK

SEQ ID NO: 77206 - DNA, 1209 bp, Wolbachia endosymbiont of Drosophila simulans
  CDS (1)..(1209): transl_table=11
atgggtctcccagcttcgcttagacaagctctagataaaaataatcttttcgtcccaactccgattcaaatacaagcgattcccttagcgctacaaggtaaagatattctcggatctgctcaaacggggactggaaaaactttagcatttgctattccgttggttgctaagttgctgaatgagcctaacactggttcagctttagtcatcgtgccaaccagagagcttgcgcatcaggtaacaaatgagataagaaaactcttatctcaaaattctgcactaagggtcgctttgttgattggtggtgagcctatttttaggcagctaaatcagcttcagaaaaaaccacaaattgtaataggtactcctggtcgtattatagaccatattgagcgtaaaactttgattactcgcaatgttagcgttcttgtgcttgatgaaacggatcgtatgtttgatatgggctttggagttcagattgaagaaattatgaagcatttgcctaaaataaggcaaactcttatgttttctgcaactcttcctggagatatagtaaaacttgctgagaagtaccttaatcgaccagaacgtatttctgttgattgtgaggttacaacttctgtaaaaattaagcaagaaattgtttatgcatcagaatcagaaaaatatgaaaagcttgttacacaactatgtcagcgcgaaggatcaatcattatctttgtcaaaacaaagcgaggagcggatcagctagctcacagattgcacaaagatgactatagcgctttagcaattcatggtgatttaaggcagcacaagcgcgaaagggtcattaattcttttcgtcgtggccgtaatcaaatcatggttgcaacagatgttgcttctcgcggccttgatattccccacattcaacatgttatcaattatgatgcaccacaatcgcaagctgactatattcatcgtataggtagaactgcacgcgctggagctgaagggtatgcgctatcttttgttacacctcaagataagagaagactgcctgtactggcagacaaagaaggagagctaaattttgattgtagtgtgcaatttaaaaaacgtaacagcaaaaaggtctttaaaaggccaagtacgttaaagactaaatacggtagaaaaaagatcaatgcatttaagaagaaaagcagagtactagaaaaagcgtattaa

SEQ ID NO: 77207 - protein, 402 aa, Wolbachia endosymbiont of Drosophila simulans
MGLPASLRQALDKNNLFVPTPIQIQAIPLALQGKDILGSAQTGTGKTLAFAIPLVAKLLNEPNTGSALVIVPTRELAHQVTNEIRKLLSQNSALRVALLIGGEPIFRQLNQLQKKPQIVIGTPGRIIDHIERKTLITRNVSVLVLDETDRMFDMGFGVQIEEIMKHLPKIRQTLMFSATLPGDIVKLAEKYLNRPERISVDCEVTTSVKIKQEIVYASESEKYEKLVTQLCQREGSIIIFVKTKRGADQLAHRLHKDDYSALAIHGDLRQHKRERVINSFRRGRNQIMVATDVASRGLDIPHIQHVINYDAPQSQADYIHRIGRTARAGAEGYALSFVTPQDKRRLPVLADKEGELNFDCSVQFKKRNSKKVFKRPSTLKTKYGRKKINAFKKKSRVLEKAY

SEQ ID NO: 77208 - DNA, 1443 bp, Crocosphaera watsonii WH 8501; identical to SEQ ID NO: 65528
  CDS (1)..(1443): transl_table=11

SEQ ID NO: 77209 - protein, 480 aa, Crocosphaera watsonii WH 8501; identical to SEQ ID NO: 65529

SEQ ID NO: 77210 - DNA, 1593 bp, Exiguobacterium sibiricum 255-15; identical to SEQ ID NO: 65530
  CDS (1)..(1593)

SEQ ID NO: 77211 - protein, 530 aa, Exiguobacterium sibiricum 255-15; identical to SEQ ID NO: 65531

SEQ ID NO: 77212 - DNA, 1446 bp, Exiguobacterium sibiricum 255-15
  CDS (1)..(1446)
atgtctaaaaaaccattcactgattttcaactcagtacgccgattctagaagcgattgaacagctcggttatcatacgccgaccgatgtccaacaagcagtcattccggtcgctttatcggaaaaagatatcatcgtcaaatcacggaccggcagcgggaagacggcatcgttcggaattcccctttgcgaactcgttgagtgggaagaaaacaaaccccaggcgttaattttaacaccaacgcgtgagctggccctgcaagtcacggaagatgtcatgaacatcggtcgttataaacgaatcaaagcgacagctgtgtttgggaaacaaccattccgcggacaagtcgcagaactgaaacagaagacacatatcgtcgtcgggacaccgggtcgtgtgctcgatcacttggagcgcggcacgttatcacttgaaaaagtgaaatacctggttcttgacgaggcggacgagatgctcaacatgggcttcctcgatcaagtggatacgattttaaaacaattgccgaaacaacggacgacgatgctgttctcagcgacgttcccgcaagatattcatcagttgagcgaccgttacatgcagtcaccgaaacaagttgaaatcacgacgaaggcaacggaaatcgcagaaatcgaacacagctatatcaaggtcacggataaaacgaagtttgctgtcctcaaagacgttactgtcgttgaaaacccggaccggtgcatgattttctgccggacaaaagaacatgttgatttcgtcgcccaaggactggcatcgatggattatccggttgaaaaaattcacggtggaatggaacaggacgagcgtctcgccgtcatgaaagccttccgggccggtgagttccgttatctcgtcgcgacggacgtcgcagcccgcgggattgatattgaaaacatcacacacgtcatccaatacgatatgccggttgaaaaagaaagttacgtccaccggacaggtcggacaggacgtgccggagcactcggaaaagctatcagtttggtgacggagtcggatatgcgtcgtctccgtgaagtcgaacagtaccgcggtgaggccatcgaaagacgccaagcaccgactgaacgggaactgatccggacagctgatgcatttgaagagaaaatcacgacagctgatgtccgggcttcaaaaacggagcagctcaacgccgatatcatgaaactgtactttaacggcggcaagaaaaagaaactgcgtgccgttgatttcgtcggaacgattgcgaaaatcgaaggcatgactgcgcaggatatcggaatcatcacgattcaggatacggtcacgtacgtggaaatcctgaacggaaaaggtccgctcgtcctgcgggcgatgaagacaacaaaagttaaaggcaaacagctgaaagtatacgaagcgtttaaaaaataa

SEQ ID NO: 77213 - protein, 481 aa, Exiguobacterium sibiricum 255-15
MSKKPFTDFQLSTPILEAIEQLGYHTPTDVQQAVIPVALSEKDIIVKSRTGSGKTASFGIPLCELVEWEENKPQALILTPTRELALQVTEDVMNIGRYKRIKATAVFGKQPFRGQVAELKQKTHIVVGTPGRVLDHLERGTLSLEKVKYLVLDEADEMLNMGFLDQVDTILKQLPKQRTTMLFSATFPQDIHQLSDRYMQSPKQVEITTKATEIAEIEHSYIKVTDKTKFAVLKDVTVVENPDRCMIFCRTKEHVDFVAQGLASMDYPVEKIHGGMEQDERLAVMKAFRAGEFRYLVATDVAARGIDIENITHVIQYDMPVEKESYVHRTGRTGRAGALGKAISLVTESDMRRLREVEQYRGEAIERRQAPTERELIRTADAFEEKITTADVRASKTEQLNADIMKLYFNGGKKKKLRAVDFVGTIAKIEGMTAQDIGIITIQDTVTYVEILNGKGPLVLRAMKTTKVKGKQLKVYEAFKK

SEQ ID NO: 77214 - DNA, 1680 bp, Sulfitobacter sp. EE-36; identical to SEQ ID NO: 65532
  CDS (1)..(1680): transl_table=11

SEQ ID NO: 77215 - protein, 559 aa, Sulfitobacter sp. EE-36; identical to SEQ ID NO: 65533

SEQ ID NO: 77216 - DNA, 2361 bp, Roseovarius nubinhibens ISM
  CDS (1)..(2361): transl_table=11
atgagccggggtttcgcggcccggccgcctgcctccggccctccccgccgcaacccccaggatacccttcccatgataccccccctttccaacgcgctcgccgcccgtggctatgacagcctcacccccgtgcaagaggccatggccgatcccgatctcatcggctccgatctgctggtctcggcccagaccggctcgggcaagacggtggccttcggcctcgccatggcgcccaccctgctcgacgaggccgaggtcttcggccccgccgccgcgccgctggcgctggtggtggccccgacgcgcgagctggcctttcaggtgatgaacgagctgcgctggctctatgccgagaccggcgcgcgcatcgcctcctgcgtcggcggcatggatatgcgcgacgaacggcgcacgctggaacgtggcgcgcatatcgtcgtcggcacgccggggcggctgcgcgaccatatctcgcgcggctcgctcgacatggacgacctgcgtgtcgtggtgctcgacgaggcggatgagatgctcgatctcggctttcgcgaagatctcgagttcatgctcgaagccgcgcctgagaaccgccgcaccctgctcttctcggccaccgtgccgcccgccatcgcccggctcgccggccagtttcagcgcgacgcccgccgcatcaacaccgtcagcagcaccgaacaacatgccgacatcgcctatcaggcgctgcgcgtcgcccatggcgaaggcgaagcggcgatcttcaacctgctgcgctttcatgatgccgaggcggcgatcgtctttgccaacacccgcgcggcggtcaaccacctgaccacccggctcgccaatcgcggctttgccgtggtgagcctctcgggcgagctgagccaatcggaacgcagccacgcgctgcaggcgatgcgcgacgggcgcgcccggatctgtgtcgccaccgatgtggcggcgcgcggcatcgacctgcccaatctcaatctggtgatccatgccgatctgccgaaaaacaccgagagcctgatgcaccgctcgggccgcaccggccgcgccgggcgcaagggcgtctcggcgctgatcgtcgcgccgcgcgatctgaaaaaggccgaacgcatcctgaaattcgccaagatcaccgccgaatggacgctgccgccctccgccgatgcgatcctcgaacaggatgaaaaccgcctgctcgccgatcccgcctgggagacgccgctgaccgaggccgaaaccgcctttgccgcccgcctgctggccgagcagagccccgaggccgtggtcggcgcctatctgcgcctcttccgcacccgtcacgccgcccccgaagagctgagcgcgccggaggcgggcaaagccgcaccgcgccgcgatcatgccgagttcggccccgccacgtggatttcgctctcggtcggccgcaaggaccgggccgaggcgcgctggctgctgccgcttctcttgcgctccggcaatctcgacaaggccaatatcggcgcaatccgcgtgcaggatggcgagacctatgtcgagctgtctaccccggcggtctcgggctttttcgacgcgctcgacaacaacacgctcgaggatggcatcactgtgcgccagctcgacgagatgcccgatcttggccgccccgcgccgaaaccgcatcgcggtgcgcgccccgcaggcggcaagccgcgccatgacggcccgccccgtggcgagaaatcctggggcgacaagccgcgcggtgacaagccgcgtggtgacaagccgcgcggggagaagtcctggggtgacaaaccccgtggcgacaagccctggggcgacaaaccccgcagcgacaagccccgcgccgacaaaccgcgcagcaagccccggccgctgaccgaaacccatgccgtcgaacacaagagcccgaaacccgccccaaaacccgcctcgaaacccgccggcaaaccttcgggcaagtttggcgacaaacccgctggcaaattcggtgacaagccgggcggcaagcccgctggtaaaccttcgggcaagcccggcggcaaaccctctggcaagttcggcgacaaacccggcggcaagccttctggcaaaccgggcggcaaaccggctggcaagagcttcggcaaagccgagggcaaaccggctggcaagcccgccgggaaacccgccggtaagcccgctggcaaacccggcgcgaaaccggcggccaagcccgcccgcgatgggcgcgacacgtcgaaacgcttcaccccgcccggcggtctcaagcccggcgcgcgtcagccgcgcaaacccggctcccgtcccggcggcggcgaaccgccccgccgcaagggctaa

SEQ ID NO: 77217 - protein, 786 aa, Roseovarius nubinhibens ISM
MSRGFAARPPASGPPRRNPQDTLPMIPPLSNALAARGYDSLTPVQEAMADPDLIGSDLLVSAQTGSGKTVAFGLAMAPTLLDEAEVFGPAAAPLALVVAPTRELAFQVMNELRWLYAETGARIASCVGGMDMRDERRTLERGAHIVVGTPGRLRDHISRGSLDMDDLRVVVLDEADEMLDLGFREDLEFMLEAAPENRRTLLFSATVPPAIARLAGQFQRDARRINTVSSTEQHADIAYQALRVAHGEGEAAIFNLLRFHDAEAAIVFANTRAAVNHLTTRLANRGFAVVSLSGELSQSERSHALQAMRDGRARICVATDVAARGIDLPNLNLVIHADLPKNTESLMHRSGRTGRAGRKGVSALIVAPRDLKKAERILKFAKITAEWTLPPSADAILEQDENRLLADPAWETPLTEAETAFAARLLAEQSPEAVVGAYLRLFRTRHAAPEELSAPEAGKAAPRRDHAEFGPATWISLSVGRKDRAEARWLLPLLLRSGNLDKANIGAIRVQDGETYVELSTPAVSGFFDALDNNTLEDGITVRQLDEMPDLGRPAPKPHRGARPAGGKPRHDGPPRGEKSWGDKPRGDKPRGDKPRGEKSWGDKPRGDKPWGDKPRSDKPRADKPRSKPRPLTETHAVEHKSPKPAPKPASKPAGKPSGKFGDKPAGKFGDKPGGKPAGKPSGKPGGKPSGKFGDKPGGKPSGKPGGKPAGKSFGKAEGKPAGKPAGKPAGKPAGKPGAKPAAKPARDGRDTSKRFTPPGGLKPGARQPRKPGSRPGGGEPPRRKG

SEQ ID NO: 77218 - DNA, 1416 bp, Oceanicola batsensis HTCC2597; identical to SEQ ID NO: 65534
  CDS (1)..(1416): transl_table=11

SEQ ID NO: 77219 - protein, 471 aa, Oceanicola batsensis HTCC2597; identical to SEQ ID NO: 65535

SEQ ID NO: 77220 - DNA, 1797 bp, Erythrobacter sp. NAP1
  CDS (1)..(1797): transl_table=11
atgtcatttgaaattctcccgcccgccattggcgaggccttggccgaacgcggctattccgaacccactcctgtgcaggcagccgcaatggcccctgattccgccggacgcgacctgatcgtttcggcccagaccggctcgggcaagaccgtcgccttcgggatcgcgctggcgcaggacattcttgaccagatcagcggaacgccgctgcaagagaggccgctggtcctggcaatcgcgccgacccgcgaacttgccttgcaggtgagccgcgagcttggctggctttacgccaaggcaggcctgcgcatcgcgacctgcgtcggcggaatggacgcgagcaaggagcgccgcgcgcttcggtccgggcctgccatcgttgtcggcacgccgggccgtctgcgcgatcacctagagcgcggcgcgctggacctgtcgggactaatcggcgttgttctcgacgaggctgacgagatgctcgacatgggctttcgcgaggaccttgaggaaatcctcgacgcaacgccggatacgcgccgcacgttgctgttttcagcaaccatgccgcaggcgatcgttcgccttgcccagaaataccagtcggacgcgctgcgcctgtcgctgggtggcaaggatcgtgggcacggcgatattgaatatcaggcgatcaccgttgccccgtccgaaatcgagaacgcggttgtgaacctgctgcgcttccacgaggcggaatcggcaatctgtttctgcgccacgcgcgaaagcgtgcggcggcttcattcggcgcttcagaacaggggctttggcgtcgtttcgctgtccggcgagaattcgcaatccgaacgcaatcaggcgctgcaggcgatgcgcgaccggcgtgcgcgggtctgcgttgcaaccgacgtggccgcgcgcgggatcgacctgccgacactcagccttgtcatccatgttgaaacgccccgcgatgccgagacgcttcagcaccgttcgggccgcacgggccgtgcgggcaagaagggcacggcggcgatcatcgtgccgtacaatcgccgcaggcgcgtcgatgcaatgctgaatggagcaaagatcaaggcgcagtggctcgacgcacccagtcccgaggcgatccgcaagaaggatcacgcacgcctcatggaaaaactcacccagccggccgagtacgaggcagacgatcgcgcgatcgccagcgaactgctcgctcgcatgtcgccagaagacatcgcggccgctctggtgaaagcgcatagggccgagctgcccgaacccgaagagatgctcgccaacacgcccgaggcgcgcgagaaggcgaagaaagagcgccagcgccccggcttcgaagacactgtgtggttcaagatcggcgttgggcgcaggcacaatgcagagccgcgctggctcttgccgctgatctgtcgccgcggccacatcactcgcaacgaaatcggagcgatccgggtcgggcagaacgaaagctggttccagataccgcgtcccatcgctgccaagtttgccgatacgcttgagcagaccttttcggacaaggatgaccaggacgcgatcctgatcgaagaatcggcagaaggaccccggatcgaggctcggaacaaccgcaagaaccattcgggcaagcctttcgtgaagccgttcgggaaaggcaagaacgccagcccgagggatggcaacccgcgtgaaaagggcgcgggcttcaagtcaaagcatggcaagccgaacaaaggcaacggcccaaagaaaccgttcaagcccaagcgttaa

SEQ ID NO: 77221 - protein, 598 aa, Erythrobacter sp. NAP1
MSFEILPPAIGEALAERGYSEPTPVQAAAMAPDSAGRDLIVSAQTGSGKTVAFGIALAQDILDQISGTPLQERPLVLAIAPTRELALQVSRELGWLYAKAGLRIATCVGGMDASKERRALRSGPAIVVGTPGRLRDHLERGALDLSGLIGVVLDEADEMLDMGFREDLEEILDATPDTRRTLLFSATMPQAIVRLAQKYQSDALRLSLGGKDRGHGDIEYQAITVAPSEIENAVVNLLRFHEAESAICFCATRESVRRLHSALQNRGFGVVSLSGENSQSERNQALQAMRDRRARVCVATDVAARGIDLPTLSLVIHVETPRDAETLQHRSGRTGRAGKKGTAAIIVPYNRRRRVDAMLNGAKIKAQWLDAPSPEAIRKKDHARLMEKLTQPAEYEADDRAIASELLARMSPEDIAAALVKAHRAELPEPEEMLANTPEAREKAKKERQRPGFEDTVWFKIGVGRRHNAEPRWLLPLICRRGHITRNEIGAIRVGQNESWFQIPRPIAAKFADTLEQTFSDKDDQDAILIEESAEGPRIEARNNRKNHSGKPFVKPFGKGKNASPRDGNPREKGAGFKSKHGKPNKGNGPKKPFKPKR

SEQ ID NO: 77222 - DNA, 1875 bp, Pseudoalteromonas tunicata D2; identical to SEQ ID NO: 65536
  CDS (1)..(1875): transl_table=11

SEQ ID NO: 77223 - protein, 624 aa, Pseudoalteromonas tunicata D2; identical to SEQ ID NO: 65537

SEQ ID NO: 77224 - DNA, 1242 bp, Pseudoalteromonas tunicata D2
  CDS (1)..(1242): transl_table=11
atgggatttgctgcattagggttaaatcaacaactggttcaagcgctcactgagtgtggttacgatacacctacgcctatccaaactgcggctattggagagattttacaaggtaaagatgtgatggctggcgcccaaacgggcacaggtaaaacagccgcttttgcactgccaattttacagcgtttggcagagcagcctgagcgaaagggccaattgcgtactttggtgctaacgccaacccgagagttggcgcagcaagtatttgccagctttgaaaaatatggccagcatagtgaattaaccgccgctcttgcttatggcggcgtaagcattggtgagcaaattaaagctattaaagcgggcgttgatattatggtggcaacacctgggcgtttgcttgatcacttagttaaaggcacggttaatttatcaaacgttcaatatttggtttttgacgaagcagatcgaatgctcgatatgggttttattgacgaaattaataatattttgcgtcggttacctaaagagcgccaaaccttattattttcagccacctttgatgatgcaatttttaaactgagtaaaaaattgctcaatcagcctgttttaattgaagtgaatcaacgcaatcaagctgccagcgaagttgaacaaattgtttatgcggttgatgctgatagaaagcgtgagttgatttcacacctaattggcgctaaaaattggcagcaagtgctggtatttactcgtaccaaacaaactgcagacgaacttgctaaagaaatgtgcaaagatggtttaaaaacccaagctattcatggtgataaatctcagggggcacgagataaagccttaagtgagtttaaagaaggcaaaacgcgggtattagtagccaccgatgttgcggctcgcggcattgatattcagcaattacagtatgtgatcaattatgaattaccttatatcgctgaagattatattcatcgtattggtcgtaccggtcgtgcgggtgaaaagggcctagcgatatcgttattgagtattgacgaaaattggctgcttgaagaaatagaagcggtacttgataagcgtttacctcagcaatggttgccaggctatgagcctgatttaaccaaagagcccgtagataaacgcaaaaatggcaaggtagctgaaaagcgaagagctaaaaagcgtttatctgggcaaaaaacgggtaatcgtgcgcagcgtaaacgttaa

SEQ ID NO: 77225 - protein, 413 aa, Pseudoalteromonas tunicata D2
MGFAALGLNQQLVQALTECGYDTPTPIQTAAIGEILQGKDVMAGAQTGTGKTAAFALPILQRLAEQPERKGQLRTLVLTPTRELAQQVFASFEKYGQHSELTAALAYGGVSIGEQIKAIKAGVDIMVATPGRLLDHLVKGTVNLSNVQYLVFDEADRMLDMGFIDEINNILRRLPKERQTLLFSATFDDAIFKLSKKLLNQPVLIEVNQRNQAASEVEQIVYAVDADRKRELISHLIGAKNWQQVLVFTRTKQTADELAKEMCKDGLKTQAIHGDKSQGARDKALSEFKEGKTRVLVATDVAARGIDIQQLQYVINYELPYIAEDYIHRIGRTGRAGEKGLAISLLSIDENWLLEEIEAVLDKRLPQQWLPGYEPDLTKEPVDKRKNGKVAEKRRAKKRLSGQKTGNRAQRKR

SEQ ID NO: 77226 - DNA, 1368 bp, Pseudoalteromonas tunicata D2
  CDS (1)..(1368): transl_table=11
atgagttttgcccgcttgggtttatccgcaccaatcttagacgcagtagccgagcaaggttacgatacgccaacccctattcagcttgcagcaattcctgcaatcatcgaagggcgagatatgatggccgcggcccaaacgggaacaggtaaaacagctggttttactttacctttgttagagcgcttatcaaaaggtaagcctgctggaaataaccaagtccgtgcattagtactaacgccaacccgagaacttgcagcacaagtagctgaaagtgttgagttatatggtaaaaacttaaagcttacttcgtttgtggtttatggcggtgtgaaagtaaatccacaaatgatgcgtttacgtcgcggtgtggatattttagtggcgactcctgggcgtttacttgatttatttaatcaacgcgcggttaaatttgatcaacttgaagtgctcgtgcttgatgaagctgaccgtatgcttgatatgggctttattcacgatattaaaaaaattcttaaagtattacctgccaaacgccaaaatttaatgttttcggcaactttttctgatgatattcgtaatcttgccaaaggattaataaacgatccggttgaagtctccgttgcaccagcaaacaccacagcagcaacggttgagcagcgtttgcaccccgttgataaagctaaaaaaccggcgctattatcacacctcattttacaaaatgattggaagcaagtgcttgtttttactcgtactaaacacggtgcaaaccgattagtaaaacagctagaagcggataaaataaacgcagctgcaattcatggtaataaaagccaaagcgcgcgcatgaaagcattagctggttttaaagatggtcaagtccgtgtcttagtggcgaccgatattgtggctcgtggtttagacattgatcaactgccgcaagtagtgaactttgatttacctaatattgctgaagattatgttcatcggattggacggactggtcgagcaggtgccagtggtcatgctatttcgtttgtaacaaccgaagaagccaaagaacttgccgatattgaacgcttaattaatgccacgattgcaagagaagtggtgcctggctttgagccaagcaatcaagtaaaagaaacagatttaaatatcaaggcaaaaaaaccgaagaaagctaaaaagccaagagaatttagctcaaccgacggcgcggcaaaagttgcccaaccgcgtcgaagtaacgcaaattcaccggctaaaaagcctgctataggtcaaaagcccgcgggtgaacaagcggccaacaagcctgcaaagcgccgcgtatggcgcaataagcctaaacctgttgctaattaa

SEQ ID NO: 77227 - protein, 455 aa, Pseudoalteromonas tunicata D2
MSFARLGLSAPILDAVAEQGYDTPTPIQLAAIPAIIEGRDMMAAAQTGTGKTAGFTLPLLERLSKGKPAGNNQVRALVLTPTRELAAQVAESVELYGKNLKLTSFVVYGGVKVNPQMMRLRRGVDILVATPGRLLDLFNQRAVKFDQLEVLVLDEADRMLDMGFIHDIKKILKVLPAKRQNLMFSATFSDDIRNLAKGLINDPVEVSVAPANTTAATVEQRLHPVDKAKKPALLSHLILQNDWKQVLVFTRTKHGANRLVKQLEADKINAAAIHGNKSQSARMKALAGFKDGQVRVLVATDIVARGLDIDQLPQVVNFDLPNIAEDYVHRIGRTGRAGASGHAISFVTTEEAKELADIERLINATIAREVVPGFEPSNQVKETDLNIKAKKPKKAKKPREFSSTDGAAKVAQPRRSNANSPAKKPAIGQKPAGEQAANKPAKRRVWRNKPKPVAN

SEQ ID NO: 77228 - DNA, 1830 bp, Pseudoalteromonas tunicata D2
  CDS (1)..(1830): transl_table=11
atgtccgaaccagttactttttcatccttaaacttatctcctgaaatcttaaaatccgtcgaaaaactaggttatgttacgccttctgaaatccaagcgcagtgtattccttttttattaaatggtaaggatgttctcggactggctcaaacgggcacgggtaaaaccgcagcgtttgctttgccgttacttaataacatcgatgcaacagttaaacaccctcaagtactagtacttgcaccgactcgtgagctcgcaattcaagttgctgaagcgtttgagcaatacgcccaattcattaaaggcattaacgtattagcattatatggtggccaaagctataacgtgcaactgagtggtttacgtaatggccctcaagtcattgtggcgactccaggtcgattaattgaccatttaaaccgtggcacaattaagtttgatcatctaaaagcacttgtgcttgatgaagccgacgaaatgctccgcatgggctttattgaagatgttgaaaccatcatggcaaaaacaccgaaacaaaaacaaacgtgtttgttttcggccactatgccacaacaaattcaaaagatttgcagcacttacttagaagatgctgaacatgttcatatctctgcgcgtaacagcacagtagaaagtgttgaacaagtttattggcaagccaatacccataaaaacaatgctattatccgtttcttacaagctgaaacctatgacggtgccattgtatttgtgcgcacacgtaacgataccgttgaaattgccgagctacttgaacaagctggtttctctgctgcaccacttaatggtgatatgaatcaacaagcccgtgagcgtactgttgagcgtttaaaaaatggcttacttgatattgttattgcaaccgatgtcgctgctcgtggtttagacgttgaccgtttatcattagtaatcaattacgatatcccacaagattctgaagcgtatgtgcaccgtattggtcgtaccggccgtgcaggtcgtacaggtaaagcaattttattcgtaaaacataatgaacgtcatttattacgcaatattattcagcataccaaatcaaccattaataatgttgatatgccaagcactgcattagttgaagaaaaacgcattcaacaactagcaattaaagtcgctgcaagtgcagagcaaaaagacattcttttttacaatgaattagctgaaaagttatctgaacaattaggcttagttggtactgatttagcgggtgcattattgtacttagctcagcaaagtgcaccgattaaagttaaagaagtggctattcatcgtgaagcgcgtaatgaccgcgatggaaaatcacgtgaacgcagtgctcgcccagagcgtgatggccgtgctcgtcgcgaagagcgtgcaccacgtgaaccgcgtcgtgattcagataaaccccgtgaacgtcgcaacagcgaaaatggcccaatggatacttaccgtatcgatatcggccgtgagcatggtgttcaggtgaaaaacattgttggtgcgattgccaatgaagctgatattccaagtaaatttattggtgatattcgtttatttgatgatcacagtacagtgcaattaccactgaatatgccagcagaaacactccagcatttcaaaaaagtgtttatttgcaaacgcccaatgaacttggttttacacaacgataaaaaccatagtcatgataaagcccatggcactgaaaaagtacacaattacgataaaccagcttcagccaatcgtgctaaagccgttgaaaaacgcgggcctcgtgcgccacgtaataagtaa

SEQ ID NO: 77229 - protein, 609 aa, Pseudoalteromonas tunicata D2
MSEPVTFSSLNLSPEILKSVEKLGYVTPSEIQAQCIPFLLNGKDVLGLAQTGTGKTAAFALPLLNNIDATVKHPQVLVLAPTRELAIQVAEAFEQYAQFIKGINVLALYGGQSYNVQLSGLRNGPQVIVATPGRLIDHLNRGTIKFDHLKALVLDEADEMLRMGFIEDVETIMAKTPKQKQTCLFSATMPQQIQKICSTYLEDAEHVHISARNSTVESVEQVYWQANTHKNNAIIRFLQAETYDGAIVFVRTRNDTVEIAELLEQAGFSAAPLNGDMNQQARERTVERLKNGLLDIVIATDVAARGLDVDRLSLVINYDIPQDSEAYVHRIGRTGRAGRTGKAILFVKHNERHLLRNIIQHTKSTINNVDMPSTALVEEKRIQQLAIKVAASAEQKDILFYNELAEKLSEQLGLVGTDLAGALLYLAQQSAPIKVKEVAIHREARNDRDGKSRERSARPERDGRARREERAPREPRRDSDKPRERRNSENGPMDTYRIDIGREHGVQVKNIVGAIANEADIPSKFIGDIRLFDDHSTVQLPLNMPAETLQHFKKVFICKRPMNLVLHNDKNHSHDKAHGTEKVHNYDKPASANRAKAVEKRGPRAPRNK

SEQ ID NO: 77230 - DNA, 1284 bp, Photobacterium sp. SKA34
  CDS (1)..(1284): transl_table=11
atgtcgtttcaatccctaaaccttcatcccaatttgttaaaagcattgactgatttaggttattcaacacctacagatgtgcagcaacaggcaattccattggcattgaaaggtgacgatgtaatggctggtgcgcaaactggcacaggtaaaacagcagcatttacacttccactattacaacgcttaatgactttaccatcgcaagcagagcaggtgtctacagcggtcgaaaataatcagaaatcacgtaataaaattcgtgctttaattttgactccaacacgagaattagctcaacaagtatttgatagtattacaacgtatgccaaatatactgagataaaagtggcggttgcttatggcggtacgagtatgaatgtacaagttaaagccttaaatgcaggcgctgaaattctagtagcaacacctggacgtttacttgatcacgtctttaatggttctgtttctttatctgaagttgaaacgtttgtattagatgaagctgatcgtatgttagacatgggtttcattgttgatattcaacgtattatgaagcgaatgccggctgagcgtcagacattatttttctctgcgacattttcaaagcaagttaaaaaactagcatttgatattcttaccaaccctaaaatggtagaagtaacgccagcaaatactgccgctgaaaccgttgaacaaatagtttatcccgttgataaacatcgtaaagctgaattacttgcatatttaattggttctcgtaattggcgacaggtactggtattcaccaaaaccaaacagggttccgatcaattagctaaagatctcggtctagatggtattaaagcatcatcgatcaatggtgacaaaagccaaggtgcgcgccaacgtgcattagatgatttcaaatcaggtaagactcgcgtattagtcgcgactgatgttgctgccagaggtctggatattgagcaactcgaatatgtggttaactttgatatgcccttcaaagcggaagattatgttcaccgtattggtcgtacaggtcgagccggaatgacagggcatgcgattactttgatgagtcttgatgaagagtgggcattaaaagcaattgaagagttattagatagccgtttaccacagcaatggttagaaggttatgagcctaatccggcattaatagaaacacaatctgttcatcgtggtgcggcagctgaaaagcgacgagcgaaatcgaaaagtaaaatccaccagaatagaggtaagcatagaaatcgtcgataa

SEQ ID NO: 77231 - protein, 427 aa, Photobacterium sp. SKA34
MSFQSLNLHPNLLKALTDLGYSTPTDVQQQAIPLALKGDDVMAGAQTGTGKTAAFTLPLLQRLMTLPSQAEQVSTAVENNQKSRNKIRALILTPTRELAQQVFDSITTYAKYTEIKVAVAYGGTSMNVQVKALNAGAEILVATPGRLLDHVFNGSVSLSEVETFVLDEADRMLDMGFIVDIQRIMKRMPAERQTLFFSATFSKQVKKLAFDILTNPKMVEVTPANTAAETVEQIVYPVDKHRKAELLAYLIGSRNWRQVLVFTKTKQGSDQLAKDLGLDGIKASSINGDKSQGARQRALDDFKSGKTRVLVATDVAARGLDIEQLEYVVNFDMPFKAEDYVHRIGRTGRAGMTGHAITLMSLDEEWALKAIEELLDSRLPQQWLEGYEPNPALIETQSVHRGAAAEKRRAKSKSKIHQNRGKHRNRR

SEQ ID NO: 77232 - DNA, 1284 bp, Oceanospirillum sp. MED92
  CDS (1)..(1284): transl_table=11
atgagtgcttcatctttcgctgagctggctctgtgtccagagttacagtttacccttaagaatcttggttatgagcaaccaacgccgattcagtcacaagcgataccgctggtgctgcgaggggatgatcttttggcagaagcccaaaccgggaccgggaaaacggccagttttgcactgcctattattgagaagttgagtaaaaaccccattgacggttatcgccctgtgcgcgccttggttttggctcctacccgtgaattggcgatacaggtggcggataataccctggaatacggacgtgatttgggtatgcgagttatatccgtttacgggggcgtgccggtagagaaccagattaaacggcttaagcgtgggaccgatattctggtggcaacgccggggcgattactggacctattaaggcaaaaagcgatcagtctggaaaagcttgaatatctggtgctcgatgaagctgatcgtatgctggatctgggctttatcgacccgattcagaaaatcatggattatgcagcagatgatcgtcagaccttactctttacggctacggccgacgaaagtgttgaggtattagccgaattctacctcaataacccaaccaaaattaaagtgacgccgcgtaactctaccgcgaagcagatcagacagtttgcctatcaggtcgattatgggcagaaggcagatatactcagttatctgattacagagggtaaatggggtcaaacactggtctttgtaaggactaaaaagcgtgtggatgaattgactcaatatctatgcaaagagggaataaacgcagccgctattcacggtgagaagagtcagcgagaacgtgtgcgtatgcttaatgagtttatcgctggggatctacatgtgctggtggcgactgacgtggcagcgcgaggtttggatatcgagtctttaccttatgtcgttaattatgatctgcctaatcaacctgaagcttatgtgcaccggattgggcgtaccggtcgagcaggggagactggggaagctgtttcattagtggctccagcagaacgtgagttcctgcagagaattgagaaactgattaagcaaaaaataaaactgcgccccgtaccaagaattgaagatggcaaacggctggaaattgatgattttgcagataaacccatgaagcgaaagcctgctaaggcaaagcagcaaaagcgtaaaaaggttgagtcttatcagccggataaaagtaagaaagcgattcgcccttcactttttaacaagtga

SEQ ID NO: 77233 - protein, 427 aa, Oceanospirillum sp. MED92
MSASSFAELALCPELQFTLKNLGYEQPTPIQSQAIPLVLRGDDLLAEAQTGTGKTASFALPIIEKLSKNPIDGYRPVRALVLAPTRELAIQVADNTLEYGRDLGMRVISVYGGVPVENQIKRLKRGTDILVATPGRLLDLLRQKAISLEKLEYLVLDEADRMLDLGFIDPIQKIMDYAADDRQTLLFTATADESVEVLAEFYLNNPTKIKVTPRNSTAKQIRQFAYQVDYGQKADILSYLITEGKWGQTLVFVRTKKRVDELTQYLCKEGINAAAIHGEKSQRERVRMLNEFIAGDLHVLVATDVAARGLDIESLPYVVNYDLPNQPEAYVHRIGRTGRAGETGEAVSLVAPAEREFLQRIEKLIKQKIKLRPVPRIEDGKRLEIDDFADKPMKRKPAKAKQQKRKKVESYQPDKSKKAIRPSLFNK

SEQ ID NO: 77234 - DNA, 1935 bp, Flavobacteria bacterium BBFL7
  CDS (1)..(1935): transl_table=11
ttgtatttttgcaaaatatttaaaagaagttatttgaaaaattttgaagtcttaggactctcacagccgttattaaacggcctcgctgacatgggttttgaaaacccaacagagattcagcaacagtctattcccattttattgaagcatgacggcgactttataggtcttgctcaaactggtacgggaaaaactgctgccttcggtttacccttattggatcttatagacgttaattctcgtgaagtacaagcccttattctggcacctactcgcgaacttgctcaacaaatatgtgggcaaatggagcaaatgtcaaaacacctaggtaaattgaatgttgttcctgtttttggaggagcaaatattatgaatcaaattagagacatccgtcgtggtgcacaaattattgtggctactccaggacgtctgatggatttaatgaaacgccgcgaagtaaaactcgacgctttaaagtacatggtactagatgaagcagatgagatgcttaacatgggctttaaagaggatattgattttatcctttctaaaagtgataccggtagaaacatatggttattctctgctacaatggcacgtgaaattaagcgtattgtagatacctatatggtacaaccagaagaggtgcgtattaatccaaagaatattgtaaataagaatatcgaacatcagtcgatacaacttaaagcatctgataagatagaggctctacgtcgttttttagattatgatgaagacatgttcggtgtggtcttttgtcgtacaaaaagagatacacaaaatgtagcagatcaattgaataacaatgggtatgcgacagaagcgttacacggtgatatgtcacaggcacagcgtgatgctgctatgaagcgtttccgtaataaaaatttaaaattgttaatagctactgatgtagcggcacgtggtatcgatgtagatgacattactcatgttatacactttgctttaccagatgatcctgagttttatactcaccgttctggtcgtacagctcgtgctggtaaaaaaggtgtttctattgcgctaattactcgtggtgataatcgtaagttaaaatttatcgctagcaaattaggaattgaatttacacaaggtgaagttcctgcgttagaagcaatcactcaaaaacgtatttctagatggtctgaaaacatgatcaaacaagaaattaatgagaaaattgatgagcagttagtgaatgcagttcaagaaagctttgctgatgttactaaagaggagataattgctaagttgttaactaaagaatataactctatttataagcgtaattctatttctgatcttaatgatcgttctaaaggacgcgatagagatgatagtccaagacgcgagcgtggtaaacgtacaagtcgtggtactgaagaaggaatgaaaacctactttattaatctaggtcttaaagatgatattaataaaggtgcattactaggatatgtatgtgataccacaggtatttctggtgctcaaataggtcgtatcgtaatggataaaacgcattcttatatggatgtagcagaagatgtagcgtctcaaatactcaccttagatggtaaacaacgtaatggtcatgatctaagagttaatgagcataaaggtgttgtaaaagaaccagctcgtgaacgtggtggtcgtggtggtcgtggtggtcgtggtggtcgcagtggtggcggttttaaaggacgtcgtgattctaacggtggtggtggctttaaaggaagcagtaactctggaggcagtagccatagaggaagacgttctgattctgataatagcggttcaggtaatagaagtagtcgtcgtagaagtgattcttcttctggcggtaatgatagtggtggtaaccgtggaggctttaaaggtcgtaagtggtaa

SEQ ID NO: 77235 - protein, 644 aa, Flavobacteria bacterium BBFL7
MYFCKIFKRSYLKNFEVLGLSQPLLNGLADMGFENPTEIQQQSIPILLKHDGDFIGLAQTGTGKTAAFGLPLLDLIDVNSREVQALILAPTRELAQQICGQMEQMSKHLGKLNVVPVFGGANIMNQIRDIRRGAQIIVATPGRLMDLMKRREVKLDALKYMVLDEADEMLNMGFKEDIDFILSKSDTGRNIWLFSATMAREIKRIVDTYMVQPEEVRINPKNIVNKNIEHQSIQLKASDKIEALRRFLDYDEDMFGVVFCRTKRDTQNVADQLNNNGYATEALHGDMSQAQRDAAMKRFRNKNLKLLIATDVAARGIDVDDITHVIHFALPDDPEFYTHRSGRTARAGKKGVSIALITRGDNRKLKFIASKLGIEFTQGEVPALEAITQKRISRWSENMIKQEINEKIDEQLVNAVQESFADVTKEEIIAKLLTKEYNSIYKRNSISDLNDRSKGRDRDDSPRRERGKRTSRGTEEGMKTYFINLGLKDDINKGALLGYVCDTTGISGAQIGRIVMDKTHSYMDVAEDVASQILTLDGKQRNGHDLRVNEHKGVVKEPARERGGRGGRGGRGGRSGGGFKGRRDSNGGGGFKGSSNSGGSSHRGRRSDSDNSGSGNRSSRRRSDSSSGGNDSGGNRGGFKGRKW

SEQ ID NO: 77236 - DNA, 1530 bp, delta proteobacterium MLMS-1
  CDS (1)..(1530): transl_table=11
atgagcaacgacgatataatgcatttttcccaactgcccctggctccggcggtcagccaggcggtggccgagatcggctacgagaccccgacccccatccaggccgccgccatcgggccgctgctggccggccgcgatctgctgggccaggcccagaccggcaccggcaagaccgccgccttcgcgctgcccttgctgagccgcctggataccagccgtaagtatccccaattgctggtcctggcccccacccgggagctggccctgcaggtggccgacgagatccaggcctacagccgccatctgcccggcttccaggtgctgcccctgtacggcggccagaacatggcccagcagttgcgcgccctgcaacgcggggtccaggcggtggtcggcacccccggccgcatccaggatcatctccgccggggcaccctgaaactggaccgcctgaccgcggtggtcatcgacgaagccgacgagatgctcaagatgggctttgtcgacgaggtggaaaagatcctggcccagaccccgccccagcgccaggtcgccctgttctccgccaccatgacccaggagatcatgcgaatcgcccgacgccatctcaaggaccccgaagagatccggctgaaaacccggaccaccacggtggagaccatcagccagcattactggctggtccagggcctgcagaaactcgacgccttaacccggatcctggaagccgaagcggtggaggcgatgctgatcttcgtccgcaccaaagtggccaccgtcgagctggccgagaaactggcggcccggggctttgccagcgccgccctaaacggcgacatgacccaggggttgcgggaaaagaccgtcgaacagctcaaggatggcaccctggatatcgtggtggccaccgatgtcgcggcccggggcctggatgtccagcggatcagccacgtggtcaactacgatatcccctacgataccgagtcctacgtccaccggatcggccgcaccggccgggccggccgccagggccaggcgatcatcttcgtggccccccgggagatgcggatgctccacgccatcgaaaaagccacccggcagcagatcgcccgcctgcaactgcccagccgccgggaggtcaaccagcggcggatcgaccagttcaaggagaagatcatcgccgccagccgccagccgggcctggagttcttcgaggaactgatcgcccaggccacggcggaggccgaaatcgactcccagcaactggccgccggcctggcctacctgctgcaacaggcacggccgctgctgcccgaggaaggagggcctcccccggcggaggagcaacagcagcggccccgaccccaggggccacggaaaccggcgccgaccggccgcctgcggggccagtacccgggccggcgggaatcgccgtcccgcaagggcaaagcccagggcaaagcccagggcaaacgcaccccccagggacgtaccggcggcggcccgaccacccacagagaaaaaccgtaa

SEQ ID NO: 77237 - protein, 509 aa, delta proteobacterium MLMS-1
MSNDDIMHFSQLPLAPAVSQAVAEIGYETPTPIQAAAIGPLLAGRDLLGQAQTGTGKTAAFALPLLSRLDTSRKYPQLLVLAPTRELALQVADEIQAYSRHLPGFQVLPLYGGQNMAQQLRALQRGVQAVVGTPGRIQDHLRRGTLKLDRLTAVVIDEADEMLKMGFVDEVEKILAQTPPQRQVALFSATMTQEIMRIARRHLKDPEEIRLKTRTTTVETISQHYWLVQGLQKLDALTRILEAEAVEAMLIFVRTKVATVELAEKLAARGFASAALNGDMTQGLREKTVEQLKDGTLDIVVATDVAARGLDVQRISHVVNYDIPYDTESYVHRIGRTGRAGRQGQAIIFVAPREMRMLHAIEKATRQQIARLQLPSRREVNQRRIDQFKEKIIAASRQPGLEFFEELIAQATAEAEIDSQQLAAGLAYLLQQARPLLPEEGGPPPAEEQQQRPRPQGPRKPAPTGRLRGQYPGRRESPSRKGKAQGKAQGKRTPQGRTGGGPTTHREKP

SEQ ID NO: 77238 - DNA, 1593 bp, Desulfitobacterium hafniense DCB-2; identical to SEQ ID NO: 65552
  CDS (1)..(1593): transl_table=11

SEQ ID NO: 77239 - protein, 530 aa, Desulfitobacterium hafniense DCB-2; identical to SEQ ID NO: 65553

SEQ ID NO: 77240 - DNA, 1416 bp, Vibrio sp. Ex25
  CDS (1)..(1416): transl_table=11
atgtgccctcttttcatctcacctgaggatattcccgtgagcaaacaaacttttgatcaagtcgggctaaacccagcgttactcgccacacttgattccctgaactacacccacatgacgccaattcaagctttgagtttgcctgcaatcctaaaacatcgtgatgtcatcgggcagggtaaaacgggctcaggtaaaaccgctgcatttggtttgggtgttttatcgaaccttaacgtcaaacgctttcgtgtccagtcattagtattgtgtccaactcgtgagcttgcggatcaagtcgcgaaggaaattcgtactttaggtcgtggcattcataatattaaagtgcttactctctgcggtgggatgccaatggggccacaaattggttctctggagcatggcgcgcatatcttagtcggcacacctggccgtattttggatcaccttgagaaaggccgaattaacctgagcgagctgaataccttggtgctggacgaagctgatcgcatgttggacatgggtttccaagacgcattagatgcgattattgatgcagcgccaaagcagcgtcaaactctacttttcagtgctactttcccagagaaaattgagcaaattgcgcagcgtattatgcagacgcctgaagtcattaaggtggaatcgactcatgatacctcaagcattgctcagcatttctacaaagttgaaggttcggaagcgcgtgatgaagcgttggcgaacttgctactgactcaccaaccagagtccgctgtggttttttgcaataccaaaaaagaagtgcaaagtgtcgcagatgagttgcatcgcaaagggttcagcgttatcgatatccatggggacttagaacagcgtgaacgcgatcaagcattggtgcagtttgctaacaagagtgtttctatccttgtcgcaacagacgtcgcggcgcgtggtttggacgtagataaccttgatgcagtctttaactttgagctatcgcgcgatcctgaggttcatgtacaccgtattggtcgtacaggtcgtgcgggtagtaaaggtttagcgttcagcttttttggtgagaaagacggtttacgtgtagctcgtattgaagaatacctagagatggacgtggtaccagcaacattgcctgccaaatcaaatcagcagccataccaagcgaagatggtgacgattaacattgatggcggtaagaaacagaaagtacgaccgggtgatatcttagggtgtctgacggggaaaaatggtatcccaggctctcaagttggcaagattcacctgttcccgatgcgcgcctacgttgcggtcgagaagtcagctgccaaaaaggctctacaaaccattagtaatggcaagatgaaagggcgtcagttccgggcgcggcttcttaaatag

SEQ ID NO: 77241 - protein, 471 aa, Vibrio sp. Ex25
MCPLFISPEDIPVSKQTFDQVGLNPALLATLDSLNYTHMTPIQALSLPAILKHRDVIGQGKTGSGKTAAFGLGVLSNLNVKRFRVQSLVLCPTRELADQVAKEIRTLGRGIHNIKVLTLCGGMPMGPQIGSLEHGAHILVGTPGRILDHLEKGRINLSELNTLVLDEADRMLDMGFQDALDAIIDAAPKQRQTLLFSATFPEKIEQIAQRIMQTPEVIKVESTHDTSSIAQHFYKVEGSEARDEALANLLLTHQPESAVVFCNTKKEVQSVADELHRKGFSVIDIHGDLEQRERDQALVQFANKSVSILVATDVAARGLDVDNLDAVFNFELSRDPEVHVHRIGRTGRAGSKGLAFSFFGEKDGLRVARIEEYLEMDVVPATLPAKSNQQPYQAKMVTINIDGGKKQKVRPGDILGCLTGKNGIPGSQVGKIHLFPMRAYVAVEKSAAKKALQTISNGKMKGRQFRARLLK

SEQ ID NO: 77242 - DNA, 1302 bp, Alteromonadales bacterium TW-7
  CDS (1)..(1302)
atgaattttaaatcttttagtttcgcacctgaaatcatccaggcattagacgaactcaactatcacactcttacgcccattcaacgcgcagcaattccagctgttcgtaaaggtaaagacgttttagccagtgcacaaactggtaccggtaaaactgccgcgtttgctttacctgttatccaaaaattaattgaatcagacttaagcacaaccaatgcacctactgctttggttttagcaccaacacgagaattagcagagcaaatagccaataactgtaaagaatatgcaaagcatacctcactaaaagtagtgagtttatttggtggagtgaataccgcaggccaagaaaacgcattaaaagcaggcgttgatatcgtagtcgcaactccgggtcgtttactcgatcacattcgcctaggtaacttaagcttggccaatgtaaagcacctagtacttgatgaagccgaccgtatgcttgatatgggctttatcacagatatgcaaactgtgattaaaagctgtgctgatgaccgtcaaattttattattttcggctacattccctgcagctattaaacaatttgcttctaaggtacttaagcaacctgaaattgtgcgtgttgaccaaactaacagtaccgcatctactgtacagcacgttgtatacccagtggaagagcgccgcaaacaagaacttctttctgagctgattggtaaaaagaactggcagcaagtacttgtgtttgtaaatatgaaagacacagcggatgagctagttaaagaattaaatctcgatggcattcctgcaaccgtttgccatggcgataagtcacaaggtaaccgacgccgtgctttacgtgagtttaaagaaggtaaggtacgtgtgttagtggccactgaagttgctgcgcgtggcattgatattgatggattaccgcgtgtaattaatattgacttaccatggcttgctgaagattacgttcaccgtattggccgtacaggccgtgctggtaatcaaggccaagcaatatcttttgtaagccgtgaagaagaaaatacattatttgaaatcgaagcattaattggtcaaaaaattaagcgtgtttaccttgaaggctatgaagtgagtaaccgcgaagtgcttattgataaaataggtaaaaagccggctcacttacgccgtactcgttctaataagttatcagggcaagcaacgggcgaagctcgcgcggtaaaccgttcgcgtatatctaatgtgcgtaaaagcttaaaaggtgcaaagttgtcacttaaaaaataa

SEQ ID NO: 77243 - protein, 433 aa, Alteromonadales bacterium TW-7
MNFKSFSFAPEIIQALDELNYHTLTPIQRAAIPAVRKGKDVLASAQTGTGKTAAFALPVIQKLIESDLSTTNAPTALVLAPTRELAEQIANNCKEYAKHTSLKVVSLFGGVNTAGQENALKAGVDIVVATPGRLLDHIRLGNLSLANVKHLVLDEADRMLDMGFITDMQTVIKSCADDRQILLFSATFPAAIKQFASKVLKQPEIVRVDQTNSTASTVQHVVYPVEERRKQELLSELIGKKNWQQVLVFVNMKDTADELVKELNLDGIPATVCHGDKSQGNRRRALREFKEGKVRVLVATEVAARGIDIDGLPRVINIDLPWLAEDYVHRIGRTGRAGNQGQAISFVSREEENTLFEIEALIGQKIKRVYLEGYEVSNREVLIDKIGKKPAHLRRTRSNKLSGQATGEARAVNRSRISNVRKSLKGAKLSLKK

SEQ ID NO: 77244 - DNA, 1248 bp, Alteromonadales bacterium TW-7
  CDS (1)..(1248)
atgtctgccacatcattttcatcacttaatctcgacccgttattattaacagcgattgagcaaaataattacactacgcctaccgcaattcagattaaaactattccgccaattctcgcgggcaacgatgtaatgggcagcgcacaaactggcacaggtaaaacagcagcctttgtattgccactactacataagcttttaaatacacctaaaaaagatgagccaggcattgctcgagtggtcattttaacgcctacgcgtgagcttgctcagcaagtgtttgcaagctttgaaaaatacgctcaaggcagtaatgttcagggtgctttagcgtatggcggcgcaagtattggcccgcaaattaaagcacttaaaacggcgcaagtgatagtggcaacaccagggcgtttgctcgatcatatagttaaaggcagtgtggtgctttctagtgttgattcattagtatttgatgaagccgaccgcatgctggacatgggctttattgatgaaataaaacgtattttgcgccatattccgggcgatcgccaaaccttattgttctcagccacattcgatgacagcgtgtttgggctaagtgaaaaactacttaaaaaccccgagctgattgaagttgataaacgtaactcagccgccgttgaagtagaacaaattatttacgctgttgatgaagacagaaaacgcgaacttgtatcgcacatgattggcatgaaaaattggcgccaagtacttatatttacgcgcaccaaacaaatggccgataagcttgccaaagaaatgtgtaaagacggtttaaaaacagaatccattcatggcgataaatcgcaaggcgcgcgagaccgtgcactacaaaactttaaagaaggtactactcgcgtattagttgccaccgatgtagctgcccgtggtttagatattccagcccttaaatacgtaattaactttgaattgccatacatagctgaagattatgtccaccgcataggccgtacgggtcgcgcaggcgagcaaggccttgcaatgtcgcttgtaagtattgacgagcaatggttacttgaagaaattgaagtactgcttgatacgcgtttagcaccacaatggttagaaggttatgagcctgatttaaacaaagcccctaaagataaccgaaaaaacaccaataaagcgcgtaaagatcgtgacaaaaagcgtattacaggtaaaagggcaccaagcagacgacgaaaataa

SEQ ID NO: 77245 - protein, 415 aa, Alteromonadales bacterium TW-7
MSATSFSSLNLDPLLLTAIEQNNYTTPTAIQIKTIPPILAGNDVMGSAQTGTGKTAAFVLPLLHKLLNTPKKDEPGIARVVILTPTRELAQQVFASFEKYAQGSNVQGALAYGGASIGPQIKALKTAQVIVATPGRLLDHIVKGSVVLSSVDSLVFDEADRMLDMGFIDEIKRILRHIPGDRQTLLFSATFDDSVFGLSEKLLKNPELIEVDKRNSAAVEVEQIIYAVDEDRKRELVSHMIGMKNWRQVLIFTRTKQMADKLAKEMCKDGLKTESIHGDKSQGARDRALQNFKEGTTRVLVATDVAARGLDIPALKYVINFELPYIAEDYVHRIGRTGRAGEQGLAMSLVSIDEQWLLEEIEVLLDTRLAPQWLEGYEPDLNKAPKDNRKNTNKARKDRDKKRITGKRAPSRRRK

SEQ ID NO: 77246 - DNA, 1356 bp, marine gamma proteobacterium HTCC2143
  CDS (1)..(1356): transl_table=11
ttgacattattaagtgagttagcactccataaacagctattgaaagcgttagataaacttggttttagcgaggccacagaggtgcaggcgcaagctattcctgaggcgttgaaacgccgtgatctaatggtttcagcacagaccggaagtggtaaaaccgccgcatttcttctgccgatattgcatcagatactgacggaagaggtgtctaccagcggcacgcgggtattgatacttttacccacccgtgaattggcgctgcagacgcagaaaaattttgaaatgctcgcggcatttacttatatcaaaagtggcctgatcatcggcggtgaagcgtttaaacatcaggtggctacattgcgcaaagatccggaggtgttgatcgctacgccgggtcggctggtcgaccatatcgagaaagggacgccggattttagacagctggaagttctggtgctggacgaggctgaccgtatgctggatatgggttttgcaattgatatgaatacgatcgctagtagttgtaatccagagcggcaaaatctactgttctcagcgtccttgaaacatgaaggtttagggaagatcagtaaaagctttcgagacccggtcgctattgctgtggggtcaccggaccatcagcatcaagatatttgtcaacaattggtgctagcggatacgataaaacataaagaaaaactcgtagaggcgctgattgatgaggagcaggcgcagaagacattggtgttttgtaatactcgagtgcaatgccagcagcttagccatttgctgcgctacaaaaaaatgaaagtcggttatattcatggagatatctctcagaatgatcgcaagcaagtgatgaaccagtttcgccaaggaggcatagcggttctagtagcaacagatgttgctgctcgagggttggatataaaaggtgttgatctggttgtgaattttaatattgcgcaatccggtgatgatcatttacaccgagttggccgcactggtcgcgccggtgagcagggtaaggcgatcacgttgatcgattccaacgaatggaatcaaatgtccagtattgagcggtatttgaaatttcgtttcgagtcacgcgttgtcaaaggcctgaaggcagattacagtggccccaaaaaagtaaaaaaatccggcaaagccgccggtactaaaaagaaaaaagtggacaataaaaaatcgctgaatggcaagctgtcagctaaggtgaaaaagaaaccaggcaagaaaatgccggctaatagccccgcagattcaaagtcatcggaacgcaagaaaagagtgttagtgactggggatggttttggtgtattacctaaaaaatag

SEQ ID NO: 77247 - protein, 451 aa, marine gamma proteobacterium HTCC2143
MTLLSELALHKQLLKALDKLGFSEATEVQAQAIPEALKRRDLMVSAQTGSGKTAAFLLPILHQILTEEVSTSGTRVLILLPTRELALQTQKNFEMLAAFTYIKSGLIIGGEAFKHQVATLRKDPEVLIATPGRLVDHIEKGTPDFRQLEVLVLDEADRMLDMGFAIDMNTIASSCNPERQNLLFSASLKHEGLGKISKSFRDPVAIAVGSPDHQHQDICQQLVLADTIKHKEKLVEALIDEEQAQKTLVFCNTRVQCQQLSHLLRYKKMKVGYIHGDISQNDRKQVMNQFRQGGIAVLVATDVAARGLDIKGVDLVVNFNIAQSGDDHLHRVGRTGRAGEQGKAITLIDSNEWNQMSSIERYLKFRFESRVVKGLKADYSGPKKVKKSGKAAGTKKKKVDNKKSLNGKLSAKVKKKPGKKMPANSPADSKSSERKKRVLVTGDGFGVLPKK

SEQ ID NO: 77248 - DNA, 1683 bp, Pseudomonas putida GB-1
  CDS (1)..(1683): transl_table=11
atgacccaggaaaccggcggcttcgccgctctcgatcttaatccgaacattgttgctgccgttgtggctaccggctacgaagagccgtccgccattcagcaacaatcgatcccgatcatcctcgccggtcacgacatgatcggccaggcgcagactggcaccggcaaaaccgctgccttcgccctgccgatcctcaacaagatcgatgtgagcaagcgcgaaccgcaagccctgatcctggcgccaacccgtgagttggcgctgcaagttgctaccgctttcgaaacctacgccaagcagatgccgggcgttaacgttgtcgccgtctacggtggtgccccgatgggcccacagctgcgcgcaatccgtaatggcgcgcaaatcgtcgtggccaccccgggccgtctgtgcgaccacctgcgtcgtgacgaaaaagtcctgtcgaccgtacagtacctggtactggacgaagccgacgagatgctgaagctgggcttcatggatgacctcgaagtgatcttcgacgcaatcccggctacccgtcagaccgtcctgttctccgctaccctgccgtcgtcgatccgttcgatcgccgagcgtcacctgcgcgaacccaagcacgtcaagatccagaccaagacccagaccgttaccgcgatcgagcaggcccacctgatggtccacgccgaccagaagatcccggctgtgctgcgtctgctggaagtggaagagttcgacgcactgatcgccttcgtgcgcaccaagcaagccaccctggacctggccgccgcgctggaagccaagggctacaaggctgccgcgctgaacggcgacatcgcccagaaccagcgtgagcgcgtgatcgactcgctcaaggatggccgcctggacatcgtcgtcgctaccgacgtcgctgcccgtggcctggacgtaccgcgcatcactcacgtgttcaacgttgatatgccgtacgacccggagtcctacgttcaccgtatcggccgtaccggccgtgccggtcgcgatggccgcgcactgctgctggtcaccccgcgtgagcgccgcatgctgcaggtgatcgagcgtgtaaccgggcagaaggttgccgaagcgcgcctgccgaacgctcaggccgtgctcgatgcccgcatcaagaagctgacgtcgagcctggcgccgctggtggccgaagctgaagccacccacggcgagctgttcgaccgcctgaccagcgacctgggttgcagtgcgcgtgccctggcttcggccttgctgcgcaaagccaccaatggccaggcgctggacctggctgcggtagagcgtgagcagccgctggtgccgggcgttggtgccccgcgtggcgagcgtagcgagcgtcctgaccgtggcgagcgccctgaccgtggtgaccgcgagcgccgcgcgccgctgccgctggccgaaggccgtgtacgttgccgtaccgccctgggtgcccgtgacggtatcgctgccaagaacctgttgggcgcgatcctcaacgagggtggcctggcgcgtgacgccattggccgtatccaggtacgcgacagcttcagcctggtcgagctgccggaagacggcctggagaagctgctgtccaagctcaaggacacccgcgtggctggcaagcagctgaagctgcgtcgctaccgcgaggattga

SEQ ID NO: 77249 - protein, 560 aa, Pseudomonas putida GB-1
MTQETGGFAALDLNPNIVAAVVATGYEEPSAIQQQSIPIILAGHDMIGQAQTGTGKTAAFALPILNKIDVSKREPQALILAPTRELALQVATAFETYAKQMPGVNVVAVYGGAPMGPQLRAIRNGAQIVVATPGRLCDHLRRDEKVLSTVQYLVLDEADEMLKLGFMDDLEVIFDAIPATRQTVLFSATLPSSIRSIAERHLREPKHVKIQTKTQTVTAIEQAHLMVHADQKIPAVLRLLEVEEFDALIAFVRTKQATLDLAAALEAKGYKAAALNGDIAQNQRERVIDSLKDGRLDIVVATDVAARGLDVPRITHVFNVDMPYDPESYVHRIGRTGRAGRDGRALLLVTPRERRMLQVIERVTGQKVAEARLPNAQAVLDARIKKLTSSLAPLVAEAEATHGELFDRLTSDLGCSARALASALLRKATNGQALDLAAVEREQPLVPGVGAPRGERSERPDRGERPDRGDRERRAPLPLAEGRVRCRTALGARDGIAAKNLLGAILNEGGLARDAIGRIQVRDSFSLVELPEDGLEKLLSKLKDTRVAGKQLKLRRYRED

SEQ ID NO: 77250 - DNA, 1485 bp, Pseudomonas putida GB-1
  CDS (1)..(1485): transl_table=11
atgcccgtcgtccggaacaacacatggaatcatagggcgaatggccacgaggctggtagactgtgcggcatttttcgcttcgcaacgcaggcccgcctcgtgaccaccgaatccaccgcctttgccactctgccgttgtccaccgccatgctggcgaacctggacgccctcggctatgcctcgatgacgccgatccaggcccagagcctgccagtcatcctcaaaggccaggacctgatcgcccaggccaagaccggcagtggcaagaccgccgccttcggcatcggcctgctcaacccgatcaacccgcgctacttcggctgccaggcactggtgctgtgccctacccgcgagcttgccgaccaggtggccaaggaactgcgccgcctggcccgcgctgaggacaacatcaagatcctcaccctgtgcggcggcgtttcgctgggcccgcaaatcgcttcgctggagcacggtgcgcacatcatcgtcggcaccccagggcgcatccagcaacacctggacaaaggcaccctggtgctcgatggcctcaacaccctggtactcgacgaagccgaccgcatgctcgacatgggcttcttcgatgccatcgccagcatcatcggcaagaccccggcgcgccgccagaccctgctgttctcggccacttacccggctggcatcaagcagctggccgccgacttcatgcgcaacccgcagcaagtcaaggtcgagagcctgcacaccgacaaccagatcgagcagcgcttcatcgagatcgacccgcagcaccgcctggaggccgtcacccgcgtgctcggccactaccgcccgcagtcctgcgtggcgttctgcttcaccaagcagcagtgcgaggatgtggttgcccacctgaccgccaagggcatcgtcgcccaggccctgcacggcgacctggagcaacgtgaccgcgaccaggtgctgaccatgttcgccaaccgcagcagctcggtgctggtggcgaccgacgtggccgcgcgtggcctggacatcgatggcctggacatggtcatcaacgtggaactggcacgtgatgcggaaatccacgtgcaccgtgtgggtcgtactggccgtgctggcgagaaagggatcgcggtcagcctggtggcaccggccgaaggccaccgtgcccaagccatcgaagacctgcagaaaagcccgctgcgctgggactcgctggacagcctgaagaacaagggcggcgaaccactgctgccggtgatgaccacgctgtgcattgccgctggccgcaaggacaagctgcgccctggcgacattctcggtgcgctgaccggtgatgccgggatcccaggcaagcaggtgggcaagatcgccatcttcgacttccaggcgttcgtggccgtggagcgggcgttggccaaacaggccatgcagcggctgaacagcggcaagatcaagggtcgcgccctgaaagtccgcattatctaa

SEQ ID NO: 77251 - protein, 494 aa, Pseudomonas putida GB-1
MPVVRNNTWNHRANGHEAGRLCGIFRFATQARLVTTESTAFATLPLSTAMLANLDALGYASMTPIQAQSLPVILKGQDLIAQAKTGSGKTAAFGIGLLNPINPRYFGCQALVLCPTRELADQVAKELRRLARAEDNIKILTLCGGVSLGPQIASLEHGAHIIVGTPGRIQQHLDKGTLVLDGLNTLVLDEADRMLDMGFFDAIASIIGKTPARRQTLLFSATYPAGIKQLAADFMRNPQQVKVESLHTDNQIEQRFIEIDPQHRLEAVTRVLGHYRPQSCVAFCFTKQQCEDVVAHLTAKGIVAQALHGDLEQRDRDQVLTMFANRSSSVLVATDVAARGLDIDGLDMVINVELARDAEIHVHRVGRTGRAGEKGIAVSLVAPAEGHRAQAIEDLQKSPLRWDSLDSLKNKGGEPLLPVMTTLCIAAGRKDKLRPGDILGALTGDAGIPGKQVGKIAIFDFQAFVAVERALAKQAMQRLNSGKIKGRALKVRII

SEQ ID NO: 77252 - DNA, 1383 bp, Vibrio cholerae O1 biovar eltor str. N16961
  CDS (1)..(1383): transl_table=11
ttgaacgccaactcttttgctgctttgaatctgaagcctgaacttcttgctaaccttgaaaccatggggtttgccactatgactccgattcaggcgcaatctcttcctgcgatccttaaaggtcaggatgtgattggccaaggcaaaacaggctccggtaaaaccgctgcgtttggtcttggggtactctccaacctcaatgtgaagcgctttcgtgtacaagccttggtgctgtgtccaacacgtgagttggccgatcaagtcgcgaccgatattcgtacgctagggcgtgctatccacaatatcaaagtgttgacgctgtgtggcggcatgccgatggggccgcagatcggatcccttgagcatggcgcgcatatcttggtcggaacgccgggacggattttggatcatttgagtaaagaccgtatcgatctcagtgagctcaataccttggtgttggatgaagcggatcgcatgctcgaaatgggcttccaagaagcgctggaggcgatcattgctgctgcgccagccgagcgtcaaaccttgctgtttagtgcaacttaccccgctagtattgagcagattgcgcaaagcgtgactcgcaatgcgctgatgattaaagttgaggcgacccacgatacttcaagcattcgtcaatacttctataaagtagaaggcagtgctgcgcgtgatgaggctctggaaacgttgcttttacaccatcaaccgacttcttcggtggtgttctgtaacactaaacgtgaagtacaaaatgttgccgatgccctgcatcaaagcggctttagcgtgattgaactgcatggtgatatggagcagcgtgagcgtgaccaagccttagtgcaatttgccaataagagtatttctattctggtcgcgaccgatgttgcggctcgtggtctggatgtcgataaccttgatgcagtgtttaactacgatctgtctcgcgatcctgaagtgcatgtacatcgcatcgggcgtactggtcgtgcgggaagtaaaggcttagcgtttagcttctttagtgacaacgagagctaccgtgtggcgcaaattgatgagtacatggatattgcgattgagccttcaaccttgccgcaacctgctgcaggcgctcgtccttacgcggcgaatatggtcaccattcagattgacggtggtaagaaagacaaggtgcgtcccggtgatattcttggcgcgctaaccagtgatggtgaactgactgcggagcatatcggcaagattaacctgttcccgatgcgtgcttatgtagccgtgcacaagaaaatcgccaccaaagcactgaataaaattgccaacggtaagatgaagggacgccagttccgtgctcgcttactcaaataa

SEQ ID NO: 77253 - protein, 460 aa, Vibrio cholerae O1 biovar eltor str. N16961
MNANSFAALNLKPELLANLETMGFATMTPIQAQSLPAILKGQDVIGQGKTGSGKTAAFGLGVLSNLNVKRFRVQALVLCPTRELADQVATDIRTLGRAIHNIKVLTLCGGMPMGPQIGSLEHGAHILVGTPGRILDHLSKDRIDLSELNTLVLDEADRMLEMGFQEALEAIIAAAPAERQTLLFSATYPASIEQIAQSVTRNALMIKVEATHDTSSIRQYFYKVEGSAARDEALETLLLHHQPTSSVVFCNTKREVQNVADALHQSGFSVIELHGDMEQRERDQALVQFANKSISILVATDVAARGLDVDNLDAVFNYDLSRDPEVHVHRIGRTGRAGSKGLAFSFFSDNESYRVAQIDEYMDIAIEPSTLPQPAAGARPYAANMVTIQIDGGKKDKVRPGDILGALTSDGELTAEHIGKINLFPMRAYVAVHKKIATKALNKIANGKMKGRQFRARLLK

SEQ ID NO: 77254 - DNA, 1374 bp, Salmonella typhimurium LT2
  CDS (1)..(1374): transl_table=11
gtgaccactttttcaaccctgaatgttttgcccgccgcccagctcaataaccttactgagctgggctatcttgagatgacgcctgttcaggccgcagcattacccgtcattctggcgggtaatgatgtgcgtgtgcaggccaggaccggtagcggcaaaacggcggcgtttggtcttgggctcttgcatcgaattgacgtcactctgttccagacacaggcattagtgctgtgcccgacgcgggagctggcggatcaggttgccggagagttacgtcgcctggcccgttttctgccaaataccaaaattctgaccttgtgtggcgggcaaccctttggcgcacagcgcgactcgcttcagcacgctccgcatatcattgtcgcgacgccggggcgcctgctggatcatttacaaaaagaaaccgtatcgctggatgcgctgcatattctggtaatggatgaagcagaccgaatgctggacatgggattcagtgacgccattgatgaggtgatccgctttgcgcctgcgacgcgccagacgttattgttttcagcaacctggcctgaggccatcgcggcgattagcggtcgtgtacagcagcagccaatacgtattgaaatcgatacggtagatgcgctaccggctatcgaacaacagttcttcgaaacgtctgcgcatgaaaaaatttcgctgctacaaacgttgcttagccagcatcagccagcgtcctgcgtggtattttgcaataccaaaaaagattgtcaggccgtttgtgatgcgcttaatgcggtaggacaaagcgcgttggcgctccacggcgatctggaacaacgcgaccgcgaccagacgttggtgcgttttgcaaatggcagcgcgcgcattctggttgccaccgacgttgccgcgcgagggttagacattaaatcgctcgaactggtggttaactatgaactggcctgggacccggaggtgcatgtccatcgtattggccgtacggcgcgcgcgggaagcagcggcctggcgatcagtttctgcgcgccggaagaggcgcagcgggcgaatattctttcagaaatgctgcaactcaagctgaactggctgaatgcgcccgcccggcagccgttactccctctggccgcagagatggctaccctatgcattgacggcggcaaaaaagcgaaaatgcgtccgggagatattttgggcgcgctgaccggcgatattggattagacggggcggatattggcaaaattaacgtgcatccaatgcacgtttacgtcgccgtacgtcaagcagtagcgcaaaaagcctggaagcagttgcaaaacgggaagatcaaaggcaagtcatgccgggtacggctattaaaatga

SEQ ID NO: 77255 - protein, 457 aa, Salmonella typhimurium LT2
MTTFSTLNVLPAAQLNNLTELGYLEMTPVQAAALPVILAGNDVRVQARTGSGKTAAFGLGLLHRIDVTLFQTQALVLCPTRELADQVAGELRRLARFLPNTKILTLCGGQPFGAQRDSLQHAPHIIVATPGRLLDHLQKETVSLDALHILVMDEADRMLDMGFSDAIDEVIRFAPATRQTLLFSATWPEAIAAISGRVQQQPIRIEIDTVDALPAIEQQFFETSAHEKISLLQTLLSQHQPASCVVFCNTKKDCQAVCDALNAVGQSALALHGDLEQRDRDQTLVRFANGSARILVATDVAARGLDIKSLELVVNYELAWDPEVHVHRIGRTARAGSSGLAISFCAPEEAQRANILSEMLQLKLNWLNAPARQPLLPLAAEMATLCIDGGKKAKMRPGDILGALTGDIGLDGADIGKINVHPMHVYVAVRQAVAQKAWKQLQNGKIKGKSCRVRLLK

SEQ ID NO: 77256 - DNA, 1398 bp, Ralstonia solanacearum GMI1000
  CDS (1)..(1398): transl_table=11
atgaccatcgaaccgactgccccacccttcagtacccttgcgctcgcccccgccgtactcgcgaatctcgcgcagcttggttacaccgacatgacgccgatccaagccgcgagcctgccgatcgcgctcgcgggtcacgacctgatcgcgcaggcgaagaccggcagcggcaaaaccgcagcgttctcgctcgcgctgctcgcgcggctcgacacgcgccgcttcgacgtgcaggcgatggtgctctgcccgacgcgcgagcttgccgatcaggtcgcgcaggaaatccgccgcctcgcgcgcgccgaggaaaacgtgaaagtgctgacgctctgcggcggcacgccaatgcgtccgcaggcggcaagcctcgagcacggcgcgcatgtcgtcgtcggtacgccggggcgcatcatggaccatctcgaacgcggcaatctcgcgctcggcgcgctgaagacgctcgtgctcgacgaagcggaccggatgctcgacatggggttcttcgacgacatcgcgacggtcgtgcgccagtgtccgcctgaacggcagacgctgctgttctcggcgacctacccagacgggatcgcaaagctgagccggcagatcctgcggaatccgaaggaggtgaaactcgaagagcgccacgacgacagcaagattcgccagcgcttctacgaggtgaccgatgacgagcgactgcatgcggtcgggctgctgctgaagcactatcggccggtcagcacactcgcgttctgcaacacgaagcagcaatgccgcaacctgctcgacgtgctgcgtgcgcaaggcttccatgcgctcgcgctgcatggcgagctcgagcagcgcgagcgcgatcaggtattgatccagtttgcgaaccggagctgctcggtgctcgtcgcaaccgacgttgccgcacgcgggctcgacatcgcgcagctcgaagcagtgatcaacgttgatgtgacgcccgatcccgaagtgcacgtgcatcggatcggccgcacgggccgtgccgatcaggacggttgggcgctgagcctcgcgagcatggacgagatggggcgtgtcggcggcatcgagcaggcgctcgggcgcgaggtcgaatggcatcggctcgccgaactcgacgccagcagcgacgcaccgctgctaccgccgatggagacgctacagattctcggcggacgcaaggacaagatccgccccggcgatgtgctcggcgcgctgaccggcgacgcgggctttcgcggcgaccagatcggcaagatcaacgcgaccgaattctcgacctacgtcgcggtcgagcgcggcatcgcgcgcgacgcgctgcgcaagctcaacgcaggcaaggtgaagggcaagaaggtcagggttcggttgatggacgaatga

SEQ ID NO: 77257 - protein, 465 aa, Ralstonia solanacearum GMI1000
MTIEPTAPPFSTLALAPAVLANLAQLGYTDMTPIQAASLPIALAGHDLIAQAKTGSGKTAAFSLALLARLDTRRFDVQAMVLCPTRELADQVAQEIRRLARAEENVKVLTLCGGTPMRPQAASLEHGAHVVVGTPGRIMDHLERGNLALGALKTLVLDEADRMLDMGFFDDIATVVRQCPPERQTLLFSATYPDGIAKLSRQILRNPKEVKLEERHDDSKIRQRFYEVTDDERLHAVGLLLKHYRPVSTLAFCNTKQQCRNLLDVLRAQGFHALALHGELEQRERDQVLIQFANRSCSVLVATDVAARGLDIAQLEAVINVDVTPDPEVHVHRIGRTGRADQDGWALSLASMDEMGRVGGIEQALGREVEWHRLAELDASSDAPLLPPMETLQILGGRKDKIRPGDVLGALTGDAGFRGDQIGKINATEFSTYVAVERGIARDALRKLNAGKVKGKKVRVRLMDE

SEQ ID NO: 77258 - DNA, 1377 bp, Xanthomonas campestris pv. campestris str. ATCC 33913
  CDS (1)..(1377): transl_table=11
atgaacgaattctccgcgctgccgctctcgccagccttggcccccggcatcgatgccctgggctacaccaccctcacgccgatccaggcgcagagcctgccgccgatcctccaggggctggatgtgattgcccaagcgcccaccggcagcggcaagaccgccgcgttcgggctgggcctgctgcaaaagctcgacccggcactgacccgtgcgcaagcgctcgtgctgtgccccacgcgcgaactggcagaccaggtcggcaagcaactgcgcaagctggccaccggcattcccaacatgaagttgctggtgctcaccggcggcatgccgcttggtccgcagctggcatcgctcgaagcgcacgacccgcaggtcgtggtcggcacgcccggccgcatccaggaactggcgcgcaaacgcgccctgcatctgggcggcgtgcgcacgctggtgctggacgaggccgaccgcatgctcgacatgggctttgaagaacccatccgcgagatcgccagccgctgcgacaaacaccgccagagcctgctgttctcggcgaccttccccgacatcatccgcacgctggcgcgcgagctgttgaaggacccggtggaaatcaccgtggaaggtgcggacaacgcaccggagatcgaccagcagttcttcgaagtggaccccacttatcggcagaaggcggtggccgggctgctgctgcgcttcaatcccgaatccagcgtggtgttctgcaatacccgcaaggaagtggacgaagtcgccggctcgctgcaggagttcgggttctccgcgctggcattgcatggcgacatggagcaacgcgaccgcgacgaggtgctggtgcgcttcgtcaatcgcagctgcaacgtactggttgccagtgacgtggccgcgcgcggcctggatgtggaagacctcgcggcagtggtgaattacgagcttcccaccgacaccgaaacctatcgccaccgcatcggccggactgcgcgcgccggcaagcacggcttggcactcagcctggtggcgccgcgcgaaagcgctcgtgcgcaggcgctggaggccgagcacggccagccgctcaagtggtcacgcgcaccgctggccaccgcacgcccggcgcaattgccgctggccgcgatgaccacgctgcgcatcgacggcggcaagaccgacaaactgcgtgccggcgacattctgggcgcattgaccggcgaagcaggcttgtcgggtgcggcgatcggcaagatcgccatctaccccacccgctcgtacgtggcgattgcgcgggcgcaggtcgctcgtgcactgacccacttgcaggccggcaagatcaagggccgccgcttccgggtgaccaagctctag

SEQ ID NO: 77259 - protein, 458 aa, Xanthomonas campestris pv. campestris str. ATCC 33913
MNEFSALPLSPALAPGIDALGYTTLTPIQAQSLPPILQGLDVIAQAPTGSGKTAAFGLGLLQKLDPALTRAQALVLCPTRELADQVGKQLRKLATGIPNMKLLVLTGGMPLGPQLASLEAHDPQVVVGTPGRIQELARKRALHLGGVRTLVLDEADRMLDMGFEEPIREIASRCDKHRQSLLFSATFPDIIRTLARELLKDPVEITVEGADNAPEIDQQFFEVDPTYRQKAVAGLLLRFNPESSVVFCNTRKEVDEVAGSLQEFGFSALALHGDMEQRDRDEVLVRFVNRSCNVLVASDVAARGLDVEDLAAVVNYELPTDTETYRHRIGRTARAGKHGLALSLVAPRESARAQALEAEHGQPLKWSRAPLATARPAQLPLAAMTTLRIDGGKTDKLRAGDILGALTGEAGLSGAAIGKIAIYPTRSYVAIARAQVARALTHLQAGKIKGRRFRVTKL

SEQ ID NO: 77260 - DNA, 1383 bp, Yersinia pestis KIM
  CDS (1)..(1383): transl_table=11
gtgagcacaacttccttttcttccctgacactgcctgctgagcagttgtccaatcttaatgaacttggctataccgagatgaccccggtacaagctgcggtgttacccgcaatcctcaacgggcaggatgtccgggcgaaggccaaaaccggcagcggtaaaacagccgcatttggcattggtttgctggacaaaatagcggtaggggaatttgttacccaagcgctggtattgtgcccaacccgagaattagcagaccaggtcagtaaagagctgcgccgtttagcacggtttacacaaaatattaaaattctgaccctgtgtggcggccaaccgatgggccaccaattagattctctggtccatgcaccgcacattgtcgtgggtacgccagggcgtattcaggaacatctgcgcaagaaaacgctggtacttgatgagttgaaaacgctggtgttggatgaagctgatcgcatgttggatatgggtttttccgatgccattgatgacgtgattgcgtatacccctccacagcggcaaaccttgttgttctctgccacctacccatcaggtattgagcagatcagtgcacgagttcagcgccaaccattgaatgttgaagtgggtgataccgatgaagagcccgctattgaacaggtgttttttgaaacgactcgtgagaaacggctgccactgctgatctcagttctgagccattaccagccggcctcttgtgtggtgttctgtaacaccaaaaaagattgtcagagcgtttatgagtcactggaatcacgtggtatcagtgtcttggctttgcacggggatttagaacagcgtgatcgtgatcaggttctggtgcgttttgccaatcgtagctgccgtgtgttggtggcgaccgatgttgctgctcgtggtttagatatcaaggatctggagctggtcattaactttgaattggcgtttgatcccgaaattcacatacaccgcattggccgtaccgggcgcgcagggatgagcggcctggccgttagcctatgtacgccacaggaaatggtacgtgcccataccatcgaagattatctgcaaataaaattgaaatggacacctgcggaacaggttagccgtagcaccaacatcatgctggaaccagaaatggtgacgttatgcattgacggggggcgcaaagctaaaattcgccctggtgacattctcggggcattaaccggtgatgcagggttaaccgccgcagatgtgggtaagattgatatgttcccggttcatgcctatgtggctatccgtaaagccagtgccaagcgtgcgttgcaacaattgcagcaaggcaaaatcaaaggtaaaaactgtaaagcccgtctattaaaataa

SEQ ID NO: 77261 - protein, 460 aa, Yersinia pestis KIM
MSTTSFSSLTLPAEQLSNLNELGYTEMTPVQAAVLPAILNGQDVRAKAKTGSGKTAAFGIGLLDKIAVGEFVTQALVLCPTRELADQVSKELRRLARFTQNIKILTLCGGQPMGHQLDSLVHAPHIVVGTPGRIQEHLRKKTLVLDELKTLVLDEADRMLDMGFSDAIDDVIAYTPPQRQTLLFSATYPSGIEQISARVQRQPLNVEVGDTDEEPAIEQVFFETTREKRLPLLISVLSHYQPASCVVFCNTKKDCQSVYESLESRGISVLALHGDLEQRDRDQVLVRFANRSCRVLVATDVAARGLDIKDLELVINFELAFDPEIHIHRIGRTGRAGMSGLAVSLCTPQEMVRAHTIEDYLQIKLKWTPAEQVSRSTNIMLEPEMVTLCIDGGRKAKIRPGDILGALTGDAGLTAADVGKIDMFPVHAYVAIRKASAKRALQQLQQGKIKGKNCKARLLK

SEQ ID NO: 77262 - DNA, 1368 bp, Shigella flexneri 2a str. 301
  CDS (1)..(1368): transl_table=11
gtgaccgctttttctaccctgaatgttttgcctcccgcccaactcacgaaccttaatgagttgggttatttaaccatgacgccggtgcaggccgccgcgcttccggcgatccttgccggaaaagatgttcgcgtgcaggcgaaaaccggcagcggcaaaacggcggcttttggcctcggcttgttacagcaaattgatgcgtcgctatttcaaacccaggctttagtgctgtgtcctacgcgtgaactggcggatcaggtggcaggtgaattgcgtcggctggcgcgttttctgccaaataccaaaattttgacgttgtgcggtggtcaaccgttcggtatgcagcgtgattcgctgcaacatgcgccgcatattatcgtggcaacgccgggtcgtttgctggatcacttgcaaaaaggcacggtatcactggatgcgctgaatactttggtgatggatgaggccgaccgcatgctggatatgggatttagcgatgccattgatgatgtcatccgttttgcgcctgcatctcgacagacgcttctgttttcggcaacctggccggaagccatcgccgcaatcagcggacgagtgcaacgcgatcctttggcgattgaaattgactcaacagatgctttgccacccattgaacaacaattttatgagacatccagtaaaggcaaaattcctctgttgcaacggttattaagcttgcatcagccatcctcttgtgtggtgttttgcaataccaaaaaagattgccaggctgtctgcgacgcgctgaatgaagtagagcaaagtgcattgtcgttacacggcgatctggagcaacgcgatcagaccctggtacgttttgctaacggtagcgcccgtgtactggttgcgactgatgttgctgcgcgtggtctggatattaaatcgcttgagctggtggtgaactttgagctggcgtgggaccctgaagttcatgtacatcgcatcggtcgtacagctcgtgcaggaaatagcggtctggcgatcagtttctgtgctccggaagaagcacagcgggccaatatcatttctgacatgttgcagataaaacttaactggcaaacgccgccagctaatagttccattgtgacgctggaagcagaaatggcaacgttgtgtatcgatggcgggaaaaaagccaaaatgcgcccgggtgatgtattaggtgcactgacaggagatatcgggcttgatggcgcagatattggcaaaatcgccgtgcatccggcgcatgtctatgtcgcggtccgtcaggctgttgctcataaagcatggaaacagttacagggcgggaagattaaaggaaaaacgtgccgggtgcggttattaaaataa

SEQ ID NO: 77263 - protein, 455 aa, Shigella flexneri 2a str. 301
MTAFSTLNVLPPAQLTNLNELGYLTMTPVQAAALPAILAGKDVRVQAKTGSGKTAAFGLGLLQQIDASLFQTQALVLCPTRELADQVAGELRRLARFLPNTKILTLCGGQPFGMQRDSLQHAPHIIVATPGRLLDHLQKGTVSLDALNTLVMDEADRMLDMGFSDAIDDVIRFAPASRQTLLFSATWPEAIAAISGRVQRDPLAIEIDSTDALPPIEQQFYETSSKGKIPLLQRLLSLHQPSSCVVFCNTKKDCQAVCDALNEVEQSALSLHGDLEQRDQTLVRFANGSARVLVATDVAARGLDIKSLELVVNFELAWDPEVHVHRIGRTARAGNSGLAISFCAPEEAQRANIISDMLQIKLNWQTPPANSSIVTLEAEMATLCIDGGKKAKMRPGDVLGALTGDIGLDGADIGKIAVHPAHVYVAVRQAVAHKAWKQLQGGKIKGKTCRVRLLK

SEQ ID NO: 77264 - DNA, 1377 bp, Shewanella oneidensis MR-1
  CDS (1)..(1377): transl_table=11
atggctttctcgacccttaagctaaaaaccgaactgcttgagaacctttcttctatgggctacaacgagatgacgcccattcaggcgcaaagcttgccagccattttagcgggcgaggatgtgataggtcagggtaaaacggggtcaggtaaaacggcggcctttggtctaggtttactaaataaattagacgttaagcgttttcgcattcaaaccttagtactgtgtccaacccgcgagctggccgaccaagtggcgcaggagatccgtactctggcccgcggtatacacaatgtgaaagtattaaccctgtgtggtggtgtgcccatggggccgcaaattggctctttggagcatggtgcccatattattgtgggaaccccagggcggatcgtcgatcacttagaccgcaatcgtttagatttaagtaatctgaatatgttagtgcttgatgaagctgaccgcatgctcgaaatgggcttccaacctcagctcgatgccattattgaacagtcaccacgagagcgccaaacgctgctgtttagtgcgacattccctgagcaaattcaatcgattgctaaacaaatcatgtataaccctgtgatggttaaggccgcggttacccatgaaaaaaataccatcgaacagcatttttatcagttagatgacgataagtcgcgcatgcaagcgctgcaattattactgttagaacataagccagaaagcgccgtggtgttttgtaataccaagcgtgaaacgcaaaaagtggccgacgaacttgagggtttaggctttagtgttttagccttgcacggcgatttagagcagcgcgatagggacgaaaccctgttgcaatttgccaataagagtgcctgtgtattagtggctaccgacgtggccgcccgtggtttagatatcgatgcactagatgcggtatttaactaccatgtggcctacgataccgaagttcacattcaccgtatcggccgtacaggtcgtgcgggcagtaaaggcgctgcttataccttttacaacgatcaagacggttacaagattgccttgctagaagagtacttagatcgagaaattaccagtgaatcactgccatcattaagcttgcttggcagtgcgcccaatgcgccaaccatgatcactctgcaaatcgatggcggtaaaaaagagaaacttcgccctggcgatattcttggcgccctgacgggtgataatggcattgaaggtacgcaggtgggcaaaattcttgtgactgattatcgcgcttatgtggcggtaaaccgtaaagtggctaaaaaggcactgagcaagatcaccagcggccgcattaagggtaagtcttaccgcgcatggttgatgaaataa

SEQ ID NO: 77265 - protein, 458 aa, Shewanella oneidensis MR-1
MAFSTLKLKTELLENLSSMGYNEMTPIQAQSLPAILAGEDVIGQGKTGSGKTAAFGLGLLNKLDVKRFRIQTLVLCPTRELADQVAQEIRTLARGIHNVKVLTLCGGVPMGPQIGSLEHGAHIIVGTPGRIVDHLDRNRLDLSNLNMLVLDEADRMLEMGFQPQLDAIIEQSPRERQTLLFSATFPEQIQSIAKQIMYNPVMVKAAVTHEKNTIEQHFYQLDDDKSRMQALQLLLLEHKPESAVVFCNTKRETQKVADELEGLGFSVLALHGDLEQRDRDETLLQFANKSACVLVATDVAARGLDIDALDAVFNYHVAYDTEVHIHRIGRTGRAGSKGAAYTFYNDQDGYKIALLEEYLDREITSESLPSLSLLGSAPNAPTMITLQIDGGKKEKLRPGDILGALTGDNGIEGTQVGKILVTDYRAYVAVNRKVAKKALSKITSGRIKGKSYRAWLMK

SEQ ID NO: 77266 - DNA, 1389 bp, Bordetella pertussis Tohama I
  CDS (1)..(1389): transl_table=11
gtgaccaacacgtctttttcctccctgcctcttctgcccgccttgctcgacaacctgcaaggcctgggcttcgaacagatgacgccgatccaggcgcaaagcctgccgctcatcctggaaggccgcgacctgatcgcgcaagccaagaccggcagcggcaagaccgccgcattcggcctgggcgtgctgcagaacctggacgtcaaccgcctggcgccgcaggcgctggtgctctgtcccacccgcgaactggccgaccaggtggcccaggagctgcgccggctggcccgcctgattcccaacgtcaaggtgctgacgctgtgcggcggcgccgccgcgcgtcctcaggccgagtcgctggcgcgcggcacgcatctggtggtgggcacgcccggccgcatccaggaccacctggcgcgcggcagcctggacttgtccacgctgaacacgctggtgctggacgaggccgaccgcatggtggacatggggttctatgacgacatcgccgccattgcctcgcattgcccggccaggcggcagaccctgctgttctcggccacctaccccgacaacatccgcaagctgagcgcccgcttcctgcgcaatccggccgaaatcaaggtagaggcccagcacgacgccagccgcatcgagcagctcttcttcgagatcgacgaaggccagaggctggatgccgtggcgacgctgctggcccacttccgcccggcgtccacgctggcgttctgcaacaccaagatccgcagccacgacctggtcgaacgcctgcgcgcccagggcatcagcgcccaggcgctcaacggcgacctggagcagcgcgagcgcgatgaaatcctgatccagttcgccaaccagagctgcgccgtgctggtcgccaccgacgtggccgcccgcgggctggacatccagaacctgggcgcggtcatcaacgtggacgtgaccaaggacaccgaggtccacgtgcaccgcatcggccgcagcggccgcggcgaccagaaagggctggcgctgagcctgtgctcgcccgaggaaatgcgctgggccaacctcatcgagcaataccagggcgccccgctgaaatgggccgacctcggctcgctgcggcccaagtccgaccgccccttgcgcgcgcccatgatcaccctgtgcatccagggcggcaagaaggacaagctgcgtcccggcgacctgctgggcgcgctgaccggcgacggcgggctggcgttcgagcaggtcggcaagatcaacatcaccgaattcaacgcctatgtggcgctggaccgccaggtcgccaagcaggccttcgcgcgcctgtccaacagcaatatcaagggacggcggttccgcatgcgcttcctggaagagttctga

SEQ ID NO: 77267 - protein, 462 aa, Bordetella pertussis Tohama I
MTNTSFSSLPLLPALLDNLQGLGFEQMTPIQAQSLPLILEGRDLIAQAKTGSGKTAAFGLGVLQNLDVNRLAPQALVLCPTRELADQVAQELRRLARLIPNVKVLTLCGGAAARPQAESLARGTHLVVGTPGRIQDHLARGSLDLSTLNTLVLDEADRMVDMGFYDDIAAIASHCPARRQTLLFSATYPDNIRKLSARFLRNPAEIKVEAQHDASRIEQLFFEIDEGQRLDAVATLLAHFRPASTLAFCNTKIRSHDLVERLRAQGISAQALNGDLEQRERDEILIQFANQSCAVLVATDVAARGLDIQNLGAVINVDVTKDTEVHVHRIGRSGRGDQKGLALSLCSPEEMRWANLIEQYQGAPLKWADLGSLRPKSDRPLRAPMITLCIQGGKKDKLRPGDLLGALTGDGGLAFEQVGKINITEFNAYVALDRQVAKQAFARLSNSNIKGRRFRMRFLEEF

SEQ ID NO: 77268 - DNA, 1383 bp, Chromobacterium violaceum ATCC 12472; identical to SEQ ID NO: 65356
  CDS (1)..(1383): transl_table=11

SEQ ID NO: 77269 - protein, 460 aa, Chromobacterium violaceum ATCC 12472; identical to SEQ ID NO: 65357

SEQ ID NO: 77270 - DNA, 1383 bp, Geobacter sulfurreducens PCA; identical to SEQ ID NO: 65374
  CDS (1)..(1383): transl_table=11

SEQ ID NO: 77271 - protein, 460 aa, Geobacter sulfurreducens PCA; identical to SEQ ID NO: 65375

SEQ ID NO: 77272 - DNA, 1518 bp, Bdellovibrio bacteriovorus HD100; identical to SEQ ID NO: 65380
  CDS (1)..(1518): transl_table=11

SEQ ID NO: 77273 - protein, 505 aa, Bdellovibrio bacteriovorus HD100; identical to SEQ ID NO: 65381

SEQ ID NO: 77274 - DNA, 1521 bp, Herminiimonas arsenicoxydans
  CDS (1)..(1521): transl_table=11
atgcggagtgctgtctttaatcatgaaagatgcattctctttgcaccggttttccgcatgtttttcatgcgcttgcccatgcctgttagactgcgtgtccatttccgcatcacgcaagctcccaacatgaatccaagttccttcgccgccctcgccctttcccctcccatgctgagtaatctcgacgccctcggctatcgggagatgacgtccatacaggcgcaaagcctgccggtgatattgcaattacgcgatctgattgcgcaggcaaaaaccggcagcggcaagacggcggctttcggtattggcatgctgcagaaattgaacccgacctggttcgccattcagggactggtgatttgcccgacacgtgaactggccgatcaggtgtcgaatgagttgcgccgactggcgcgctttgcagacaacatcaagatattgaccctgtgcggcggcgcaccgatgcggccgcaaatcgcctcgctggaacatggcgcgcacatcgtggtcggtacgccgggacgtctgcgcgatcacatcagccgcaatacgatcaatctgtccaccgtacaaacgctggtgctggatgaagccgaccgcatggtcgatatgggtttttatgaggagatcgccggcatcgtcagcgcctgccccgagcgtcgtcagaccctgctgttttctgcgacctacccggacgatatccgcaaggccagtgctgaattcttgcgcgatccggttgaagtcaaggttgaagcacagcacgacgacagccagatcgagcagcggttttatgaagtcggctacgacgaccgcaacgccgccgtcgccacgctgctgaaacattaccgccccgtatcgacgctggcattctgcaataccaagattcattgccgcgaactggccgccgaattgcgtgcgcaaggtttcagcgcactggctttatatggcgagttggagcagcgcgaacgcgatgaaattctcgtattgttcgccaatcaaagctgttcggtgctggtggcgactgacgttgccgcacgcggactggacattcaatcgctgggggcggtgatcaacgtggatgtatcgaaagataccgaagtgcatatccatcgcatcggtcgtaccggtcgcggccaggacaagggattggcgctcagcctgtgcgcaccgaacgaaaagaaatgggtcaagctgatcgaggaataccagcagaagcctgcgcaatggttcgacctgaaatctgccgaaccggcggaaggcggcgacttgcacgcacctatggtgacgctgtgcatcatgggcggcaagaaggataaattgcgcccgggcgatttgctcggcgccctgaccggcgatgtcggcttgacgaaagatcaggtcggcaagatcaatgtgtttgaattcatgacctatgtggcgctggatagacgcgccgcagacaaagcctatgcaagtttaagcaatggcaatatcaaggggcgcaacttcaagatgcgctttattgaaaccgataacggatga

SEQ ID NO: 77275 - protein, 506 aa, Herminiimonas arsenicoxydans
MRSAVFNHERCILFAPVFRMFFMRLPMPVRLRVHFRITQAPNMNPSSFAALALSPPMLSNLDALGYREMTSIQAQSLPVILQLRDLIAQAKTGSGKTAAFGIGMLQKLNPTWFAIQGLVICPTRELADQVSNELRRLARFADNIKILTLCGGAPMRPQIASLEHGAHIVVGTPGRLRDHISRNTINLSTVQTLVLDEADRMVDMGFYEEIAGIVSACPERRQTLLFSATYPDDIRKASAEFLRDPVEVKVEAQHDDSQIEQRFYEVGYDDRNAAVATLLKHYRPVSTLAFCNTKIHCRELAAELRAQGFSALALYGELEQRERDEILVLFANQSCSVLVATDVAARGLDIQSLGAVINVDVSKDTEVHIHRIGRTGRGQDKGLALSLCAPNEKKWVKLIEEYQQKPAQWFDLKSAEPAEGGDLHAPMVTLCIMGGKKDKLRPGDLLGALTGDVGLTKDQVGKINVFEFMTYVALDRRAADKAYASLSNGNIKGRNFKMRFIETDNG

SEQ ID NO: 77276 - DNA, 1383 bp, Erwinia carotovora subsp. atroseptica SCRI1043
  CDS (1)..(1383): transl_table=11
gtgagtacaacctctttttcttccctcgcgctgccggcagagcagttatccaatcttaatgaactgggctataccgaaatgacgccagtccaggcggcgacgctgccagccgttctgagcggcgcagacgtgcgggccaaggcgaaaaccggtagtggcaaaacggcggcatttgggattgggttgctagatcgtattgtcgtcagcgattttaccacgcaggcgctggtgctatgtccgacgcgtgaactggccgatcaggtcagcaaagaactgcgccgtctggcgcgttttgcgcaaaacattaagattttgacactgtgcggcggtcagccgatggggcagcagctcgattcactggtccacgcaccgcacattgttgtcggtacgccggggcgtattcaggatcatttacgcaagcagtctctggctttagatagcctgaaagtgttggtgctggatgaagcggatcgcatgctggacatgggctttactgacgccattgatgatgtgatttcctatacgccgtccgatcgtcaaacactgctgttttccgctacgtacccgcaagagatcgaacagatcagcgcacgggttcagcgtcagccgcaacgtttcgaaatagcagatgacgtggaagagtcggccattgaacaacgtttctatgagacaacgaaagatcagcgcctgccgctgttgattgccattctgagccattatcagccagcatcctgcgtggtgttttgcaacacgaaacgtgattgccagagcgtatttgaggcactggagatgcgcgggattagcgtatcggcattgcatggcgatttggaacagcgcgaccgcgatcaggttctggtgcgtttctctaaccgtagctgtcgcgtgttggtagcaacggatgttgcggctcgcggtcttgatatcaaagagttggcgctggtggtgaattttgagctggctttcgatcctgaagttcacgttcatcgcattggcagaacaggccgcgcggggacgcagggtctggctgtgagcctgtgtacgccacaggaaatgaaccgcgctaacctgattgaagactatatcggtatgcgaattaaatggacatcggcggatgagattagccgcagtggtgatgttgcgctcgaacctgagatgatgacgctgtgcattgatggtggcagaaaggccaaaatccgtcccggcgatattcttggcgcgttaactggcgatgtaggattaacggcagcggaagtcgggaaaattgatatgttccctctacatgcttatgtcgcaatccgtaaagacagtgctaaacgtgcgctgcaacagctccagaaaggcaaaatcaaaggaaaaagctgtaaggccagattgttaaagtaa

SEQ ID NO: 77277 - protein, 460 aa, Erwinia carotovora subsp. atroseptica SCRI1043
MSTTSFSSLALPAEQLSNLNELGYTEMTPVQAATLPAVLSGADVRAKAKTGSGKTAAFGIGLLDRIVVSDFTTQALVLCPTRELADQVSKELRRLARFAQNIKILTLCGGQPMGQQLDSLVHAPHIVVGTPGRIQDHLRKQSLALDSLKVLVLDEADRMLDMGFTDAIDDVISYTPSDRQTLLFSATYPQEIEQISARVQRQPQRFEIADDVEESAIEQRFYETTKDQRLPLLIAILSHYQPASCVVFCNTKRDCQSVFEALEMRGISVSALHGDLEQRDRDQVLVRFSNRSCRVLVATDVAARGLDIKELALVVNFELAFDPEVHVHRIGRTGRAGTQGLAVSLCTPQEMNRANLIEDYIGMRIKWTSADEISRSGDVALEPEMMTLCIDGGRKAKIRPGDILGALTGDVGLTAAEVGKIDMFPLHAYVAIRKDSAKRALQQLQKGKIKGKSCKARLLK

SEQ ID NO: 77278 - DNA, 1410 bp, Desulfotalea psychrophila LSv54
  CDS (1)..(1410): transl_table=11
atgagcgcatttactacactggccttaagcaaagcaatgaccgataatctagagatcatgggttaccatgaaatgactcctatccaggcagagagtctgccccatgtgctggagggcgaggatctgctagcacaggccaagacaggatcaggcaaaacagcagccttcggtatcggcctcctccacaatctggatgtaagcctctttcgagtccaaactctggtgatgtgcccaacccgtgagctggcggagcaggtagcaggcgagctacgtcgtattgcccgcttcaagcacaatatcaaaattaccaccctctgtggcggcatgcccatcaagcctcaactggcctctctggaacatcaggcccatattgtggtcggcaccccgggccgtattgaacagcatttaaagcgagaaagtctcaatcttgaccacgtcaccaccctggtcctcgatgaagcggatcgcatgctggacatcggctttgccgatacccttgatgccattataagctatctcccccggcgtcgtcagaccctactcttctctgccaccttccccgatgagatcctccgtctgagtgaacaatttcagtataaggcccaaagggtcatagtcgacgtagagcacgaggaaaactcaattcagcaagagttctttgagtgcaaatgggataaaaaagcagctattgtcagcagaattttggccactcataagcctgagtccaccctgatcttctgtaatactaaagcgaactgcagggatatagccgaggccttagaggccaaaggattttcggccctggccattcacggagaccttgaccagagagaacggacagaagttctggtacgtttctccaacggcagtagtcctatcatggtggccaccgatgtggcagcccgaggacttgatatcaatgggctcagcgcagtaatcaacgtcgatcttccctttgagtccgaggtctatatccatcgtatcgggcggacgggtcgagccgggaaagagggtctggccttttcccttatggagcctggcgaagagttcaggttggaggagattaatcgtctgatgggcactgactttaagatttccgatgtcgaggcgcttgctccggcaggcaaaggcgtaacagccctgccaccgatggtgaccctctctatcaacggtggacgaaagaccaagctcaggcccggagatattttgggagccctgactaaagatgcgggcattgccggaagcaaggtgggcaagatcaactgttttgatttttactcctatgtcgccattgaacgttccgtagcagacgaggccgaaagggcactttccaccaaaaagatcaagggacgacgctttattatctatcgtcatgagggggagggagtcaaatcctcctttgagtattaa

SEQ ID NO: 77279 - protein, 469 aa, Desulfotalea psychrophila LSv54
MSAFTTLALSKAMTDNLEIMGYHEMTPIQAESLPHVLEGEDLLAQAKTGSGKTAAFGIGLLHNLDVSLFRVQTLVMCPTRELAEQVAGELRRIARFKHNIKITTLCGGMPIKPQLASLEHQAHIVVGTPGRIEQHLKRESLNLDHVTTLVLDEADRMLDIGFADTLDAIISYLPRRRQTLLFSATFPDEILRLSEQFQYKAQRVIVDVEHEENSIQQEFFECKWDKKAAIVSRILATHKPESTLIFCNTKANCRDIAEALEAKGFSALAIHGDLDQRERTEVLVRFSNGSSPIMVATDVAARGLDINGLSAVINVDLPFESEVYIHRIGRTGRAGKEGLAFSLMEPGEEFRLEEINRLMGTDFKISDVEALAPAGKGVTALPPMVTLSINGGRKTKLRPGDILGALTKDAGIAGSKVGKINCFDFYSYVAIERSVADEAERALSTKKIKGRRFIIYRHEGEGVKSSFEY

SEQ ID NO: 77280 - DNA, 1383 bp, Yersinia pseudotuberculosis IP 32953; identical to SEQ ID NO: 65452
  CDS (1)..(1383): transl_table=11

SEQ ID NO: 77281 - protein, 460 aa, Yersinia pseudotuberculosis IP 32953; identical to SEQ ID NO: 65453

SEQ ID NO: 77282 - DNA, 1407 bp, Legionella pneumophila subsp. pneumophila str. Philadelphia 1; identical to SEQ ID NO: 65458
  CDS (1)..(1407): transl_table=11

SEQ ID NO: 77283 - protein, 468 aa, Legionella pneumophila subsp. pneumophila str. Philadelphia 1; identical to SEQ ID NO: 65459

SEQ ID NO: 77284 - DNA, 1398 bp, Burkholderia mallei ATCC 23344
  CDS (1)..(1398): transl_table=11
atgacctacccccccaccgccacgccgttcagcgcgctggcgctgacgcccgcgacgctcgcgaatctcgcgcagctcggctacaccgacatgacgccgatccaggccgcgagcctgccgatcgcgctcgccggccacgacctgatcgcgcaggcgaaaaccggcagcggcaagacggccgcgttctcgctcgcgctgctcgcacgcctcgacgcgcgccgcttcgacgtgcaggcgctggtgctgtgcccgacgcgcgaactggccgaccaggtcgcgcaggaaatccgccgcctcgcgcgcgcggaggagaacgtcaaggtgctgacgctgtgcggcggcacgccgatgcgccctcaaacgcagagcctcgaacacggcgcgcacatcatcgtcggcacgccggggcgcatcatggatcatctggaccgcggccatctgacgctcgacgcgctgaacacgctcgtgctcgacgaagcggaccggatgctcgacatgggtttcttcgacgacatcgcgaaggtggcgcggcaatgcccgccgacgcgccagacgctgctgttctccgccacgtatccggacgggatcgcgaagctcagccagcagttcctgcgccatccgaagagggtgaagctcgaggaacgccacgacgacagcaagatccgccagcgcttctacgaagtgaccgaggacgagcggctgcatgcggtcggcctgttgctgaaccactatcgcccggtgagcacgatcgcgttctgcaacacgaagcagcaatgccgcgatctgctcgacgtgctgcatgcgcagggtttccacgcgctcgcgctgcacggcgagctcgagcagcgcgagcgcgaccaggtgctgatccggttcgcgaaccgcagttgctcggtgctcgtcgcgaccgacgtcgccgcgcgcggcctcgacatcgcgcagctcgaggcggtgatcaacgtcgacgtgacgcccgacccggaagtgtacgtgcaccgcatcggccgcacgggccgcgccgaccaggacggctgggcgctgagcctcgcgagcatgaacgagatgggccgcgtgggcggcatcgagcaggcgctcgcgcgcgaagtcaaatggcatccgctcgccgaattgaaggccggcggcgacgcgccgctgctgccgccgatggagacgctgcagattctcggcggccgcaaggacaagattcgccccggcgacgtgctgggcgcgctgacgggcgacgcgggcttcagcggcgcgcagatcggcaagatcaacgtgaccgagttctcgacctatgtggcggtggaacgcggcatcgcgcgcgacgcgctgcgcaagctcaacgcgggcaagatcaagggcaagcgggtgaaggtgcggctgatggacgaatga

SEQ ID NO: 77285 - protein, 465 aa, Burkholderia mallei ATCC 23344
MTYPPTATPFSALALTPATLANLAQLGYTDMTPIQAASLPIALAGHDLIAQAKTGSGKTAAFSLALLARLDARRFDVQALVLCPTRELADQVAQEIRRLARAEENVKVLTLCGGTPMRPQTQSLEHGAHIIVGTPGRIMDHLDRGHLTLDALNTLVLDEADRMLDMGFFDDIAKVARQCPPTRQTLLFSATYPDGIAKLSQQFLRHPKRVKLEERHDDSKIRQRFYEVTEDERLHAVGLLLNHYRPVSTIAFCNTKQQCRDLLDVLHAQGFHALALHGELEQRERDQVLIRFANRSCSVLVATDVAARGLDIAQLEAVINVDVTPDPEVYVHRIGRTGRADQDGWALSLASMNEMGRVGGIEQALAREVKWHPLAELKAGGDAPLLPPMETLQILGGRKDKIRPGDVLGALTGDAGFSGAQIGKINVTEFSTYVAVERGIARDALRKLNAGKIKGKRVKVRLMDE

SEQ ID NO: 77286 - DNA, 1407 bp, Colwellia psychrerythraea 34H
  CDS (1)..(1407): transl_table=11
ttgagtactaatacaactacttcatcgttagctttttcttcgttgagcttaaaacaggatttagttaaaaacttatcgtcgcttggctatgagcaaatgacacctattcaagctaaaaccttacctgaattgcttaaaggaaaagatgttattggcgaagcgaaaacaggctcaggtaaaacggctgcttttggtttagcattacttaacaaattagaagttaaaaagtttcgcattcaatccatggttatttgtccaacccgagaactggctgaccaagttgcgaaagagttgagaaaactagcgcgtggtattcataatataaaaatattgacactttgtggcggaaccccttttggtccacaaattggttctttagagcatggggcacatgttattgttggtactccaggacgccttgaagaacatgttataaaaggcactttacaattagataacttaaacttattagtgctcgatgaagctgaccgtatgctagaaatgggcttccaagccgcacttgataatattgttggacgtacaccacttgatcgtcaaacattacttttcagtgctacctttcctgaccaaattaagtctattagcgaaagtatcatgacagatcctgtgatggttaaaatcgcttcaagtgaagaccaatcaactatcagtcaaaaattctttaaagtgggtaatgatgacgatcgcctagacgcgttacgtttattgttactaggtaatcaagttgaatcgaccgctattttttgtaataccaaaaaagagacccaacaagtcgctgatgccttacactttgatggttttagcgtattagcgttacacggcgatttagagcaacgcgatagagaccaaacattattacgctttgccaacaaaagtgcttcaattcttgttgcgacagacgttgctgcacgaggcttggatattgatagcttagacttagttattaattatcacattgcccgcgatagtgaagtgcatgtgcatagaataggccgaacaggtagagcaggcagtacgggtatcgcttattcactgtttagtgacaaagaaagttataaagttggcttactagaagactaccttgaagctgttattacccctgagccattgccttcattagcggtactttccaatgaacgtccgcaagctaaaatggcaaccattcaaattgatggcggtaaaaagcaaaaagttagagctggagacattttgggcgcacttaccggcgataatggtgtgcaaggttcgcaagttggcaaaatttcagtgcttgataataaggcctatgttgccgttactaaagcggctttgaacttagccttgaaaaaaatatctaagggcaaaatgaaaggccgtacctttaatgctcgccatttaactaattag

SEQ ID NO: 77287 - protein, 468 aa, Colwellia psychrerythraea 34H
MSTNTTTSSLAFSSLSLKQDLVKNLSSLGYEQMTPIQAKTLPELLKGKDVIGEAKTGSGKTAAFGLALLNKLEVKKFRIQSMVICPTRELADQVAKELRKLARGIHNIKILTLCGGTPFGPQIGSLEHGAHVIVGTPGRLEEHVIKGTLQLDNLNLLVLDEADRMLEMGFQAALDNIVGRTPLDRQTLLFSATFPDQIKSISESIMTDPVMVKIASSEDQSTISQKFFKVGNDDDRLDALRLLLLGNQVESTAIFCNTKKETQQVADALHFDGFSVLALHGDLEQRDRDQTLLRFANKSASILVATDVAARGLDIDSLDLVINYHIARDSEVHVHRIGRTGRAGSTGIAYSLFSDKESYKVGLLEDYLEAVITPEPLPSLAVLSNERPQAKMATIQIDGGKKQKVRAGDILGALTGDNGVQGSQVGKISVLDNKAYVAVTKAALNLALKKISKGKMKGRTFNARHLTN

SEQ ID NO: 77288 - DNA, 1440 bp, Pseudomonas syringae pv. phaseolicola 1448A
  CDS (1)..(1440): transl_table=11
gtgaggtctggctggcgggtgatacactacgcgacatttttgttttgcaggtccaccgtcgtgactaacaccgctttcaattctctgcctctgtccgctgccatgctggctaacctggagtcgcttggttatgccgaaatgacaccgattcaggcgcagagcctgccggtgatcctcaagggcatggacctgatcgcgcaagccaagaccggcagcggcaagaccgctgccttcggtatcggcctgctcaacccgatcaacccgcggttcttcggttgccaagcactggtcatgtgcccgacccgcgaactggcggatcaggtcgccaaggaaatccgccgtctggcgcgctcggaagacaacatcaaggtgctgaccctctgtggcggcgtgtctttcggcccgcagatcggctcgctggagcacggcgcgcacatcatcgtcggtacgccggggcgtattcagcagcatttgcgcaagggttcgctggtcctggacggcctgaacacgctgatcctcgatgaagccgaccgcatgctggacatgggcttctacgacgccatcgccgacatcatcgagcagaccccgcagcgccgtcagaccctgctgttctccgcgacctacccggtcggcatcaagcagctgtcgtcgaaattcatgcgtgacccacagaccgtaaaagtcgaagcgctgcacgccgacagccagatcgatcagattttctatgaaatctctccggaacagcgtctggaagcggtggtcaaggtactcggtcatttccgtccggcgtcctgtgtggcgttctgtttcaccaagcagcaggttcaggaagtggtcgaccacctgaccgccaaaggcatgtctgccgtcggtctgcatggtgatctggaacagcgcgaccgcgatcaggtgctggcgatgttcgccaaccgtagtacctcggtactggtcgccaccgacgtggccgcgcgcggtctggacatcgacgcactggacatggtgatcaacgtcgagctggcgcgagattcggaaatccacattcaccgcgtaggccgtaccggtcgcgcaggcgaaaaaggcatcgcggtcagccttgtggcaccgtcggaaagccagcgcgcccgcgctatcgaagagttgcagaaagccccgttgaactggcagcagtacgatcagctaagtatcaaggaaggcggcaagctgctgccgaccatgacgacgctgtgcatcggttcgggtcgcaaggacaaactgcgcccgggcgacattcttggcgcgctgaccggcgaagcgggtattgcgggcactcaggtgggcaagatcgcgatcttcgatttccaggcttacgtcgccgtcgaacgcagcatggccaagcaggccctggagcgtctgaacaacggcaagatcaaaggcaagtcgctgcgcgtgcgaatcctctga

SEQ ID NO: 77289 - protein, 479 aa, Pseudomonas syringae pv. phaseolicola 1448A
MRSGWRVIHYATFLFCRSTVVTNTAFNSLPLSAAMLANLESLGYAEMTPIQAQSLPVILKGMDLIAQAKTGSGKTAAFGIGLLNPINPRFFGCQALVMCPTRELADQVAKEIRRLARSEDNIKVLTLCGGVSFGPQIGSLEHGAHIIVGTPGRIQQHLRKGSLVLDGLNTLILDEADRMLDMGFYDAIADIIEQTPQRRQTLLFSATYPVGIKQLSSKFMRDPQTVKVEALHADSQIDQIFYEISPEQRLEAVVKVLGHFRPASCVAFCFTKQQVQEVVDHLTAKGMSAVGLHGDLEQRDRDQVLAMFANRSTSVLVATDVAARGLDIDALDMVINVELARDSEIHIHRVGRTGRAGEKGIAVSLVAPSESQRARAIEELQKAPLNWQQYDQLSIKEGGKLLPTMTTLCIGSGRKDKLRPGDILGALTGEAGIAGTQVGKIAIFDFQAYVAVERSMAKQALERLNNGKIKGKSLRVRIL

SEQ ID NO: 77290 - DNA, 1401 bp, Dechloromonas aromatica RCB
  CDS (1)..(1401): transl_table=11
atgagcgaagacaccaccgcaggccaaagttttgacacgctaccgctgtcgccggccatgctggccaatctggcgcagcttgaatacttgagcatgacgcctatccaggcggccagcctgcccctggcgctggccggcaatgatctgatcgcccaagccaagactggtagcggcaagaccgccgcctttggtcttgccttgctcaatcgcctgaacaccagtcgtttcgccgtgcaggccatggtgctgtgcccgacccgtgaactggccgatcaggtgacgcaggaaatccggcgtctggcccgttttgaagagaacatcaaggtgttgtcgctggttggtggctcaacgctgcgcaatcaggcgaacagcctggaaaaaggcgtccacatagtcgttggcacgccaggtcgcatcatggaccacatggagcgcggctacctgaagctcgacgaattgaacacgctggtccttgacgaagccgaccgcatgctcgacatgggcttccatgatgacattgcttacgtcgccaagcggtgcccggcgcagcgccagacgctgttgttctcggcgacctatccggaaggcatcgccctgctggccaggcagtttttgcgtcagcccaaggaagtcaaactccttgagctgcatgaggaaaccaagattcgccagcgcttttacgaggtcaaggacgacgagcgcctcgatgccgtggtgcgcctgctcaagcattaccgtccggtcagcacgctggcgttctgcaataccaagcagcagtgtcgtgatctggtcaatgtcctgcgccacgccggcattcatgcgctgacgctgaatggcgatctggagcaacgcgagcgcgatcaggtgctgatccagttcgccaaccgcagttgctcggtgctggtggcgaccgacgttgcggcgcgcggcctggatatcgatcagcttgaagcggtgatcaatgttgatgtgacacccgatccggaaatccacatccaccgtatcggccggaccggccgtggtgatgaagagggctgggcgttgagtctgtgcagttccggcgaccgccgccgggtggcgacgatcgccgagatgatgaagtgcaagctcgacgtgcttgatctgaaaaccgtggaagtcaccgacgattcgccgctggtgccgccgatgtcgacattgctgatgctcggcgggcgcaaggacaagattcgtcccggcgacgtgatgggcgcgctggctggcgaggctggcctgacccgcgagcaggtcggcaagatcacggtaactgaccagagcacctatgtggccgtagcgcgtgctgtggccaaggagacggtgcgcaagctgtcggccggcaaggtcaagggcaagacggtcaaggttcgcatcctgaccaattga

SEQ ID NO: 77291 - protein, 466 aa, Dechloromonas aromatica RCB
MSEDTTAGQSFDTLPLSPAMLANLAQLEYLSMTPIQAASLPLALAGNDLIAQAKTGSGKTAAFGLALLNRLNTSRFAVQAMVLCPTRELADQVTQEIRRLARFEENIKVLSLVGGSTLRNQANSLEKGVHIVVGTPGRIMDHMERGYLKLDELNTLVLDEADRMLDMGFHDDIAYVAKRCPAQRQTLLFSATYPEGIALLARQFLRQPKEVKLLELHEETKIRQRFYEVKDDERLDAVVRLLKHYRPVSTLAFCNTKQQCRDLVNVLRHAGIHALTLNGDLEQRERDQVLIQFANRSCSVLVATDVAARGLDIDQLEAVINVDVTPDPEIHIHRIGRTGRGDEEGWALSLCSSGDRRRVATIAEMMKCKLDVLDLKTVEVTDDSPLVPPMSTLLMLGGRKDKIRPGDVMGALAGEAGLTREQVGKITVTDQSTYVAVARAVAKETVRKLSAGKVKGKTVKVRILTN

SEQ ID NO: 77292 - DNA, 1434 bp, Thiobacillus denitrificans ATCC 25259
  CDS (1)..(1434): transl_table=11
atgactgttgaaaccacctttgccagcctcgcgctggccgaacccattctgcgcgcgatcgccgacgccggctacacggcgcccacgccgatccaggctcaggcgattccgcacgtgctcgccggcggcgatctgctcgccgcggcgcagaccggcaccggtaagacggcgggcttcacgctgccgatcctgcatcagctatcgacccgcgcggcggtcgcgccgaagcccggccggccgcgctgcctgatcctggtgccgacgcgcgaactcgcggcgcaggtcgaggaatcggtcaagacctacggcaaatacctctcgctgacgtcgatggtcatgttcggcggcgtcaacatcaacccgcagttcaaggcgctgaaggcgcgcgtcgacatcctcgtcgcaacgccgggccgcctgctcgatcatgtcgcgcaaaaaaccgtggacctgtccggggtcgaaatcctcgtactcgacgaggccgaccgcatgctcgacatgggcttcatccgcgacatcaggcgggtgctcgccgtgctgccgaaacagcgccagaacctgctgttctcggcgactttctccgacgagatccgcacgctcgcgaacggcctgctgaacaatccgaagagcgtcgaagtcgcacgccgcaacacgacggccgaggtcgtcgagcaatcgatgcaccgcgtgccgcaggcgcacaagcgcgacctgctcgcgcatctgatcaagcaccacgactggcagcaggtgctggtcttcacgcgcaccaagcacggcgccaacaagctcgccgagaagctcaacaaggatggcatcaccgcagcggccatccacggcaacaagagccagtccgcgcgcaccaaggcgctcgcgagtttcaaggacggcagcgtgcgggcgctcgtggcgaccgatatcgccgcgcgcggcatcgacatcgaccagttgccgcaggtcgtcaacttcgaactgcccaacgtccccgaggactacgttcaccgcatcggccgcaccggccgggccggcgcgacgggttccgcgctctcgctcgtcgacgacgaggaaatgggctatctgcgcgacatcgagaagctcatcaagcgcgcgatcgtgcgcgtcgagatcgagccgggcttcgtgccgccggccaaggcagacctgatgtccgacgagcgtccgccacgtccgccgcaggggcgcggcgcatcgcgcgccggccagaacggcgggccgcgccagggccagggcgggcgcggcgggcaaggtagcggacgcaatgcgaaccggccggcccaggggaaatcggccgcggcgcccgtcaagcctgcgagcggccgtgcggccgcgccgaattcgccggcccagccgcgcaagccgcggccgcaggcggcgctgttctcggccaagcccggttcgcgcgggcactga

SEQ ID NO: 77293 - protein, 477 aa, Thiobacillus denitrificans ATCC 25259
MTVETTFASLALAEPILRAIADAGYTAPTPIQAQAIPHVLAGGDLLAAAQTGTGKTAGFTLPILHQLSTRAAVAPKPGRPRCLILVPTRELAAQVEESVKTYGKYLSLTSMVMFGGVNINPQFKALKARVDILVATPGRLLDHVAQKTVDLSGVEILVLDEADRMLDMGFIRDIRRVLAVLPKQRQNLLFSATFSDEIRTLANGLLNNPKSVEVARRNTTAEVVEQSMHRVPQAHKRDLLAHLIKHHDWQQVLVFTRTKHGANKLAEKLNKDGITAAAIHGNKSQSARTKALASFKDGSVRALVATDIAARGIDIDQLPQVVNFELPNVPEDYVHRIGRTGRAGATGSALSLVDDEEMGYLRDIEKLIKRAIVRVEIEPGFVPPAKADLMSDERPPRPPQGRGASRAGQNGGPRQGQGGRGGQGSGRNANRPAQGKSAAAPVKPASGRAAAPNSPAQPRKPRPQAALFSAKPGSRGH

SEQ ID NO: 77294 - DNA, 1395 bp, Saccharophagus degradans 2-40
  CDS (1)..(1395): transl_table=11
ttgtctgattcatccaataccgccttttcttctattggcctgcagccaggtttaatgcaaaacctagaatcgcttggctataacaccatgacgcccattcaagcccaaagtttaccgaatattattgccggtaaagatgtgatagggcagggtaaaactgggtcgggcaaaacggcggcatttgggttagggctgctgaatagtttggatgtaaagcgcttctacgtgcagagccttgtgctgtgcccaacccgagagctagccgatcaggtagcgaaagaaatccgacggcttgctcgcgccattcacaatatcaaagtgctcactttgtgcggaggtatgccctttggcccgcaaataggttcgctggagcacggtgcccatatagtagtgggtacccctggccgtgtagaagagcatgtacgtaaaaataatttagacctaagcaagctttctgtattggtgctggatgaagcagaccgcatgctagaaatggggtttcaggcagcgctagatgccattatagaaaccatgcctaagcagcgccaaacactgctttttagcgcaacgtttcctgaagagatacaagccatagccagtcgcataatgacggcaccagtaatgacgcaagttgaatctacgcacgataccagcacgattaagcagcgcttttacaaagttgataacgacgatcaacgtctattggcggtgcgcttacttctactgcaacacaaacctgaatctgccgtagtgttttgcaacaccaagcgcgaaacacaaatggtggccgatgatttagctggtcatggttttactgcgttggcattacatggtgatttggagcagcgcgatagagatttaaccctagtgcggtttgccaatggcagtgccaccgtgttggtagccaccgatgtagcggcacgcgggttagatattgaatcgttagatgctgttattaattatcacatagcgcgcgatatggaagtgcacgtacaccgtattggtcgcaccggccgtgcgggcgcaaaaggtattgcgtgctctatttatagcgaaaaagaacattttaaattagcgcggttagaagaaaccatggggcagcaagtggttaacgataagttaccgccaacaagcgtgctggattaccctgcacccaaacccaaaatggccacgctgcaaattgatggtggtaaaaagcaaaaagtacggcctggggatattgtcggcgggcttaccggtgagaacggtattgcaggtacagaaataggtaagattagtgtttttgataattcgtcttacgtggcggttgctttgccagtaatgaaaactgctttaaataaaattcgcgatggaaaattaaaaggccgcaattttcgagtgcgcgccattacttaa

SEQ ID NO: 77295 - protein, 464 aa, Saccharophagus degradans 2-40
MSDSSNTAFSSIGLQPGLMQNLESLGYNTMTPIQAQSLPNIIAGKDVIGQGKTGSGKTAAFGLGLLNSLDVKRFYVQSLVLCPTRELADQVAKEIRRLARAIHNIKVLTLCGGMPFGPQIGSLEHGAHIVVGTPGRVEEHVRKNNLDLSKLSVLVLDEADRMLEMGFQAALDAIIETMPKQRQTLLFSATFPEEIQAIASRIMTAPVMTQVESTHDTSTIKQRFYKVDNDDQRLLAVRLLLLQHKPESAVVFCNTKRETQMVADDLAGHGFTALALHGDLEQRDRDLTLVRFANGSATVLVATDVAARGLDIESLDAVINYHIARDMEVHVHRIGRTGRAGAKGIACSIYSEKEHFKLARLEETMGQQVVNDKLPPTSVLDYPAPKPKMATLQIDGGKKQKVRPGDIVGGLTGENGIAGTEIGKISVFDNSSYVAVALPVMKTALNKIRDGKLKGRNFRVRAIT

SEQ ID NO: 77296 - DNA, 1386 bp, Myxococcus xanthus DK 1622
  CDS (1)..(1386): transl_table=11
atggacttttccgcgcttgcgctatctccccccctgctccaggtcctggaggagctggacttcaagacggccacgcccatccaggcgcagagcatcccggtgctgctccagggcagggacctggtcggccaggcgcagacgggcagcggcaagacggcggccttcgcgctgccgctgctccagaaggtccagttgcagcaccgcaaggtgcaggcgctggtgctgtgtccgacgcgagagctgtgcgcgcaggtggcgggcgagattcgcaggttggggcggcggctgcccgggctccaggtgctggtgctcgcgggaggccagcccatccgcccgcaactggaagcactggagaagggcgcgcacctggcggtgggaacgccgggccgggtgatggatgtgctggaccgcgaggcgctggagacgcggcagttatccacggtggtgctggacgaggcggaccggatgctggacatgggcttccgcgaggacatggagcgcatcctcggagccatgccgccgcggcggcagacggtgctcttctccgccaccttcccgccggacatcgaggcgttgagccgcgatttccagcgtcagcccgtccgcgtcacggtggaggccgccaccgcggggcccgacatccagcaggtgcgctacgactgcgagccgggagacaagcaggccctgctgctgcgcatcctccggcactaccagccggcgtccgccatcgtcttctgcaacctcaaggcaaccgtggtggagttgaagaagtcgctctccgcgtcgggcgtcagcgtggacgggctccagggggatttggagcagttcgagcgcgaccgggtgatggcgaagttccgcaaccagagcacgcgggtgctcatcgccacggacgtggcggggcgcggcatcgacgtggaggcgctggatgccgtcatcaacttcgacctgcccatgcaggccgagccctacgtgcaccgcatcggccgcacgggccgggcggggcgcgcgggcctggccgtctccatcgtcacgcctcgggatggccgcaaggtggacgacatccaactggccaccggcgtgaagctggagcgtggggacgtggagtcactgccctcggcggatcctcgcaacgcggtgtccctggagtccacgtgggacacgctctacatctccgccggacgcaaggacaagatgcggcccggggacatcctgggcgcgctcacgggcgaggcgggcgggctcgaagcgaccgacgtgggcaagattgaaatccaggaccacgtggcctacgtcgccgtcgcccggcgcgtgtcgcgggtggccttccagcggctgagtgaaggccgcatcaagggccgccggtacaaaatcgagcgcgtgaagtag

SEQ ID NO: 77297 - protein, 461 aa, Myxococcus xanthus DK 1622
MDFSALALSPPLLQVLEELDFKTATPIQAQSIPVLLQGRDLVGQAQTGSGKTAAFALPLLQKVQLQHRKVQALVLCPTRELCAQVAGEIRRLGRRLPGLQVLVLAGGQPIRPQLEALEKGAHLAVGTPGRVMDVLDREALETRQLSTVVLDEADRMLDMGFREDMERILGAMPPRRQTVLFSATFPPDIEALSRDFQRQPVRVTVEAATAGPDIQQVRYDCEPGDKQALLLRILRHYQPASAIVFCNLKATVVELKKSLSASGVSVDGLQGDLEQFERDRVMAKFRNQSTRVLIATDVAGRGIDVEALDAVINFDLPMQAEPYVHRIGRTGRAGRAGLAVSIVTPRDGRKVDDIQLATGVKLERGDVESLPSADPRNAVSLESTWDTLYISAGRKDKMRPGDILGALTGEAGGLEATDVGKIEIQDHVAYVAVARRVSRVAFQRLSEGRIKGRRYKIERVK

SEQ ID NO: 77298 - DNA, 1377 bp, Pseudomonas aeruginosa UCBPP-PA14
  CDS (1)..(1377): transl_table=11
gtgacctccaccgctttctcctcgctgccgctttccgcggacctcctggccaatctcgactccctcggttaccgggagatgacgccgatccaggcgcagagcctgccgctgatcctccagggccacgacctgatcgcccaggccaagaccggcagcggcaagaccgcggctttcggcctcgccctgctcagcccgctgaacccgcgctacttcggctgccaggcgctggtgctgtgcccgacccgcgaactggccgaccaggtcgccaaggagatccgccggctggcccgcgccgccgacaacatcaaggtcctgaccctctgcggcggcgtcccctacggcccgcaggtggcttcgctggagcacggcgcgcacgtggtggtcggcaccccggggcgcatccaggagcacctgcgcaagggcaccctggtcctcgacgggctcaataccctggtcctcgacgaagccgaccggatgctcgacatgggcttctacgacagcatcgccgagatcatcggccagctccccgagcgccggcagaccctgctgttctccgccacctacccggacggcatcgagaagctggcgaagaccttcatgcgcgatccgcgacaggtgaaggtcgagtcgctgcacgccgacagccagatcgagcagcgcttcttcgagatcgatccgaagcagcgcatggacgccgtggtacgcctgctccagcatttccggccgcagtcctgcgtggccttctgccagacccgccagcagtgccaggagctggccgacgcactgaaggcgcagcggatttccgccctggccctgcacggcgacctggagcagcgcgagcgcgaccaggtcctgacggtgttcgccaaccgcagttgcaacgtactggtggccaccgacgtggccgcccgcgggctggacatcgccgccctggaaacggtgatcaacgtcgagctggcgcgcgacccggaggtccacatccatcgcatcggacgcagcggtcgcgccggcgagaaaggcctggccctgtcgctggtggcgccggccgaggccagccgtgcgcaggccatcgaggacctgcagaagcagccgctggcctggtacgccctcggccagttgaaggccagcccggagccattgctgccgccgatgagcaccctgtgcatcgccggcggacgcaaggacaaggtgcgccccggcgacctgctcggtgccctcaccggcgacgccgggctgcccggcagcgcggtgggcaagatcgccatcttcgacttccaggccttcgtcgccatcgagcgcggcctcgcccaccaggccctcaagcgcctgagcgaaggcaagatcaaggggcgctcgttcaaggtccgcctgctgtag

SEQ ID NO: 77299 - protein, 458 aa, Pseudomonas aeruginosa UCBPP-PA14
MTSTAFSSLPLSADLLANLDSLGYREMTPIQAQSLPLILQGHDLIAQAKTGSGKTAAFGLALLSPLNPRYFGCQALVLCPTRELADQVAKEIRRLARAADNIKVLTLCGGVPYGPQVASLEHGAHVVVGTPGRIQEHLRKGTLVLDGLNTLVLDEADRMLDMGFYDSIAEIIGQLPERRQTLLFSATYPDGIEKLAKTFMRDPRQVKVESLHADSQIEQRFFEIDPKQRMDAVVRLLQHFRPQSCVAFCQTRQQCQELADALKAQRISALALHGDLEQRERDQVLTVFANRSCNVLVATDVAARGLDIAALETVINVELARDPEVHIHRIGRSGRAGEKGLALSLVAPAEASRAQAIEDLQKQPLAWYALGQLKASPEPLLPPMSTLCIAGGRKDKVRPGDLLGALTGDAGLPGSAVGKIAIFDFQAFVAIERGLAHQALKRLSEGKIKGRSFKVRLL

SEQ ID NO: 77300 - DNA, 1410 bp, Acidovorax sp. JS42
  CDS (1)..(1410): transl_table=11
atgaccatctcttcaggcgcgtcgcctgccccgtccgccaccgccttctcatcgctgcctctgtcccctgaaatgctggccaacctgcagcagctgggctatgcgcagatgacgcccatccaggccgccagcctgcccttcagcctgcagggccgtgatctgatcgcccaggccagcaccggcagcggcaagacagcggcctttggcttggccatggtcgatcggctgaacccgcgctggttcgccgtccagggcctggtgctgtgccccacgcgcgagctggccgatcaggtggccaccgagatccgccgcttggcgcgtgcgcaagacaacatcaaggtcgtcactgtgtatgggggcgtgccttcgcgcggccagattgcttcgctggagaacggtgcccacatcgtggtcggcacgccgggccgcgtgatggacctgatggagcgcggcaagctcgacatcgccaacctcaagaccttggtgcttgacgaggccgaccgcatgctggacatgggcttcctggccgatattgagaccgtggtgcgccagtgtccggccgagcgccagaccctgctgttctccgccacctatcccgacggcattgcgggactggcacagcgtttcatgcgcgcgccccagatggtgaaggtggccgcccagcacggtgcaggcaagatcgcgcagcgctggtatgaggtggatgcacgcgagaaggtcgacgtggtggcgcgcatgctcgcgcactttcgccctgcgtcgagcattgccttctgcaataccaagcagcagtgccgtaacgtggtgactgcgctgcagagccagggattcagtgccctcgccctgtttggcgagttggagcagcgcgagcgtgacgaggtgctggtgcagtttgccaacaagagctgcagcgtgctcgtggccaccgacgtggcggcgcgcggcatcgatattgccgacctctcggccgtgatcaacgtcgacgtgacgcccgatcccgaggtgcacatccaccgcatcggccgcacgggccgtggcgatgccgaggggctggcgctgaacctggtcagcatggatgagatgggcagcgtgggcaggatcgaattgctgcaaggccgtgcctgcgagttctttccggtggatgaactcacccctacggcagggggcgaactgcggccacccatgtgcaccatccaaatcatcggcgggcgcagggagaagatccgcgccggcgacgtgatgggcgccatgtgcgccgacttcggctatgcgcgcgagcagatcggcaagatcagtgtcaacgatttttccacctacgtggccgtggaccgcgccatcgcggcccaggcctgcgccaagctgaatgcgggccgcgtcaaaggcaagatggtgaaggcgcgcttgctgtag

SEQ ID NO: 77301 - protein, 469 aa, Acidovorax sp. JS42
MTISSGASPAPSATAFSSLPLSPEMLANLQQLGYAQMTPIQAASLPFSLQGRDLIAQASTGSGKTAAFGLAMVDRLNPRWFAVQGLVLCPTRELADQVATEIRRLARAQDNIKVVTVYGGVPSRGQIASLENGAHIVVGTPGRVMDLMERGKLDIANLKTLVLDEADRMLDMGFLADIETVVRQCPAERQTLLFSATYPDGIAGLAQRFMRAPQMVKVAAQHGAGKIAQRWYEVDAREKVDVVARMLAHFRPASSIAFCNTKQQCRNVVTALQSQGFSALALFGELEQRERDEVLVQFANKSCSVLVATDVAARGIDIADLSAVINVDVTPDPEVHIHRIGRTGRGDAEGLALNLVSMDEMGSVGRIELLQGRACEFFPVDELTPTAGGELRPPMCTIQIIGGRREKIRAGDVMGAMCADFGYAREQIGKISVNDFSTYVAVDRAIAAQACAKLNAGRVKGKMVKARLL

SEQ ID NO: 77302 - DNA, 1383 bp, Pseudoalteromonas tunicata D2
  CDS (1)..(1383): transl_table=11
ttgagccaatcagcattttcatcactcaagttacaacctgcgttacttgagaacttaacgtcacttgaatatacctcgatgacgccaattcaagcgcaaagcttaccgcacattctttcaggtaaagatgtgattgcccaagctaaaacaggctcaggtaaaacagcggcatttgcccttggtttactagaaaacctagatgtacgtaaatatcgagttcaagcacttgtgctgtgcccgacccgtgaacttgctgatcaagtcgctcaagaaattcgtaaactcgctcgtggcattccaaacgtaaaggttttagctttatgtggcggtgtacctatgggcccacaaattggttcgctcgaacacggtgcgcacattattgttggtacacccggtcgtattgaagatcatttaagccgtcgcacattagatttaagccacgttaatacattagtacttgatgaagcagaccgcatgctcgacatgggtttttctgcagcacttgatgccatcattgaccaaacgccacgcgatcgccaaaccttgttttttagtgccacgtttcctgaaaaaattcagcaaattgctagtcgcactatgcgagatcccgttaaagttgaagtggaatccagccataacaacgttaatattcgccaatacttttataaagttgagcagaacaaacaacgcactaccgcactgcgtctattgctgctcaaacacgagccaaatagttgcgtagttttttgtaatactcgagttgaaacgcaagcagttgccgatgaattagcggtaagtggttttagcgttttagcgctgcacggtgaacttgagcaacgtgagcgtgaccaaaccttagtccgttttgccaataagagtatttcgattttagtggcaacagatgtagccgcccgcggactcgatatcaacgaactagatatggttattaactaccacattacccaagaccctgaggtgcatgtacaccgtattggtcgtacaggccgagctggcagtaaaggtaccgcacattcgttattcactgataatgaaagctatcgcgttgcggcagtttcagaatactttgataaacaatttgagctttcagcactaccgccattcactttattagacaaagtgccagagaaaccattaatggtgacgttgcaaattgatggcggcaagaagcaaaaagttcgtcctggtgatattttaggtgctctaacaagtaaagacggcattgcgggtaaacaagtaggcaaaattaccgtacttgaaaacttcgcctatgttgctgttgccagagatgcagctaaaccagcgcttcgtaaattaggtgaagataaaattaaaggtcgtttattcagagcgcgccgtatctaa

SEQ ID NO: 77303 - protein, 460 aa, Pseudoalteromonas tunicata D2
MSQSAFSSLKLQPALLENLTSLEYTSMTPIQAQSLPHILSGKDVIAQAKTGSGKTAAFALGLLENLDVRKYRVQALVLCPTRELADQVAQEIRKLARGIPNVKVLALCGGVPMGPQIGSLEHGAHIIVGTPGRIEDHLSRRTLDLSHVNTLVLDEADRMLDMGFSAALDAIIDQTPRDRQTLFFSATFPEKIQQIASRTMRDPVKVEVESSHNNVNIRQYFYKVEQNKQRTTALRLLLLKHEPNSCVVFCNTRVETQAVADELAVSGFSVLALHGELEQRERDQTLVRFANKSISILVATDVAARGLDINELDMVINYHITQDPEVHVHRIGRTGRAGSKGTAHSLFTDNESYRVAAVSEYFDKQFELSALPPFTLLDKVPEKPLMVTLQIDGGKKQKVRPGDILGALTSKDGIAGKQVGKITVLENFAYVAVARDAAKPALRKLGEDKIKGRLFRARRI

SEQ ID NO: 77304 - DNA, 1386 bp, Photobacterium sp. SKA34
  CDS (1)..(1386): transl_table=11
ttgagccagactgctttttctacgttaaaccttaaccctgatttgctcagtaacttaacgtcattaggttacgacgcaatgacgccgatccaagcgcaaagcctacctttaattcttgagggaaaagatgttattgctcaaggtaaaacaggttcaggtaaaacagcagcatttggcttgggattactacagaatctaaaagtaaaacgctttcgtgtgcagacgttagtattgtgcccaacgcgtgagcttgccgatcaggtagcgaaagagattcgtcgcttagctcgcgctattcacaatattaaagttttaacattatgcggcggtacacctttcgggccacaaattggttcattagagcatggtgcacatattattgtgggtacacctggtcgtgtcgaagaacacgtgcgtaaaggctttctatgtttagatgagctaaatacgttagtgcttgatgaagctgaccgaatgttagaaatgggttttcaagattcattagatgcaattattgatgttgcgccaagcgatcgtcaaacgctactgttcagtgcaacatatccaactcaaattgcttctattgcaaaacgtattatgcgtaatcctgttgaagttaaagttgaatctaaccacgacaatagcagtatctctcagcacttctataaagtagagagtaatgatgaccgtttacgtgctgtgcgtttactacttagccagcaccgccctgaatcatgtgtgattttttgtaataccaaacgtgaagcacaagagatttctgatgatcttgaagattatggctttagctcaattgcattacacggtgatttagagcagcgtgaacgcgatcgtactttagtcttgtttgctaataagagccgttcaattttagtggcaaccgatgtggctgcgcgtggccttgatattgataatcttgatgcggtgattaactatcatttagcacgtgatactgaagtgcacgtgcaccgtattggtcgtaccggtcgtgcgggtagtaaaggtattgcttgttcgttatttagcgataaagagcattataaagtcgcattacttgaagattaccttgatcgcccaatctcaggtgaagcgttaccagccgagcatctattagatcaaccaacgttccgccctgaaatggtaacgttaatgattgatggcggtaaaaaacagaaagtgcgtccgggtgatattttaggtgcattgacgggtgaaaatggtatcgctggtagtgatgtgggtaaaattaatgtctttgacttctgtgcttatgtagcagtgaagcgtgaagttgtacgtgctgcattgaaaaagctagaaaacggtcgaattaaaggtcgtaacttccgctctcgtcaattacgctaa

SEQ ID NO: 77305 - protein, 461 aa, Photobacterium sp. SKA34
MSQTAFSTLNLNPDLLSNLTSLGYDAMTPIQAQSLPLILEGKDVIAQGKTGSGKTAAFGLGLLQNLKVKRFRVQTLVLCPTRELADQVAKEIRRLARAIHNIKVLTLCGGTPFGPQIGSLEHGAHIIVGTPGRVEEHVRKGFLCLDELNTLVLDEADRMLEMGFQDSLDAIIDVAPSDRQTLLFSATYPTQIASIAKRIMRNPVEVKVESNHDNSSISQHFYKVESNDDRLRAVRLLLSQHRPESCVIFCNTKREAQEISDDLEDYGFSSIALHGDLEQRERDRTLVLFANKSRSILVATDVAARGLDIDNLDAVINYHLARDTEVHVHRIGRTGRAGSKGIACSLFSDKEHYKVALLEDYLDRPISGEALPAEHLLDQPTFRPEMVTLMIDGGKKQKVRPGDILGALTGENGIAGSDVGKINVFDFCAYVAVKREVVRAALKKLENGRIKGRNFRSRQLR

SEQ ID NO: 77306 - DNA, 1401 bp, marine gamma proteobacterium HTCC2207
  CDS (1)..(1401): transl_table=11
atgagaatcccattgtcagaatatgatttttccagcttagatcttaaccccgccctagtagataaccttgcaagccttggttactcggagatgacgccgattcaggcacaagctttaccctcaattttagccagtaaagatgttattgctaaggccaagaccggctcgggtaaaaccgcaaccttttctctggggttattgaataagcttgatgtaaagcgttttcgtgttcagaccctggtgttatgtccaacccgtgaattagcagaccaggtggctgctgaaatacgtaaactggcacgagggatccacaatattaaggtgctgactctctgtgggggggtagcctttgggcctcaggtgggttctttggagcacggtgcgcacattattgtgggcactcctgggcgggtcgaagatcaccttcgcaaagcgaatcttaatttagataatcttacgactttaatattagatgaagccgacagaatgttggatatgggttttcaacaggctttggatgatattgttggttatatgcctaggcagcgacaaacaatgttgtttagtgctacttatcctgaaaaaatcgacaaaattgcacagcgaatcatgcgatccccagtgactgtagaagtgcaagacagtcacagcagtcagagtattgtcgagaccctttaccagatagacaatgaccagtcgcggatagaggcggtgaggcttttgttgcaggcacaccaaccagagaccacgctgattttttgcaataccaaaatcgaaactgatcgagtggccaacgaattgcgtgcagtaggttacgaagcatcggctttacatggtgatttggagcaaaaagatcgagaccaaaccttagcctgtttcgccaaccgcagtgtttctgtgctggtggctacagatgttgcagcccggggtttagatattgacgctcttgatatggtgatcaattaccaaatggcgcaggagcttgaagtccatactcatcggatcggccgcacgggtcgtgccggcgctcaaggtattgcctgcagcttatatacgcaaaaagaaacttacaaaattgacttgttagaagactatttagaacagaaatttaatcgcggtgacctgccgcacttagaattgttacgtgagcctgtcttctatccacctatggtgactattcatataggcggtggcaaaaagcagaagctgaggccaggggatattgtgggtgccttgactggtgctgatggtattccaggaacagagatcggcaaaattcaggtaggtgaccactgggcctatgttgctgtaacccgtaaacatgggaaaacggcgtttaaaaagctcagtgaaggcaagctcaaggggcgcagctttagggtaaggcgtttgcggggttag

SEQ ID NO: 77307 - protein, 466 aa, marine gamma proteobacterium HTCC2207
MRIPLSEYDFSSLDLNPALVDNLASLGYSEMTPIQAQALPSILASKDVIAKAKTGSGKTATFSLGLLNKLDVKRFRVQTLVLCPTRELADQVAAEIRKLARGIHNIKVLTLCGGVAFGPQVGSLEHGAHIIVGTPGRVEDHLRKANLNLDNLTTLILDEADRMLDMGFQQALDDIVGYMPRQRQTMLFSATYPEKIDKIAQRIMRSPVTVEVQDSHSSQSIVETLYQIDNDQSRIEAVRLLLQAHQPETTLIFCNTKIETDRVANELRAVGYEASALHGDLEQKDRDQTLACFANRSVSVLVATDVAARGLDIDALDMVINYQMAQELEVHTHRIGRTGRAGAQGIACSLYTQKETYKIDLLEDYLEQKFNRGDLPHLELLREPVFYPPMVTIHIGGGKKQKLRPGDIVGALTGADGIPGTEIGKIQVGDHWAYVAVTRKHGKTAFKKLSEGKLKGRSFRVRRLRG

SEQ ID NO: 77308 - DNA, 1401 bp, Oceanobacter sp. RED65
  CDS (1)..(1401): transl_table=11
atggcaactactgtgtctcaaaccgctttttcttcactaaaactcgatccggcattactccagaatctagaagacttgggttatcagcaaatgcgtccaattcaggcgcaaagtttacctgccataattgaagggaaagacgttattggccaagcaaaaaccggtagcggtaaaactgccgcgtttgctttgggtcttttgcatcatctagacgtaaagcgttttcgagtacagcacttggttttatgccccactcgagagctagcggatcaggtagcaaaagaaattcgtcagctcgcgcgggctattcataacatcaaagtgctgacactttgcggtggtatgccatttggtccgcaagtgggctcattagaacacggcgcccatatagtggtgggtactccaggtcgcattgaagagcatattcgcaaaaacaacctgcctttgaaggacattaccggctttgttttagacgaagcggatcgcatgttggatatgggttttcaagattctctagagagcatcgtcaatgcgctaccaaaacagcgtcaaacacttttgtttagtgccacatatcccgaaaacattgaaaagctcgctgcttgggtgaccaataaacctgtgcgcgtagaagtccaagagagcgacgttcacagtcaaattaagcagcttttttatcgtttgcaagataacaaacaacgaatgaccgctttatccttgttgcttaaaaaagagaaaccagaaagcagcattgtattttgcaataccaagcgagaggctcaagaaatcgctgatgaattgcgtagtcagggcttttcggcagtggccttgcatggggacctagagcaaagacagagagatcaaacgttggttcgctttgccaataaaagtgccagcattatggtcgcaaccgatgttgcagcacgaggtttggacattgaaagtgtagatgccgtattcaactatcatttagctcgtgatccagaagtccatgtgcatcgcgtcggtcgaacagggcgtggggataaaaaaggcaaagcattttctttttataccgataaagaaggatacaagttggttgcgctcgaagaaactttatcggtcgatgcaacggcgcaaaaactacctgatttttcagtattagataagcctgctttcaaagcccctatggccaccttacaaattgatggtggtaaaaagcaaaaagttcgcccgggggacattctgggggcccttactggtaaaaacggcattgcaggtaagcaagtgggtaagatttcggtgttggattactgtgcctatgttgcagttgaacgggatgctgctaaaccagcgttgaagaagttgtcggaaggaaaactgaaagggcgttcgtttagagcaagacgtattcgcggttaa

SEQ ID NO: 77309 - protein, 466 aa, Oceanobacter sp. RED65
MATTVSQTAFSSLKLDPALLQNLEDLGYQQMRPIQAQSLPAIIEGKDVIGQAKTGSGKTAAFALGLLHHLDVKRFRVQHLVLCPTRELADQVAKEIRQLARAIHNIKVLTLCGGMPFGPQVGSLEHGAHIVVGTPGRIEEHIRKNNLPLKDITGFVLDEADRMLDMGFQDSLESIVNALPKQRQTLLFSATYPENIEKLAAWVTNKPVRVEVQESDVHSQIKQLFYRLQDNKQRMTALSLLLKKEKPESSIVFCNTKREAQEIADELRSQGFSAVALHGDLEQRQRDQTLVRFANKSASIMVATDVAARGLDIESVDAVFNYHLARDPEVHVHRVGRTGRGDKKGKAFSFYTDKEGYKLVALEETLSVDATAQKLPDFSVLDKPAFKAPMATLQIDGGKKQKVRPGDILGALTGKNGIAGKQVGKISVLDYCAYVAVERDAAKPALKKLSEGKLKGRSFRARRIRG

SEQ ID NO: 77310 - DNA, 1401 bp, Alteromonadales bacterium TW-7
  CDS (1)..(1401): transl_table=11
atggaatttactgtgacttcaactgctttttcatctttggctttaccagctggacttgttgataatttatcgacgcttggctacgcccacatgacacctgtacaggcgcaaagtttgccacctgtacttgaaggtaaagacatcattgcgcaggcaaaaaccggctcaggtaaaacggctgcgtttagtttaggtgtgcttgctaaattaaacgtaaaacgttttagaattcaatcgctagttttatgtccaacacgtgaacttgctgaacaagtggctgttgaaatgcgtaagcttgcgcgtggtatccataatattaaaatattaacgctatgtggtggcgtatcaattgggccgcaaattgggtcgcttgaacacggtgcacacatcattgttggtacaccagggcgcgtagatgaccatattcgcaaagggactttacggttagacgatgtagaaacattagtattagacgaagccgatcaaatgcttgatatgggctttcaagatacccttgatgcgattattgaatgtattccacaaaaccgccaaacgcttttgtttagtgctacttttccacgcgcaatcgaagcgatagcaaagcgtgtacttagtaacccagaaatgattaaagtagaagaagagcaagaaaaaagcacaataaaacaatacttctacaaaatggataacaataaacagcgctatccaacactcaagttactattacttaaatttacaccacaaagttgtgttgtgttttgtaacaccaaggtagaaacgcagcaagtatgcgacgatttagccgatgaaggtttcagcgccgtggcattgcatggtgatttagaacaacgtgaccgtgagcgcactctgattcattttgctaataaaagtgcatctattttagttgcgacagatgttgccgcacgtggtttagatattgacgatatggacatggtaatcaactaccatttagcgcatgacccgcaaacgcacgttcaccgagttgggcgaacaggtcgcgcgggtaaaaaagggattgcttgctcaatttatggtgatgcagagcaattcaaagtagcgcaaattggtgatcactatgagcgcgactttgagccagagccaatgccttcatataatttgttggacaaacctccgtacaaaccagaaatggtcactctgatgatagattcaggtaaaaagcaaaaagtgcgtgctggtgatattttaggtgcgttaacgggtaaagacggtattgctgggcgtcaagtaggtaaaatcaatgttcttgataacgtcgcatttgtagctgttgaacgtaatgcgtctaaaccggcacttcgtaaattaaccgaaggtaatataaaagggcgcaaaattcgtgctcgtcgcctaacgcgttaa

SEQ ID NO: 77311 - protein, 466 aa, Alteromonadales bacterium TW-7
MEFTVTSTAFSSLALPAGLVDNLSTLGYAHMTPVQAQSLPPVLEGKDIIAQAKTGSGKTAAFSLGVLAKLNVKRFRIQSLVLCPTRELAEQVAVEMRKLARGIHNIKILTLCGGVSIGPQIGSLEHGAHIIVGTPGRVDDHIRKGTLRLDDVETLVLDEADQMLDMGFQDTLDAIIECIPQNRQTLLFSATFPRAIEAIAKRVLSNPEMIKVEEEQEKSTIKQYFYKMDNNKQRYPTLKLLLLKFTPQSCVVFCNTKVETQQVCDDLADEGFSAVALHGDLEQRDRERTLIHFANKSASILVATDVAARGLDIDDMDMVINYHLAHDPQTHVHRVGRTGRAGKKGIACSIYGDAEQFKVAQIGDHYERDFEPEPMPSYNLLDKPPYKPEMVTLMIDSGKKQKVRAGDILGALTGKDGIAGRQVGKINVLDNVAFVAVERNASKPALRKLTEGNIKGRKIRARRLTR

SEQ ID NO: 77312 - DNA, 1380 bp, marine gamma proteobacterium HTCC2143
  CDS (1)..(1380): transl_table=11
gtgtctgataattttgcctcccttgacctaccacccgggcagcttgccaatctacagcagctcggttatgagaaaatgacgccgatccagcagcagagcttgcctctagtcttagcgggcagtgatattatagccaaggctaaaactgggagtggtaaaactgcggcatttggcatcggtctgttaacaaaaataaacccgcgtgatttcggcacccagacgatggtgatttgtcccaccagagaattgagcacacaggtcgctacagaaatcaggcgattagcccggtatcaacaaaatattaaagttgttgtgttgtgtggcgggcagtcgattggtccgcagatcggttccttagagcacggcgcgcatattgttgtaggtacacccgggcggataaaagatcatctacgtaaaaaaacgctgtcattgtcgcgtctaggaatcttggttctggatgaggcagatcgcatgttagatatgggattctatagtgatattgaaaccatcatccatgagatgccagacgatcgccagacgctacttttttcagcaacctatcccgacaaaataaagacactgagttccagctttcaacgaagccccgttgaaataagtgtcgagtctgttcgtggtaatgaaaagatccatcaacagctgtttatctgtgataagagagaacgactagcggggttgcagcggctattaatgaattatccgattgaatcagccgtcatcttttgtaatacgataaaattggttaaagaagtctgtgattacctggttgatataggtatcagtgcaaaagcgattcatggcgatttagaacagcgggatcgtgatcaagtattgatacaatttgctaatcacagctgctctttgttggtagctacggatgtcgcggcgagaggtttggatatagaggacttgcctgctgttataaattttgagttaccaagagaggcggatgtttatatccaccgaatagggcgtactggccgcgccggaaaagaaggattagcattttcactgtttacagattctgagaaatatcgatttgatgcgatatcgacactacaggaaaataagcttaactttgaatcaataggagtgctaaaggacattgatcgccagttagcagcgccccctatggtgaccctatgtatttcaggaggtagaaaagataagtttcgccctggcgatattgttggcgcgttaactggagaggctggtatggacggcagtgttataggaaaaatatcagtgcttgattttgtttcctatgttgctatcgaaagacatgctgctaacgacgcgcttcgagggctggagcagggaaagataaaaggtcgaaaggttaagatcaggaagcttcgctaa

SEQ ID NO: 77313 - protein, 459 aa, marine gamma proteobacterium HTCC2143
MSDNFASLDLPPGQLANLQQLGYEKMTPIQQQSLPLVLAGSDIIAKAKTGSGKTAAFGIGLLTKINPRDFGTQTMVICPTRELSTQVATEIRRLARYQQNIKVVVLCGGQSIGPQIGSLEHGAHIVVGTPGRIKDHLRKKTLSLSRLGILVLDEADRMLDMGFYSDIETIIHEMPDDRQTLLFSATYPDKIKTLSSSFQRSPVEISVESVRGNEKIHQQLFICDKRERLAGLQRLLMNYPIESAVIFCNTIKLVKEVCDYLVDIGISAKAIHGDLEQRDRDQVLIQFANHSCSLLVATDVAARGLDIEDLPAVINFELPREADVYIHRIGRTGRAGKEGLAFSLFTDSEKYRFDAISTLQENKLNFESIGVLKDIDRQLAAPPMVTLCISGGRKDKFRPGDIVGALTGEAGMDGSVIGKISVLDFVSYVAIERHAANDALRGLEQGKIKGRKVKIRKLR

SEQ ID NO: 77314 - DNA, 1398 bp, marine gamma proteobacterium HTCC2080; identical to SEQ ID NO: 65564
  CDS (1)..(1398): transl_table=11

SEQ ID NO: 77315 - protein, 465 aa, marine gamma proteobacterium HTCC2080; identical to SEQ ID NO: 65565

SEQ ID NO: 77316 - DNA, 1374 bp, Marinobacter sp. ELB17
  CDS (1)..(1374): transl_table=11
atgccttcctttaaagaccttgaactgtctgccgccatgcaggccaatcttgtgcgcctgggttttaccgaacccaccgacattcagacgcgggctttgccccattgcttggcgggtcaagacgttatcgccttggcgcacaccggcagcggcaaaaccgcagccttcggtattggtttgattgagcatgtcaaacccaagcagttctcggtacaaagcttggtactgtgccccactcgggagttggctgatcaggtcgccaaggctttgcgggaactggcccgtgcccgcgataatataaaaatactcaccctgtgcggtggtgtgtcgattggccctcagatcggctcgctggcccacggcgctcatatagtcgtgggtacaccagggcggatagcggatcacctgcaaaaaggcacgctgaaactggatcgggtgcacaccgtggtgctggacgaagccgaccgcatgttggatatggggtttcaggaggcagtggaaaacattctttcacacgcgccggcacagcgccagactctgctgttctcagccacttggcccgaatcgattcgtaaactcagcgctggttttcagcgagagccggtggatgtgcgggcgcaaaccgagaaaatgaacagtgatattgccgaggtgttctatgagatttctggcaaccagcgtactcgcgccatcgtggctctgctgtcgcagcatcaacccacatcctgcctggtgttctgcgctatgaagcatcagtgtgacgagctggcggccgagctctcacagcagggtttttcggcgctggcgttgcacggcgacctggaacagcgcgaccgcgacagcgttctggtgcgctttgccaatcaaagttgccaggtattggtggccaccgacgtggcggcccgagggctggacataaaatcattgccactggttgttaacgccgagccggcgggtgatccggagatacatacgcaccgcatcggtcgcaccggccgcgccggggaacaggggctggccgttactctgtgcagcccgtcccagggccacaaaatcaatcgcctggaaagcgagcgcggtgcaacggttatctggggtgatagcgacccattaatggcgactgtaccaaaaccgatgaagccgctgatgaaaaccctgtgcatagcggccggtcgcaaagaaaaactgcgcccaggtgatgtgatgggcgctctgaccggcgatggcggcttgcctggtagcgccgttggtaaaataaatgtgtttgaatttcagtgttttgtagccgtggaaagccgccacgccggacgtgcgttggagcagttggagcgcggtaaggtaaaaggtcgcaatttgcgggcacgcttagtctag

SEQ ID NO: 77317 - protein, 457 aa, Marinobacter sp. ELB17
MPSFKDLELSAAMQANLVRLGFTEPTDIQTRALPHCLAGQDVIALAHTGSGKTAAFGIGLIEHVKPKQFSVQSLVLCPTRELADQVAKALRELARARDNIKILTLCGGVSIGPQIGSLAHGAHIVVGTPGRIADHLQKGTLKLDRVHTVVLDEADRMLDMGFQEAVENILSHAPAQRQTLLFSATWPESIRKLSAGFQREPVDVRAQTEKMNSDIAEVFYEISGNQRTRAIVALLSQHQPTSCLVFCAMKHQCDELAAELSQQGFSALALHGDLEQRDRDSVLVRFANQSCQVLVATDVAARGLDIKSLPLVVNAEPAGDPEIHTHRIGRTGRAGEQGLAVTLCSPSQGHKINRLESERGATVIWGDSDPLMATVPKPMKPLMKTLCIAAGRKEKLRPGDVMGALTGDGGLPGSAVGKINVFEFQCFVAVESRHAGRALEQLERGKVKGRNLRARLV

SEQ ID NO: 77318 - DNA, 2133 bp, Macrobrachium rosenbergii
  CDS (1)..(2133)
atggacgagtcccaaaggaacgtggtgcttcccggccccgaagccgccgtgtccgggcggctgctgggccaaaaaacctccgcccccccctgctttgcctcccccgaccacctgacctccgactacgtgaacgtgatcgtggaccctcaatccaattggcactgttccgtgcaccgtcacgtgcgtatccaataccgttacgccggctcctccaaacaaggtgcctccggtggtggtgggggagcccccaatgggggggacggaggaggaggaggaggaagccgcgcgtgtcacaaatgtggagaagaagggcactttagtcgcgaatgtccccaagccggtggtggtggtggtagtggtcccaggacctgtcacaaatgtggagaagaaggacattttggtggaggaggaggaggaggaggaagtagggcgcatcacaaatgtggagaagaaggacacttttctagagaatgtccccaaggaggaggaggaggaggatccggacctaggacctgtcacaaatgtggggaagaaggacacatgagtcgcgactgtccccaaagaggttcaggacccagacaaggaggaggaagtcgcgaatgtccccaaggaggatttgttcccgttcttttcggattcgaccccgttcacgccgttggaggagttcataattttcgctctatttgtctttctcccgctgttggaatccccttcaaacaatggggatccgcgttcgggttgggacccggccgcggaggaggacgccgcggaggaggacgcggcggccccggcattcaaagcagccgcggatctggaggagcgcgtcgtattcccaccgcgaccaggcaacgctctgaaagacccccccccaggaacgaaaaatggccctcttatgaattactttgttacggtcccgtgcaaaaatgtggtattcccaggggtggtggtgaccttatggcatgtgctcagactggatccggaaaaacggctgcattcctacttccaattttgcagcagctaatggccgatggcgtggctgccagcagctttgttgagttgcaggaacccgaggcaatcattgtcgccccaactcgggagctcatcaaccagattttcctggaggccaggaagtttgcctatggaacgtgtgtgcgtccagtggtggtgtatggtggagtgaacactggatttcagctcagagaaatttctaaaggctgcaacatagtgtgtggaacgccggggagattattggatgtaattcaacgtggatggatcggtctgaccaagctgcgctatctggttcttgatgaggctgacaggatgttggatatgggctttgagcctgacatgcgccgcctggttgcttcgcccgggatgccacccaaagagaatcgccagactctgctgtttagcgccacctaccctcaagacatccagaagttggccgccgatttcctcaagacggactatttgtttctggctgttggcatagtgggcggggcttgtagtgatgtcgaacagacatttgtccaagtcaccaagtactcaaagagagaacagcttcttgactttcttaagaccatcggaaatgagcgcacaatggtgtttgtggagacaaagagacaagctgatttcattgccactttcctgtgccaagaggaacttcccacgaccagtattcacggggatcgcgaacagcgggaacgagagcaggccttggccgactttaaggccggcaaatgccccatcctcgtcgcgacgtcggtcgctgcccgcggcctggacattccagaagtgcagcacgtggtcaattttgacctccccaagaatattgatgaatatgtccaccgcatcggcagaaccggccgctgcggtaatattggcagagcggtgtctttctacgatccagaggtggacagtcagctggctgcttccttggtcacaatcctgtccaaggcccaacaagaagtgccatcatggctggaggagtctgcattcagtggaggagccactagctttagccaggccaacaagagctttgcctcctccgactcccggaagtctcaacaggcaggatgtgagaggagacagcccgttcctcagattgtagtttctgacgatatttgggagtag

SEQ ID NO: 77319 - protein, 710 aa, Macrobrachium rosenbergii
MDESQRNVVLPGPEAAVSGRLLGQKTSAPPCFASPDHLTSDYVNVIVDPQSNWHCSVHRHVRIQYRYAGSSKQGASGGGGGAPNGGDGGGGGGSRACHKCGEEGHFSRECPQAGGGGGSGPRTCHKCGEEGHFGGGGGGGGSRAHHKCGEEGHFSRECPQGGGGGGSGPRTCHKCGEEGHMSRDCPQRGSGPRQGGGSRECPQGGFVPVLFGFDPVHAVGGVHNFRSICLSPAVGIPFKQWGSAFGLGPGRGGGRRGGGRGGPGIQSSRGSGGARRIPTATRQRSERPPPRNEKWPSYELLCYGPVQKCGIPRGGGDLMACAQTGSGKTAAFLLPILQQLMADGVAASSFVELQEPEAIIVAPTRELINQIFLEARKFAYGTCVRPVVVYGGVNTGFQLREISKGCNIVCGTPGRLLDVIQRGWIGLTKLRYLVLDEADRMLDMGFEPDMRRLVASPGMPPKENRQTLLFSATYPQDIQKLAADFLKTDYLFLAVGIVGGACSDVEQTFVQVTKYSKREQLLDFLKTIGNERTMVFVETKRQADFIATFLCQEELPTTSIHGDREQREREQALADFKAGKCPILVATSVAARGLDIPEVQHVVNFDLPKNIDEYVHRIGRTGRCGNIGRAVSFYDPEVDSQLAASLVTILSKAQQEVPSWLEESAFSGGATSFSQANKSFASSDSRKSQQAGCERRQPVPQIVVSDDIWE

SEQ ID NO: 77320 - DNA, 2061 bp, Oryza sativa subsp
  CDS (1)..(2061)
atggcgtcggcggcggcgacggcgagggggccgcggtacgcgccgccagatccgacgctgcccaagccgtggagggggctcatcgacggcaacaccgggtacctctacttctggaacccggagaccaaggccgtgcagtacgaccgccccacggcgccgccgccctcctcccccccggcgcagcagcctccggagaggcctaggaacagcgatcctgctgagtcgcaggcgcaggctggagcgagccgaacgcagaatgctgctcctgctgatgatagggcaaggaatgatcatttgaatgatcatttcgagcggcacacggaagcggtgggaagtcatgcgcagaacgtgcctttcactgagcaaaatactaggagcaacccttcttcacagccgtgctctgcagctggagtataccctgcacagaatgtattttcagaggctgccagtggagaccgcacctcaccagaagcgtatcgtgctaagcacgagatcactattgtcggaaatgaggctccagctccattcatgacatttcagtccacaggtttccctccagagattctaagggaggtacagcaagcgggattctctgcaccaactcctatccaagctcaatcatggccaattgctcttaggaatcgtgatattgtagctgtggcgaagacaggttccggaaaaacactgggttatctcattccagggtttatccttcttaagcgccttcaacataattcaagggatggtccaacggtattagtgctttctccaacaagggaattggcaacacaaatccaagatgaagcaaaaaagtttgggagatcatcaagaatatcgtctgtttgtctatatggaggtgctcctaaaggtcctcagctaagagatctagagcgcggtgcagacattgtggttgcaactcctggaagattgaatgacattttagaaatgcgaagagtgagcctacatcaagtatcttatcttgttcttgatgaggctgaccgcatgcttgatatgggttttgagccacaaataagaaaaattgtgaaacaagtacaacccaaacgacagactcttatgttcactgccacttggccaaaagaggtgaggaaaatagcctcagatttgctgtccaatccagtccaagttaacattgggaacactgatcaactggttgccaataagtcaatcactcagtatgtggatgttatcacacctccggagaaatcgaggcggcttgatcaaatcctaaggtcacaggaacctggatcgaaaatcataatattttgctccacaaagaggatgtgtgatcagctggctcgaaacctagcacggcagtatggtgcttctgctattcatggtgataaatcacaagccgagagggattctgtgttgagtgaatttcgaagtggcagatgccctattcttgttgctactgatgtggctgcccgaggcttggacataaaggatatcagagttgtggtcaactacgatttcccaacaggtgttgaggattacgtccatagaattgggagaacaggacgggctggagcgactggagttgcctatacattcttctgtgatcaggattcaaagtatgcttcagatctcgtgaagattttggagggtgcaaaccagtctgtttcgcaacagttgagagatatggtctcccgtggagggtatggtggaaggtcacggcgctgggcatcttcagatgactcttatggtggtcgaggatatgattcaggctatacttcaaggtcgactgacaactataacagtggttatggcagtcagtctgggaatggttctagctttcatagtagcttccataacagcaacagtggcaatcagtttggcgatacttctggcttccaaaccagcagcaacaacgatcaacctggtgatggtctcagctttcatgccaggttctatagctcttctcgaggcagcgatcagagcagaacaaacaatgctggctttcgtgatagaagtaggagtcctccaagcaatcgcaaccatgaagatcctgggtccaaggctgttggtgtctccaactggtaa

SEQ ID NO: 77321 - protein, 686 aa, Oryza sativa subsp
MASAAATARGPRYAPPDPTLPKPWRGLIDGNTGYLYFWNPETKAVQYDRPTAPPPSSPPAQQPPERPRNSDPAESQAQAGASRTQNAAPADDRARNDHLNDHFERHTEAVGSHAQNVPFTEQNTRSNPSSQPCSAAGVYPAQNVFSEAASGDRTSPEAYRAKHEITIVGNEAPAPFMTFQSTGFPPEILREVQQAGFSAPTPIQAQSWPIALRNRDIVAVAKTGSGKTLGYLIPGFILLKRLQHNSRDGPTVLVLSPTRELATQIQDEAKKFGRSSRISSVCLYGGAPKGPQLRDLERGADIVVATPGRLNDILEMRRVSLHQVSYLVLDEADRMLDMGFEPQIRKIVKQVQPKRQTLMFTATWPKEVRKIASDLLSNPVQVNIGNTDQLVANKSITQYVDVITPPEKSRRLDQILRSQEPGSKIIIFCSTKRMCDQLARNLARQYGASAIHGDKSQAERDSVLSEFRSGRCPILVATDVAARGLDIKDIRVVVNYDFPTGVEDYVHRIGRTGRAGATGVAYTFFCDQDSKYASDLVKILEGANQSVSQQLRDMVSRGGYGGRSRRWASSDDSYGGRGYDSGYTSRSTDNYNSGYGSQSGNGSSFHSSFHNSNSGNQFGDTSGFQTSSNNDQPGDGLSFHARFYSSSRGSDQSRTNNAGFRDRSRSPPSNRNHEDPGSKAVGVSNW

SEQ ID NO: 77322 - DNA, 2070 bp, Oryza sativa subsp
  CDS (1)..(2070)
atggcttcggcggcggcggcggcggcaacggcgaggggcccccggtacgcgccgccagatccgacgctgcccaagccgtggagggggctcatcgacggcaacaccgggtacctctacttctggaacccggagaccaaggccgtgcagtacgaccgccccacggcgccgccgccctcctcccccccggcgcagcagcctccggagaggcctaggaacagcgatcctgctgagtcgcaggcgcaggctggagcgagccgaacgcagaatgctgctcctgctgatgatagggcaaggaatgatcatttgaatgatcatttcgagcggcgcacggaagcggcgggaagtcatgcgcagaacgtgcctttcactgagcaaaatactaggagcaacccttcttcgcagccgtgctctgcagctggagtataccctgcacagaatgtattttcagaggctgccagtggagaccgcacctcaccagaagcgtatcgtgctaagcacgagatcactattgtcggaaatgaggctccagctccattcatgacatttcagtccacaggtttccctccagagattctaagggaggtacagcaagcgggattctctgcaccaactcctatccaagctcaatcatggccaattgctcttaggaatcgtgatattgtagctgtggcgaagacaggttccggaaaaacactgggttatctcattccagggtttatccttcttaagcgccttcaacataattcaagggatggtccaacggtattagtgctttctccaacaagggaattggcaacacaaatccaagatgaagcgaaaaagtttgggagatcgtcaagaatatcgtctgtttgtttatatggaggtgctcctaaaggtcctcagctaagagatctagagcgtggtgcagacattgtggttgcaactcctggaagattgaatgacattttagaaatgcgaagagtgagcctacatcaagtatcttatcttgttcttgatgaggctgaccgcatgcttgatatgggttttgagccacaaataagaaaaattgtgaaacaagtacaacccaaacgacagactcttatgttcactgccacttggccaaaagaggtgaggaaaatagcctcagatttgctgtccaatccagtccaagttaacattgggaacactgatcaactggttgccaataagtcaatcactcagtatgtggatgttatcacacctccggagaaatcgaggcggcttgatcaaatcctaaggtcacaggaacctggatcgaaaatcataatattttgctccacaaagaggatgtgtgatcagctggctcgaaacctagcacggcagtatggtgcttctgctattcatggtgataaatcacaagccgagagggattctgtgttgagtgaatttcgaagtggcagatgccctattcttgttgctactgatgtggctgcccgaggcttggacataaaggatatcagagttgtggtcaactacgatttcccaacaggtgttgaggattacgtccatagaattgggagaacaggacgggctggagcgactggagttgcctatacattcttctgtgatcaggattcaaagtatgcttcagatctcgtgaagattttggagggtgcaaaccagtctgtttcgcaacagttgagagatatggtctcccgtggagggtatggtggaaggtcacggcgctgggcatcttcagatgactcttatggtggtcgaggatatgattcaggctatacttcaaggtcgactgacaactataacagtggttatggcagtcagtctgggaatggttctagctttcatagtagcttccataacagcaacagtggcaatcagtttggcgatacttctggcttccaaaccagcagcaacaacgatcaacctggtgatggtctcagctttcatgccaggttctatagctcttctcgaggcagcgatcagagcagaacaaacaatgctggctttcgtgatagaagtaggagtcctccaagcaatcgcaaccatgaagatcctgggtccaaggctgttggtgtctccaactggtaa

SEQ ID NO: 77323 - protein, 689 aa, Oryza sativa subsp
MASAAAAAATARGPRYAPPDPTLPKPWRGLIDGNTGYLYFWNPETKAVQYDRPTAPPPSSPPAQQPPERPRNSDPAESQAQAGASRTQNAAPADDRARNDHLNDHFERRTEAAGSHAQNVPFTEQNTRSNPSSQPCSAAGVYPAQNVFSEAASGDRTSPEAYRAKHEITIVGNEAPAPFMTFQSTGFPPEILREVQQAGFSAPTPIQAQSWPIALRNRDIVAVAKTGSGKTLGYLIPGFILLKRLQHNSRDGPTVLVLSPTRELATQIQDEAKKFGRSSRISSVCLYGGAPKGPQLRDLERGADIVVATPGRLNDILEMRRVSLHQVSYLVLDEADRMLDMGFEPQIRKIVKQVQPKRQTLMFTATWPKEVRKIASDLLSNPVQVNIGNTDQLVANKSITQYVDVITPPEKSRRLDQILRSQEPGSKIIIFCSTKRMCDQLARNLARQYGASAIHGDKSQAERDSVLSEFRSGRCPILVATDVAARGLDIKDIRVVVNYDFPTGVEDYVHRIGRTGRAGATGVAYTFFCDQDSKYASDLVKILEGANQSVSQQLRDMVSRGGYGGRSRRWASSDDSYGGRGYDSGYTSRSTDNYNSGYGSQSGNGSSFHSSFHNSNSGNQFGDTSGFQTSSNNDQPGDGLSFHARFYSSSRGSDQSRTNNAGFRDRSRSPPSNRNHEDPGSKAVGVSNW

SEQ ID NO: 77324 - DNA, 2010 bp, Ciona intestinalis
  CDS (1)..(2010)
atgtttgacgacgattgggaaccagcacctttaaccgcccttggaaacacagattttcgaggtgcaagttcttttgataacccgtattccaagaaagatgatggtggttttggttcaggttttggtgatagccgtggaggtgcacgcagcaaaggttgttttaaatgtggagaagaaggtcatatgtccagagaatgcccgcagaacactggatcaggttttggtgatagccgtggaggtgcacgcagcaaaggttgttttaaatgtggagaagaaggtcatatgtccagagaatgcccgcagaacactggatcaggttttggtgatagccgtggaggtgcacgcagcaaaggttgttttaaatgtggagaagaaggtcatatgtccagagaatgcccgcagaacactggatcaggtgacagacattcaaacgcatattttaaaggtggagatcacgctgctcaggaatatcataaggctggagacggagataaacctcgtcctcctctgtacattccccccccacctcctgaggatgaggttgaaatgtttgctagcatgcagcgaggaattaactttgggaagtacgatgccatccctgtggaggtgagcggactcaacgctccgaagtgcatttcaactttcgagatggcaaacctccaagaaacaatcctggtaaatgtgcagaaagcaggttatgacagacctacacctgtgcaaaaatacagcattcccattattaatgctgatcgtgacttgatggcatgtgcacagacaggatctggcaaaacggctgcgtttttgcttccggtccttactaagctggttgaatcgggtgtaaagtcgtctgaattcagtgaaaagaaaactccacaagcgattataattggcccaacaagagaacttgtaaaccagatttttctggaagcccgtaaattctcacgtagcaccattattcatccagtggttgtatatgggggcaccagtgttggttaccaaataagagctgtacaaaaaggttgtgacgtattgatcgcaacccctggtcgtctgatggattttattaaccgtggcttgattggtctggagaatgttcggttcattatcctcgatgaagcagatcggatgttggatatggggttcgaatctgagatcaggaagcttgtatctttaccagggatgccacagaagaacaatcgtcacacgcttatgttcagcgcgacatttccagatgaaatacaaaaacttgctcacgactttctccgggaggacttcctgttcctcacagtaggaagagtagggggagcatgctccgatgtcacgcaaacagtgatctccgtggagtggaaagacaaacgctccaaactactcgagcttattgcagatgttaatgaaaccaagagtcgtactcttgttttcgtagaaaccaagagaggagctgatttcctcgcttgtgttttatgccaagaagatttcccaaccacaagcatccatggagatcgtttacaacaagatagagagcaagcactccgtgatttcaaattagcagtttgtccaatacttgttgctacttcagttgctgcaagaggattagacataccaaaggtagagcatgtgattaactatgacatgccgagagaaatagatgaatatgtgcatcgaatcggacgtactggtcgttgtggtaacctgggacgcgcaactacattttttgacaacaaaaaagacgcaaatctggctcgctcacttgttaaaattctttccgaggctcaacaagaagttccaggttggttgggggaatgtgcagagtctgctgttggttcgaatttcggagcagaaaaaggaagatttggtggaaaagaccttcgggagagaggtggagaaggaattactggtttcggatcaatgggtggtggaagtggagcaaggagcactgctgattatgattataatgatggtggtggtttcgactgtgttggtgtgaatgacgatgatgactcgtgggattaa

SEQ ID NO: 77325 - protein, 669 aa, Ciona intestinalis
MFDDDWEPAPLTALGNTDFRGASSFDNPYSKKDDGGFGSGFGDSRGGARSKGCFKCGEEGHMSRECPQNTGSGFGDSRGGARSKGCFKCGEEGHMSRECPQNTGSGFGDSRGGARSKGCFKCGEEGHMSRECPQNTGSGDRHSNAYFKGGDHAAQEYHKAGDGDKPRPPLYIPPPPPEDEVEMFASMQRGINFGKYDAIPVEVSGLNAPKCISTFEMANLQETILVNVQKAGYDRPTPVQKYSIPIINADRDLMACAQTGSGKTAAFLLPVLTKLVESGVKSSEFSEKKTPQAIIIGPTRELVNQIFLEARKFSRSTIIHPVVVYGGTSVGYQIRAVQKGCDVLIATPGRLMDFINRGLIGLENVRFIILDEADRMLDMGFESEIRKLVSLPGMPQKNNRHTLMFSATFPDEIQKLAHDFLREDFLFLTVGRVGGACSDVTQTVISVEWKDKRSKLLELIADVNETKSRTLVFVETKRGADFLACVLCQEDFPTTSIHGDRLQQDREQALRDFKLAVCPILVATSVAARGLDIPKVEHVINYDMPREIDEYVHRIGRTGRCGNLGRATTFFDNKKDANLARSLVKILSEAQQEVPGWLGECAESAVGSNFGAEKGRFGGKDLRERGGEGITGFGSMGGGSGARSTADYDYNDGGGFDCVGVNDDDDSWD

SEQ ID NO: 77326 - DNA, 3357 bp, Ostreococcus tauri
  CDS (1)..(3357)
  misc_feature (3277)..(3277): n is a, g, c or t
  misc_feature (3278)..(3278): n is a, g, c or t
  misc_feature (3279)..(3279): n is a, g, c or t
  misc_feature (3280)..(3280): n is a, g, c or t
  misc_feature (3281)..(3281): n is a, g, c or t
  misc_feature (3282)..(3282): n is a, g, c or t
  misc_feature (3283)..(3283): n is a, g, c or t
  misc_feature (3284)..(3284): n is a, g, c or t
  misc_feature (3285)..(3285): n is a, g, c or t
  misc_feature (3286)..(3286): n is a, g, c or t
  misc_feature (3287)..(3287): n is a, g, c or t
  misc_feature (3288)..(3288): n is a, g, c or t
  misc_feature (3289)..(3289): n is a, g, c or t
  misc_feature (3290)..(3290): n is a, g, c or t
  misc_feature (3291)..(3291): n is a, g, c or t
  misc_feature (3292)..(3292): n is a, g, c or t
  misc_feature (3293)..(3293): n is a, g, c or t
  misc_feature (3294)..(3294): n is a, g, c or t
  misc_feature (3295)..(3295): n is a, g, c or t
  misc_feature (3296)..(3296): n is a, g, c or t
atgccgagcgatgcggcgaagaaacgcgcgcgcgcggacgagaccccggaggcgcgcgcgcgacgaaaggcggcgaagcgagcgaagaaagatgcggaggagcggcggcgagacgtcgagcgcgacgcgtcgccgtcgatcgaggcgccgcccacgcccacgctcaagcgcgtggcgtccaaggaagactttcgtaaggagcatcagatatcgatcaagaacgcgtgcgagcggacgagggatttggagccgtacgtgacgtttgacgacgcaaagtttccggcggcgctgcgaaaggcgttaaaggcgcaaggatacgacgcgccgacgccgattcaggccgaggcgtggccgattttgttgaaagggaaagatgtggtggcgatcgcgaagacgggttcggggaagacgtgcgggttcttactcccggcgttggcgaaaatcgtcgccgaggggacgcaaaaggcgccggagatgcaactcgtcgacgggcgatggagaccgggagcggtgacgccgagcgtgatcgttctcgcgccgacgcgagagttggcgattcagattcacgacgagtgcgccaagttttgtccggcggcgggatgtcgttcggcggtgctctacggaggcgccgccaagggcgaccagcttcgagcgctgcgctctggcgcggatgtcgtcgtcgccaccccggggcgcttgaacgatttcttagagccccctcccggattcaccgcccccgtgagcgccgtgaaggcggcgtacgtggtattggacgaagctgatcgcatgttagacatgggtttcgagccgcagattaagaagatttttaagctgtgtccgtcggcgcgacagacggtgatgttcaccgcgacgtggccgaagggcgtgcaaaagatcgccgatgcgttcacgaccaagccgattcacatccaaatcggttctggtggggacaagctcacggcgaacaagtccatcacgcaaaccgtggaggtggtggaggaggaggaaaagtttgatcgatgcgtcgccatcctgaagaaggagctcggtaagaacgagacgtgcatcatgttcgccggcacgaaacgtcgatgcgatttcttagatcgccgactgaaacaagtcgggttctcatccgcggggtcgattcacggcgacaaggatcagtacgagcgcgagatggtgctcgacaatttccgacgcggtcgcgggaacattctcgtcgcaaccgacgtcgccgctcgcggcttggacatcccgggcgtcgccgcggtcatcgtgtacgattttccacttcaggtcgaggactacgtgcacagaatcggccgaaccggtcgcgcgggtaaggatggaaaggctttcacgtttttcaccaaggacaaccgcggcgctgcgaatgagctcatcgaaatcctccagggtgcgggtcaaaccgttcctctggcgctccaggcgatgcaacgcaaggtatttcaattcatcacgttcgactcatcgacgcttctccgtccgctctcccgccgtcgccactttgatccaattcgtcgtcgcgtcgacgtctccggcccgccccgcgccgcgtccgcacacgtcgtcgcgctccacgcccgtgatgcgcgtcgcgtttcgcccagacctcgcacacgggcgatcgggtcatcgaacgcgcatcgaacgcgcgcaaagcgtcatcgcgggcgcacaccgcgctcggtgagcgacgagagcgtcgcggataggactccgtcgcagcgcgaatcaacctctcgaaacgtcgtcacctcgaacgaggacgacgcgcaggcggtaaaccgcgcgtcgaacgcggtcgagcccgcggagtgccgggtgacgcgcgatttaggtcgggcggtgagcgcgaaggagggttggcggcgcctcgcgcgggcgacgcgcgagtccagacgcgacgtcgagcggagcggtgagtcgaggaacgagagcgggtgcgtgcggttcgtgatcgacgttccgagaggggatgcgtgtttagattgggtgcgagaggcgagcggacgcgctggagagggtgcgccggcgttttattggtcgcccagggcgcgcacggcgagcggcggcggaaaagcgagcggaaggacacgcgatggatcggtcgaggacgacggacgcgcgagcaggcatgacgggatgttgagttctgatagaggcgcgcgcgcgggtttaggggcgtgcgcgacgtggacggacgcgggagaggaggacgagtcttcgtttcagcggcgcatagcatccatgcggaggtttcttagcggtcatcagagcggacgtgccggcgcacgcgtgtacggagcgggacgattcgaccccggacgcacacctgaggcagagtgggcgtcgttcgggacgcacttcttcttcttacccgtgctcgaggtggtggagggcgtcaagtgcgccacgctctcggtgtgcgtcgcgtgggacgcgaagggcgacgagaactgcggtccctcggcgaagtcgttcgttcaagcgttggatgacgcgtgtgagatgctcaagcgctcgatgagcgtgaacctgagctcgaacgagacacttccgcccggagcggcgcacgtaacagacaggactctggtgcctgatgagaacgggtggtccaaggacgtgtcctccgtcatcgatcgtattcgagcatccaaggcgagttcgagctcgaatcgcgaaaagggtgaggcgtgggtggacttgggaagtagctttgatgaagcggattcaccaaacgtgcggtccgcattggagtcgctcgggcgcgcggtgggcttagaagcgccaagcgcggttctcgaccagttcgaggcgatgacgatggcgagaagtctctcggatgaaaacgtgaattcagacggcatggtggacgccatgcttctcggaggaaaatccatggaaccgctgcgtaaagtcgtcttggctcgccgtagcaagctcgcgctcagcgcgccggtgaacacatttgacttgatttctaggcttcaagcccgcgaccccgacgcgtatcagttcgttttgaggcatccaaacggagagacgttcttaggatcgacccctgaacgtttgtttctgagtcaaggaggaagagcttccagcgaagccgtggcaggcacgcgcgcgcgaggctctgacgacggtgaagacgcagcgctcgcttacgacatgcttttgtcgccaaaagaacacgaagagttcgcgatcgtaagagaagaagttcgtcgtgctctcggggaagtcgcggagnnnnnnnnnnnnnnnnnnnncccgttcttcgaggccggtatttcgttcttcggaagtggaaggccggcgccggcgccttga

SEQ ID NO: 77327 - protein, 1118 aa, Ostreococcus tauri
  misc_feature (1093)..(1093): The Xaa at location 1093 stands for Stop, Ala, Arg, Asn, Asp, Cys, Gln, Glu, Gly, His, Ile, Leu, Lys, Met, Phe, Pro, Ser, Thr, Trp, Tyr, or Val.
  misc_feature (1094)..(1094): The Xaa at location 1094 stands for Stop, Ala, Arg, Asn, Asp, Cys, Gln, Glu, Gly, His, Ile, Leu, Lys, Met, Phe, Pro, Ser, Thr, Trp, Tyr, or Val.
  misc_feature (1095)..(1095): The Xaa at location 1095 stands for Stop, Ala, Arg, Asn, Asp, Cys, Gln, Glu, Gly, His, Ile, Leu, Lys, Met, Phe, Pro, Ser, Thr, Trp, Tyr, or Val.
  misc_feature (1096)..(1096): The Xaa at location 1096 stands for Stop, Ala, Arg, Asn, Asp, Cys, Gln, Glu, Gly, His, Ile, Leu, Lys, Met, Phe, Pro, Ser, Thr, Trp, Tyr, or Val.
  misc_feature (1097)..(1097): The Xaa at location 1097 stands for Stop, Ala, Arg, Asn, Asp, Cys, Gln, Glu, Gly, His, Ile, Leu, Lys, Met, Phe, Pro, Ser, Thr, Trp, Tyr, or Val.
  misc_feature (1098)..(1098): The Xaa at location 1098 stands for Stop, Ala, Arg, Asn, Asp, Cys, Gln, Glu, Gly, His, Ile, Leu, Lys, Met, Phe, Pro, Ser, Thr, Trp, Tyr, or Val.
  misc_feature (1099)..(1099): The Xaa at location 1099 stands for Ala, Arg, Asn, Asp, Cys, Gly, His, Ile, Leu, Phe, Pro, Ser, Thr, Tyr, or Val.
MPSDAAKKRARADETPEARARRKAAKRAKKDAEERRRDVERDASPSIEAPPTPTLKRVASKEDFRKEHQISIKNACERTRDLEPYVTFDDAKFPAALRKALKAQGYDAPTPIQAEAWPILLKGKDVVAIAKTGSGKTCGFLLPALAKIVAEGTQKAPEMQLVDGRWRPGAVTPSVIVLAPTRELAIQIHDECAKFCPAAGCRSAVLYGGAAKGDQLRALRSGADVVVATPGRLNDFLEPPPGFTAPVSAVKAAYVVLDEADRMLDMGFEPQIKKIFKLCPSARQTVMFTATWPKGVQKIADAFTTKPIHIQIGSGGDKLTANKSITQTVEVVEEEEKFDRCVAILKKELGKNETCIMFAGTKRRCDFLDRRLKQVGFSSAGSIHGDKDQYEREMVLDNFRRGRGNILVATDVAARGLDIPGVAAVIVYDFPLQVEDYVHRIGRTGRAGKDGKAFTFFTKDNRGAANELIEILQGAGQTVPLALQAMQRKVFQFITFDSSTLLRPLSRRRHFDPIRRRVDVSGPPRAASAHVVALHARDARRVSPRPRTRAIGSSNAHRTRAKRHRGRTPRSVSDESVADRTPSQRESTSRNVVTSNEDDAQAVNRASNAVEPAECRVTRDLGRAVSAKEGWRRLARATRESRRDVERSGESRNESGCVRFVIDVPRGDACLDWVREASGRAGEGAPAFYWSPRARTASGGGKASGRTRDGSVEDDGRASRHDGMLSSDRGARAGLGACATWTDAGEEDESSFQRRIASMRRFLSGHQSGRAGARVYGAGRFDPGRTPEAEWASFGTHFFFLPVLEVVEGVKCATLSVCVAWDAKGDENCGPSAKSFVQALDDACEMLKRSMSVNLSSNETLPPGAAHVTDRTLVPDENGWSKDVSSVIDRIRASKASSSSNREKGEAWVDLGSSFDEADSPNVRSALESLGRAVGLEAPSAVLDQFEAMTMARSLSDENVNSDGMVDAMLLGGKSMEPLRKVVLARRSKLALSAPVNTFDLISRLQARDPDAYQFVLRHPNGETFLGSTPERLFLSQGGRASSEAVAGTRARGSDDGEDAALAYDMLLSPKEHEEFAIVREEVRRALGEVAEXXXXXXXPFFEAGISFFGSGRPAPAP

SEQ ID NO: 77328 - DNA, 2082 bp, Ostreococcus tauri
  CDS (1)..(2082)
atgggtaagacgaaggataaagcggccaaggaggcgaagaaggagaagaaggagaagaagagctccaaggagagaacggtggaggcggcggcggcgacggagacgaagaagaagcgaaaggcgagcgatgaggaggatgaatcaaagagagaaaagtcgcgcgcgcgaagagaggaggacgagcgggcggagggagatctcgaactcgggacgcccgaaccggaggagccgaatccgttggcgttggataattttaagggtttgactgatccggtgaagacgacgctgcggaagaaggggtacgatgcgttgtttcagattcaggcggagacgctggaaatcgcgctcggcgggcgcgacgtcgtgggacgagcgaggactggatgcgggaagacgctggcattcgtgctgcccatcatcgagttgatggccaagatgtcgccaatgccggcgaatggacgacgggtgcagggcagacgaccgatgtgcgtggtgttggcgcctacgagagagctcgcaaagcaagtcttcgcggatttcgactggattggaaactcgtacggattcaaatctctgtgtgtgtacggcggcgcgccgtatcgcgagcaagagatgggtttgcgaagcggtgttgatatcgtgatcggtaccccgggacgcatgaaggatcacctcgagcgcaagacgctgatgatgacggatctgaagtttcgcgtgctcgacgaagccgacgaaatgttgaacatgggtttcgtcgacgatgtcgagaccattttgaagagctctggtgacgtgcaaacacttttgttctccgccacgcttccatcgtgggtgaaggacatctccaagcgcttcctgaagcccaactactcgacggttgacttggttggtgacgaaaagcaaaaagcgagcggcgccgtgcagcacatgttgttgccgtgccagtggtccgatcgagttgacctcgtatgcgacgtcattcgatcgaaagcccctggtggtggacgtgttatcgttttctgtgataccaaacgcgattgcggcgagttgtgcgacaacctgcaaaaggaaatcccgaagggggcaaaggcgcttcacggcgacgtcagccaaagccaacgcgaagtcgtcctttcgttgtttcgcgaagacaagttccaggttttggtcgcgaccgatgtcgccgctcgcggtttggacatcacgggtgtggaacttgtcattcagtgcgaaccaccgaaagatgcagagacgtatattcaccgctcggggcgaaccggaagagcgggcgcaactggaattagcgtcaccctttgtacgccgcgtaacgagtgggctgtaccgaacatcgagcgtaagggaggattcaagttcattcgaatcggaccaccgcaaccggcggagatggccaaggctgcggggaagattgccggcgaacaaattcgcaaggtgcataagggtgccgcgaagctcttcatggatgtcgcgcgcgatttactcgagggtgaggacagcgacagcgaagagggtcgcgatccagtcgaggtacttgcgatggcgatcgccaagcttgcaggtcatggagaacttcgtcagcgctctctattgacgtcgcactcagggcagacaactttgctcttcaccgccaacggcgtcgatatcaggactccgacatatgtctggaacttcttacgtcaacgcatggacgagagtgagcttcaacttcgtcgtctcacgttgagtatggataacaaggcggccgtgttcgacgtaccatcggaactcgccgataagtttgtcgcgctctcagagccagcgaccagcggtaagaccgctgtcaccatcatcgagtgcgctgagttgcctgaattgagtcagcgaccgcaagcccgcgaaggtggttttggtggcgggcgcggcggtggtggaggacgattttctggtcgaggtgggaactacggtggcggccgaggctctcctggtggtcggttcggtggacgaggttctccaggcggacgtgcgggcggtcgcggtggcggaggacggttctcgggcggaggacgaggaagaggtcgttattag

SEQ ID NO: 77329 - protein, 693 aa, Ostreococcus tauri
MGKTKDKAAKEAKKEKKEKKSSKERTVEAAAATETKKKRKASDEEDESKREKSRARREEDERAEGDLELGTPEPEEPNPLALDNFKGLTDPVKTTLRKKGYDALFQIQAETLEIALGGRDVVGRARTGCGKTLAFVLPIIELMAKMSPMPANGRRVQGRRPMCVVLAPTRELAKQVFADFDWIGNSYGFKSLCVYGGAPYREQEMGLRSGVDIVIGTPGRMKDHLERKTLMMTDLKFRVLDEADEMLNMGFVDDVETILKSSGDVQTLLFSATLPSWVKDISKRFLKPNYSTVDLVGDEKQKASGAVQHMLLPCQWSDRVDLVCDVIRSKAPGGGRVIVFCDTKRDCGELCDNLQKEIPKGAKALHGDVSQSQREVVLSLFREDKFQVLVATDVAARGLDITGVELVIQCEPPKDAETYIHRSGRTGRAGATGISVTLCTPRNEWAVPNIERKGGFKFIRIGPPQPAEMAKAAGKIAGEQIRKVHKGAAKLFMDVARDLLEGEDSDSEEGRDPVEVLAMAIAKLAGHGELRQRSLLTSHSGQTTLLFTANGVDIRTPTYVWNFLRQRMDESELQLRRLTLSMDNKAAVFDVPSELADKFVALSEPATSGKTAVTIIECAELPELSQRPQAREGGFGGGRGGGGGRFSGRGGNYGGGRGSPGGRFGGRGSPGGRAGGRGGGGRFSGGGRGRGRY

SEQ ID NO: 77330 - DNA, 1809 bp, Pasteurella haemolytica
  CDS (1)..(1809): transl_table=11
atgacaactgaatctttaactttcgccgatttaggcttacctcaaccaatccttgatgctgtaaatgaaatgggctttgtaaacccatcacccattcaacaagaatgtattcctcatttattagccggtcgtgatgtgcttggtatggcacaaaccgggagcggtaaaaccgccgcattctcgctgccgctgttggcacaaattgacccaacacaacgccacccgcaaatgttggtgatggcacccacccgtgagcttgcgattcaagtagccgatgcttgtgagcagtttgcaaaaaatatgaaaggcattcgtgtagtgacggtttatggtggacaacgttacgacattcaattacgtgctttaaaacaaggctcacaagtagtagtgggtacacctgggcgtattcttgaccatatccgccgtggcacattagatttatccgaattaaaattcatcgtgttagatgaagccgatgaaatgctgcgtatgggctttattgacgatgttgaaacggtaatggctgaattaccggaaacacatcaaactgctctcttctctgccaccatgccggagccgattcgccgtattacccgtcgttttatgaaagatccgcaagaggtaaaaattaaggcaaccgagcgttcagccccggatattgaacaaagctactggctggtaaacggcttccgtaaaaacgatgcgttattgcgtttcctagaagtagaagaatttgatgctgctatcatctttacccgcaccaaaaccggtactattgatattaccgaattgtgtgaacgcaacggctaccgtactgcggcattaaacggcgatatgacccagcaagcccgtgagcaaaccttagataaattacgctccggtcgtttagatattttagtcgccaccgatgttgctgcccgtggtattgatattgagcgaatcagcttggttattaactacgatattccgttagaagaagaatcttatgttcaccgcatcggacgtaccggtcgtgccggtcgttcaggtcgtgccttactgtttgttgagcctcgtgaacgccgcttattacgcaatatcgaaaatttaatcaaaaaaccaattaatgaagtggcgattccaaaccacgaaattttaatggaaaaacgccgtgagaaattcaaagcccgcatttctaagcagttagaacatcacgatttagaaaaatatcgtgaattgttggaagatttatttactgcggatcaagaccacgaagaattagcagcggcgatgatgatgttactgcaagaaaaacaaaaactgattctgccaccggatccggttgtgcgtgctgcccgttctgaacgtggacgtgaccgcaatgagcgaaacgatcgtcgtaacggtcgtgaacaccgtgaaaacaatggtgtggcaatggatttataccgcattgaattggggcgtgaagacggtgtggaagttcgtcatattgttggagcgattgccaacgagggggatatcagcagccgttacatcgggcatatcaaactttatgataaatactcaaccattgagttgccgcaaggaatgccaaatcatctcgtacaacatttcgctcacaaagcacgtgtattaagcaaaccaatgcagatgacattacttggctctgcaaacagtgcaagtaatgcaaatccatttgaaggtcgtggtcgccgtggtaacgatcgtaatgatcgtggtggtcgccgagacgggggtttcaataaagaccgcaaaggtggctttaaagaaaaacgtttcagtgaaaaacgtggtcgtcgtgactaa

SEQ ID NO: 77331 - protein, 602 aa, Pasteurella haemolytica
MTTESLTFADLGLPQPILDAVNEMGFVNPSPIQQECIPHLLAGRDVLGMAQTGSGKTAAFSLPLLAQIDPTQRHPQMLVMAPTRELAIQVADACEQFAKNMKGIRVVTVYGGQRYDIQLRALKQGSQVVVGTPGRILDHIRRGTLDLSELKFIVLDEADEMLRMGFIDDVETVMAELPETHQTALFSATMPEPIRRITRRFMKDPQEVKIKATERSAPDIEQSYWLVNGFRKNDALLRFLEVEEFDAAIIFTRTKTGTIDITELCERNGYRTAALNGDMTQQAREQTLDKLRSGRLDILVATDVAARGIDIERISLVINYDIPLEEESYVHRIGRTGRAGRSGRALLFVEPRERRLLRNIENLIKKPINEVAIPNHEILMEKRREKFKARISKQLEHHDLEKYRELLEDLFTADQDHEELAAAMMMLLQEKQKLILPPDPVVRAARSERGRDRNERNDRRNGREHRENNGVAMDLYRIELGREDGVEVRHIVGAIANEGDISSRYIGHIKLYDKYSTIELPQGMPNHLVQHFAHKARVLSKPMQMTLLGSANSASNANPFEGRGRRGNDRNDRGGRRDGGFNKDRKGGFKEKRFSEKRGRRD

SEQ ID NO: 77332 - DNA, 2551 bp, Aedes aegypti
  CDS (62)..(2476)
gtgatcgcaaaccaaaaaattgctatttacgattctctcagtgaaattcaaacaatttaccatgaaaattaataaaaaagcgcctaccaagagtgttaaaaagacggccgatgtagtggacaaaaagtacgacctgatcaaaaccattaacgaagatgaagaagtggaggatctctcggaggaatcggacgttgaggttgagtatcaacccaccaagttgaagaaccaaaagaagggcgacttcgacaatgacttcaagttcgtctcctcagtgagcgaatacaatcacgacacatgggatgacctgatgaagtacgttaagaaaaagaatcgcggaaaggtggaagacaagattgcgggcgttatcaaaggtcgttctaaggagaatgcggaaatgctggaagaagcggacgaccacgacccgaattcgtaccacgacgaagttgacctatccgatgatgagctgaagcacgacgtcatgcgagtgaaggagaaaaagggccgaaaacgtgagattcccaccgacaataaggtcgaaatcgaggatgaggaagacgaaccgcaggactttttcgaagaagccggtggcaatgaggaaatatcttcgttctaccaaatgaacctttctcgtccactgatgaaagcgatcggagtgcttggctacatataccctacacctatccaggctgcaactattccgatagctctgctgggaagagatatctgtggttgtgccgccactggaactggtaaaaccgctgcctatatgcttcctacgttggaacgcttgctgtacaaacctagtgcagctcaggcggtcaccagagtgttggtccttgtgccaactcgtgaattgggggcacaggtctatcaggtctccaaacagctgacacagttcaccagcattgaagtcggcattgccattggaggtttggacgtgaaagcgcaagaagccgtgctcagaactaatccggacgtcgtaattgccacgcctggccgtttgatcgatcatataaagaacacacccagcttctcattggactcgattgaggtactaattctggatgaggctgatcgaatgttggacgaatatttcgccgagcaaatgaaagaaattattcaaagctgcagcaaaactcgccagacaatgctgttttctgcgacaatgaccgatcaagtaaaagatttagcagcggtatcgcttacgaaaccagtcaaagttttcgttaataataaccaaacagtagcattcaacctacgccaagaattcatacgaattcgtgaaggtcgtgaggcggatcgtgagccacttctggctgcgttgatctgccgtaccttccacgatcattgtatggtgtttgtccaaaccaagaagactgcccacagattacgaattcttcttgggctgctgggagtcaaatctggagagttgcatggggatttaactcagtcccaacgattggaatctttgaagcaattcaaagatgaacaagtagatgttctgattgcaacagatgtggcagctcgaggcttggacataagtggtgttaaaaccgttatcaacttcgttatgccaatcacgatggaacattacatccatcgagtgggacgaacagctcgtgccggtaaagctggtgtttccgtttctttggctggagaactggaacgaaaaattgtcaaagacataatcaaaaatgcagtaagtccggtcaaaaatcgtataattccgaccgagattgtcgataaatataggaaaaaggtgcttgctttggaagaggaaatcgaaaaagtcttgtgtgaggaaagggctgaaaaaatgctactgcaaacggaacagcaactgaaccgaacagaacggaaattgaaaggtgttgtgagtggacccagtcgcgaatggttccaaacccatcatgaacgaaaggaggaaaaggagcgcctttctgtgaagaatggcgacgagaatgaaaaacgtaagaaaaacaagaaacgtaagcgtggagacgacagcgacgacgaatttgaccctatcaaatatcagcaagagaaaaagcagaaggtggcaaagaaaaaggcagaggtacacaaaacgcccagccagttggcaaaggagcgtgctttacaggagttgaccaaagtgtcccttgtgcaggccaagttggccaagatcaaaaatcgtccttcacgagtcactgctgcagctgatgacgatgacttcggaaaaggcaaaaacaattcaagacaaaagaataaaaaacgattgtctcgtttcgagaaagacctcaccgacaccagcaaaaagggtgtgaagaaattacgatatgatgccactaagaaacaaaaaatggataagttcgacaagggcaagatgtccaacatgaagatgagtgcggataaattccgcaacaaaaaaggccttaacaagtcgaataagggcaaatcttttggaccaaagcagtccagaaaaggaaagcattgattctttttgtacaaataaaaactatgattaataaatacataatgataaatcttgctataatatataaattgtttc

SEQ ID NO: 77333 - protein, 804 aa, Aedes aegypti
MKINKKAPTKSVKKTADVVDKKYDLIKTINEDEEVEDLSEESDVEVEYQPTKLKNQKKGDFDNDFKFVSSVSEYNHDTWDDLMKYVKKKNRGKVEDKIAGVIKGRSKENAEMLEEADDHDPNSYHDEVDLSDDELKHDVMRVKEKKGRKREIPTDNKVEIEDEEDEPQDFFEEAGGNEEISSFYQMNLSRPLMKAIGVLGYIYPTPIQAATIPIALLGRDICGCAATGTGKTAAYMLPTLERLLYKPSAAQAVTRVLVLVPTRELGAQVYQVSKQLTQFTSIEVGIAIGGLDVKAQEAVLRTNPDVVIATPGRLIDHIKNTPSFSLDSIEVLILDEADRMLDEYFAEQMKEIIQSCSKTRQTMLFSATMTDQVKDLAAVSLTKPVKVFVNNNQTVAFNLRQEFIRIREGREADREPLLAALICRTFHDHCMVFVQTKKTAHRLRILLGLLGVKSGELHGDLTQSQRLESLKQFKDEQVDVLIATDVAARGLDISGVKTVINFVMPITMEHYIHRVGRTARAGKAGVSVSLAGELERKIVKDIIKNAVSPVKNRIIPTEIVDKYRKKVLALEEEIEKVLCEERAEKMLLQTEQQLNRTERKLKGVVSGPSREWFQTHHERKEEKERLSVKNGDENEKRKKNKKRKRGDDSDDEFDPIKYQQEKKQKVAKKKAEVHKTPSQLAKERALQELTKVSLVQAKLAKIKNRPSRVTAAADDDDFGKGKNNSRQKNKKRLSRFEKDLTDTSKKGVKKLRYDATKKQKMDKFDKGKMSNMKMSADKFRNKKGLNKSNKGKSFGPKQSRKGKH

SEQ ID NO: 77334 - DNA, 1595 bp, Aedes aegypti
  CDS (1)..(1581)
atggcatcgaaatcagacaaaaagttttccgatctcggattgaaaccgtggatcgctaaccaaatggacaagctcggtcttcgtcggccaacgccgatccaggaggcgtgcatcccccgcatcttggatggacaggactgcatcggtgctgccaagaccggttccgggaagacgtttgcctttgcgttgcccatcctgcagaggctaagtgaggaaccgaccagcaatttcgccctggtgttgactcctactcacgaacttgcctatcagattgcggaacagttctccgtggcgggacaaccgatgagcgtgaaagtgtgcgtgataaccggtgggacggatcagctgctggaggcacaacggcttcagagccggccgcacatcgtggtggctatgccaggccgattggcatcccatttgaccggatgcaacacgtactcgttccgggccatgcagttcctggttgtggacgaagccgatagggttctgagtggaagcttcgacgaagatctggcagcgattgatagctttctgccgaagaagcgccagaatttgttcttttcggccacgctgaaggagtttatgcgggagaacagtgtctttccgattggggccgatgctttcgagtggtcggaggaaagtgaggtagcgacggtggaaacgttggaccagcggtacatcctgtgtgccgattacgatcgggatatggtgctgatagagacccttagaaagttcaaggaggataacgaggaagccagcgtgatgatctttacaaactccaagaaagattgccaagtcttgtctatgacactgaacacgattggatttgataacgtgtgtctgcacggatttctgaggcaaaaagaacgtgtggcggcgctcaataggttcaaatcgaagcacgtgagagttctgattgccacggatgtcgccagtcgagggttggacattccgaatgtccagcttgttctgaaccatcgcttgccgaaaattccgaacgaatacattcaccgtgtcggacgaacggcgagagccggtcgcaaagggctggccatttcgatatttcggttcccgagggatttggaattcttgggagaaatcgagagcctgatcaatacgaaactgaccgagcacccgatcgatcaacggttggtggagcgaatcttcatgcaggtcagcgtggcgcgccgggaagccgaaatgaatctggacaataaggacttcgacgagaggcagcacaactaccggcggaaaaagtggatcgagcaaggtctggatccggacgagatggaagcaaaatggaagcaggagaaggaaacgcgagcggccgagcggaaggaacgactcaggaaagagaacgaagaccgcaagcgtgcagcggcgagtgaagatagatccacgtccgcaacgaaggatgaacgtttcgcgggggtggcacaaagtaagaaatttaagaagcgaaagtttgttacggctgaccaattggaagattttgcaaaggccgcaaaagttaagcaacgcagtgatgggaaaggtaaggtcaaaaagggaaaaatgaagatcaagaagaataaagcgtgattgatcatttgttg

SEQ ID NO: 77335 - protein, 526 aa, Aedes aegypti
MASKSDKKFSDLGLKPWIANQMDKLGLRRPTPIQEACIPRILDGQDCIGAAKTGSGKTFAFALPILQRLSEEPTSNFALVLTPTHELAYQIAEQFSVAGQPMSVKVCVITGGTDQLLEAQRLQSRPHIVVAMPGRLASHLTGCNTYSFRAMQFLVVDEADRVLSGSFDEDLAAIDSFLPKKRQNLFFSATLKEFMRENSVFPIGADAFEWSEESEVATVETLDQRYILCADYDRDMVLIETLRKFKEDNEEASVMIFTNSKKDCQVLSMTLNTIGFDNVCLHGFLRQKERVAALNRFKSKHVRVLIATDVASRGLDIPNVQLVLNHRLPKIPNEYIHRVGRTARAGRKGLAISIFRFPRDLEFLGEIESLINTKLTEHPIDQRLVERIFMQVSVARREAEMNLDNKDFDERQHNYRRKKWIEQGLDPDEMEAKWKQEKETRAAERKERLRKENEDRKRAAASEDRSTSATKDERFAGVAQSKKFKKRKFVTADQLEDFAKAAKVKQRSDGKGKVKKGKMKIKKNKA

SEQ ID NO: 77336 - DNA, 2989 bp, Aedes aegypti
  CDS (222)..(2006)
catcattgactgtgattagcaaagcgacgccttttagtagcgcacgtcgtagttccatcttcgccgcaagaaccttcagcttgcagcgtccggaagccattacttacccgcacaggtgcctggcaacagagagaaggaatttaacggttctccagcagcagcagtactattcgaccgcatcatttacagtcgacaaggagaacaacgaagaattcattgaaatggctccgagattcgaacgtgacgactacaagaaggactcgtaccgtggcgtgaagcgcacgggaacggaattcaaacgtccatccggccgagatggccgcgatggtggtggattccgtggaggtgccggtggaagccgctttggcggctcatccggcggtggccgcgacaagtggaccatggagtccaagcctctccaaaaaatcaactggagcaaaatgcaactatctccattcaagaaggacttttaccgggaacatccggcaatcaaaaaccgctctcaacgtgacgttgaacggtttctggaaaaacacgacattacactgattggaaattgtcccaagccaattactgaatttgatgaaattgacatgccggactacgtattgaatgaaattgaaaagcaaggcttccaaaggcctactccaattcaggctcaagggtggccaatcgcccttagtggtttgaacatggtcggcgtagccaagaccggctccggcaaaactcttggatatatgctaccagcaattgtgcacatcaaccaccagaagccggaccccagtgtccgtggtccactggtgcttgttcttgccccaacccgcgagttggcacagcagattcaacaagttgcaacagattttggatcatcgtcgtacattcgtaacacttgcctgttcggaggttccagcaagggccctcaggctagcgatttgcgccgaggagttgagattgtcattgcaactcccggtcgtttgattgatttcctggaaactggtacgaccactctacagcgcgttacctacttggttctggatgaagccgatcgtatgttggacatgggcttcgaaccccagattcgcaagattttggagcaagtgcgccccgatcgtcaaattttgatgtggagtgccacgtggccaaaggaagtgcagcgcttggcgcgtgatttcctcggagattacgtccaaatcaatgttggatcactggagttgtccgctaatcacaatattactcagtacgtgaaagttattgaggaacacgagaagaatgaacagcttggtaagctattggacaatctttctgcccggggtccagccggcaagattctgatcttcagcactaccaagcgtaagtgcgatcagattaccagctatctgcgccgttacggtcaggacgccgtcggaatgcatggtgacaagagccagcaagagcgcgagagagcactgaaccgcttccgcaactcaaacagctgcatcttggtcgctaccgatgttgctgctcgtggtctagatgttgatggcatcaaggtggtcatcaattacgactacccgcagcagacggaggattacgtgcaccgtatcggtcgtacaggtcgctcgaacgccaccggagaagcgtacaccttcttcacgtcgaatgagcgcaagatggccaaggaattggtggccatccttgaggaagccaaacaggacgtcccaccagagttgctgaagtggcgccacatgggcggcggtggcatcaaccgttatggcagcggtggtggcaaccgatttggcacattcaagggaggacgtggtggtgatttcggacgcggaggtggcgaccgatatggaggtggagaccgaggcgcaaagcgatcgtatggaggcagttccagctacggaggctcgacgtctaatggctacagtggtagctcgaatggctatggaaatagttcaagcagctatcgcaacggtactagtggaggcagtagtaatacgaagcacataaagtttgacgactaaacacgtcgttctgtactactttgtctcatctctagtaggattagtcttagctcgtcgtcttatctttaatcttaatgataacctatttaatttaaacaacaatcgtaaaaaagtattgttttagttgatccacgtgcgcgagaaatggaccaattacgtttgtcatttttttacaattttagataagagaaagtgaatttctaccctccgaagttgaacaaaaaccattcatttgtaaacgatcgcgcaccgatggaactcgggaagaagatgaaaatacttacaaatcttaattgctgtgatagatcatcagtcgagtatcacgtttatatcaatcggtttgatttagtttgaagttttaatttgaaaaggcaatcatttaccaaatctggaaattaggtacacaaatgaaacaataaacccaggaactgtaagttgaaggcttttgttcggattgaaccgttcaacacaagggcggtgacattccagtgtattaattagcaaaccatgtggttcctcgatggaaaataaaacaaagagaaataaaatcagttcactttacaataaataccggtttcaatttatttctaacaaacacaacattcccgtaaatggcacattctccaacactcccatttttcgtttcgtttctaaatacccagcgttttacagagattgtaatattttttcgtcaacctaggattatccaaacaaccatacaaatcattgatttttaagcagtccgttttactaagcgcttgacgttgtccaatcttaatccccggcattttgggctcgatcgtttgtttgcctttcccggtgctgaaatagctccgtccgtagtgcatgatactgttgtagtcgtattcgaagttgtaggtggtgttcttgagcgattgcttctcgaagttggatttgaatgctgaaaagattaaaaatggattctattattaatacacgaaataaaggcactattccaaccc

SEQ ID NO: 77337 - protein, 594 aa, Aedes aegypti
MAPRFERDDYKKDSYRGVKRTGTEFKRPSGRDGRDGGGFRGGAGGSRFGGSSGGGRDKWTMESKPLQKINWSKMQLSPFKKDFYREHPAIKNRSQRDVERFLEKHDITLIGNCPKPITEFDEIDMPDYVLNEIEKQGFQRPTPIQAQGWPIALSGLNMVGVAKTGSGKTLGYMLPAIVHINHQKPDPSVRGPLVLVLAPTRELAQQIQQVATDFGSSSYIRNTCLFGGSSKGPQASDLRRGVEIVIATPGRLIDFLETGTTTLQRVTYLVLDEADRMLDMGFEPQIRKILEQVRPDRQILMWSATWPKEVQRLARDFLGDYVQINVGSLELSANHNITQYVKVIEEHEKNEQLGKLLDNLSARGPAGKILIFSTTKRKCDQITSYLRRYGQDAVGMHGDKSQQERERALNRFRNSNSCILVATDVAARGLDVDGIKVVINYDYPQQTEDYVHRIGRTGRSNATGEAYTFFTSNERKMAKELVAILEEAKQDVPPELLKWRHMGGGGINRYGSGGGNRFGTFKGGRGGDFGRGGGDRYGGGDRGAKRSYGGSSSYGGSTSNGYSGSSNGYGNSSSSYRNGTSGGSSNTKHIKFDD

SEQ ID NO: 77338 - DNA, 2736 bp, Aedes aegypti
  CDS (1)..(2736)
atgcagtttcaaggaaatggacaaccccatccgggaggtttccgcccacgtggtgacaagcccgatttctacggcggaaacggagtcccgggaggcaaaccaccacactttatgagcaaaccaggcggaccaccgtcgattccgcccttcaacccgaacggatttggaggaccgaaacccatgtacggcagtggcccgaatggaccctccggtggacccggtcggttcaacaagttccgcccaaacatgtacggcggcccgacggaactcggcggaggaatggcaccgaagaaggactttggtggacctaagatgttcagcacgggcgccccagtaggcatgggcgcgatgaatggaaaaccgatgtatgacaaacctttcgatgcattcggaggtcctaaaaagtacaacaccatgccaaactcgtacggaaacagaaatggttatggtccaaagccagattttaacaacatgagcaaggaagaacgggccaaaattcaatcgctgaaggccaagttccccggacaaggtctggtgaagcccatctggaaggacctagaaccattcgagaaggacttttatgttcctcaccccaatgtgatggcccggactccggaagaagtgcaggcattccgcgagcgtatgcaaatcacagtcatgggcaacagcgttccccatccgtctcaagactttgaggaaggcaatttccccgactttgtcatgaatgaaatcaacaaaatgggattccccaacccgaccgccatccaggcacaaggctggcctatcgctctctccggtcgggatttggtcggaattgctcagactggatcgggaaaaaccctggcatacatgctgccgggtatcgtccatattgcccaccagaagccactgcagcggggtgaagggccggtagtgttggtgctggcaccgacccgtgaactggcgcagcaaatccaaaccgtggtgcgagactttggcactcactcgaagccgctgattcgctacacctgtatcttcggaggagctctgaagggaccacaggttcgggatttggaacgtggtgttgaagtggtgatcgccaccccaggacgcttgatcgatttccttgaacggggcattaccaacttgcgtcgttgtacatacttggtgcttgacgaagccgatcgtatgctggacatgggcttcgaaccgcagattcgtaagatcatcgaacaaatccgaccggatcggcaagtgctgatgtggtccgccacgtggcccaaggaagttcaggcgctggccgaagacttccttcatgactacatccagatcaacatcggatcgttgaatctgtctgccaaccacaacattcaccagatcgtggacgtgtgcgaggagggtgagaaggaaggcaagctgctgtcgctgttgaaggaaatttctagcgatgtaaacagcaagattatcattttcgtcgaaaccaagaaaaaggtggaagatttgctgaagaacatcgtgcgggatggatacggtgcgacgtcgattcacggtgacaagtcccaatcggaacgtgattacgtactgcaagatttccgccatggcaaaagcaccattttggtggcgaccgatgtcgcagccagaggcttagatgtggaagacgtgaaatatgtaatcaattttgactacccgaattcctcggaagattacattcaccgaattgggcgcactggccgttgctcttcgtacggtacggcttacaccttcttcacgcccggcaatggacgtcaggcacgcgaattgctttcggtgctggaggaggcgggacaacaaccgactgctcagctgattgatttggctaaacaggcacctggtggtaaaggtggcagaagccgatacaacgttcgtggtgcgttgacttccggaggatataatcgagatcagaatggttttggaggtaacaggatgttccagaagaagccattcgagaaccgattcggtggtcctccagtcaatggaatgggacctaatcggttcaacaacccgggaccgaacaaatacggcggaccaggaggctaccgaagtgaaaacagctggaacaagaacactggaggttatcaggccgtgccatcgcatcagactcagaacggaactccacagcagtcaccgccacagcagcagttgtatgaacctcaccagcaaatgcgattccattcgaagaataccatgtaccagaatccgaatcaatacgaagatttctccaaccaaatggtcggaggagctccacaagctttcaacggtcatagcggaacgcgtttctactcgaacaagccccatcagggcacaggtggaatgcagcaaactcaacttggcggtcccggtggccgttacaatccgaataaccaatacaacggtgatgtcggtccgaaacccgctggcggacgtcccccatatcaaccgaagcaacaacagtttaacaatagctatgccgccgctggtacggccaacccatacccggcgcaactggctgcagcagctgctgcggccgctgccgctgtcggtggcggacaaaccattccagctgccgggtttgctaccggatttgatccgttggctggcgtccagggagcgatgggtacgttcacttcttcctatcaaattccagctgctgcagcttactattcgtatcctgcggccgctgctccaccgccgccaccacagactcaagccccgccggtcgttcccccggttcaacagtaa

SEQ ID NO: 77339 - protein, 911 aa, Aedes aegypti
MQFQGNGQPHPGGFRPRGDKPDFYGGNGVPGGKPPHFMSKPGGPPSIPPFNPNGFGGPKPMYGSGPNGPSGGPGRFNKFRPNMYGGPTELGGGMAPKKDFGGPKMFSTGAPVGMGAMNGKPMYDKPFDAFGGPKKYNTMPNSYGNRNGYGPKPDFNNMSKEERAKIQSLKAKFPGQGLVKPIWKDLEPFEKDFYVPHPNVMARTPEEVQAFRERMQITVMGNSVPHPSQDFEEGNFPDFVMNEINKMGFPNPTAIQAQGWPIALSGRDLVGIAQTGSGKTLAYMLPGIVHIAHQKPLQRGEGPVVLVLAPTRELAQQIQTVVRDFGTHSKPLIRYTCIFGGALKGPQVRDLERGVEVVIATPGRLIDFLERGITNLRRCTYLVLDEADRMLDMGFEPQIRKIIEQIRPDRQVLMWSATWPKEVQALAEDFLHDYIQINIGSLNLSANHNIHQIVDVCEEGEKEGKLLSLLKEISSDVNSKIIIFVETKKKVEDLLKNIVRDGYGATSIHGDKSQSERDYVLQDFRHGKSTILVATDVAARGLDVEDVKYVINFDYPNSSEDYIHRIGRTGRCSSYGTAYTFFTPGNGRQARELLSVLEEAGQQPTAQLIDLAKQAPGGKGGRSRYNVRGALTSGGYNRDQNGFGGNRMFQKKPFENRFGGPPVNGMGPNRFNNPGPNKYGGPGGYRSENSWNKNTGGYQAVPSHQTQNGTPQQSPPQQQLYEPHQQMRFHSKNTMYQNPNQYEDFSNQMVGGAPQAFNGHSGTRFYSNKPHQGTGGMQQTQLGGPGGRYNPNNQYNGDVGPKPAGGRPPYQPKQQQFNNSYAAAGTANPYPAQLAAAAAAAAAAVGGGQTIPAAGFATGFDPLAGVQGAMGTFTSSYQIPAAAAYYSYPAAAAPPPPPQTQAPPVVPPVQQ

SEQ ID NO: 77340 - DNA, 3094 bp, Aedes aegypti
  CDS (119)..(2218)
ctcggtgcagtttgagtgaatcacccaaagtgtttggacagaaaatccacgtcgctccgctattcgcttaattctgcagaaaaatttccgcaaggaccctcccaaaaccagctaaaaaatgtacggcaatcgtcaacaatcgtccggcggattcaggggaggcaaccagggtggtggccgccccatgaacgggggaggattccgcggtggcgatcgcccctcgggaggatctcgtggcggaatgggcggcggaatgggaggcggtggcggtttcggtggtaatcgcggcacattcgaccggcaagctaacaacggtgccacgctgcgtacgctgaagtggactagcgaagagctgacccccttcgagaaggacttctacaaaccatcggagttcatttccaacctctcggaaacggatgtcaaggggtatctggccaaactggaaatcacgctcaagggcagaaacatcccacgccccagtatggagtttgaacagggtggtctaccggactacatcctggaggaagcgaacaagcaaggcttctccaaaccaacggccattcaggctcagggtatgccaatcgccctaagtggccgcgacatggttggaatcgctcaaacaggctcgggaaaaaccctggcctacattgcgccagccttggtgcacattacacatcaggatcagctacgtcggggagatggtccgattgcccttgtattggcaccaacgcgagagctggcccaacaaattcaacaggttgctacggatttcggacagagaattaacgccaacaacacctgcgtgttcggaggagcccctaagggaccgcagatccgtgacttggaacgtggtgcggaaattgttattgccacacctggccgtttgatcgatttccttgaacgaggaatcactaacttgcgtcgctgcacctatctggtgctcgatgaagcagatcgcatgcttgatatgggcttcgaaccgcaaattcgcaagatcatgggacagattcgtcctgatcgccaagtgctgatgtggtccgccacatggcccaaagaagttcgcaacttggccgaagagtttttgaacgattatattcagatcaacattggatctctgaacctgtcggcaaatcataacattctacagattgtggatgtctgtgaagactacgaaaaagaccaaaagctcatgaagcttctgacggaaatctctgctgagaatgagactaagacgattatcttcgtcgaaacaaaacggcgggtggacgatattacccgcaacatcaaccgtaatggttggagagctgtgtcaattcatggcgacaaatcgcaacaggaacgtgactacgttctgaatgcattccgaaatggacgccagggtattctggtggccactgacgttgccgcccgtggacttgatgtcgaagacgtgaagtttgtaatcaattacgactacccgtcaaattcagaagattacgtccatcgtattggtagaactggccgttctaacaataccggcactgcatacacgctgttcaccaattccaatgccaacaaggccggcgacctcatcaacgtacttcgggaggccaatcaagttatcaatcccaagcttgcagaaatggccaaaccgggcatgaacagacatggacaacgccacaacagatacggaaaccgctacggaggtcagcagaacaggccaccacgtgatggaggctacggtggacagcgcaacgatggaggtcatcgcttcggtggcatgaacaatggcaacaaattcggtggacctcgcggggatgctggcggtgacaaattcggttcgaaaccggcccagaacggaggctaccaatcgcgtgatcagaatcgcattccaaatggatctggaccaccatcaggagcccgtccgagccgattctctgccccgagcaatgcacctccatcattcccgtctggtgcaaccggtggcaacagttataataagggggcttaccaaaacggttctgctgccagtggaaatagtgctccgaccagcaatggttacggatcatacaaaccttacacaaccgctcctccaactcaaagtgcaaccggtgcgtcattcggcggatatcaaagaagtacacctgctgttccttccgcgtacccgtcgttcggcggtgctctgccacaacctggacaaacgtttgcattccctccacctgcagttgcgttaaactaagcatcccctaagttaatcatcccttgaacttcattcttatctcattgaattattttttttattgacaccatctaatccatagagcaaagtgtgattaattagttttacctgtgaacatgatacaaacctagaaaacgaagtaactaggattaagaacgtcctatttatttaattgattgttattagcaggtactgacccaaaacaaagaatgtaagaatttgcactttcaagtagctgcgagttgggttcttaacatttgctctttttactatcctcgatacgattgattatataaatgtgataatgatagtacgtagtccatcaaatcgagacaaaaaaaaacacaagcaacagaaatcatttctgtgttccactttactcgaatgagaaccaattcgcaaatttgtatttattataatttgtgtggaggctgtcctgcgttgacgcagagatctactgtgaatttaatagatgtatgtgaaatggaagttgcggttggatgtgtgaataataggaaataaattgattaaaaaaagcaaacttcaagattttgaaattcacacaacacttgagacaaatgtgtggagggcagctagcaatggtatctacaccgaatgccccattgatggtacttcgattttaaaatattgcgataacgataagaattagaccgtttcggatagcactgtaatccacacattgaatctactctttagtctgcaaatagcatactaaccccattctttacagcaactagtactaacaactctgaaacatgtaatttgttttactgaagtgttgtgctttagtggaataaaagccatttcttggagaaatatggatggtacattaaaaatggtaaccttatgaatagc

SEQ ID NO: 77341 - protein, 699 aa, Aedes aegypti
MYGNRQQSSGGFRGGNQGGGRPMNGGGFRGGDRPSGGSRGGMGGGMGGGGGFGGNRGTFDRQANNGATLRTLKWTSEELTPFEKDFYKPSEFISNLSETDVKGYLAKLEITLKGRNIPRPSMEFEQGGLPDYILEEANKQGFSKPTAIQAQGMPIALSGRDMVGIAQTGSGKTLAYIAPALVHITHQDQLRRGDGPIALVLAPTRELAQQIQQVATDFGQRINANNTCVFGGAPKGPQIRDLERGAEIVIATPGRLIDFLERGITNLRRCTYLVLDEADRMLDMGFEPQIRKIMGQIRPDRQVLMWSATWPKEVRNLAEEFLNDYIQINIGSLNLSANHNILQIVDVCEDYEKDQKLMKLLTEISAENETKTIIFVETKRRVDDITRNINRNGWRAVSIHGDKSQQERDYVLNAFRNGRQGILVATDVAARGLDVEDVKFVINYDYPSNSEDYVHRIGRTGRSNNTGTAYTLFTNSNANKAGDLINVLREANQVINPKLAEMAKPGMNRHGQRHNRYGNRYGGQQNRPPRDGGYGGQRNDGGHRFGGMNNGNKFGGPRGDAGGDKFGSKPAQNGGYQSRDQNRIPNGSGPPSGARPSRFSAPSNAPPSFPSGATGGNSYNKGAYQNGSAASGNSAPTSNGYGSYKPYTTAPPTQSATGASFGGYQRSTPAVPSAYPSFGGALPQPGQTFAFPPPAVALN

SEQ ID NO: 77342 - DNA, 2539 bp, Aedes aegypti
  CDS (1)..(2445)
atggccggcgacaggaagcgtcgctcacggtcgcgggagaggatcgacttggatcgggaccgaggtggaggcggcagggatcgttaccgggaacgcgaatacgaacgggacagagaacgggagaggtatcaggatcgggaacgcgaacgagatatccgggaaagggagcgggagcgcgaaagggaacgagaacgggatcgggcgctggataaggccattgctaggaagagatcccgttcccgagagagggatcgtgacgacaagaagcggaaggatgagaaggacaaaaaggacgacgatgttgaggaggtgaaggttgaagtgccgaaaaaggaggaaaaggctaagaaggaaccgctttcgctggaggaattgttggcgaagaagaaagcggaagaggaagccagaagtaagccggttttcataacgaaggagcaaagagcagccgaagcactgaagaggaggcaggaagaagtagccgcaatgcgagcaggggcttcggttggagttcccaagttcggagatgttccggtgacgactttgttaaacagggagaagaaggatccactggaaaagtatgacagaagagaaagggaacgtgaacgtgaacgggaaagagcaagagatcgggaaagggagagagacgggaaggagaaagatcgagatgatgataaaagacgttccacgacggaagacacaactgtcaaggacaaggaaaaagagcaggaagcgattcgagagcgttacctgggaatcgtgaagaagaaaagacgagttaggagactgaatgatagaaagtttgtcttcgattgggatgctgctgaggatacttcaatagattacaataacctgtataaggaacgacatcacgtccagttctttggacgaggaaacattgctggaattgatataaaagatcagaagcgtaagcagagtaagttctacggggatcttttggaaaaacgtcgaacggatgcagagaaagaacaggagaaagttcgtctgaagaaggtcaaaaagaaggaagacaaacaaaagtgggatgatcgtcattggtccgaaaaggattgcgatgagatgactgaacgtgattggcgtatcttcagagaggactacaacattacaatcaaaggcggtaagattcctaatcccttcagaagttggagcgaaaccggatttccaaaagaaatcctggatattatcgataaagttggttataaagagcccactcctattcagagacaagccatcccaattggtcttcagaaccgggatattattggtattgctgaaactggttctggtaaaactctggccttcttgattcctctcctgacatggatccaatcgcttccaaagatcgatcgtttggaaacagctgaccaaggcccgtatgccatcattttggccccaactcgagaattggctcaacagatcgaagaagaaacgcaaaagttcggtcaaccattgggcatccgtacggttgtcgttgtcggaggtttgtctcgagaagaacagggcttccggctgcgacttggttgtgaaatcgttattgctactcccggtcgtttgattgacgtcttggagaatcgttatctggtgttgaatcagtgtacttacatcgtattggatgaagccgatcgtatgattgacatgggtttcgaaccagatgtgcagaagatccttgaatacatgcccgtcaccaatctcaaaccagacaccgaagaagctgaagatgcctccaaacttatggagaactttaacacaaagaaaaagtatcgtcaaactgtcatgtttacagcgactatgcctccggcagtagaaagactcgcccgaacctatctccggcgtccagcaacggtctacattggttccgtaggaaaacccacagaaagaaccgaacagatcgtgcacatcatgaccgaaaacgagaaacgcaagaagctcatggaaattctttctcgcggagtcgaaccgccctgcattatcttcgtcaaccagaagaagggagcggatgtattggccaagggactcgagaagcttggctacaacgcttgtacgcttcacggtggcaaaggtcaggaacagcgagagtacgccctggcatcgctcaagaacggttccaaggacatcctggtggccacagacgtggcaggtcgtggtatcgatatcaaggacgtgtccctcgtcatcaactacgatatggccaaaaccatcgaggattacacgcatcgtatcggtcgaactggtcgcgctggaaagacgggttgcgccatttcgttctgcaccaaggacgacagccatctgttctacgatctgaagcaaatcgtcgtagccagtcccgtgtcggtttgtccgccggagttgatgaaccatccagacgctcagcacaagccgggcactgtcgtcacgaagaagcgaagggaggagaagattttcgcttaaacgtaagtcgaattcttagtgatgtttccatttatgcttgtaatattatgattgttcgaactgtagcattgtggtaaacttctttttgtatcac

SEQ ID NO: 77343 - protein, 814 aa, Aedes aegypti
MAGDRKRRSRSRERIDLDRDRGGGGRDRYREREYERDRERERYQDRERERDIRERERERERERERDRALDKAIARKRSRSRERDRDDKKRKDEKDKKDDDVEEVKVEVPKKEEKAKKEPLSLEELLAKKKAEEEARSKPVFITKEQRAAEALKRRQEEVAAMRAGASVGVPKFGDVPVTTLLNREKKDPLEKYDRRERERERERERARDRERERDGKEKDRDDDKRRSTTEDTTVKDKEKEQEAIRERYLGIVKKKRRVRRLNDRKFVFDWDAAEDTSIDYNNLYKERHHVQFFGRGNIAGIDIKDQKRKQSKFYGDLLEKRRTDAEKEQEKVRLKKVKKKEDKQKWDDRHWSEKDCDEMTERDWRIFREDYNITIKGGKIPNPFRSWSETGFPKEILDIIDKVGYKEPTPIQRQAIPIGLQNRDIIGIAETGSGKTLAFLIPLLTWIQSLPKIDRLETADQGPYAIILAPTRELAQQIEEETQKFGQPLGIRTVVVVGGLSREEQGFRLRLGCEIVIATPGRLIDVLENRYLVLNQCTYIVLDEADRMIDMGFEPDVQKILEYMPVTNLKPDTEEAEDASKLMENFNTKKKYRQTVMFTATMPPAVERLARTYLRRPATVYIGSVGKPTERTEQIVHIMTENEKRKKLMEILSRGVEPPCIIFVNQKKGADVLAKGLEKLGYNACTLHGGKGQEQREYALASLKNGSKDILVATDVAGRGIDIKDVSLVINYDMAKTIEDYTHRIGRTGRAGKTGCAISFCTKDDSHLFYDLKQIVVASPVSVCPPELMNHPDAQHKPGTVVTKKRREEKIFA

SEQ ID NO: 77344 - DNA, 1842 bp, Haemophilus influenzae
  CDS (1)..(1842): transl_table=11
atgactgacaaaattacttttaatgacttaggcttacctgagttcatcttaaaagctgtttctgacttaggttttgaaaccccttctccaattcaacaagcttgtatcccacatttgctcagtggcaatgatgtgctaggtatggcacaaacaggtagtggtaaaaccgctgcttttgcactgcctttattagcacaaatcgatccaagtgaaaaacatccacaaatgttagtaatggcacctactcgcgaacttgctattcaagttgccgatgcgtgcgaacaatttgttaaatatgctcatggctcccgcattgttaccttatatggcgggcaacgttatgacatccaacttcgtgcattaaaacaaggcgcacaagtggttgtgggtacaccaggtcgtattcttgaccatattcgccgcggcacattaaatctttctgaacttcgttttatcgtattagatgaagccgatgaaatgctacgtatgggtttcattgatgatgtagaaaccgtgatggctgaactaccagaaaatcatcaaactgcgttattctctgcaacaatgcctgaaccgatccgtcgtattacgaaacgttttatgaatgatccgaaagaagtgaagatcaaagttaataacgaaaatgctccagatattgagcaaagttgctggtatgtacacggcgtgcgtaaaaacgaagctcttcttcgtttcttagaagtggaagattttgatgccgcaattatttttgctcgcactaaaactggcacgttagacattacagaactacttgaaaaaaatggtttccgttccgccgcacttaatggcgatatgacacaacaactccgcgaacaaaccctcgatcgcttacgtaacggcagtttagatattgtagtagcaaccgatgtggctgctcgtggtattgatattgaacgtatcagccttgtggtaaactacgacattccgctggatgcagaatcttatgtacatcgaattggccgtactggtcgtgcaggtcgttctggtcgtgctttattattcgttgaacctcgtgagcgtcgtttacttcgtaatattgaacacctaatgaaaaaaggtatcaatgaagtagaattgccaaatcatcttgtgttacaagaatgccgccgcaaaaaattcgttgcaaaaattacgaaacaactagagcatcacgatttagagcaatatcgtagtttattagaagacttattcacagctgatcaagatcaagaagatattgctgctgcaatgttaatgttgttacaaggtaaacaaaaattaattcttccacctgatccgccaatggaaaaacgtcgtcgtgaacgtaatgatcgcggtgatcgtcgtgaaaatccacgttcagctgaacgtcgtggcgaacgtaaaggctacggaaatccacaagcaatggatttatatcgtatcgaagtcggtcgtgcagatggtgtagaagttcgtcatatcgttggtgcgattgctaacgaaggcgatattaacagccgttatattggtcatattaaactttatgatgattacactaccgttgaattgccacaaggtatgccgaaagaattattgcaacaattcggaaaaacacgcgtattgaataaacaaatgcaaatgtctttcttaggtgcagtaaaatccgataattctcgtggcagtgatgattttaacggtaaacgtaaaggtcgtggtagcgatttccgtggagaacgcggacgtgaacgtggcaatgataatcgtggaaatcgtaaatttaatgaaaaaagtaaccgcacttttagcgataaaccacgtcgtgatcgtagatcatcattctaa

SEQ ID NO: 77345 - protein, 613 aa, Haemophilus influenzae
MTDKITFNDLGLPEFILKAVSDLGFETPSPIQQACIPHLLSGNDVLGMAQTGSGKTAAFALPLLAQIDPSEKHPQMLVMAPTRELAIQVADACEQFVKYAHGSRIVTLYGGQRYDIQLRALKQGAQVVVGTPGRILDHIRRGTLNLSELRFIVLDEADEMLRMGFIDDVETVMAELPENHQTALFSATMPEPIRRITKRFMNDPKEVKIKVNNENAPDIEQSCWYVHGVRKNEALLRFLEVEDFDAAIIFARTKTGTLDITELLEKNGFRSAALNGDMTQQLREQTLDRLRNGSLDIVVATDVAARGIDIERISLVVNYDIPLDAESYVHRIGRTGRAGRSGRALLFVEPRERRLLRNIEHLMKKGINEVELPNHLVLQECRRKKFVAKITKQLEHHDLEQYRSLLEDLFTADQDQEDIAAAMLMLLQGKQKLILPPDPPMEKRRRERNDRGDRRENPRSAERRGERKGYGNPQAMDLYRIEVGRADGVEVRHIVGAIANEGDINSRYIGHIKLYDDYTTVELPQGMPKELLQQFGKTRVLNKQMQMSFLGAVKSDNSRGSDDFNGKRKGRGSDFRGERGRERGNDNRGNRKFNEKSNRTFSDKPRRDRRSSF

SEQ ID NO: 77346 - DNA, 2331 bp, Chironomus tentans; identical to SEQ ID NO: 65614
  CDS (1)..(2331)

SEQ ID NO: 77347 - protein, 776 aa, Chironomus tentans; identical to SEQ ID NO: 65615

SEQ ID NO: 77348 - DNA, 2118 bp, Polyandrocarpa misakiensis
  CDS (1)..(2118)
atgttccaagaggaagatgattgggatgactttggtggagtggaaactgctactaaaactactaataaaagttcatttggaggatttggagatgatgttaatagtgactttgctgggagctctttctccggcaacaacagcaaatttaatggagggtctggttcaatgaacgggggaggagatagaggcggtggggctcgcaacagaagctgctttaaatgtggacaagaaggtcacatgtccagagattgcactagtggtgcgtctggtgacacgcaggcaaagaaatgcttcaaatgtggtgaagagggccatatgtctcgtgactgccctagtaatacttctacaggatctagcaaggcatgctttaaatgcggtgaagaaggtcacatgtccagggagtgcccaaataataataataataattctaaggcatgtttcaaatgtggcgaagaaggtcacatgtccagagagtgcccgaataataattctagtaaggatggatttggtacctcaagcagggcttgcttcaaatgcggcgaagagggccacatgtctcgtgaatgccccaaggcgggggaaccagatcctaaccgcccacccctgtacattccaccgccaccctctgaagatgaagaagtcatttttgcatcgatgcaaacaggaatcaactttaacaagtatgattctattccggtggaagttactggaatggatgcaccaaacccaattgcaaactttgatgaagccaatctgccagaaacgatttgtgcaaacgtgaagaaggctaaatattcccgacctaccccagtgcagaagtacagcattcctatcattaatgccgatagagatttgatgtcatgcgctcaaactggatctggcaagactgccgcatttcttttgccagttttgtctggtatgtttcgtaaaggtcttaagagtgacaccttatccgaaaagcagacgcctcaagccatcgttgtgggacccacaagagagctagtgttgcagatcttccttgaggcgagaaagtttgcgtatggttcagtgattcgtcctgttgttgcttatggagggacaagtgttggaagtcaacttcgtgatctctgtcgtggctgcaatattcttattgctaccccaggaagattgttggatttcataaatcgcggtaaagtatcttgtgagtgcgtggaatatctaattctggatgaagctgacaggatgctggacatgggatttgagccagaaattcgacgacttttgggatcaccaggcatgcctgataaaaacagtcggcacacactcatgtttagtgctacttttcctaatgaaatacaaaaactagctcacgagtttttaagagatgatttcttattcttgagcgttggtcgagttggtggagcatgctccgatgtgactcaaactatattacaggttgatgaagaagataagcgtgaaacactcatgcaattgctgtcagatgttgccgaaacaaggtcaagaacactagtttttgtggaaacaaagcgcaaagcggacttcttggctgcttttttgtcacaggagaatcttcctacaacaagtatccatggtgacagataccaaagagagagggaaatggcattagctgacttcaaatctggcacttgcccaatcatgattgcaacctctgtggctgccagaggtttagacataccaaaggtagagcatgttatcaactttgaccttccaaatgaaatagatgaatttgtgcatcgcgttggccgtaccggacgttgtgggaatcttgggcaagcgacttccttctattctgacaataaagatggcatgttagctagatcacttgtaaaagttttggctgatgctcaacaagaagttccagagtggctagaatcctgtgcagaaagtgctattgggacaagcttcggccctaaaggcggtcagtttggtgcaagagatgcaaggaataaaggtagaggacaaagcagagttgagaccttccgtagcaagggagattatgattatgctgatggaggatctactgctgaggatcaatttggcaatgccgaaaaacaggcatctaatggctttggtgaggatgatgacgagtgggaataa

SEQ ID NO: 77349 - protein, 705 aa, Polyandrocarpa misakiensis
MFQEEDDWDDFGGVETATKTTNKSSFGGFGDDVNSDFAGSSFSGNNSKFNGGSGSMNGGGDRGGGARNRSCFKCGQEGHMSRDCTSGASGDTQAKKCFKCGEEGHMSRDCPSNTSTGSSKACFKCGEEGHMSRECPNNNNNNSKACFKCGEEGHMSRECPNNNSSKDGFGTSSRACFKCGEEGHMSRECPKAGEPDPNRPPLYIPPPPSEDEEVIFASMQTGINFNKYDSIPVEVTGMDAPNPIANFDEANLPETICANVKKAKYSRPTPVQKYSIPIINADRDLMSCAQTGSGKTAAFLLPVLSGMFRKGLKSDTLSEKQTPQAIVVGPTRELVLQIFLEARKFAYGSVIRPVVAYGGTSVGSQLRDLCRGCNILIATPGRLLDFINRGKVSCECVEYLILDEADRMLDMGFEPEIRRLLGSPGMPDKNSRHTLMFSATFPNEIQKLAHEFLRDDFLFLSVGRVGGACSDVTQTILQVDEEDKRETLMQLLSDVAETRSRTLVFVETKRKADFLAAFLSQENLPTTSIHGDRYQREREMALADFKSGTCPIMIATSVAARGLDIPKVEHVINFDLPNEIDEFVHRVGRTGRCGNLGQATSFYSDNKDGMLARSLVKVLADAQQEVPEWLESCAESAIGTSFGPKGGQFGARDARNKGRGQSRVETFRSKGDYDYADGGSTAEDQFGNAEKQASNGFGEDDDEWE

SEQ ID NO: 77350 - DNA, 1575 bp, Candidatus Kuenenia stuttgartiensis
  CDS (1)..(1575): transl_table=11
atggaatcatttgaaagtttaggactgtcagaatcaacactaaaggtgttaaaggaaaaggggtacgaagaacctacgccaattcagcaaaaaaccataccggcaatactgagcggaactaaagatatcgtggggcaggcgcagacgggtactggcaaaacagcggcattcggccttcccgttcttgaactcctgccggaaaaatcaaaaaatgttcaggcgcttgtactcactccaacacgagaattggcaattcaggtggcagaagaactcaattcgctgaagggaaagaaaagattgagcattgttcccatatacggaaggcaatccatggaattacagctaagaagccttaaaaaggggattgatattgttgtcggcacgccaggccgtgtccttgatcatctgaagcggggcacattaaagatcggcaaaatatcgtttcttgtccttgatgaagcggatgaaatgctgaatatgggttttattgatgatgtcagagaaatcatggaaaacacgggacatgaaaaaaggacattgctgttttctgctactatgccctttgaaataatgcaaatagccaaaaattatatgcgagactttgacgtgcagaaggtcaacgccggacaacttaccgtaagtcagacagatcagatttattttgaggtatttgcggcggataaatttgaagcgctttgcaggataatagatatcgagaaggatttttacggccttgttttctgccgtacaaaaattgatgttgacgccgttgccagccatctgattgaacgcggttacgatgcggacgcattgcacggcgatatatctcaaagcctgagggaaaagatccttgccaaatttaaaaaacgccagatcaacatacttatcgcaactgatgtggcggcgcggggattagacattcacaacctttcccatgtaataaattattcccttccgcaggacccagaatcatatgtccacaggattgggcgcaccggccgcgcggggaaagggggaattgctataacatttataaccccggaagaatacaggaaactgcaatttatacaaaaagcggcaaagacggacattcgcaaggaaaaacttccaaagatcgaggatattatacggacaaaaaaacttaaaataaaagaccatattaatgaaattgtggatttaaatgcccataattgctacattgaaatggcaaaagaattgaccgaacataagaaaccagaagatatcatatcagcattactgcagtattcctttcctgatgaacttaatgaaaaacgctatgttgaaatagaagaggcggtagttgacaagaaagggaaaacaaggctctttgtaacgcaggggaaacaggaaggattaacacacaaaaaattagtgacatacatcaaggatatatcaaatatcgcgagtgaaaaaatacgggacgtgcagattcttgataaatattcttttgtaacactcccttttcgcgaagcggaaatattattaacgagttttaaaagaagaaaaaagggatccggattgtttatcaccaaagcgaaaaaaatgcggacatag

SEQ ID NO: 77351 - protein, 524 aa, Candidatus Kuenenia stuttgartiensis
MESFESLGLSESTLKVLKEKGYEEPTPIQQKTIPAILSGTKDIVGQAQTGTGKTAAFGLPVLELLPEKSKNVQALVLTPTRELAIQVAEELNSLKGKKRLSIVPIYGRQSMELQLRSLKKGIDIVVGTPGRVLDHLKRGTLKIGKISFLVLDEADEMLNMGFIDDVREIMENTGHEKRTLLFSATMPFEIMQIAKNYMRDFDVQKVNAGQLTVSQTDQIYFEVFAADKFEALCRIIDIEKDFYGLVFCRTKIDVDAVASHLIERGYDADALHGDISQSLREKILAKFKKRQINILIATDVAARGLDIHNLSHVINYSLPQDPESYVHRIGRTGRAGKGGIAITFITPEEYRKLQFIQKAAKTDIRKEKLPKIEDIIRTKKLKIKDHINEIVDLNAHNCYIEMAKELTEHKKPEDIISALLQYSFPDELNEKRYVEIEEAVVDKKGKTRLFVTQGKQEGLTHKKLVTYIKDISNIASEKIRDVQILDKYSFVTLPFREAEILLTSFKRRKKGSGLFITKAKKMRT

SEQ ID NO: 77352 - DNA, 2064 bp, Botryllus primigenus; identical to SEQ ID NO: 65626
  CDS (1)..(2064)

SEQ ID NO: 77353 - protein, 687 aa, Botryllus primigenus; identical to SEQ ID NO: 65627

SEQ ID NO: 77354 - DNA, 1791 bp, Anopheles gambiae
  CDS (1)..(1791)
atgagcggagacggtgaatgggacgattgtgacgagggacgtagcttcgatcagcccaagtacgatgctaccgaaaatagtgttcaggacaacgatactaacgggttcgacaactatcagtccaacaatgctttcggtgacgagtatcaaagcaacgacaacggtggatatggaggcggtgacgatggatacggcggcggtggtcgtggaggccgtggaggccgaggtggcggacgaggtcgtggtcggggccgtggcgggcgcgatggtggcggtggcttcggtggcggtggctacggtgatcgaaacggcgatggcggccgacctgcctattctggcaacagcgatccaagcatggaccaggtgaagacggacaagccgagggagctgtacattccgccacttccgaccgaggacgaatcgctgatcttcgggtccggcatcagctctgggatcaattttgacaagttcgaggaaatccaggtgcgcgtgtcgggcgaaaatccaccggatcacgtggagagcttcgagcgctccggtttgcgcgaggaggtgatgacgaacgtgcgcaagtcgagctacacgaaaccgacgcccatccagcggtacgccatcccgatcatcctgaacgggcgcgacctgatggcctgcgcccagaccggttcgggcaagacggccgccttcatgctgccgatgatccaccatctgctggacaaggaggattcgctggagctgcgcacgcgcaacccgtacatcgtgatcgtagccccgacccgtgagctcgcgattcaaatccacgacgaggggcgcaagttcgcgcacggcaccaagctgaaggtctgcgtatcgtacggcggcacagccgtacagcaccagctgcagctgatgcgcggtggctgccacgtgctggtggcaacgcccggtcggctgctggacttcatcgaccgggggtacgtgacgtttgagaacgtgaacttcgtggtgctcgacgaagccgatcggatgctggacatgggctttctgccctcgatcgagaaggtgatgggacacgcgacgatgccggaaaagcagcagcggcagacgctcatgttttcggctacgttcccggccgaaatccaggagctggcgggcaagttcctgcacaactacatctgcgtgttcgtgggcatcgtcggcggagcgtgtgccgatgtggagcagacgatccatctggtggaaaagttcaagaagcgcaagaagctggaggagatcctgaacggcggcaatcccaagggtacgctcgtgttcgtggagacgaagcgcaatgcggactatctggcatcgctgatgtccgagacgcagttcccgaccacctccatccatggcgatcggttgcagcgggagcgcgagatggcgctgtacgatttcaagtccgggcggatggacgtgctgatcgcgacgtcggtagcggcccgcgggctggacattaaaaatgtgaaccacgtggtgaactacgatctgccgaagagcatcgatgattacgtgcaccgtatcgggcgaaccgggcgcgtcggcaacaagggccgagcgactagcttctacgacccggaggcggaccgggctatggcgagcgatctggtgaagattctcacccaggccgggcagtcggtgccggactttttgaaggatgctggcggctccggatcgtacatgggatcgtcccagttcggtggcaaggatatccgcgactcgtacggttcgcgtgtcgatgcccagccggttgccctcgagccggaggaagagtgggagtaa

SEQ ID NO: 77355 - protein, 596 aa, Anopheles gambiae
MSGDGEWDDCDEGRSFDQPKYDATENSVQDNDTNGFDNYQSNNAFGDEYQSNDNGGYGGGDDGYGGGGRGGRGGRGGGRGRGRGRGGRDGGGGFGGGGYGDRNGDGGRPAYSGNSDPSMDQVKTDKPRELYIPPLPTEDESLIFGSGISSGINFDKFEEIQVRVSGENPPDHVESFERSGLREEVMTNVRKSSYTKPTPIQRYAIPIILNGRDLMACAQTGSGKTAAFMLPMIHHLLDKEDSLELRTRNPYIVIVAPTRELAIQIHDEGRKFAHGTKLKVCVSYGGTAVQHQLQLMRGGCHVLVATPGRLLDFIDRGYVTFENVNFVVLDEADRMLDMGFLPSIEKVMGHATMPEKQQRQTLMFSATFPAEIQELAGKFLHNYICVFVGIVGGACADVEQTIHLVEKFKKRKKLEEILNGGNPKGTLVFVETKRNADYLASLMSETQFPTTSIHGDRLQREREMALYDFKSGRMDVLIATSVAARGLDIKNVNHVVNYDLPKSIDDYVHRIGRTGRVGNKGRATSFYDPEADRAMASDLVKILTQAGQSVPDFLKDAGGSGSYMGSSQFGGKDIRDSYGSRVDAQPVALEPEEEWE

SEQ ID NO: 77356 - DNA, 2451 bp, Platynereis dumerilii
  CDS (1)..(2451)
atgcctaatgattccatccaaaatggcaaaagtctagaacagcaggttgctgggctagacttgaactctgcaccccctttcaggggcggaggacgagacggttttaaccctggctacatgcgcggaggcaacacacgtggctttcatcatggtccgtaccaggtccctcccccgccaccccagtttttcgctggaccgccgggccctggaggcaaccctgccatgtactttccgtttcccactggacggtacatccctccacacctacggggacgtggcggaggtgtccctggccctagtgcagaccgacaaaacggagcaggaagaggcgctggaccccctggccctccgatagaccaaaacggcgggaactggaatagcctaccaagaggttcatcggcccaaggggactacaacagctacaacaactcgagggggggaagatcagggtctgagggacccagggatggccctggacggggaggaagcgcggaccgagacttcgacggaggcagaggtggcggcacctgggggccatcaaacagacgaggcagccaggacagtcagggcggaggccggcgctgggataaccgaagcagcgaccgtggaggtggctggggatggcggcaacaaccgctgggacaaccgtggcggcagcgaaggcccccggcggtcgctacaacaaccgtggcggccagagatggggacaacagagacaacaaccgcggattcgacgacggcacccagaggtggggtaacagccgctggaacaacagtggtggcggcggaggtggtcgaaacacatgggacaacaatgaccagaacggctctcgctggaatcggctgagagaggagggacctgctgattggtctaaactactgccgcctaatgagcgcctggagaaggagctcttcggcaacagcaacacaggaatcaacttcgacaagtacgaggacattcccgtcgaggcaacgggagaagactgccctgcaaacgtggagtcgtttgccgagttagaacttggtgagatcgtagacagcaacatcgtcctgtccaagtacaccaagccgacccctgtgcagaagcacgctatgcctatcatcaaaaagaagagggatctgatggcctgcgctcagacggggtctggcaagacggcctccttccttgttcctgtgctatctcagatgtttttggacggccagcccgagttcattcgggaacagaataaccgcaacaataggaagcagtacccaattgcactggttcttgcgccaaccagagagttggcctctcagatctacgaggaggctagaaagtttgcgtaccgttctcacgtgcgaccatgtgtagtttacggaggagcagacatcggagcacagatgagagatctgcccgaacgggggtgccacttgctggtggcgacacctggaagactcgtggacatgctggagagaggaaagatcggtctggaccacatcagatttgtggttcttgacgaggcagatcgtatgttggacatgggtttcgaaccccagatccgtcgaatcgttgagaaagacactatgcccccaaccggagatagacgaacgcttatgttcagtgccacttttcccaaggagatccagatcttagcaagagatttcctgcacaactacattttcttggctgtcggccgagtgggaagtacaagcgaaaacatcacccagaaggttgtctgggtggaggagcccgacaagaggtcgttcttactcgatctgcttaatgcttctggtccggattcactgaccctggttttcgtggagaccaagaagggagcggacgcccttgacaacttcctgtacaacgaggggtacccgtccgcctgtatccatggtgacagatctcagaaggagcgagaggaggccctcaggaacttcaggagtggaaagacccccgtgctggtcgctactgctgtggcagccagaggtctggatatccctaacgtgaaacacgtcattaacttcgatctgccgagtgacattgaggagtacgtccacaggattgggcgtaccgggcgtgtgggaaatcttggtcttgccacttctttcttcaacgacaagaacaagaacatcgtccgtgacatggtggatcttctcatagaagccaaacaggaggttcccccatggatcgagagcatcgcttacgaagccagaaccatgggaggaggacgacgaccccagaataagaggttcggaggcagcttcggcagtcgcgattaccgtcaaatgggcggccagggtggcggacgaggaggaagcactcagatgaggagcaaccccgtccctcaagcgttcggaggagccccgatgggctacggattccaccagggaggaggaggctacggaggaagctacggaggaccctaccagcaaccccaggcccatcacgctcacgactggtggggcaactag

SEQ ID NO: 77357 - protein, 816 aa, Platynereis dumerilii
MPNDSIQNGKSLEQQVAGLDLNSAPPFRGGGRDGFNPGYMRGGNTRGFHHGPYQVPPPPPQFFAGPPGPGGNPAMYFPFPTGRYIPPHLRGRGGGVPGPSADRQNGAGRGAGPPGPPIDQNGGNWNSLPRGSSAQGDYNSYNNSRGGRSGSEGPRDGPGRGGSADRDFDGGRGGGTWGPSNRRGSQDSQGGGRRWDNRSSDRGGGWGWRQQPLGQPWRQRRPPAVATTTVAARDGDNRDNNRGFDDGTQRWGNSRWNNSGGGGGGRNTWDNNDQNGSRWNRLREEGPADWSKLLPPNERLEKELFGNSNTGINFDKYEDIPVEATGEDCPANVESFAELELGEIVDSNIVLSKYTKPTPVQKHAMPIIKKKRDLMACAQTGSGKTASFLVPVLSQMFLDGQPEFIREQNNRNNRKQYPIALVLAPTRELASQIYEEARKFAYRSHVRPCVVYGGADIGAQMRDLPERGCHLLVATPGRLVDMLERGKIGLDHIRFVVLDEADRMLDMGFEPQIRRIVEKDTMPPTGDRRTLMFSATFPKEIQILARDFLHNYIFLAVGRVGSTSENITQKVVWVEEPDKRSFLLDLLNASGPDSLTLVFVETKKGADALDNFLYNEGYPSACIHGDRSQKEREEALRNFRSGKTPVLVATAVAARGLDIPNVKHVINFDLPSDIEEYVHRIGRTGRVGNLGLATSFFNDKNKNIVRDMVDLLIEAKQEVPPWIESIAYEARTMGGGRRPQNKRFGGSFGSRDYRQMGGQGGGRGGSTQMRSNPVPQAFGGAPMGYGFHQGGGGYGGSYGGPYQQPQAHHAHDWWGN

SEQ ID NO: 77358 - DNA, 2316 bp, Platynereis dumerilii
  CDS (1)..(2316)
atgcctaatgattccatccaaaatggcaaaagtctagaacagcaggttgctgggctagacttgaactctgcaccccctttcaggggcggaggacgagacggttttactggacggtacatccctccacacctacggggacgtggcggaggtgtccctggccctagtgcagaccgacaaaacggagcaggaagaggcgctggaccccctggccctccgatagaccaaaacggcgggaactggataagcctaccaagaggttcatcggcccaaggggactacaacagctacaacaactcgagggggggaagatcagggtctgagggacccagggatggccctggacggggaggaagcgcggaccgagacttcgacggaggcagaggtggcggcacctgggggccatcaaacagacgaggcagccaggacagtcagggcggaggccggcgctgggataaccgaagcagcgaccgtggaggtggctggggatggcggcaacaaccgctgggacaaccgtggcggcagcgaaggcccccggcggtcgctacaacaaccgtggcggccagagatggggacaacagagacaacaaccgcggattcgacgacggcacccagaggtggggtaacagccgctggaacaacagtggtggcggcggaggtggtcgaaacacatgggacaacaatgaccagaacggctctcgctggaatcggctgagagaggagggacctgctgattggtctaaactactgccgcctaatgagcgcctggagaaggagctcttcggcaacagcaacacaggaatcaacttcgacaagtacgaggacattcccgtcgaggcaacgggagaagactgccctgcaaacgtggagtcgtttgccgagttagaacttggtgagatcgtagacagcaacatcgtcctgtccaagtacaccaagccgacccctgtgcagaagcacgctatgcctatcatcaaaaagaagagggatctgatggcctgcgctcagacggggtctggcaagacggcctccttccttgttcctgtgctatctcagatgtttttggacggccagcccgagttcattcgggaacagaataaccgcaacaataggaagcagtacccaattgcactggttcttgcgccaaccagagagttggcctctcagatctacgaggaggctagaaagtttgcgtaccgttctcacgtgcgaccatgtgtagtttacggaggagcagacatcggagcacagatgagagatctgcccgaacgggggtgccacttgctggtggcgacacctggaagactcgtggacatgctggagagaggaaagatcggtctggaccacatcagatttgtggttcttgacgaggcagatcgtatgttggacatgggtttcgaaccccagatccgtcgaatcgttgagaaagacactatgcccccaaccggagatagacgaacgcttatgttcagtgccacttttcccaaggagatccagatcttagcaagagatttcctgcacaactacattttcttggctgtcggccgagtgggaagtacaagcgaaaacatcacccagaaggttgtctgggtggaggagcccgacaagaggtcgttcttactcgatctgcttaatgcttctggtccggattcactgaccctggttttcgtggagaccaagaagggagcggacgcccttgacaacttcctgtacaacgaggggtacccgtccgcctgtatccatggtgacagatctcagaaggagcgagaggaggccctcaggaacttcaggagtggaaagacccccgtgctggtcgctactgctgtggcagccagaggtctggatatccctaacgtgaaacacgtcattaacttcgatctgccgagtgacattgaggagtacgtccacaggattgggcgtaccgggcgtgtgggaaatcttggtcttgccacttctttcttcaacgacaagaacaagaacatcgtccgtgacatggtggatcttctcatagaagccaaacaggaggttcccccatggatcgagagcatcgcttacgaagccagaaccatgggaggaggacgacgaccccagaataagaggttcggaggcagcttcggcagtcgcgattaccgtcaaatgggcggccagggtggcggacgaggaggaagcactcagatgaggagcaaccccgtccctcaagcgttcggaggagccccgatgggctacggattccaccagggaggaggaggctacggaggaagctacggaggaccctaccagcaaccccaggcccatcacgctcacgactggtggggcaactag

SEQ ID NO: 77359 - protein, 771 aa, Platynereis dumerilii
MPNDSIQNGKSLEQQVAGLDLNSAPPFRGGGRDGFTGRYIPPHLRGRGGGVPGPSADRQNGAGRGAGPPGPPIDQNGGNWISLPRGSSAQGDYNSYNNSRGGRSGSEGPRDGPGRGGSADRDFDGGRGGGTWGPSNRRGSQDSQGGGRRWDNRSSDRGGGWGWRQQPLGQPWRQRRPPAVATTTVAARDGDNRDNNRGFDDGTQRWGNSRWNNSGGGGGGRNTWDNNDQNGSRWNRLREEGPADWSKLLPPNERLEKELFGNSNTGINFDKYEDIPVEATGEDCPANVESFAELELGEIVDSNIVLSKYTKPTPVQKHAMPIIKKKRDLMACAQTGSGKTASFLVPVLSQMFLDGQPEFIREQNNRNNRKQYPIALVLAPTRELASQIYEEARKFAYRSHVRPCVVYGGADIGAQMRDLPERGCHLLVATPGRLVDMLERGKIGLDHIRFVVLDEADRMLDMGFEPQIRRIVEKDTMPPTGDRRTLMFSATFPKEIQILARDFLHNYIFLAVGRVGSTSENITQKVVWVEEPDKRSFLLDLLNASGPDSLTLVFVETKKGADALDNFLYNEGYPSACIHGDRSQKEREEALRNFRSGKTPVLVATAVAARGLDIPNVKHVINFDLPSDIEEYVHRIGRTGRVGNLGLATSFFNDKNKNIVRDMVDLLIEAKQEVPPWIESIAYEARTMGGGRRPQNKRFGGSFGSRDYRQMGGQGGGRGGSTQMRSNPVPQAFGGAPMGYGFHQGGGGYGGSYGGPYQQPQAHHAHDWWGN

SEQ ID NO: 77360 - DNA, 2112 bp, Penaeus vannamei
  CDS (1)..(2112)
atgtctgatgattgggatgaaactgatgcagcccctgcatctgattggaatatagagtcctttgggctgccaacaagttttggaagtacaaagaaaacctgtaacacaggcaatgcctttaatgatggagaagggggctttgatgaaggttctcagagcaactttgatgatccctttaggagtggaggtggtggctttgggggcagaggaagaggaggaccaagagcatgttttaagtgtggagatgaaggtcacatggcaagagattgcccctcagcatcagatagtaggggaaacagaacaaacaacagaaggcaagacaactggggaggcggcagttcatccaagcctgcaaatggagagcccttcgggtttgggtctgcttttggtgacaatcaagaaagtgacccttttggtgctactgaatcatccggcttcggttttggctctggttctggttccaggggtggtagaaggaatgatggtggcaggggatgctttaagtgtggagaggaaggccacatgtcaagggattgtccatctggtggaggacgtaataagggctgcttcaagtgtggtcaggaaggccataatgcccgtgactgcccaaacccgggtgagggaagtgaggaaaaaaagccaagagctccactttatatcccagcggatgtgaatgaagatgagctctttgtcatgggcattgaagctggctccaactttgatgcatatgccaacgttccagccaatgtatcaggagctgagccaattcagcctgcagctgaaagtttccagtccatgaatctacgtcccttgcttctggagaacatagtcaaagctggttatggttgtccaacaccagtccagaagtacaccattccaaatgtgatgaatggacgagatattatggcgtgtgcacaaacggggagtgggaagacagctgctttcctgttgccaatgctacactacatacttgacaataactgcccaagcaatgcatttgaggaaccagcccaaccaactggactggtaatctgcccaaccagagagctggctatccagatcatgcgagaggctcgaaagttttctcacagctcagttgcaaagtgttgtgtggcttacggtggagctgcaggattccaccagttgaagaccattcatagtggatgccatattttagtagcaacaccaggaagattactggacttccttgagaagggcaaaattgtcttcagcagtctgaagtatctggttcttgacgaagccgacaggatgctggacatgggctttttgtcgagcatcaaaacagtgataaatcacaagacaatgacaccaactgcagaacgcataacattgatgttcagtgctacattcccccatgagattcaggaactagcatctgcctttttgaacaactatttgtttgttgttgttggaactgttggagcagcaaacactgatgtcaaacaagaggttttgtgtgtgcccaagtttgagaagaaggcaaagctggtagagatgtgtgaagaaattttaatcagtgctgatgatgagaagatcttggtatttgttgaacaaaagcgagtagctgattttgttggtacttacctctgtgaaaagaaattccgggccaccactatgcatggggatcgttaccaagcacagcgtgaacaagcattatcagaattcaggactggtgttcacaatatcctggtagctacagctgttacagcccgtggtcttgatatcaaggggattggtgtggtagtcaattatgatttaccaaaggacattgatgaatatgtacaccgcattggccggactggacgtcttgggaatcgaggcttgtccatcagtttctatgatgatgaaactgatgcttgcttaacaaaggacttggtgaaggttctgagtgaggccaatcaaactatcccagactggctgacacaaaaggcaaatgcaagtggccatgcccaaacttaccatggcagtggtctgtttgcatcctctgatataaggtcaaagaatgggggaggaagaggctgggagaaaaaccaggctagcagctttctcggaggacctagtgaaagcaatgtagatgaagaatgggactaa

SEQ ID NO: 77361 - protein, 703 aa, Penaeus vannamei
MSDDWDETDAAPASDWNIESFGLPTSFGSTKKTCNTGNAFNDGEGGFDEGSQSNFDDPFRSGGGGFGGRGRGGPRACFKCGDEGHMARDCPSASDSRGNRTNNRRQDNWGGGSSSKPANGEPFGFGSAFGDNQESDPFGATESSGFGFGSGSGSRGGRRNDGGRGCFKCGEEGHMSRDCPSGGGRNKGCFKCGQEGHNARDCPNPGEGSEEKKPRAPLYIPADVNEDELFVMGIEAGSNFDAYANVPANVSGAEPIQPAAESFQSMNLRPLLLENIVKAGYGCPTPVQKYTIPNVMNGRDIMACAQTGSGKTAAFLLPMLHYILDNNCPSNAFEEPAQPTGLVICPTRELAIQIMREARKFSHSSVAKCCVAYGGAAGFHQLKTIHSGCHILVATPGRLLDFLEKGKIVFSSLKYLVLDEADRMLDMGFLSSIKTVINHKTMTPTAERITLMFSATFPHEIQELASAFLNNYLFVVVGTVGAANTDVKQEVLCVPKFEKKAKLVEMCEEILISADDEKILVFVEQKRVADFVGTYLCEKKFRATTMHGDRYQAQREQALSEFRTGVHNILVATAVTARGLDIKGIGVVVNYDLPKDIDEYVHRIGRTGRLGNRGLSISFYDDETDACLTKDLVKVLSEANQTIPDWLTQKANASGHAQTYHGSGLFASSDIRSKNGGGRGWEKNQASSFLGGPSESNVDEEWD

SEQ ID NO: 77362 - DNA, 2340 bp, Daphnia magna
  CDS (1)..(2340)
atgggtgatgattgggatgaagtgatttgctctgctccatctcaaagcagtgctggaggttcttggaataataacaataaccaaacaggaataaaaccacctgctggcagagggagaggggcagctgcattagccagtcaaatgaacagtgtgaagatctcatctgatgatgaatggggagcgggagttaaagctgtaaaacctgttcctagctctaatggatgggatgctccagccccgaaggctggcaattccagtgattggggagccccagcgtcaactgctcctgcaagttctggtgggtggaatgctcctgaaagcacctcacaattcaagaatgattttgatgatcagcctcgtggtggtggatggggcagcactggagcaagtggattaaaaagcactggaggtggccgtccatgtcataagtgtggagaagaaggtcacatggcaagggagtgtccaaaaggtggtggtggtggcggtggaggcagtcgggcttgtcacaagtgtggagaagaaggacatttttccagagagtgtccacaagccggtgggggtggtggtagcggtccgcggacttgtcacaaatgtggggaagaggggcatttctcaagggaatgtccacaaggaggtggcggcggcggtggtggtggtggaagtcgtgcttgccataagtgtggagaagaaggacatttttccagggaatgcccacaaggaggaggagggggtggtagtggacctcgtacgtgtcacaagtgtggagaagagggtcatatgtcaagggattgtccacaaggaggaggtggtggtgacggcaagtgcttcaagtgtcacgaagctggtcacacctcgaaagattgcccgaacccattcagtgaattgacggaagacggaaagccgcgtgaacaatacattccggaagctgtgacgtgcgatgaaaaggaactttttaagggcatcgtctgtggggagcgctttaacaattttgataaggtcgtcctccaggttactggaaaagatgtacctcaatacataacatcgttcgaagaagccggcttgcgcccactgttgcttcagaacatcaagaattctggctacataaaaccaacacctgttcagaaagcctcgattgcagttattctggccaaaagagatttgattgcttgtgctgtcacgggctccggcaaaacggcggcgtacttagtaccagttatgaacatattgttagagcaaggtgttgctggtgcgtcccacggcatgcttcaaaagccagaagttgtaattgttgcacccactcgtgaattggctattcaaattcaccgcgaggcgtgtaaattctcctacaactcggttttgaagtccgtgattatatatgggggaactgtcgtgaaccatcagcggacaaatcttcaagctgggtgcaatattcttgtcgcgaccgctgggcgactgaaggatttcctcgaccgtggaatatttgacttcacagcggtcagatttttaatcttggacgaagctgatcgaatgcttgatatgggttttggtcccgatattgaaaaaatggtcaaccatcccacgatgcctccaaaagggatccgtcgtgtttgcatgttttcggctacattcccagatgaagtacaagcgttggcagcgacttacatggaagactacatattcgtcacaacgggtattgttggtggcaccaatccggatgtcgaacagctgttttttcagtgctcgaaaagagataagagagctaagctgatggaagttttacaagatctcggtgatgccaagactatcgtttttgtcgacagcaaaaagaccgcggatttcgtcgcagcatttttgtgcaataataacttacaatctaccagcattcatggagatcgtcttcagagccagcgcgagcaagcgcttcgtgatttcaagaatggtgtcaggaatattctcgtggccaccaatgttgctgcccgtggtttagatattgccggtgtaaactatgtcgtaaattatgacttgccaactgatattgaagagtatgttcatcgtgttggtcgaacgggccgcgtgggaaacattggaaaatcaattagtttctttgacgatgaaaaagatggccctaacgttggaaaatttgtgtcgttgttaactaagtccaacgctgatgtaccgccattcatgcaagcgatggtctcgggagtgagtggaatgggttacgacttcagcgcaccttcgagccaggggggttttgctagtcgcgatgtgcgccgatttggtgataaacctggtatggctgctgctctgcctactgaagctgaagagagctgggattaa

SEQ ID NO: 77363 - protein, 779 aa, Daphnia magna
MGDDWDEVICSAPSQSSAGGSWNNNNNQTGIKPPAGRGRGAAALASQMNSVKISSDDEWGAGVKAVKPVPSSNGWDAPAPKAGNSSDWGAPASTAPASSGGWNAPESTSQFKNDFDDQPRGGGWGSTGASGLKSTGGGRPCHKCGEEGHMARECPKGGGGGGGGSRACHKCGEEGHFSRECPQAGGGGGSGPRTCHKCGEEGHFSRECPQGGGGGGGGGGSRACHKCGEEGHFSRECPQGGGGGGSGPRTCHKCGEEGHMSRDCPQGGGGGDGKCFKCHEAGHTSKDCPNPFSELTEDGKPREQYIPEAVTCDEKELFKGIVCGERFNNFDKVVLQVTGKDVPQYITSFEEAGLRPLLLQNIKNSGYIKPTPVQKASIAVILAKRDLIACAVTGSGKTAAYLVPVMNILLEQGVAGASHGMLQKPEVVIVAPTRELAIQIHREACKFSYNSVLKSVIIYGGTVVNHQRTNLQAGCNILVATAGRLKDFLDRGIFDFTAVRFLILDEADRMLDMGFGPDIEKMVNHPTMPPKGIRRVCMFSATFPDEVQALAATYMEDYIFVTTGIVGGTNPDVEQLFFQCSKRDKRAKLMEVLQDLGDAKTIVFVDSKKTADFVAAFLCNNNLQSTSIHGDRLQSQREQALRDFKNGVRNILVATNVAARGLDIAGVNYVVNYDLPTDIEEYVHRVGRTGRVGNIGKSISFFDDEKDGPNVGKFVSLLTKSNADVPPFMQAMVSGVSGMGYDFSAPSSQGGFASRDVRRFGDKPGMAAALPTEAEESWD

SEQ ID NO: 77364 - DNA, 2532 bp, Moina macrocopa
  CDS (1)..(2532)
atggccgacgattgggacgttggtgcgccaccatcgagcactgcaggtgcaccaaatgattcttggggagtcaacaattcatggggagagccaaaaggtggaataaagccacctggaggcagaggaagaggcattgctgctcatgtaactaatcaaatgggtgacatgaaaatttcaagcaatgacagctggggaacaagcaagttgccccaggaatctacaggcccaggcaacccagaccctgatagcagttgggtcaaaccagcacctaagtcgggagagtggggtcaagcttcagcgcaatccaacaatgattggggagatgctgcaccaggacagtttgctgatgcacaaccaaagagtggaggctggggctctcccccacagaagtctggccctgctggttttggaacttcgccaaaaaaggctagtactggtggttggggtgctgacaaggaagagcaaccacgaggtgctggatggggatcttcaaaccaaggtggtaccggatggggaacttccaaccaaggtgcctctggtggtggctggggagcccctaatggaggtgatcgtggaagtggaccacgacaaggtggcggttcaagaggatgctttaattgtggagatactaatcatatgtctcgagaatgcccaaatcccaaaaaggagggcaattccagagggacttgctataattgcggagatagtggtcacatgtctcgggaatgcccaaatcccaagaaggagagcagttctagaggcacttgctataactgccagcaagaaggtcacatgtcaaaagattgtccaaaccctaaggttgagagaagccgtggctgccgtaattgtggagaagatggccacatggccagagagtgccctagcaaaaacggagatggcaacggtggtggagatcgcggcggaaaccgcgcgtgttttaattgcggcgaagaaggccaccaatcgaaggattgtgagaagccaaggacttcgaagggtggtggtggtggagcttgcttcagatgtcagagcacggaccatatggctaaggactgtccggagcccaacgtcggcccggacggcaaaccccgcgagagctacgtcccaccggaaatccaagatgagagcgaactgttcaaagacggaatttcaaccggcaacaactttgctaattttgaaaatgccattctccaggtaaccggtaacaatgtacctaattacattacgtcattcgagacggccggactgcgagatcttgtactccagaacatcaaagcgtctggctacacgaaacccacacccgttcagaaaggtgctattgcagttgttttggcacggcgcgatctcatcgccagtgcagttactggctcaggcaaaacggccgcctttctggtcccggtagttaatattctgcttgagaaacaagtccagggtgccccttctggcgaagttcagaaacccgaggtagtgattatctcaccaacgcgcgaattggccattcagattcaccgggaagcccggaaattttcccacaattccgttctcaagtccgttatcgtgtatggtggtactcaagtaagccatcagaagagcagtctgatgaacggctgcaatatcctggtcggcactcctggccgtctgaaggactttgtcgataaggggttcattgattttagcaacgttcagttctttattctggacgaggctgatcgcatgctcgacatgggattcggttccgacattgaattcattgcccagcatcccactatgactccagtgggcaggagagtgactctgatgttttctgcaacttttcccgatgatgtgcagaaaattgcaggcaagtacttgcacgactacgtgtttgtgaccactggaaatatcggcggtatgaatcctgacgtgtgccaagagtttcacgaagtgcaacgccaggataaacgaaacaaattggtggagattctgcgagacttgggcaattcgcgtgtcattgtctttgtggaaagcaagaagactgccgattttatcgccgcttttttggcaaatactcaattccaggcaacaagcattcacggtgatcgtctgcagagccagcgcgaacaagctctccgggaatttaaaagcggccaaagaaatattctagttgcaacgaatgttgctgctcgtggtttagatattgctggagtggagtatgttataaattatgacctcccggctgacatagaagagtatgtccaccgcattggtcgcactggtcgcgtcggcaacgccggccgatcgatcagcttttacgatcctgacagggacgccccgaacgctggacgccttgttcaacgactagttgcctctgaagccgacgtgccttctttcctccaatcttctgtctctggcgtcgggggaatgggtttcaactttaacgcgccgaacggctcggcaagcggcttcaggagcgtcgatgctcgtcgttttggaaacagcggggcgtctggcttcgtagacaagcctgccgaaaccgaagaaagatgggagtag

SEQ ID NO: 77365 - protein, 843 aa, Moina macrocopa
MADDWDVGAPPSSTAGAPNDSWGVNNSWGEPKGGIKPPGGRGRGIAAHVTNQMGDMKISSNDSWGTSKLPQESTGPGNPDPDSSWVKPAPKSGEWGQASAQSNNDWGDAAPGQFADAQPKSGGWGSPPQKSGPAGFGTSPKKASTGGWGADKEEQPRGAGWGSSNQGGTGWGTSNQGASGGGWGAPNGGDRGSGPRQGGGSRGCFNCGDTNHMSRECPNPKKEGNSRGTCYNCGDSGHMSRECPNPKKESSSRGTCYNCQQEGHMSKDCPNPKVERSRGCRNCGEDGHMARECPSKNGDGNGGGDRGGNRACFNCGEEGHQSKDCEKPRTSKGGGGGACFRCQSTDHMAKDCPEPNVGPDGKPRESYVPPEIQDESELFKDGISTGNNFANFENAILQVTGNNVPNYITSFETAGLRDLVLQNIKASGYTKPTPVQKGAIAVVLARRDLIASAVTGSGKTAAFLVPVVNILLEKQVQGAPSGEVQKPEVVIISPTRELAIQIHREARKFSHNSVLKSVIVYGGTQVSHQKSSLMNGCNILVGTPGRLKDFVDKGFIDFSNVQFFILDEADRMLDMGFGSDIEFIAQHPTMTPVGRRVTLMFSATFPDDVQKIAGKYLHDYVFVTTGNIGGMNPDVCQEFHEVQRQDKRNKLVEILRDLGNSRVIVFVESKKTADFIAAFLANTQFQATSIHGDRLQSQREQALREFKSGQRNILVATNVAARGLDIAGVEYVINYDLPADIEEYVHRIGRTGRVGNAGRSISFYDPDRDAPNAGRLVQRLVASEADVPSFLQSSVSGVGGMGFNFNAPNGSASGFRSVDARRFGNSGASGFVDKPAETEERWE

SEQ ID NO: 77366 - DNA, 2181 bp, Artemia sanfranciscana
  CDS (1)..(2181)
atggatgactgggatgatgaagagaagcccacgacttatgtgaaagggaatgctctagaaagtacaactcaagataatggttggaacccagtagaaagtggcggatggaatgacagtggcgctaaagagtcaaatggatgggatgagagtaacaacaacagttggggacgatccaatggtgattcaggattccaaggaagtggaaggggaggcagaggagaaggatcaagtggaaaatgctttaattgtaatcaagaagggcatatgtcacgtgagtgcacacagccaagagctgaaagaggtggcggacgcggaggaggacgcggtggttcaagggcctgttacaattgtaatcaagaaggacatatgtcgcaagaatgcacagagccaagagctgaaagaggtggtggacgtggaggaggacgtggtgggtcaagggcctgtttcaattgtcagcaagaaggccatagagcaagtgattgcactgaacctagggccgaaagaggtcgtggaggaggccgaggtcgtggcggacgtggtggctttggcaggactgaaactactacgtctgattggggtaacaatgaaacagacacagcagcagaatcaggctggaacggtgattcctttgcagagtcagataattttggtaatgatacaagttctggatttcgtggtagaggaggccgtgggggaaggggtcgtggtggtggaagaggaccatcggacgattcggaaccagctggagagacaaccgagccagagcgtgctccagtaacgtacattcccgacgaggaggaagaaacagaggagctcctttttcaccgagggactactgccggaataaattttagtaaattttcaaatgtagcagccaaggtaacaggcgaaggccttcctagtggaattgattcttttgatgctgcagggttgcgtccaaaaatattagataatataaagaaatctggatatactcaacctacacctgttcagaagtgggccattccagtcattatgaagaaaagggacttaatggcatgtgcgcagaccggctctggaaaaaccggtgcttatcttatcccaatcataaatcgcctgatcgaagaaggatgcgctgcctcgtcgtatgacgaaacacaaactccagaagcggttgtcatgtgtccaacccgagaattggctatacagatttttaaggaagccgtcaagttttcttacgataccattattaaaccagttgttgtctatggtggtgttgcgcctcgttatcaatctgacaaagttaagagtggctgtaatatcctagttggcacgcctggccgattgatagattttatgaatcgtggagtattcaacttttctgcttgtaagtttttggttcttgatgaagctgatcgaatgttggacatgggcttcatgggcgaagtcaagaaagttgtataccatggaacgatgccagtaaaggttgaaagaaatacattgatgttctcagcaacttttcctaacgaagttcaagagttggctgcagaatttcttgagaattatatttttgttactgttggcacagtgggtggagcctgcatggacgtacttcaagaagttatagagattgatgctaagagtcgaatcgatcgacttctcgaaattttgacagaaaaagagggcgttaagactctggtttttgcatcttcgaagaagactgccgattttcttgccgcattactctcaacaaaaaaccttcctgccacaagtatacacggagatcgatttcaatatcagagagaagaagtgctgcgtgactttaaatctgggcaccgtaacattcttgttgctactgcagtggctgctcgaggcttagatataaagggcgttggccttgtcatcaactatgaactacctacagatattgatgaatatgtacataggatcggaagaacgggtcgccttggtaatactgggcatgccatatcatttttcaacccggataaggattcagcaattgccgggaagctggttaatgttcttgcggcggcacagcaaactgttcctgtttttcttgagtctatggcaagtggggtatcatttggttctgatgcttcgagccgttttggtggatctgatgttagaaatactgggagagccttagaagtccagatcgaagctgacgaagaatggtcttaa

SEQ ID NO: 77367 - protein, 726 aa, Artemia sanfranciscana
MDDWDDEEKPTTYVKGNALESTTQDNGWNPVESGGWNDSGAKESNGWDESNNNSWGRSNGDSGFQGSGRGGRGEGSSGKCFNCNQEGHMSRECTQPRAERGGGRGGGRGGSRACYNCNQEGHMSQECTEPRAERGGGRGGGRGGSRACFNCQQEGHRASDCTEPRAERGRGGGRGRGGRGGFGRTETTTSDWGNNETDTAAESGWNGDSFAESDNFGNDTSSGFRGRGGRGGRGRGGGRGPSDDSEPAGETTEPERAPVTYIPDEEEETEELLFHRGTTAGINFSKFSNVAAKVTGEGLPSGIDSFDAAGLRPKILDNIKKSGYTQPTPVQKWAIPVIMKKRDLMACAQTGSGKTGAYLIPIINRLIEEGCAASSYDETQTPEAVVMCPTRELAIQIFKEAVKFSYDTIIKPVVVYGGVAPRYQSDKVKSGCNILVGTPGRLIDFMNRGVFNFSACKFLVLDEADRMLDMGFMGEVKKVVYHGTMPVKVERNTLMFSATFPNEVQELAAEFLENYIFVTVGTVGGACMDVLQEVIEIDAKSRIDRLLEILTEKEGVKTLVFASSKKTADFLAALLSTKNLPATSIHGDRFQYQREEVLRDFKSGHRNILVATAVAARGLDIKGVGLVINYELPTDIDEYVHRIGRTGRLGNTGHAISFFNPDKDSAIAGKLVNVLAAAQQTVPVFLESMASGVSFGSDASSRFGGSDVRNTGRALEVQIEADEEWS

SEQ ID NO: 77368 - DNA, 2328 bp, Daphnia magna
  CDS (1)..(2328)
atgggtgatgattgggatgaagtgatttgctctgctccatctcaaagcagtgctggaggttcttggaataataacaataaccaaacaggaataaaaccacctgctggcagagggagaggggcagctgcattagccagtcaaatgaacagtgtgaagatctcatctgatgatgaatggggagtgggagttaaagctgaaaaacctgttcctagctctaatggatgggatgctccagccccgaaggctggcaattccagtgattggggagccccagcgtcaactgctcctgcaagttctggtgggtggaatgctcctgaaagcacctcacaattcaagaatgattttgatgaccagcctcgtggtggtggatggggcagctctggagcaaatggattaaaaagtactggaggtggccgtccatgtcataagtgtggagaagaaggtcacatggcaagggagtgtccaaaaggtggtggtggcggtggtggcagtcgggcttgtcacaagtgtggagaagaaggacatttttccagagagtgtccacaagccggtgggggtggtggtagcggtccgcggacttgtcacaaatgtggggaagaggggcatttctcaagggaatgtccacaaggaggcggcggcggtggtggaagtcgtgcttgccataagtgtggagaagaaggacatttttccagggaatgcccacaaggaggaggagggggtggtagtggacctcgtacgtgtcacaagtgtggagaagagggtcatgtgtcaagggattgtccacaaggaggaggtggtggtgacagcaagtgcttcaagtgtcacgaagctggtcacacctcaaaagattgcccgaacccattcagtgaattgacggaagacggaaagccgcgtgaacaatacattccggaagctgtgacgtgcgatgaaaaggaactttttaagggcatcgtctgtggggagcgctttaacaattttgataaggtcgtcctccaggttactggaaaagatgtacctcaatacataacatcgttcgaagaagccggcttgcgcccactgttgcttcagaacatcaagaattctggctacataaaaccaacacctgttcagaaagcctcgattgcagttattctggccaaaagagatttgattgcttgtgctgtcacgggctccggcaaaacggcggcgtacttagtaccagttatgaacatattgttagagcaaggtgttgctggtgcgtcccacggcatgcttcaaaaaccagaagttgtaattgttgcacccactcgtgaattggccattcaaattcaccgcgaggcgtgtaaattctcctacaactcggttttgaagtccgtgattatatatgggggaactgtcgtgaaccatcagcggtcaaatcttcaagctgggtgcaatattcttgtcgcgaccgctgggcgactcaaggatttcctcgatcgtggaatatttgacttcacagcggtcaaatttttaatcttggacgaagctgatcgaatgcttgatatgggttttggtcccgatattgaaaaaatggtcaaccatcccacgatgcctccaaaagggatccgtcgtgtttgcatgttttcggctacattcccagatgaagtacaagcgttggcagcgacttacatggaagactatatattcgtcacaacgggtattgttggtggtaccaatccggatgtcgaacagctgttttttcagtgctcgaaaagagataagagaactaagctgatggaagttttacaagatctcggtgatgccaagactatcgtttttgtcgacagcaaaaagaccgcggatttcgtcgcagcatttttgtgcaataataacttacaatctaccagcattcatggagatcgtcttcagagccagcgcgagcaagcgcttcgtgatttcaagaatggtgtcaggaatattctcgtggccaccaatgttgctgcccgtggtttagatattgccggtgtaaactatgtcgtaaactatgacttgccaactgatattgaagagtatgttcatcgtgttggccgaacgggccgcgtgggaaacattggaaaatcaattagtttctttgacgaagaaaaagatggccctaacgttggaaaatttgtgtcgttgttaactaagtccaacgctgatgtaccgccattcatgcaagcgatggtctcgggagtgagtggaatgggttacgacttcggcgcaccttcgagtcatgggggttttgctagtcgcgatgtgcgccgatttggtgataaacctggtatggctgctgctctgcctactgaagctgaagagagctgggattaa

SEQ ID NO: 77369 - protein, 775 aa, Daphnia magna
MGDDWDEVICSAPSQSSAGGSWNNNNNQTGIKPPAGRGRGAAALASQMNSVKISSDDEWGVGVKAEKPVPSSNGWDAPAPKAGNSSDWGAPASTAPASSGGWNAPESTSQFKNDFDDQPRGGGWGSSGANGLKSTGGGRPCHKCGEEGHMARECPKGGGGGGGSRACHKCGEEGHFSRECPQAGGGGGSGPRTCHKCGEEGHFSRECPQGGGGGGGSRACHKCGEEGHFSRECPQGGGGGGSGPRTCHKCGEEGHVSRDCPQGGGGGDSKCFKCHEAGHTSKDCPNPFSELTEDGKPREQYIPEAVTCDEKELFKGIVCGERFNNFDKVVLQVTGKDVPQYITSFEEAGLRPLLLQNIKNSGYIKPTPVQKASIAVILAKRDLIACAVTGSGKTAAYLVPVMNILLEQGVAGASHGMLQKPEVVIVAPTRELAIQIHREACKFSYNSVLKSVIIYGGTVVNHQRSNLQAGCNILVATAGRLKDFLDRGIFDFTAVKFLILDEADRMLDMGFGPDIEKMVNHPTMPPKGIRRVCMFSATFPDEVQALAATYMEDYIFVTTGIVGGTNPDVEQLFFQCSKRDKRTKLMEVLQDLGDAKTIVFVDSKKTADFVAAFLCNNNLQSTSIHGDRLQSQREQALRDFKNGVRNILVATNVAARGLDIAGVNYVVNYDLPTDIEEYVHRVGRTGRVGNIGKSISFFDEEKDGPNVGKFVSLLTKSNADVPPFMQAMVSGVSGMGYDFGAPSSHGGFASRDVRRFGDKPGMAAALPTEAEESWD

SEQ ID NO: 77370 - DNA, 3039 bp, Choristoneura fumiferana
  CDS (1)..(3039)
atggtgagaagcgggcgtgatcgcgatagagatagggaacgtcgacgttcgcatagtcgttcagcgacccctgaccgcaaaagacggcggtctaggtcgagaagcagggatcgtacgtctaaaacttcgaagaggaagcggagccgtagcagagaaagagagtcaaagcgagatcgcagcagggaccgagacaggggacagggaaaagtgataaacgtgatggacaaggcggaatggcaccaagcagtaagccttcaaggaaaaagacaccggacaaggagagagacaggtccaaatccaaagagaagtctattaaacaagaaccagactatgatattgggtctgctgataaggaagaagagcaaagccgcttggaggctgaaatgcagaaacggcgtgatcgtatcgagcggtggagagccgaccggaaacggaaagaactcgagtcagccaaaaaagaagtacagaagggcagtctcgttagcaacatacagatgcctgctaagaagtggtgctagaaggatgactcaggcgatgaaggtgaattgctcgtatgctgaggaggcagaagctaaagaaaaagcagctgcacaggaaaaaaaagaagcggaagacgaaattgatccattggatgcctatatgcaagaggttcagcaagaagtgcgcaaagtgaatcaaatggaccagcaaaggggtctaactgtgcccaccaatggtgggactggtatagttattttgacgggcacagccaagaagaaggtctcagaacagaaaaataaaggtgaactgatagaacagaaccaggatggcctggagtattcttccgaagaagaaaacgaagacattaaagacacggcagcgaatctcgcgtcgaagcaaaggaaagaactggctaaagtagaccactccagcttggaatacatgccattccggaaagctttttacacagaggtgagtgagctagctcgaatgtccccagaagaagtggaagcgtatcgcacagagttagaaggtatccgcgtgaaagggaaaggctgccccaagccgataaggacgtgggctcactgcggcgtcagcaagaaagagatggatatactgaagaagctcaactttgaaaagcctacgcctatacaggctcaggcgataccggctatcatgtcgggaagggacctaataggcatagcgaagaccggctctggcaaaaccctcgccttcatcttaccaatgttccggcacgttctggaccagtctcccctcgaagacacggacggccccatctccctcattatgacacccaccagggaactgtgcatgcagattgggaaagatataaggaagtttgccaagtccttggggctgagggtcgtgtgtgtatacggtggcactggcatctctgaacagatagcggagctgaaacgtggcgctgagataatagtgtgcacgccgggtcgtatgatcgacatgttagcggctaattccggtcgcgttacgaacctgcgtcgggtgtcgtacatcgtgcttgacgaggctgaccgcatgtttgacatgggctttgagccacaggtaatgaagataatcgacaacatccgccctgaccgacagaccgtgatgttcagcgcgacttttccacgccagatggaggcgctggctcgaaggatacttcagaagcccatcgagatacaggtgggcggacgaagcgtagtctgcaaggacgtggaacaacacgtagccatcttggaggatgacgccaagttcttcaagctgctggaactcctggggctgtacagtcagttgggcagcatcatcgtgttcgtggacaagcaggaaaacgcggacagtctgctcaaagatttgatgaaggcttcatattcctgcatgagcttacatggagggattgatcaattcgacagggactccaccattgttgatttcaagaacggcaaagtgaagctcctggtagcgaccagtgtggcggcgcgcgggctggacgtcaaacaactggtgctggtagtcaactatgactgccctaaccattatgaggactacgtgcatagatgcgggcgcaccggcagagcaggcaacaaaggtttcgcctggacgttcctaaccccggaacaaggccggtacgcgggtgacgtgctacgtgctatggagctgagcggcgcagtcgtgccgcccaccttacgcgccttgtgggattcgtacaaggacgcacaagaaaaggatggcaagaaggttcatacaggaggtggatttagcggaaagggtttcaagttcgacgaatcagaagcgcaagcggcgaccgagaagaagaagtaccagaaggcagcgctcgggctccaagactctgacgacgaggacgtcgaaggcgacctcgaccagcagatagaaaccatgctggctgctaagaagatcgtcaaagagatcaagccgggtgttggtgcgccgggagccccgggggcggcggcggcgggcggcgcgggccccgacgtgaagctggagctggcgcgccggctcgcgtcgcgcatcaacctggccaagggtctgggcgccgagcacaagggcgccacgcagcaggccgccgaggccatcctgaagggggcgccatccgcccacacgctcatcacggctaagacggtagcagagcagctggccgccaaattaaacacgcgtctcaattaccagccgcgcgacgaaagtgccaacgagcccgctgaagaagtgtttaggaagtacgagacggaactggagatcaatgacttcccgcagcaggcgcgctggcgagtcactagcaaggaggctctggccctgatcagcgaatactccgaagcaggcatcacagtccgcggcacgtacgtccccccaggcaagaacccgcccgaaggggaacggaagctgtacctggccatagaaagctcccaggaactcgccgtggccaaagccaagtcggagatcacgcgtctgatcaaggaagaactgttgaaactgcagacctctgcccatcacatggtcaacaaggctagatataaggtcttgtag

SEQ ID NO: 77371 - protein, 1012 aa, Choristoneura fumiferana
MVRSGRDRDRDRERRRSHSRSATPDRKRRRSRSRSRDRTSKTSKRKRSRSRERESKRDRSRDRDRGQGKVINVMDKAEWHQAVSLQGKRHRTRRETGPNPKRSLLNKNQTMILGLLIRKKSKAAWRLKCRNGVIVSSGGEPTGNGKNSSQPKKKYRRAVSLATYRCLLRSGARRMTQAMKVNCSYAEEAEAKEKAAAQEKKEAEDEIDPLDAYMQEVQQEVRKVNQMDQQRGLTVPTNGGTGIVILTGTAKKKVSEQKNKGELIEQNQDGLEYSSEEENEDIKDTAANLASKQRKELAKVDHSSLEYMPFRKAFYTEVSELARMSPEEVEAYRTELEGIRVKGKGCPKPIRTWAHCGVSKKEMDILKKLNFEKPTPIQAQAIPAIMSGRDLIGIAKTGSGKTLAFILPMFRHVLDQSPLEDTDGPISLIMTPTRELCMQIGKDIRKFAKSLGLRVVCVYGGTGISEQIAELKRGAEIIVCTPGRMIDMLAANSGRVTNLRRVSYIVLDEADRMFDMGFEPQVMKIIDNIRPDRQTVMFSATFPRQMEALARRILQKPIEIQVGGRSVVCKDVEQHVAILEDDAKFFKLLELLGLYSQLGSIIVFVDKQENADSLLKDLMKASYSCMSLHGGIDQFDRDSTIVDFKNGKVKLLVATSVAARGLDVKQLVLVVNYDCPNHYEDYVHRCGRTGRAGNKGFAWTFLTPEQGRYAGDVLRAMELSGAVVPPTLRALWDSYKDAQEKDGKKVHTGGGFSGKGFKFDESEAQAATEKKKYQKAALGLQDSDDEDVEGDLDQQIETMLAAKKIVKEIKPGVGAPGAPGAAAAGGAGPDVKLELARRLASRINLAKGLGAEHKGATQQAAEAILKGAPSAHTLITAKTVAEQLAAKLNTRLNYQPRDESANEPAEEVFRKYETELEINDFPQQARWRVTSKEALALISEYSEAGITVRGTYVPPGKNPPEGERKLYLAIESSQELAVAKAKSEITRLIKEELLKLQTSAHHMVNKARYKVL

SEQ ID NO: 77372 - DNA, 1425 bp, Listeria ivanovii
  CDS (1)..(1425): transl_table=11
atgaggactgacatgaataatttaaatttaagtgaagaaattaaacgagcaattaatgaactaggatataaagaagcgacacctgttcaaaaggaagttatccctgttgcattaacaggaaaagacattgtggcaaaatcacaaacaggaagtggtaaaacagccgcatttgcgattccaattgctgaacaagtcatttgggaagaaaacaaacctcaagcattaattatcgttccaactagagagctagctatgcaggttaaagcggaatgcactaatataggtagatttaaacgcattaaagctgcagcaatttatgggcaatctccctttgctaaacaaaaattagaattaagccaaaaaaatcatatcgtcgttggaaccccggggcgtttgttagaccatattgaaaaaggcacacttaacgtggataaagttgcttacttagttttagatgaagtagacgaaatgttaagtatgggattcattgatcaagtagaagatattttgcagtttttacctaaaaagcgccaaaatctattcttttcggcaacaatgccagaggaaatgcaagatttaatcaaacgatatcaagacgatcccattgttattgaaatggcagcagaaaaaacaaacccaatcacacatatcgaaatgcaaacagagaataaagaaaagacgctccaagatgttttaatcacagaaaatccagatagtgcgattattttttgtaacactaaaaatcaagtagatgaactaagtgacttactacaagtaaatacagctaaaatccatggaggtttacgacaagaagagcgtttccgtgcgatggatgattttaaaagtggcaaatcgcgctttttaattgcaacagatgtagctggtcgtgggattgatgtggaaaatgtcacgctagtaattaattatgacttaccaatcgaaaaagaaaactatgtgcaccgaatcggtcgtactggtcgcgcgggaaacagtggaaaagcaatcagttttgtcaaaacaaacgaaaatcccttacttagagatatggaagatatgctaaaaatcacgattgaaaagaaacgtaaaccaaccattatcgaagtaaaggcaagcgaagaagctttccgcaagaaacaacaaaaacgtccaaccatcaaaaaagctcgtggcgaaaagctgaataaaaatattatgaaactgtactttaatggcgggaaaaagaaaaaaattcgagctgtggattttgtaggaaccatttcaaaattagaaggaattacatcagaagatatcggtattattactatagaagatcatgtgtcatttgtagaaattcttaatggtaaaggaccagctgtgcttgaaatgatgcgttcgcgtaaagtaaaaggtagacagctaaaagtgaacgaagcaagaaagcgataa

SEQ ID NO: 77373 - protein, 474 aa, Listeria ivanovii
MRTDMNNLNLSEEIKRAINELGYKEATPVQKEVIPVALTGKDIVAKSQTGSGKTAAFAIPIAEQVIWEENKPQALIIVPTRELAMQVKAECTNIGRFKRIKAAAIYGQSPFAKQKLELSQKNHIVVGTPGRLLDHIEKGTLNVDKVAYLVLDEVDEMLSMGFIDQVEDILQFLPKKRQNLFFSATMPEEMQDLIKRYQDDPIVIEMAAEKTNPITHIEMQTENKEKTLQDVLITENPDSAIIFCNTKNQVDELSDLLQVNTAKIHGGLRQEERFRAMDDFKSGKSRFLIATDVAGRGIDVENVTLVINYDLPIEKENYVHRIGRTGRAGNSGKAISFVKTNENPLLRDMEDMLKITIEKKRKPTIIEVKASEEAFRKKQQKRPTIKKARGEKLNKNIMKLYFNGGKKKKIRAVDFVGTISKLEGITSEDIGIITIEDHVSFVEILNGKGPAVLEMMRSRKVKGRQLKVNEARKR

SEQ ID NO: 77374 - DNA, 2295 bp, Hordeum vulgare
  CDS (1)..(2295)
atggcttccctcctcacgctcccgtccctctccctctccagccccagcggcggcctcgcgcccgcgctccggctccgcgccgccttccgctgctgggcgctcggccgcaggtgggcgggcgccgccgcggccatcgcgtcgcccaactccgtgctcagcgagcacgccttcaagcgcctcgggctcggcgccggcagcgacgacgaggatgaggacgggtacgggagcgaccaggaggggcccgccgccgtggagggggacaaggatgagctcgccatttccaggctcggcctccccgcccagctcgtcgccaccctcgagaagcgcggaattacccacctcttccccatccagagggctgtattgattccagcacttgagggccgtgacctgattgcaagagcaaagactggaactggaaagacgctagcctttggtatacccatgatcaagcaaataatcgagcaggacgaagggcggactcccgggcgaggtcgtattccgagagctttggtccttgcacccactagagagttggctaaacaagttgagaaagaaattatggaatcagcgccaaagcttagtacagtgtgtgtttatggtggtgtatcatataatacccagcagaatgcactctcccgtggtgttgatgttgtcgtaggaactccaggtcgcctaattgatttgataaacggtggaagtcttcagttgggagaagtaaggtatctggtccttgatgaggctgaccagatgcttgcagttggatttgaagaagatgtggaaacaatattgcaacagctgccagctgaacgacaaagcatgcttttctctgcgaccatgcctagttgggtgaagaaattgtctaggcggtacttgaataatcctttgacaattgatttggttggcgatcaagatgaaaaattagctgaaggaatcaaactctttgctattccactcacaacgacttcaaagcgcaccattcttagtgatctcattacggtatatgcaaagggtgggaaaactattgttttcactcggacaaaacgggatgcagacgaggtatcattagcattgacaaccagtattgcgtctgaggcgcttcatggtgatatttcacaacatcagcgtgagaggacattaaatggtttccgccaagggaaatttactgtgcttgtggccactgatgttgcttctcgtggtcttgatatacccaatgttgatttgattattcattatgagttgccaaatgaccccgagacttttgttcatcgttctggacgcactggacgagcagggaaagcaggaaatgcaatcttaatgtttacaaccaatcagcgaaggacagttaaatcacttgaacgtgatgttgggtgcaaatttgagtttattggcccacctacaatggaagaagtactggattcatctgcagagcatgtcattgctactctgcgaggtgtgcaccccgagtcgattcaatactttgttccagcggctgagagactaagccaagaactaggacctactgctcttgcttctgcattggcacatctgagtggattttctcagccaccttcttcacgttccctgattagccatgagcagggatcggtgacactacaactaaccagggatccagaatatgcaagaggcttcttttctcctagatctgtcaccggttttctgtctgatgtctctccatctgctgctgatgcagttggaaaaatatacctaatagcagatgagagggtccaaggagcagtctttgatttacccgaggagattgcaaaggatctgcttaccatggaactgcccccaggaaacaccttgagcaaagtaacaaagctgccggtgttgcaagatgatggccctgctactgattcttacggccgattctcaaactcagaccggggttctaggaaccggcgggggtcgtccaggggcggtatgggtggcggctcaagaggacgtggtggttgggactctgatgaaggattccgtcgtggtggcaggagctccagcagacctgacaacgacatttggtcagatgatgacttttcaggtggtggtgcgagaagatcaaaccgttcgtcatcccccagcggtggccgctcgtcctatggtgggcgtggtggctcgtcatccttcggtgacagatcctcctcctttggtgaacgctcatcgtcatacggtggtcgcggtggctcgtcctttggcagcagggacagaagcttcagtggcgcgtgcttcacatgcgggcaatcagggcacagagcatcagactgcccgaacaagtag

SEQ ID NO: 77375 - protein, 764 aa, Hordeum vulgare
MASLLTLPSLSLSSPSGGLAPALRLRAAFRCWALGRRWAGAAAAIASPNSVLSEHAFKRLGLGAGSDDEDEDGYGSDQEGPAAVEGDKDELAISRLGLPAQLVATLEKRGITHLFPIQRAVLIPALEGRDLIARAKTGTGKTLAFGIPMIKQIIEQDEGRTPGRGRIPRALVLAPTRELAKQVEKEIMESAPKLSTVCVYGGVSYNTQQNALSRGVDVVVGTPGRLIDLINGGSLQLGEVRYLVLDEADQMLAVGFEEDVETILQQLPAERQSMLFSATMPSWVKKLSRRYLNNPLTIDLVGDQDEKLAEGIKLFAIPLTTTSKRTILSDLITVYAKGGKTIVFTRTKRDADEVSLALTTSIASEALHGDISQHQRERTLNGFRQGKFTVLVATDVASRGLDIPNVDLIIHYELPNDPETFVHRSGRTGRAGKAGNAILMFTTNQRRTVKSLERDVGCKFEFIGPPTMEEVLDSSAEHVIATLRGVHPESIQYFVPAAERLSQELGPTALASALAHLSGFSQPPSSRSLISHEQGSVTLQLTRDPEYARGFFSPRSVTGFLSDVSPSAADAVGKIYLIADERVQGAVFDLPEEIAKDLLTMELPPGNTLSKVTKLPVLQDDGPATDSYGRFSNSDRGSRNRRGSSRGGMGGGSRGRGGWDSDEGFRRGGRSSSRPDNDIWSDDDFSGGGARRSNRSSSPSGGRSSYGGRGGSSSFGDRSSSFGERSSSYGGRGGSSFGSRDRSFSGACFTCGQSGHRASDCPNK

SEQ ID NO: 77376 - DNA, 1701 bp, Zea mays; identical to SEQ ID NO: 65630
  CDS (1)..(1701)

SEQ ID NO: 77377 - protein, 566 aa, Zea mays; identical to SEQ ID NO: 65631

SEQ ID NO: 77378 - DNA, 2277 bp, Crassostrea gigas; identical to SEQ ID NO: 65634
  CDS (1)..(2277)

SEQ ID NO: 77379 - protein, 758 aa, Crassostrea gigas; identical to SEQ ID NO: 65635

SEQ ID NO: 77380 - DNA, 1974 bp, Yersinia enterocolitica
  CDS (1)..(1974): transl_table=11
atgactactgagcttgaaacctcttttgctgatctggggctgtccgctccaattctttctgctctgactgatcttggttatgaaaaaccatctcctatccagttggagtgtattccacacctgttgaacggccgtgatgttctcggcatggcgcaaaccggtagtggcaaaacagccgcatttggtctgccgctgttacacaacattgatccaagcctgaaagcaccgcaagtgttagtactggctccaactcgtgagttggctattcaagttgctgaagcattatctagcttctctaaacatatgaacggcgttaacgtggttgctctgtatggtggccagcgttatgacgttcaattacgtgctttgcgtcaggggccacaagttgttgttggtaccccaggtcgtctgttagaccatctgaaacgcggtacccttaacttgtccaacctgagtggtttagtgttggatgaagcagatgaaatgctgcgcatgggctttatcgaagacgtggaaaatattctggcgcagatcccggctgaacatcagaccgcgctgttctctgccactatgccagaagcgattcgtcgtattacccgtcgctttatgaaagagccacaggaagttcgcattcagtctagcatgactacccgtcctgatatcagccagagctattgggttgtagacggtgttcgtaaaaacgatgcattggttcgtttcctggaagctgaagattttgacgctgctattattttcgttcgtaccaaaaatgcgacgctggaagtggctgaagctttggaacgtagcggttataacagcgctgcattaaatggtgacatgaaccaggctgcgcgtgagcagactcttgaacgcctgaaaaatggtcgtttagatattctgattgcaactgatgttgcggctcgtggtttggacgttgagcgcatcagcctggtagtaaactatgatatccctatggattcagagtcttatgtccaccgtatcggtcgtaccggtcgtgctggtcgcgctggtcgtgcattactgttcgttgatagacgtgaacgtcgtctgttgcagaacattgaacgtactatgaagatgactattccaccagtccaattgccaaacgcagaattactgggcgaacgtcgcttagctaaatttgcggctaaagttggccaacagctggaaagcagtgatttggatatgtaccgtgcgttgctggctaaactgcaaccagaagaagggtttgatattgaaactctggctgctgcactgctgaaaatggcacagggcgagcgtcctctgattctgcctccagaagcaccacgtcgtccacagcgtgaatttaatactcgcgatgaccgtggtagcgatcgcggtcgtgaccgtaatgatagccgtcgcgaacctcgttctgacagccgtgacggtggcgaacgtccagcacgtcgcgaacgtcgtgatgttggtgagatggaactgtaccgcattgaagttggccgcgatgatggtgttgaagttcgtcatatcgttggcgctatcgctaacgaaggtgatatcagcagccgttacatcggtaacatcaagctgtttgcttcacattcaactattgaactgccgaaaggcatgccgggcgaaatgttatctcacttcactcgcacccgtatcctgaacaagccgctgaacatgcagttgttgggtgatgcacagccgcatgagcgccgtgagcgtccagctggtggtaatggtggtgagcgtcgtggcggtggtgctggccgttcattcggtggcgaacgtcgtgacggtgccgctggtgctcctcctcgccgttcattcggtagtgaccgtgctccagccggtgctggcgaacagcgtcgtggcaatcgtgatggtcagcgcccagctgcaccacgtcgtgatgatgccgcagcgcctgctgcacctgctcgtcgtcgtttcggtgacgcataa

SEQ ID NO: 77381 - protein, 657 aa, Yersinia enterocolitica
MTTELETSFADLGLSAPILSALTDLGYEKPSPIQLECIPHLLNGRDVLGMAQTGSGKTAAFGLPLLHNIDPSLKAPQVLVLAPTRELAIQVAEALSSFSKHMNGVNVVALYGGQRYDVQLRALRQGPQVVVGTPGRLLDHLKRGTLNLSNLSGLVLDEADEMLRMGFIEDVENILAQIPAEHQTALFSATMPEAIRRITRRFMKEPQEVRIQSSMTTRPDISQSYWVVDGVRKNDALVRFLEAEDFDAAIIFVRTKNATLEVAEALERSGYNSAALNGDMNQAAREQTLERLKNGRLDILIATDVAARGLDVERISLVVNYDIPMDSESYVHRIGRTGRAGRAGRALLFVDRRERRLLQNIERTMKMTIPPVQLPNAELLGERRLAKFAAKVGQQLESSDLDMYRALLAKLQPEEGFDIETLAAALLKMAQGERPLILPPEAPRRPQREFNTRDDRGSDRGRDRNDSRREPRSDSRDGGERPARRERRDVGEMELYRIEVGRDDGVEVRHIVGAIANEGDISSRYIGNIKLFASHSTIELPKGMPGEMLSHFTRTRILNKPLNMQLLGDAQPHERRERPAGGNGGERRGGGAGRSFGGERRDGAAGAPPRRSFGSDRAPAGAGEQRRGNRDGQRPAAPRRDDAAAPAAPARRRFGDA

SEQ ID NO: 77382 - DNA, 1878 bp, Drosophila virilis
  CDS (1)..(1878)
atgtccgactgggatgatgagcctgactgcaccaatcagcctatacacaaaccccacattgatgataagtgggatagcaaaggggaggcatcatccaataagaagacagtgtccgaatggagcgatgaagaagtagctggcgatggcgatggcgatggcattgccaagggctatcgtggcgttggccaaggagctggctatcgcggacgtcgcgatgatggccaaggaggcggcggctatcgtggacgccgggatgacggcgaaggaggaggctatcgtggacgccgggatgacggcgaaggaggaggctatcgcggacgccgggatgatggcgaaggaggaggctatcgtggacgccgtgacaacgacgatggcgaagaacgccgtggcggctttgttcgtaaaagcggtggctttgaacgacgacgacgcgacgacggcgacatgaacaacaatcaggaggatgtgggcgaggatagtgaaaagaaggcaagggagttttatataccacccgagccgaccaatgacgagaccgaaatgtttagcaccggcatctcttcgggcattaactttgccaaatacgataatattcccgtcaaggtgactggcgaaaatgtgccgcaacccattaagaactttgagagtgcgcgattgcgcggcattgtgctggataatgtggttaaatcgggctatgtggtgcccacgcccatacagaaggtatcgataccagtaattgccgaagggcgtgatttgatggcctgcgcccagacgggctccggcaaaacggccgcctttttgctgcccatactcaacaacattctggatgagagtcatgatctagagattggcaagccgcaggcggtgattgtctcgccgacgcgtgagcttgccattcagatctttaacgaggcgcgaaaattttcatataccacatatctgaagatcagcatcgtttatggcggcacctcgttcaaatatcagaacgaatgcattaccaagggttgtcatgtgctgattgccacacccggacgtttgcttgattttgtggatcgcacattcataacattcgatgatacacgtttcattgtgctcgacgaggccgatcgcatgctggacatgggcttctcggatagtatgcgcaagattatgcatcatcagaccatgcgtccggagcatcagacattgatgttctcggctacgttcccggaggaaatccagcgcatggctggtgaatttttgaaaaattatgtctttgttaccattggcgttgtcggcggcgcctgctccgatgtgcagcagaccgtctacgaggtcaacaagtttaacaaacgctccaaattgatggaaatattacgcgagggcgccgatggcaccattgtctttgtggagacaaagcgtggcgctgattttctcgcctcgttcttttcggaaacggaattcccaactacctccatacacggcgatcgcctgcagagtcagcgcgagcaggctttgcgcgactttaagactggcaccatgaaggtgctcattgccacatcggtagcctcgcgtggccttgatattaagaatgtaaagcatgttatcaactatgatatgcccaccaatattgatgattatgtgcatcgcattggacgcacgggtcgtgtgggcaatagtggacgtgctacatcattctttgatccggaacaggatcgcacacttgccgctgatctgatcaagatcttggagggttccggtcaagaggtgccggagtttcttaaggaaattggcggcggcagcagcagctattttggctccaagtttggcggcattgatgttcgcggcggtgctaaaaacgggcacattgaaaacttggaggatgaggaggaatggaattaa

SEQ ID NO: 77383 - protein, 625 aa, Drosophila virilis
MSDWDDEPDCTNQPIHKPHIDDKWDSKGEASSNKKTVSEWSDEEVAGDGDGDGIAKGYRGVGQGAGYRGRRDDGQGGGGYRGRRDDGEGGGYRGRRDDGEGGGYRGRRDDGEGGGYRGRRDNDDGEERRGGFVRKSGGFERRRRDDGDMNNNQEDVGEDSEKKAREFYIPPEPTNDETEMFSTGISSGINFAKYDNIPVKVTGENVPQPIKNFESARLRGIVLDNVVKSGYVVPTPIQKVSIPVIAEGRDLMACAQTGSGKTAAFLLPILNNILDESHDLEIGKPQAVIVSPTRELAIQIFNEARKFSYTTYLKISIVYGGTSFKYQNECITKGCHVLIATPGRLLDFVDRTFITFDDTRFIVLDEADRMLDMGFSDSMRKIMHHQTMRPEHQTLMFSATFPEEIQRMAGEFLKNYVFVTIGVVGGACSDVQQTVYEVNKFNKRSKLMEILREGADGTIVFVETKRGADFLASFFSETEFPTTSIHGDRLQSQREQALRDFKTGTMKVLIATSVASRGLDIKNVKHVINYDMPTNIDDYVHRIGRTGRVGNSGRATSFFDPEQDRTLAADLIKILEGSGQEVPEFLKEIGGGSSSYFGSKFGGIDVRGGAKNGHIENLEDEEEWN

SEQ ID NO: 77384 - DNA, 1941 bp, Salmonella typhimurium; identical to SEQ ID NO: 65270
  CDS (1)..(1941): transl_table=11

SEQ ID NO: 77385 - protein, 646 aa, Salmonella typhimurium
MMSYVDWPPLILRHTYYMAEFETTFADLGLKAPILEALTDLGYEKPSPIQAECIPHLLGGRDVLGMAQTGSGKTAAFSLPLLNNLDPELKAPQILVLAPTRELAVQVAEAMTDFSKHMRGVNVVALYGGQRYDVQLRALRQGPQIVVGTPGRLLDHLKRGTLDLSKLSGLVLDEADEMLRMGFIEDVETIMAQIPEGHQTALFSATMPEAIRRITRRFMKEPQEVRIQSSVTTRPDISQSYWTVWGMRKNEALVRFLEAEDFDAAIIFVRTKNATLEVAEALERSGYNSAALNGDMNQALREQTLERLKDGRLDILIATDVAARGLDVERISLVVNYDIPMDSESYVHRIGRTGRAGRAGRALLFVENRERRLLRNIERTMKLTIPEVELPNAELLGKRRLEKFAAKVQQQLESSDLDQYRALLAKIQPSAEGEELDLETLAAALLKMAQGERPLILPPDAPMRPKREFRDRDDRGPRDRNDRGPRGDREERPRRERRDVGDMQLYRIEVGRDDGVEVRHIVGAIANEGDISSRYIGNIKLFASHSTIELPKGMPGEVLQHFTRTRILNKPMNMQLLGDAVPHAGGERRGGGRSFSGERREGGRNFSGERREGGRGDGRRFSGERRESRGPRRDDSTGRRRFGGDA

SEQ ID NO: 77386 - DNA, 1464 bp, Synechococcus sp
  CDS (1)..(1464): transl_table=11
atgaccacttcttttcaaaccatcggcttatccgacgctcgcgttgacctgttagaaaatatcggcttcgaaaagcccaccgagattcaaagtaaagcgatccccgcaatcctcgaaggccgggacgtggtgggactatcccaaacaggtacaggtaaaaccgccgcctactccctgcctttccttgaaaaaattgacctggaacaaaagaccgtccagggtttgattctgacccccacccgtgaactggcggtgcaggtgacccagtccctcaaggaattcgccgtggatcgtcgtctctgggtgctcaccgtctgcggtggtcaatccatggaacggcaaattcgcagcctgcaaaagggcgtccacattgttgtgggtacgccgggccgggtcatcgatctcctcgaacggggtaagttgtcctttgaagaactccgttgggcagtgcttgacgaagccgatgaaatgctcagtatgggcttcattgatgatgtgaaaaagattttgcgtcagtcccccaaaactcgccaaacggtttgtttctcggcgaccatgccccccgcaatccgggatctggtggaaaatttcctcaatgacccgatcaacatcacgatcaaacagccccaggtcacgcctgaccgcattgcccaagaagtctatatgattccgcgcggttggtcaaaaaccaaagccctcctgcccatcttggaaatggcaaacccagagtcggcgattatcttcgtgcgcacgaaacgtacagcttcggagttgaccaatgagttggttgaagcgggccaaagtgccgatgagtaccatggcgacctcaaccaaaaccaacgggaaaaactggtacgtcgctttaaggatggcaagatcaagatgattgtcgccacggatattgcggcgcggggtctggacgtggaaaacctcagccacgtgattaactttgatttaccagataatacggaaagttacattcaccgcatcggtcggacgggtcgggctggtaaaacgggaacggcgatcgccctcgtcgaacccagcgatcgccggttgttacgtcaaattgaacggcgcgtcaaacagtccctcaaggtttcgactattccgagccgcactgaagtagaagcccaacgagtgacccgcctggaaacccaagtacgggaagccttggccggggaacggatggcctccttcttgccgattgtgaagcgtttgggtgatgagtatgatccccaggcgatcgccgcggcggtattgcaaatgatgtacgacaataattcccccgaatggctcaacgaagattgggaagtaccggaagtcaacaccaagacaggtctccccaagccgacgaaaaaaggtggccgcagcggacgtcgttctaactacaaagggagtggcggtggctacaaaggcgatcgctcccggggacgccgttcctacagttccaaccattcctaa

SEQ ID NO: 77387 - protein, 487 aa, Synechococcus sp
MTTSFQTIGLSDARVDLLENIGFEKPTEIQSKAIPAILEGRDVVGLSQTGTGKTAAYSLPFLEKIDLEQKTVQGLILTPTRELAVQVTQSLKEFAVDRRLWVLTVCGGQSMERQIRSLQKGVHIVVGTPGRVIDLLERGKLSFEELRWAVLDEADEMLSMGFIDDVKKILRQSPKTRQTVCFSATMPPAIRDLVENFLNDPINITIKQPQVTPDRIAQEVYMIPRGWSKTKALLPILEMANPESAIIFVRTKRTASELTNELVEAGQSADEYHGDLNQNQREKLVRRFKDGKIKMIVATDIAARGLDVENLSHVINFDLPDNTESYIHRIGRTGRAGKTGTAIALVEPSDRRLLRQIERRVKQSLKVSTIPSRTEVEAQRVTRLETQVREALAGERMASFLPIVKRLGDEYDPQAIAAAVLQMMYDNNSPEWLNEDWEVPEVNTKTGLPKPTKKGGRSGRRSNYKGSGGGYKGDRSRGRRSYSSNHS

SEQ ID NO: 77388 - DNA, 1869 bp, Pisum sativum
  CDS (1)..(1869)
atgtcgtatgttcctccacacttgagaaacgcgagctcaaccgcggtggctacaaccaccagaccttcagcatcatccggaaccctagaccaccaccaccacaacaccaacctcgcattctcttcctcgtaccctcactccaactcttcttctctagccaatggttctcgtcgtacctctgccgcaacctccgccatctcggaattggtcaccgtccctgacactgtcttccctaactggcaaccttctgaacgcgtttcccgcatgaaccccgaccagattgaagaggtcgtacggcttaatcttgacgttactgtttcatctgactctactgccgcacctggacctatagaatcgtttaatgatatgtgtttgcatccaagtatcatgaaggatattgcttatcatgaatacaccaggccaagctctatccaggcacaggccatgccaattgctctcagtggaagggatcttttgggttgtgcagaaactggtagtgggaagactgcagctttcaccattcctatgttacagcattgcttggtccaacctccaattcgacgtggagatggtcccctggcattagttttggctcctactagagaacttgctcaacaaatagaaaaggaggtccaagcatttagcagatccctcgagtcattaaagaactgcatagttgttggtggaactaacattgaaaagcagaggtctgaactaagagcaggagttgaaatagcagtcgccacccctggaagattcattgaccacttacaacaaggcaacacttctctctctagaatttcttatgttgttctagacgaggcagatagaatgcttgatatggggtttgaaccacaaataagggagatcatgagaagtctacctgagaagcatcaaacactgctgtttagtgcaacgatgcctgtggagatcgaagcattagcaaaggagtacttagctaacccagttcaagttaaggtgggaaaagtgagcagcccaacaactaatgtttcacaaactcttgtaaaggtgtctggaagtgagaagattgaccgactcctagatttgcttgtagaagaggcatcacaagctgaaaagtgtggtcatcgatttccattgactattgtgtttgttgagagaaagacaaggtgcgatgaagtggctgaagcattggttgctcaaggattatctgcagtttctctgcatggtggtcacagtcagaatgaaagagaggctgcattacaaaattttcggagcagctccaccagcattttggttgccactgatgttgcatcacggggcttggatgtcacaggagtgtcacacgtcatcaatcttgaccttccaaagaccacagaagattatatacaccggattggaaggacagggcgtgcaggatcaactggcatagccacttcgttttacactgatcgtgacatgttccttgtgacaaatataaggaaagcaatagctgatgctgaatctgggaatgctgtggcatttgctactggaaaggttgccagaaggaaggagaaagaagcagcagctgcacacaaggaagcaaatattgcttcatctagacaccttggattaggagctgcatcaattaacatcgaagataagtacagattcatgattgctgcctcaaacagtagaggagaaggcgcagagatagtgcatgggatgattgatgaagtttctgatctacctcccatacatttgatctataggtatgttgtttggcagatactggagatggacaagttaagtttgcatgcctacgtactgtttcacacgttgctagctagcaaactggtaaccggtagcttcctagacacaatttgtagaatcagtcatgtttgtaggtaa

SEQ ID NO: 77389 - protein, 622 aa, Pisum sativum
MSYVPPHLRNASSTAVATTTRPSASSGTLDHHHHNTNLAFSSSYPHSNSSSLANGSRRTSAATSAISELVTVPDTVFPNWQPSERVSRMNPDQIEEVVRLNLDVTVSSDSTAAPGPIESFNDMCLHPSIMKDIAYHEYTRPSSIQAQAMPIALSGRDLLGCAETGSGKTAAFTIPMLQHCLVQPPIRRGDGPLALVLAPTRELAQQIEKEVQAFSRSLESLKNCIVVGGTNIEKQRSELRAGVEIAVATPGRFIDHLQQGNTSLSRISYVVLDEADRMLDMGFEPQIREIMRSLPEKHQTLLFSATMPVEIEALAKEYLANPVQVKVGKVSSPTTNVSQTLVKVSGSEKIDRLLDLLVEEASQAEKCGHRFPLTIVFVERKTRCDEVAEALVAQGLSAVSLHGGHSQNEREAALQNFRSSSTSILVATDVASRGLDVTGVSHVINLDLPKTTEDYIHRIGRTGRAGSTGIATSFYTDRDMFLVTNIRKAIADAESGNAVAFATGKVARRKEKEAAAAHKEANIASSRHLGLGAASINIEDKYRFMIAASNSRGEGAEIVHGMIDEVSDLPPIHLIYRYVVWQILEMDKLSLHAYVLFHTLLASKLVTGSFLDTICRISHVCR

SEQ ID NO: 77390 - DNA, 1425 bp, Solanum lycopersicum; identical to SEQ ID NO: 65646
  CDS (1)..(1425)

SEQ ID NO: 77391 - protein, 474 aa, Solanum lycopersicum; identical to SEQ ID NO: 65647

SEQ ID NO: 77392 - DNA, 2397 bp, Drosophila melanogaster; identical to SEQ ID NO: 65648
  CDS (1)..(2397)

SEQ ID NO: 77393 - protein, 798 aa, Drosophila melanogaster; identical to SEQ ID NO: 65649

SEQ ID NO: 77394 - DNA, 1824 bp, Nicotiana sylvestris; identical to SEQ ID NO: 65650
  CDS (1)..(1824)

SEQ ID NO: 77395 - protein, 607 aa, Nicotiana sylvestris; identical to SEQ ID NO: 65651

SEQ ID NO: 77396 - DNA, 1512 bp, Aspergillus clavatus
  CDS (1)..(1512)
atgggcaagcgcgtcagccacaatgaaggcgctgatcggcggccaaagaagaaggcaaagaatgagaagcccgaaaaagaaaccatggaatctcctgcggcagatgtgacagttgattttggctcgaaatcagacgctacatatgtccagtcgcaagttttgagcgatatgcctcaatcagagatagatcaattcctcgcgacacattccatcaaggttaccgacacatcagatgccccggctgttcgcccaatcatctcgttctctcatcttcctagctgtgatagcaagctctattcttcgctgagctccttcgcctcgcctacacctattcagtctgcaacttggccactattatttgctggccgcgatgtcataggcattgcagagactggaagtgggaagactctagcgtttggcttaccttgtctcaaaaagatcttggattcggggaaaatcaagtttaagaatgcccggcctgcagcggtgataatctcaccaaccagagagcttgcgatgcaaatttacgatcaaatctcgaaatacgcaggatctattggcatcaaagcaacttgtatatttgggggtgtaaaaaaagacgagcagcgagaggctttgaagagtgcagctattgtcgttgccacacctggtaggctgaaagatctgcagaacgatggttctgtggacttgggaaaagtcaagtacctagtcttagacgaggcagatcggatgctggataagggattcgagcaggatataaaagatatcattagctccactccagactcaaagcgccagaccgtgatgttcactgcaacttggcctcctagtgtcagagatctagcagccaccttcatgacctcagctgtgaccgtcaccattggcggagacccttcggccgacccgcgtgctaatacaaggatcaaacaaacggtcgaagtcgtccagtcgcatgacaaagaatacaggcttgtgcagttactcagtgaaaatcagagaggggctgcagcgcttgacaaggttttggtattttgtttatacaagaaggaggcaatgcgtgttgagaggctccttcggaacaagaacttcaaagttgcaggtatccatggcgatttgaatcagcacgaaagattcaaaagtttggatgcgtttaaatcaggggctgctaccgtgctagttgcaactgatgtcgcggcacgtggtctcgacataccatctgtcaagttggtcatcaacgtcactttccctttgacggtcgaggattatgtacatcgtattggacgaactggacgtgctggagccgaaggtcgcgccattaccctgttcaccgaaactgataaagctcagtctggcgcattgatcaatgttctgaaagctgcgaaacaagaggtgcctcaagaattgcttaaattcggaacaacggtaaaaaagaagcagcacggtgcttacggcgcgttcttcaaagaagctgactctggaaaatcggcgacaaaaattgtttttgatgattag

SEQ ID NO: 77397 - protein, 503 aa, Aspergillus clavatus
MGKRVSHNEGADRRPKKKAKNEKPEKETMESPAADVTVDFGSKSDATYVQSQVLSDMPQSEIDQFLATHSIKVTDTSDAPAVRPIISFSHLPSCDSKLYSSLSSFASPTPIQSATWPLLFAGRDVIGIAETGSGKTLAFGLPCLKKILDSGKIKFKNARPAAVIISPTRELAMQIYDQISKYAGSIGIKATCIFGGVKKDEQREALKSAAIVVATPGRLKDLQNDGSVDLGKVKYLVLDEADRMLDKGFEQDIKDIISSTPDSKRQTVMFTATWPPSVRDLAATFMTSAVTVTIGGDPSADPRANTRIKQTVEVVQSHDKEYRLVQLLSENQRGAAALDKVLVFCLYKKEAMRVERLLRNKNFKVAGIHGDLNQHERFKSLDAFKSGAATVLVATDVAARGLDIPSVKLVINVTFPLTVEDYVHRIGRTGRAGAEGRAITLFTETDKAQSGALINVLKAAKQEVPQELLKFGTTVKKKQHGAYGAFFKEADSGKSATKIVFDD

SEQ ID NO: 77398 - DNA, 1512 bp, Aspergillus fumigatus
  CDS (1)..(1512)
atggccaagcgtgtccaacacgaaggtggcgattaccggcccaagaaaagatccaagaatgaaagaaatggagagggatcgaggatctctgcgactgcagaagctgttagaaatgaacctgactctaaaccagatgctacttacgttcagtcaccagccctaggtgatctttctcagatcgagatagaccagtttctcgcgaagcattgtattaaagtgaccgattcttcggaagcgccaccgctgcgccccattatgtcgttttctcacctccctagcagcttcagcaagatctatgacccattgagctctttctcgtcgccaacaccaattcaatctgcaacatggcctctactcttcgccggtcgggatgtcataggcatcgcagagaccggaagcgggaagacattggctttcggattgccgtgtattaagaaaattctggattcagggaaggtcaagcgaaaacatgcaagacctgcagcagtcatcatttcgccaaccagggaacttgcaatgcagatatatgatcagctatcgaagtttggggcctctgtggacatcagagtaacatgtatctatgggggtgtgaagaaagatgaacagcgcgaggcactgaagactgcagctatcgttgttgccacccctggtagactgaaagatcttaaagacgatggctccgtggatcttggaaaggtcaaatacctagtcttggacgaagcggatcgcatgctggacaagggttttgaacaggatataaaagacattatccgctccacgccagattcaacacgccaaacagtcatgttcacagcaacctggcctccaagcgtcagagacctggcggcttctttcatgacttcagctgtgactgtcaccatcggtggtgatccgtccgccgatccgcgtgctaataccaggattaaacaggtggtcgaggttgttaagcctcaagaaaaggaggctaggcttgttcagttgctcagtcgctctcagcgaggcgcagcagttggcgataaggttcttgtcttttgcttgtacaaaaaagaagcggttcgtgtcgagagacttttacgaagcaagaacttcaaagtcgcagggatacatggagatttgaaccagcacgaacgatttaaaagtctagaggcatttaaaaccgggtcggctactgtacttgttgccaccgacgtggcagcccgtggccttgacataccgtcagtcaaattggttatcaatgtcacatttcctctaacagtcgaggactatgtacatcgaattggccggaccgggcgcgccggagccgatggccatgccattactcttttcacagaagcggataaagcccagtctggcgcgttgataaacgttctgagagcagccaaacaagatgtaccggacgctctgctcaagtttggaacaaccgtgaagaagaagcagcatggtgcgtacggcgcattcttcaaggacgtggataccagcaagtcagcgacaaagattgttttcgatgaatga

SEQ ID NO: 77399 - protein, 503 aa, Aspergillus fumigatus
MAKRVQHEGGDYRPKKRSKNERNGEGSRISATAEAVRNEPDSKPDATYVQSPALGDLSQIEIDQFLAKHCIKVTDSSEAPPLRPIMSFSHLPSSFSKIYDPLSSFSSPTPIQSATWPLLFAGRDVIGIAETGSGKTLAFGLPCIKKILDSGKVKRKHARPAAVIISPTRELAMQIYDQLSKFGASVDIRVTCIYGGVKKDEQREALKTAAIVVATPGRLKDLKDDGSVDLGKVKYLVLDEADRMLDKGFEQDIKDIIRSTPDSTRQTVMFTATWPPSVRDLAASFMTSAVTVTIGGDPSADPRANTRIKQVVEVVKPQEKEARLVQLLSRSQRGAAVGDKVLVFCLYKKEAVRVERLLRSKNFKVAGIHGDLNQHERFKSLEAFKTGSATVLVATDVAARGLDIPSVKLVINVTFPLTVEDYVHRIGRTGRAGADGHAITLFTEADKAQSGALINVLRAAKQDVPDALLKFGTTVKKKQHGAYGAFFKDVDTSKSATKIVFDE

SEQ ID NO: 77400 - DNA, 1488 bp, Aspergillus niger
  CDS (1)..(1488)
atggccaagcgtgaacttcaagataagggtagcactgagcatagggcgaaaaagaagtcaagaaacgaaaagcacacaaagaaggctgaggactcccaagccagtgcgcagtcctctgagacgcagtacactgacccgaaagaaccttcaccagcagtcatagagaagtttctcgaagaaaactctgtcaagataacggatactttagagggtgcaacgaagcttcatcccattacctctttctctcacctacctacctgcaacagtgcactgtaccgtcctcttgaatctttcacttctccgactgccatccagtcagcaacctggcctttcctgttttctggccgtgatgtaatcggcattgctgaaactgggagtggtaagacgcttggcttcggcttgccgtgcctgaaaaacttacaagactcggcgaagaagggaaagccttataagccgacagcggtgatgatttccccaacgagagaacttgcaatgcagatacatgatcagatctcgaaatttgcagaattagtggatatcaaggtagcttgtatcttcgggggtgtgaagaaagaggagcagcgtgaggctttgaagacagcggctattgtcgtggcgacgccaggaagactgaaggatcttcaaaatgatggctcggtggatctaggaaaagtcaagtatcttgttctggatgaagcagatcgcatgctggacaaaggtttcgaacaggatatcaaggatatcatccgccccatgccggtgtcaaagcgccaaactgtaatgttcactgcgacctggcccccagtggttagggatcttgctgcaacgtttatgacttctcctgtgacggtcacaattggtggagagccctcggctgatccgcgcgcaaatactaggatcaagcaagttgttgaggtggtgaagccgcacgaaaaagaacagaggcttgtgcagctattgaataagtatcagaagggcccatccagctcggataagattctggtgttctgcttgtataagaaggaggctgtgcgtgtcgagagacttctttggaataaaggcttcaaggttgccggaatacacggtgatttaggtcaacaggaacgattcaaaagtttggaatccttcaaaaaaggcgtctcaaccgttcttgtcgcaactgatgtggcagctcgtggtctcgacataccctcagttaagcttgtcatcaacgttacgtttcccctgaccgttgaggattacgtacatcgaattggccggaccggccgtgctggagctgagggccatgccatcactctatttactgaggttgacaaagctcagtctggagctttaataaacgttctaaaagcggctaatcaggatgtacccgaggatcttctcaaattcggggcaacggttaaaaagaagcaacatgacgcatacggcgccttttataaggatgtcgacaccaataagacatcaaccaagatcgtttttgacgattga

SEQ ID NO: 77401 - protein, 495 aa, Aspergillus niger
MAKRELQDKGSTEHRAKKKSRNEKHTKKAEDSQASAQSSETQYTDPKEPSPAVIEKFLEENSVKITDTLEGATKLHPITSFSHLPTCNSALYRPLESFTSPTAIQSATWPFLFSGRDVIGIAETGSGKTLGFGLPCLKNLQDSAKKGKPYKPTAVMISPTRELAMQIHDQISKFAELVDIKVACIFGGVKKEEQREALKTAAIVVATPGRLKDLQNDGSVDLGKVKYLVLDEADRMLDKGFEQDIKDIIRPMPVSKRQTVMFTATWPPVVRDLAATFMTSPVTVTIGGEPSADPRANTRIKQVVEVVKPHEKEQRLVQLLNKYQKGPSSSDKILVFCLYKKEAVRVERLLWNKGFKVAGIHGDLGQQERFKSLESFKKGVSTVLVATDVAARGLDIPSVKLVINVTFPLTVEDYVHRIGRTGRAGAEGHAITLFTEVDKAQSGALINVLKAANQDVPEDLLKFGATVKKKQHDAYGAFYKDVDTNKTSTKIVFDD

SEQ ID NO: 77402 - DNA, 1701 bp, Chaetomium globosum
  CDS (1)..(1701)
atgtcggccggaaagaagcacgcccgcgacggcgaggatcagggcgcccgcctggtcaagaaggcaaagactgcggacacacagaccgacagcgaccccgccgcgctgaagaccgacaagaaaaagaaggacaagaaggataagaaggaaaggaaggagaaaaaagagaagaagtcaaagaaggaagacgccgaggaagattctgaggaactgcagaacggcgacagcgccgcagtcgattctgagcccaagcccgagaaggagaagaaggagaagaacaacaagaaggataaaaaggacaaaaaagacaaaaaggacaaattgaagtcgtctggcgcgccaactacgaacggcattgcccaggatggcgaggccaatgccgccaccacgaccccgaacggttcagcccagcgtaatggcgccgcctactcatatcagcaaaccaaaacccttgatgcgatacccgaagacgagatcaaggagttcctggcgaagcaggaaattgcgattgctgacccattaggcgcgaacctccgccccatcattcatttctcgcacctgccgacgtcgaccctgacatccaagaaaccgttcgcgtcgtttaccgcgcccacaccgattcaggccgcctcatggccctttgcgctttctggccgcgacgtgattggaatcgctgagacagggtcaggcaagacgatggcctttgctgttccttgcatcgagtccctcgcgtccagcccgaagccgaaccacgctaaaggcgaccggacggcctatgcccgcgccgtggttgtatcgccgacgcgcgagttggccatgcaaacccacgctgccatgtcatcgctggcctcgctggtcgggttgtcggtcgtgtgcctctacggtggcgcgcccaaggacgaccagcgcgcattgctgcgcaagaacagcggagccgacatcatcgtcgcgacccccggtcgcctgaaggactttctttccgagggctgcgtgtcactctctgatgttatgttcgccgtccttgatgaagccgaccgcatgctcgacaaaggattcgaggaggacatcaaactcattctcggcagctgccgcccgcgcgagaagcggcagacgctcatgtttaccgcgacttggccgaccagcgtgcgcggcctggccgagggcttcatgatcgacccggtcaaggcgaccatcggcaaccgcacccgtgctggtgaggaaggcgagggtaacggatcgaccgagctgcaggccaacatccgcattgagcagaaggttgaggttgttgaccctcgtggcaaagaacaacggctcctggaattgctcaaagaggcacagaaggggagcgccaagaacgacaggatcttggtcttctgcctgtacaagaaggaagctgttcgtgtggagcagaacctcgagagaaggggcatccgtgtttgcagcattcacggcgatttgcgccaagaccaacggacgcgcagtctcgagtcgttcaaagctggcacgacaagcgttctagtggcgactgatgtggcggcccgcggtctggatattccggaggtcaagctcgttatcaatgtcacgttccccctgaccattgaggattatgttcaccgcatcgggcggacagggcgcgccggcaagaagggcaaagccatcactcttttcactgagcacgacaagtcgcattctggctcgtaa

SEQ ID NO: 77403 - protein, 566 aa, Chaetomium globosum
MSAGKKHARDGEDQGARLVKKAKTADTQTDSDPAALKTDKKKKDKKDKKERKEKKEKKSKKEDAEEDSEELQNGDSAAVDSEPKPEKEKKEKNNKKDKKDKKDKKDKLKSSGAPTTNGIAQDGEANAATTTPNGSAQRNGAAYSYQQTKTLDAIPEDEIKEFLAKQEIAIADPLGANLRPIIHFSHLPTSTLTSKKPFASFTAPTPIQAASWPFALSGRDVIGIAETGSGKTMAFAVPCIESLASSPKPNHAKGDRTAYARAVVVSPTRELAMQTHAAMSSLASLVGLSVVCLYGGAPKDDQRALLRKNSGADIIVATPGRLKDFLSEGCVSLSDVMFAVLDEADRMLDKGFEEDIKLILGSCRPREKRQTLMFTATWPTSVRGLAEGFMIDPVKATIGNRTRAGEEGEGNGSTELQANIRIEQKVEVVDPRGKEQRLLELLKEAQKGSAKNDRILVFCLYKKEAVRVEQNLERRGIRVCSIHGDLRQDQRTRSLESFKAGTTSVLVATDVAARGLDIPEVKLVINVTFPLTIEDYVHRIGRTGRAGKKGKAITLFTEHDKSHSGS

SEQ ID NO: 77404 - DNA, 1497 bp, Emericella nidulans; identical to SEQ ID NO: 65674
  CDS (1)..(1497)

SEQ ID NO: 77405 - protein, 498 aa, Emericella nidulans; identical to SEQ ID NO: 65675

SEQ ID NO: 77406 - DNA, 1746 bp, Gibberella zeae
  CDS (1)..(1746)
atggctgccactaagcattcactcgctgacagcgaggatcgacccaccaagaagaccaaggtcgactccgaagagaaggctcgcctaaaggctgagaagcgagagcgcaaggagaagaagaagagccaagagtctgagcctagtgctgagaactctgatgctgaccgtgctgctgagaaggagcgcaagaaggctaagaaggccaagaagctggagaagaagcagaagctggccgaagctgaggcatctgctgagcctgctgccgaagtctctgatgaggctcccaagaagtccaagaaggagaagaagactaccactaccgaagcctcttctaactccgaggctccctcaagcggctcttacattcaaaccattgcgctctctaacgttccccaagctgagattgacgagtttctctccaagaacgaaatccacattaccgaccccaagaccgagaacgttactcttcgccccgtcctggaattccaccagctccctgctacaaacctcctcgagaagaagccctcaccattcgccaactataaggcgcccacacccattcagtccgcttcatggcctttcaccctctctggccgtgatgtgattggtgttgccgagacaggatccggaaagacaatggctttcgcgcttccctgtgttgaggccatctctgccctcaagcacaagcacaccaaggctgttgttgtttcgcctacacgagaactcgctatgcagacctatgagcagatggcttccgttgcggctctcaacaggatgaagtgtgtctgcctctacggtggtgcttccaaggatgaccagcgaaacctcctcaaccgtggtgctgacatcattgtcgcaacacccggtcgtcttaaagatttcatgtccgatggaactgtcgatcttagccactcggccttcgccgttcttgacgaggccgaccgtatgcttgacaagggtttcgaggaggatattaagatgattctcagctcttgccctcctcgcgagaagcgccagacactcatgttcacagctacatggcctcagtcggtccagacgctcgcagccaccttcatggttagccccgtcaagatcgccattggatccggtggcaaggagactgctggtggagctgttgagctccaggccaacgcaagaatctcacagagcgttgaggttcttgagcccagagggaaggaattccgtctcctcgaggtcctgaaggagcaccagcagggaagcaagaagaacgaccgtattctggttttctgcttgtacaagaaggaggccactcgtattgagaacttcctgagccgcaagggtatccgcgttggtggtatccacggtgatttgcgacaggagcagcgaacaaggagtctcgaggcctttaagtctggacaaactcctgttcttgttgctactgatgtcgctgcccgtggtcttgatattcccgaggtcaagctcgttatcaacgttacattccccttgaccattgaggactacgtccaccgtatcggacgaaccggccgagctggcaagaccggccaggctatcactttctttactgttgaggacaagtctcactccggctctctcgtcaacattctccgaggtgccaaccagcccgtgcccgaggacctcctcaagttcggcaccactgttaagaagaaggctcacgacatgtacggcgctttcttcaaggatgtcgacatgaacgcaaagtccaccaagatcacatttgattag

SEQ ID NO: 77407 - protein, 581 aa, Gibberella zeae
MAATKHSLADSEDRPTKKTKVDSEEKARLKAEKRERKEKKKSQESEPSAENSDADRAAEKERKKAKKAKKLEKKQKLAEAEASAEPAAEVSDEAPKKSKKEKKTTTTEASSNSEAPSSGSYIQTIALSNVPQAEIDEFLSKNEIHITDPKTENVTLRPVLEFHQLPATNLLEKKPSPFANYKAPTPIQSASWPFTLSGRDVIGVAETGSGKTMAFALPCVEAISALKHKHTKAVVVSPTRELAMQTYEQMASVAALNRMKCVCLYGGASKDDQRNLLNRGADIIVATPGRLKDFMSDGTVDLSHSAFAVLDEADRMLDKGFEEDIKMILSSCPPREKRQTLMFTATWPQSVQTLAATFMVSPVKIAIGSGGKETAGGAVELQANARISQSVEVLEPRGKEFRLLEVLKEHQQGSKKNDRILVFCLYKKEATRIENFLSRKGIRVGGIHGDLRQEQRTRSLEAFKSGQTPVLVATDVAARGLDIPEVKLVINVTFPLTIEDYVHRIGRTGRAGKTGQAITFFTVEDKSHSGSLVNILRGANQPVPEDLLKFGTTVKKKAHDMYGAFFKDVDMNAKSTKITFD

SEQ ID NO: 77408 - DNA, 1737 bp, Schizosaccharomyces pombe; identical to SEQ ID NO: 65678
  CDS (1)..(1737)

SEQ ID NO: 77409 - protein, 578 aa, Schizosaccharomyces pombe; identical to SEQ ID NO: 65679

SEQ ID NO: 77410 - DNA, 1566 bp, Drosophila melanogaster
  CDS (1)..(1566)
atgcaacgaaaggaggccaatccctttcagatcctgggcctacgtccatggttggttaagcagctgaccaagttgggcctgaagggagcaactccaatccaacagaaatgcatcccagcgatattggcgggccaggattgcattggagctgccaagacgggctcgggcaagaccttcgcctttgccctgcccattctggagcggctgagcgaagagccagtgagccacttcgccctggtgctgacgcccacgcacgagttggcctatcaaatctccgagcagtttcttgtggctggacaggcgatgggggtgcgcgtatgtgttgtctctggcggcacagaccaaatggtcgagagccagaagcttatgcagcgaccgcacatcgtggtggccatgcccggccgtctcgcggatcacctaaccggctgcgacaccttctccttcgacaatctgaagtatttggttgttgacgaagcggatcgcatgctgaacggagactttgacgagagcctatccatcattgagcgctgtttgccaaagacaaggcaaaaccttttcttttccgcaaccatgaaggacttcataaaggagtccagcatatttcccattgccagcgattgttttgaatggtcgcaggactcagacgtggccactgtagagactctggaccagcgttatctgctgtgcgccgactacgatcgcgacatggtcttaatagaggcactaagaaagtatcgcgaggagaacgaaaacgctaatgtcatgatcttcaccaacacaaaaaagtactgtcagcttctctcgatgacactgaagaacatggaaatcgataatgtttgcttgcatggtttcatgcggcaaaaggagcgcgtagctgctctaagtcgcttcaagtccaaccaaatacgtacactgatcgctacggatgtggccgccagaggtctggatatacccagcgtcgagctggttatgaatcacatgcttccccggacaccaaaggagtacatccatcgcgtaggcagaacagcaagagcggggcgcaagggcatgtccatctccatattccgctttccacgcgatctagagcttttggccgccattgaggaggagatcaacaccaaacttacagagcatcccatcgatcagcgcatggtggagagaatctttatgcaagtaaatgtcacgcgccgtgaatcagagatgcaattagataataacgatttcgacgagcgagcgcaaaactataggcgaaagacgtggattatggaggggaaggaccccgaccaaatggaagctttgtatcgtaaaaaacagaaggataaactaagggaaatacgccgaaagagaaaactgcagcacgcagagccggcagccagcgaagagggcaaagctctcctacaggacgagcgttttaaatctgtagacagtgcgaggtttgagaagaagggaaaaggacgaagtagagccacccaagaagataccccaaccaagccactgaaaaggcttaacaaagaaaaaccagttgcccaaaagggcagagcagatgtcaagaaagataaagcgtga

SEQ ID NO: 77411 - protein, 521 aa, Drosophila melanogaster
MQRKEANPFQILGLRPWLVKQLTKLGLKGATPIQQKCIPAILAGQDCIGAAKTGSGKTFAFALPILERLSEEPVSHFALVLTPTHELAYQISEQFLVAGQAMGVRVCVVSGGTDQMVESQKLMQRPHIVVAMPGRLADHLTGCDTFSFDNLKYLVVDEADRMLNGDFDESLSIIERCLPKTRQNLFFSATMKDFIKESSIFPIASDCFEWSQDSDVATVETLDQRYLLCADYDRDMVLIEALRKYREENENANVMIFTNTKKYCQLLSMTLKNMEIDNVCLHGFMRQKERVAALSRFKSNQIRTLIATDVAARGLDIPSVELVMNHMLPRTPKEYIHRVGRTARAGRKGMSISIFRFPRDLELLAAIEEEINTKLTEHPIDQRMVERIFMQVNVTRRESEMQLDNNDFDERAQNYRRKTWIMEGKDPDQMEALYRKKQKDKLREIRRKRKLQHAEPAASEEGKALLQDERFKSVDSARFEKKGKGRSRATQEDTPTKPLKRLNKEKPVAQKGRADVKKDKA

SEQ ID NO: 77412 - DNA, 1323 bp, Candida albicans
  CDS (1)..(1323): transl_table=12
atgtcttttaacgatttaggggtagccaagtggcttagtgaatctcttgatgctatgaagatatatacaccaacagctattcaatcagcatgtattccagcaattttgaagggccacgattgtattggtggtgctaaaactggtagtggtaaaaccattgcatttgcagccccaatgttaactcaatggtcagaagatccctttgggatatttggtttgattttgacaccaacacgtgaattggcattacaaatagctgaacagtttgcggcattgggagcaaatatgaatattaaagtggctgttgttgtcgggggtgaagatttcgttcaacaaactttagcattgcaaagaaaaccccattttgtcattgccacacccggtagattggctgaccatatcttgaacagtggagaagaaaccattagtggattaagaagagttaaatatttggtgttggatgaggctgatcgattattgagtaatagttttggcagtgatttacaacgatgctttgacgtattacctaccagtgataaacgacaaacattgttatttactgccactataacagatgctgtgagggcattgaaggagaaaccaccgactccaggtaaacctcccgtgtttatgcacgaagttgaaacagttgataaggtggctataccgtcaacattacaaatatcgtatgtgtttgttccttcttacgtcaaagaagcatatttgaatagtatattacatcttgaacagtttaaggattcaacagcagtgatatttgttaatagaacaacaacagccgaagttttacgaagaatgttgaggaaattggatttccgagtcgcctcattgcattcggaaatgccccaatctgaaagaacaaattcattgcatagattcaaagctggcgcggcaagaatattaatagccactgatgttgcctcgagaggtttggatatacccaccgtggagctcgtgattaattttgatatcccagctgatcctgatgatttcattcatagagtcggtagaactgccagagcagggagaaagggtgatgccgtgtctattattggagaaaaagatattgatagaattcaaagtattgaagaaagaatcaataagaaaatggagttgttggaagacgttaatgacgataatgtgattaaagaatcattgagtgccacatcagtggctaaacgtgaatcattgatggaaatggataaagaaaatttcggtgaacgtaagaaaatcaacagaaagaaacatggactcgataaagtgaaaccagaaagagtaacaaagccaaagaaatctaagaaataa

SEQ ID NO: 77413 - protein, 440 aa, Candida albicans
MSFNDLGVAKWLSESLDAMKIYTPTAIQSACIPAILKGHDCIGGAKTGSGKTIAFAAPMLTQWSEDPFGIFGLILTPTRELALQIAEQFAALGANMNIKVAVVVGGEDFVQQTLALQRKPHFVIATPGRLADHILNSGEETISGLRRVKYLVLDEADRLLSNSFGSDLQRCFDVLPTSDKRQTLLFTATITDAVRALKEKPPTPGKPPVFMHEVETVDKVAIPSTLQISYVFVPSYVKEAYLNSILHLEQFKDSTAVIFVNRTTTAEVLRRMLRKLDFRVASLHSEMPQSERTNSLHRFKAGAARILIATDVASRGLDIPTVELVINFDIPADPDDFIHRVGRTARAGRKGDAVSIIGEKDIDRIQSIEERINKKMELLEDVNDDNVIKESLSATSVAKRESLMEMDKENFGERKKINRKKHGLDKVKPERVTKPKKSKK

SEQ ID NO: 77414 - DNA, 1578 bp, Emericella nidulans
  CDS (1)..(1578)
atggcgcccttgtctactccagagtccatatcacgagaaatttcagtatcatccgatgcttccgccgacgaaagtacctcactcgatcagatgcgcgcgcccaagcgccgccgcctctccgagtcctcaacagactcctacaccgcagcacccgcaccactcccgtcgctctcacgaatcaagaaaaagtcctcatcaacgaatgccacctcaagtaggaaagacgacgagaacccggtcctgatcaaggatgcgcttgaaatcgggctcaatgccgaagagaactcattcaaggccctgaatgtggcgccgtggttggttggctctttgaccaccatggcagtgcgcaagccgaccgctatccagcgggcttgtattccggagattttgaaggggagggactgtattggtgggagtcgaacaggttccggaaagacgattgctttctcggtgccgatcctgcagaagtgggcagaagatccttttgggatttttgcggtgattttgacgccgactcgtgaacttgcgctgcaaatcttcgagcagatcaaggcgatctccgcccctcagagcatgaaaccggtccttatcacaggcggcacagatatgcgctcgcaggcaatcgagctcgcaggccgaccccacgtcgtcgttgccacgcccggtcgtctagcagaccacatcaacacctccggtaccgacacagtcgcgggcctcaagcgcgtccgcatggtcgtcctcgatgaagcagaccgccttctttccccggggccaggaagcatgctcccagatgtcgaaacctgtctctccttcctcccgggcccctcacaacgccaaaccctcctctttaccgcaacactcactcctgaagttcgcgctctgaaatcaatgccccaaacgcccgggaaaccgcccatcttcgtcaccgagatctccacagaagctaaagataccgtcccccccacgctgagaacaacatacgtccaagtcccgctcacccaccgtgaggccttcctacatgtccttctctccaccgaatcaaatatcaccaagtccgctattgtcttcacaaacactaccaaatcagcggacctccttgagcgcctcctccgctcattaggccacagggtcacctctctacactccctccttccgcaatccgaacgtaactccaacctcgcgcgcttccgtgccagcgcggctcgagtcctcgtcgctacggacgttgcatctcgaggtctcgatattccctccgtcagcttggttgttaatttcgaggtccctaggaacccggacgactatgtgcatcgtgttggacgaacggcgcgtgctgggcggactggtgaggcggtaacgcttgtggggcagcgcgatgtgcagctcgtgcttgcgattgaggagcgtattggcagaaaaatggtagaatatgaagaggaaggggtcaatctcgaagctagggttgccaagggttcgctgctgaaggaggttggggcggcgaagagggaggctatggttgagattgatgaggggagggatgtgcttgggagaaagaggaataagctgaagaaggttaggtag

SEQ ID NO: 77415 - protein, 525 aa, Emericella nidulans
MAPLSTPESISREISVSSDASADESTSLDQMRAPKRRRLSESSTDSYTAAPAPLPSLSRIKKKSSSTNATSSRKDDENPVLIKDALEIGLNAEENSFKALNVAPWLVGSLTTMAVRKPTAIQRACIPEILKGRDCIGGSRTGSGKTIAFSVPILQKWAEDPFGIFAVILTPTRELALQIFEQIKAISAPQSMKPVLITGGTDMRSQAIELAGRPHVVVATPGRLADHINTSGTDTVAGLKRVRMVVLDEADRLLSPGPGSMLPDVETCLSFLPGPSQRQTLLFTATLTPEVRALKSMPQTPGKPPIFVTEISTEAKDTVPPTLRTTYVQVPLTHREAFLHVLLSTESNITKSAIVFTNTTKSADLLERLLRSLGHRVTSLHSLLPQSERNSNLARFRASAARVLVATDVASRGLDIPSVSLVVNFEVPRNPDDYVHRVGRTARAGRTGEAVTLVGQRDVQLVLAIEERIGRKMVEYEEEGVNLEARVAKGSLLKEVGAAKREAMVEIDEGRDVLGRKRNKLKKVR

SEQ ID NO: 77416 - DNA, 1362 bp, Schizosaccharomyces pombe; identical to SEQ ID NO: 65734
  CDS (1)..(1362)

SEQ ID NO: 77417 - protein, 453 aa, Schizosaccharomyces pombe; identical to SEQ ID NO: 65735

SEQ ID NO: 77418 - DNA, 1440 bp, Bacillus subtilis; identical to SEQ ID NO: 65748
  CDS (1)..(1440): transl_table=11

SEQ ID NO: 77419 - protein, 479 aa, Bacillus subtilis; identical to SEQ ID NO: 65749

SEQ ID NO: 77420 - DNA, 1806 bp, Buchnera aphidicola subsp; identical to SEQ ID NO: 65752
  CDS (1)..(1806): transl_table=11

SEQ ID NO: 77421 - protein, 601 aa, Buchnera aphidicola subsp; identical to SEQ ID NO: 65753

SEQ ID NO: 77422 - DNA, 1809 bp, Buchnera aphidicola subsp
  CDS (1)..(1809): transl_table=11
atgactcacactaatatgacattttctagttttggtttaaattcgtgtattattactgcattaaatgatataggttatgttcaaccatcacctattcaggctgcttgcattccttaccttataaaaggaaaggatgtattaggaatggcacaaacaggaagtggaaaaactgctgcttttgcgttgccgttattacataacataaaattagatgtaagagttcctcagattttagtattaaccccaactagggaactagctgttcaggtagctgaagctttttctaatttttctaaaaagttaataggagttcatgtattagcattatatggagggcaaagatatgatttacaactaaaatctttacgtaagggtccacaaattattgttggtactccaggacgtttattagatcatttaaaacgtagaacattaagtttatctaatcttcatagtttagtgttagatgaagctgatgaaatgttaagaatgggatttattgaagatgtagaaactattatgacagaaattcctgataggcatcaaacggctttattttctgctactatgccggaagcaatacggagaatttctagaagatttatgaaaaatccgaaagaaattcgaatccaatcaaacattactacaagaccagatattcaacaaagttattggatggtgtatggcaaaaaaactgatgcattaattcgttttttagaagctgaagatttttctgctacaataatatttgttcgtactaaaaatgctacattggaagtatctgaagttttagaacgttatggttataacagtgctgcacttaatggagatatgaatcaatctcttagggaacaaacattagaaaaattaaaagatggtagattagatattttaattgctacggatgttgctgcacgaggattggatgtcgatcgaattagttttgttattaattatgatattcctatggattctgaatcgtatgtgcataggattgggagaacaggcagagctgggagaaaaggaaaagcgctgttatttgttgaaaacagagaacgacgtttattgcgtaatattgaacgggctatgaatatttctatttcagaagtgaatttgccgaaatcagattttttaagtaaacgacggctcgaaaaatttgctcaaaaagttcagatacaattagatagtaaagatttacatgaatatcgcggtttattgccaaaattacaacctaataataattctttagatattgaatcattggcagctgcattattaaagatggcgcaaggtgaaagatctcttatcgtaaaaccagagtctatagttagagctagacatttaaaaattaaggatacttatcgaaataataattataaaagtttaaattatgtatcgcgctataatagagataaaaatgtagatttatatcgtattgatgtaggacgaaatgatggagtagaagttcgtcatattgtgggtgcaattgctaatgaaggtgatataagtagtcgaaagattggaaacgttcggttattttctaattattcaacaattgaattaccaaaaggtttatctaatactttgcctaagacatttattcgtactaaaattcttaataaatttattaatataaaattgttgtataattcaaattttaaaggtaattataatgatattaaagatgtaaaggtatataatagtaataaattacgttctaaaaaaatgaataataaaaaatttgtttctagtggggtacgaaaaaaaattaagactaatatttcttgtaatcgtcgtagaagtgtataa

SEQ ID NO: 77423 - protein, 602 aa, Buchnera aphidicola subsp
MTHTNMTFSSFGLNSCIITALNDIGYVQPSPIQAACIPYLIKGKDVLGMAQTGSGKTAAFALPLLHNIKLDVRVPQILVLTPTRELAVQVAEAFSNFSKKLIGVHVLALYGGQRYDLQLKSLRKGPQIIVGTPGRLLDHLKRRTLSLSNLHSLVLDEADEMLRMGFIEDVETIMTEIPDRHQTALFSATMPEAIRRISRRFMKNPKEIRIQSNITTRPDIQQSYWMVYGKKTDALIRFLEAEDFSATIIFVRTKNATLEVSEVLERYGYNSAALNGDMNQSLREQTLEKLKDGRLDILIATDVAARGLDVDRISFVINYDIPMDSESYVHRIGRTGRAGRKGKALLFVENRERRLLRNIERAMNISISEVNLPKSDFLSKRRLEKFAQKVQIQLDSKDLHEYRGLLPKLQPNNNSLDIESLAAALLKMAQGERSLIVKPESIVRARHLKIKDTYRNNNYKSLNYVSRYNRDKNVDLYRIDVGRNDGVEVRHIVGAIANEGDISSRKIGNVRLFSNYSTIELPKGLSNTLPKTFIRTKILNKFINIKLLYNSNFKGNYNDIKDVKVYNSNKLRSKKMNNKKFVSSGVRKKIKTNISCNRRRSV

SEQ ID NO: 77424 - DNA, 1890 bp, Escherichia coli O6
  CDS (1)..(1890): transl_table=11
atggctgaattcgaaaccacttttgcagatctgggcctgaaggctcctatccttgaagcccttaacgatctgggttacgaaaaaccatctccaattcaggcagagtgtattccacatctgctgaatggccgcgacgttctgggtatggcccagacggggagcggaaaaactgcagcattctctttacctctgttgcagaatcttgatcctgagctgaaagcaccacagattctggtgctggcaccgacccgcgaactggcggtacaggttgctgaagcaatgacggatttctctaaacacatgcgcggcgtaaatgtggttgctctgtacggcggccagcgttatgacgtgcaattacgcgccctgcgtcaggggccgcagatcgttgtcggtactccgggccgtctgctggaccacctgaaacgtggcactctggacctctctaaactgagcggtctggttctggatgaagctgacgaaatgctgcgcatgggcttcatcgaagacgttgaaaccattatggcgcagatcccggaaggtcatcagaccgctctgttctctgcaaccatgccggaagcgattcgtcgcattacccgccgctttatgaaagagccgcaggaagtgcgcattcagtccagcgtgactacccgtcctgacatcagccagagctactggactgtctggggtatgcgcaaaaacgaagcactggtacgtttcctggaagcggaagattttgatgcggcgattatcttcgttcgtaccaaaaacgcgactctggaagtggctgaagctcttgagcgtaacggctacaacagcgccgcgctgaacggtgacatgaaccaggcgctgcgtgaacagacactggaacgcctgaaagatggtcgtctggacatcctgattgcgaccgacgttgcagcccgtggcctggacgttgagcgtatcagcctggtagttaactacgatatcccgatggattctgagtcttacgttcaccgtatcggtcgtaccggtcgtgcgggtcgtgctggccgcgcgctgctgttcgttgagaaccgcgagcgtcgtctgctgcgcaacattgaacgtactatgaagctgactattccggaagtagaactgccgaacgcagaactgctaggcaaacgccgtctggaaaaattcgccgctaaagtacagcagcagctggaaagcagcgatctggatcaataccgcgcactgctgagcaaaattcagccgactgctgaaggtgaagagctggatctcgaaactctggctgcggcactgctgaaaatggcacagggtgaacgtactctgatcgtaccgccagatgcgccgatgcgtccgaaacgtgaattccgtgaccgtgatgaccgtggtccgcgcgatcgtaacgaccgtggcccgcgtggtgaccgtgaagatcgtccgcgtcgtgaacgtcgtgatgttggcgatatgcagctgtaccgcattgaagtgggccgcgatgatggtgttgaagttcgtcatatcgttggtgcgattgctaacgaaggcgacatcagcagccgttacattggtaacatcaagctgtttgcttctcactccaccatcgaactgccgaaaggtatgccgggtgaagtgctgcaacactttacgcgcactcgcattctcaacaagccgatgaacatgcagttactgggcgatgcacagccgcatactggcggtgagcgtcgtggcggtggtcgtggtttcggtggcgaacgtcgtgaaggcggtcgtaacttcagcggtgaacgccgtgaaggtggccgtggtgatggtcgtcgttttagcggcgaacgtcgtgaaggccgcgctccgcgtcgtgatgattctaccggtcgtcgtcgtttcggtggtgatgcgtaa

SEQ ID NO: 77425 - protein, 629 aa, Escherichia coli O6
MAEFETTFADLGLKAPILEALNDLGYEKPSPIQAECIPHLLNGRDVLGMAQTGSGKTAAFSLPLLQNLDPELKAPQILVLAPTRELAVQVAEAMTDFSKHMRGVNVVALYGGQRYDVQLRALRQGPQIVVGTPGRLLDHLKRGTLDLSKLSGLVLDEADEMLRMGFIEDVETIMAQIPEGHQTALFSATMPEAIRRITRRFMKEPQEVRIQSSVTTRPDISQSYWTVWGMRKNEALVRFLEAEDFDAAIIFVRTKNATLEVAEALERNGYNSAALNGDMNQALREQTLERLKDGRLDILIATDVAARGLDVERISLVVNYDIPMDSESYVHRIGRTGRAGRAGRALLFVENRERRLLRNIERTMKLTIPEVELPNAELLGKRRLEKFAAKVQQQLESSDLDQYRALLSKIQPTAEGEELDLETLAAALLKMAQGERTLIVPPDAPMRPKREFRDRDDRGPRDRNDRGPRGDREDRPRRERRDVGDMQLYRIEVGRDDGVEVRHIVGAIANEGDISSRYIGNIKLFASHSTIELPKGMPGEVLQHFTRTRILNKPMNMQLLGDAQPHTGGERRGGGRGFGGERREGGRNFSGERREGGRGDGRRFSGERREGRAPRRDDSTGRRRFGGDA

SEQ ID NO: 77426 - DNA, 2025 bp, Aspergillus fumigatus
  CDS (1)..(2025)
atggccgacagcttgaagatgggaaatctgtcccttaacgaatcccagcacgcgcctgctgctcccccttcaaacggccgcgctgcctacatccctccccatctccgtcagcgcaccatgggcgctaacgtcgacggtgccgctgcttccccccccggtccggctcctggtgctggtgcttggaacggcccaagaaacgctcctcgcggtggcaactgggctaatgccaatgcctctgacttcagccctcgtggtcccaacgtccccaatggtaacatcagctggactcccacggaaactcaacgtcggccctttaacccacatgcttacggacacccaggacacggaggctcctacggcggttctcatggttctgccaaaggctctggagacggccagtggcgcgacggcaagcacatccccggtcccgcaaacgcccgcctagagcgtgagcttttcggtgttcccaacgatcccaccaagcagagcactggtatcaacttcgccaactacgacgatatccccgtcgaagcatccggtcacgacgttcccgagcctgtcaatgccttcacgaaccccccgctggatgaccacttgatttctaacatcaagctcgctcgctatcaaacccctactcccgtccagaagtactccattcccattgtgatgaacggtcgcgatctcatggcgtgtgctcagactggttccggaaagactggtggtttcctgtttcccattctctctcaggccttccagacaggcccttcccctgtgcctgctcaggcctccggccagttcggctatggtcgtcaacgcaaggcgtaccctacttccctgatcctcgcccccactcgtgagctcgtttctcagatctttgacgaagcccgcaagttcgcttaccgctcttgggttcgcccctgtgtcgtctacggtggtgccgatattggctctcagctccgtcagatcgagcgtggctgtgatctcctggtcgctacccctggtcgtctggttgacctgatcgagcgtggccgcatctctctggttaacatcaagtacctggtcctcgacgaggctgatcgtatgttggacatgggtttcgagcctcagattcgccgcatcgtagagggtgaagacatgcctaacgtcaatgagcgccaaactctgatgttctcagccactttccctcgtgatattcagatgcttgcccgggacttcctgaaggattacgtgttcctctccgtcggtcgtgttggctccacctctgagaacattactcagaaggtcgagtatgtcgaggatcacgacaagcgttccgtccttcttgatatcctccacacccatggcacgagcggtcttactctcatcttcgtggagaccaagcgtatggcggatgctctttccgacttcctgcttaaccaacgcttccctgcaactgctattcacggtgatcgcacccagcgtgagcgtgaacgtgctttggagatgttccgctccgggcgttgccctattttggttgctactgctgtcgctgctcgtggtcttgatattccaaacgtcacccatgtcattaactatgatctacccaccgacattgatgactacgttcatcgcattggtcgtaccggtcgtgcgggtaacactggtatcgctactgccttcttcaaccgtagcaaccgtggtgttgtccgtgagctgattgaccttctcaaggaggctcatcaagaagttccttccttcctggagagcattgctcgcgaaggcagcggatatggtggacgcggaggccgtggaggccgcggtcgtggtggcaatgccactcgcgatatgcgtcgtatgggtggtaacgttggcggtggtggtccctcgttcggcggcggctacggtgctcccagtggaagcagctatggcggcggggctggcggctacggtgctcccccagcctacggtggtggctacggcggtggttatggcggcggtagctacggaaacccctcgggcccaactggaccctcttcctggtggtaa

SEQ ID NO: 77427 - protein, 674 aa, Aspergillus fumigatus
MADSLKMGNLSLNESQHAPAAPPSNGRAAYIPPHLRQRTMGANVDGAAASPPGPAPGAGAWNGPRNAPRGGNWANANASDFSPRGPNVPNGNISWTPTETQRRPFNPHAYGHPGHGGSYGGSHGSAKGSGDGQWRDGKHIPGPANARLERELFGVPNDPTKQSTGINFANYDDIPVEASGHDVPEPVNAFTNPPLDDHLISNIKLARYQTPTPVQKYSIPIVMNGRDLMACAQTGSGKTGGFLFPILSQAFQTGPSPVPAQASGQFGYGRQRKAYPTSLILAPTRELVSQIFDEARKFAYRSWVRPCVVYGGADIGSQLRQIERGCDLLVATPGRLVDLIERGRISLVNIKYLVLDEADRMLDMGFEPQIRRIVEGEDMPNVNERQTLMFSATFPRDIQMLARDFLKDYVFLSVGRVGSTSENITQKVEYVEDHDKRSVLLDILHTHGTSGLTLIFVETKRMADALSDFLLNQRFPATAIHGDRTQRERERALEMFRSGRCPILVATAVAARGLDIPNVTHVINYDLPTDIDDYVHRIGRTGRAGNTGIATAFFNRSNRGVVRELIDLLKEAHQEVPSFLESIAREGSGYGGRGGRGGRGRGGNATRDMRRMGGNVGGGGPSFGGGYGAPSGSSYGGGAGGYGAPPAYGGGYGGGYGGGSYGNPSGPTGPSSWW

SEQ ID NO: 77428 - DNA, 1893 bp, Debaryomyces hansenii
  CDS (1)..(1893)
atggcagatattactcaacaaatgaacaacctttcagttgaacaaggttcgcaaggaaacggttcgtcccgctcgcagtatgttccacctcatcttcgtaacagaccatcaggcggcaatggatcttttggcggcaaccgtcgtggtgggtttaataacaactcttttggaggatttgataacaaccgccgtggaggatataataataactcgtttggaggatataataacaaccgtcgtggaggattcaacaacgcacgcgggtcaggcagatataatacgcctaagccaggtgttggtagatgggtcgatggtaagcacgaaccagcagagaaaaacgagagactcgaaaaggaattatatgggattgacgaagagccaaccacgcaatcttccggtattaatttcgacaactacgatgacattccagttgaggcatcaggtgaaggagttccagaacctattactgctttcacagcaccaccattggacccattgttggtggaaaacgtcaagttatccagattcacaaagcctactccagtgcaaaagtactcggtgcctattgttgctgccggaagagatttgatggcatgtgcccaaactggttccggtaagactggtggtttcttgttcccagtgttatctgaatcgtacatgaacggaccagctgaggttccagaaactgctggcgccttctcctcgcacaaggtttaccctactgcgttggtgatggctccaaccagagaattggtgtcgcaaattttcgacgaagccaagaagttcgcctacagatcgtgggtgcgcccaagcgtcgtctacggtggtgctgatattggtggccaaatcagaaacttggaaagaggatgtgacttgttagtcgctactccaggtcgtcttaaggacttgttggaaagaggccgtgtatccttggctagcattaaatacttagtgttagatgaagctgatagaatgttggatatgggtttcgaaccacaaatcagacacattgtccaagaatgtgacatgccaggtgttgaagacagacaaaccttgatgttttcagccaccttcccaaaggaaattcaatttttggcccgtgatttcttaaaagaatatatcttcttatctgttggtcgtgttggttctacctccgaaaacattacccaaaagatcttatacgtcgaagacgaagaaaagaagtctgtgttattggacttattatctgcaaacgacaacggtttaacaatcattttcacagaaaccaagagaatggctgataacttggccgacttcttatacgaccaaggtttcccagccactgctatccatggtgacagatcacaatacgaaagagaaaaggctttggctgcgttcaagactggtactgctccaatcttagtcgccactgcagttgccgccagagggttagatattccaaacgtttcccatattgtcaactatgatttaccaagtgatattgatgattacgttcatagaatcggtcgtactggtcgtgccggtaacattggtattgctaccgctttcttcaacagaaataacaagaacattgtcaagggcttagttgatttattgactgaagctaaccaagaaattcctgatttcttaaacaagattgctagagaatcagcctttggtggaaagtccatgcgtggcggtagttctcgtggcggtagaggaggagctaccagagatttcagaaagcaaggtggcagctacggtggtggtgccagctcttctaactggggcggaagcagcagcagcggcggtggctggggttcttcaaacaacggcggttattctggatacagtggccgtagtaacggttcatcaagttacggtaacccatccgccagtaactcctggtggtaa

SEQ ID NO: 77429 - protein, 630 aa, Debaryomyces hansenii
MADITQQMNNLSVEQGSQGNGSSRSQYVPPHLRNRPSGGNGSFGGNRRGGFNNNSFGGFDNNRRGGYNNNSFGGYNNNRRGGFNNARGSGRYNTPKPGVGRWVDGKHEPAEKNERLEKELYGIDEEPTTQSSGINFDNYDDIPVEASGEGVPEPITAFTAPPLDPLLVENVKLSRFTKPTPVQKYSVPIVAAGRDLMACAQTGSGKTGGFLFPVLSESYMNGPAEVPETAGAFSSHKVYPTALVMAPTRELVSQIFDEAKKFAYRSWVRPSVVYGGADIGGQIRNLERGCDLLVATPGRLKDLLERGRVSLASIKYLVLDEADRMLDMGFEPQIRHIVQECDMPGVEDRQTLMFSATFPKEIQFLARDFLKEYIFLSVGRVGSTSENITQKILYVEDEEKKSVLLDLLSANDNGLTIIFTETKRMADNLADFLYDQGFPATAIHGDRSQYEREKALAAFKTGTAPILVATAVAARGLDIPNVSHIVNYDLPSDIDDYVHRIGRTGRAGNIGIATAFFNRNNKNIVKGLVDLLTEANQEIPDFLNKIARESAFGGKSMRGGSSRGGRGGATRDFRKQGGSYGGGASSSNWGGSSSSGGGWGSSNNGGYSGYSGRSNGSSSYGNPSASNSWW

SEQ ID NO: 77430 - DNA, 2028 bp, Gibberella zeae
  CDS (1)..(2028)
atggctgatcagatcaatatgggtggcctctccctcaacgaaggcggtcatcaaggccctccccagggtcgatcctacattcctcctcacatgcgtggccgcggtggtcctccccccgctggtccccaagctggtggtcctcccgttatgaacggtggtcctcctgctgctgctcccggtcctaacggcatcggcaacagtgcctgggctaaccaaaactacggcgcccgccaaaacaactggagcaacgatgttcctacctaccagggcaacaacaaccgccgaggcggctggggcggtcgaggtggtggctacagcggtggcggcaacttcgacggtcactctggtggtggtggcgctcccactgcccgcggatctggtgatggacaatggcgcgatggaaagcacatccccggcccggccaacccccgtgtcgagcgcgagcttttcggtgttactgccgaggacccttccaagcaacacactggtatcaacttcgagaagtacgacgacatccctgttgaggcttccggtacagacgttcccgagcctgttcaccagttcaccacacctcctctggacgaacacttgtgccgcaacattgagctcgctcactacaaggtccctacacccgttcagaagtactcgatccctatcgttagcggcggtcgtgatctgatggcttgtgcccagaccggttccggaaagactggtggtttcttgttccctatcctctctcaggctttcatcaacggaccttctgccgtgcccgctaatgccgccggtcagtttggtcgccagcgcaaggcttaccccacctctttgattcttgcccctacccgtgagcttgtgtctcagatctttgacgagtcccgcaagttcgcctaccgttcttgggtgcgaccttgtgtcgtttacggtggtgccgacattggctctcagctccgacagatcgagcgtggctgtgatctgcttgtcgctactcccggtcgattggtggacctcatagagcgaggtcgcatctccctccagaacatcaagtacctcgtgctcgatgaggccgatcgcatgctggacatgggtttcgagccccagattcgccgcattgtcgaaggcgaagacatgccccaggttcaggaccgccagaccctcatgttctcagccaccttcccccgcgacatccagatgcttgcccgcgatttcctcaaggactatatcttcctttccgtcggtcgtgtcggttccacctctgagaacattactcagaaggttgagtacgtcgaggatgttgacaagcgatccgtccttctggacattctccactcccacgccaacggtctcaccctaatctttgttgagaccaagcgcatggctgattcgctctccgacttcctcatcaaccagaacttccctgctacctccattcacggtgaccgtactcagcgtgagcgtgagcgtgctctcgagttcttccgtaacggtcgatgccccatcctggttgctactgctgttgccgctcgaggtctggatatccctcacgtcactcacgtcatcaactacgatctccctaccgatgtcgacgactacgtccatcgtattggtcgtactggtcgtgccggaaacactggtattgccactgcattcttcaaccgtggcaaccgcggaattgttcgtgagcttatggacttgctcaaggaagctaaccaagaggtccctgctttcctcgagaccatcgcccgtgagtcttccttcggtggaggaggccgtggtggtcgctcccgtggcggcggtggtcgcggtggtgccactcgtgatttccgaaagtttggcggcggcggcttcggtggtaacaacaacggcggcggtggtggcttcaacaacgctggatctcagggtgctggcttcagcgctggtggtggtggtggcgctggctacggcggaggtgctggttacggtggcggagctggctatggcggcggtggttacggcaaccccagcggccctggtgctcagtcgtcttggtggtaa

SEQ ID NO: 77431 - protein, 675 aa, Gibberella zeae
MADQINMGGLSLNEGGHQGPPQGRSYIPPHMRGRGGPPPAGPQAGGPPVMNGGPPAAAPGPNGIGNSAWANQNYGARQNNWSNDVPTYQGNNNRRGGWGGRGGGYSGGGNFDGHSGGGGAPTARGSGDGQWRDGKHIPGPANPRVERELFGVTAEDPSKQHTGINFEKYDDIPVEASGTDVPEPVHQFTTPPLDEHLCRNIELAHYKVPTPVQKYSIPIVSGGRDLMACAQTGSGKTGGFLFPILSQAFINGPSAVPANAAGQFGRQRKAYPTSLILAPTRELVSQIFDESRKFAYRSWVRPCVVYGGADIGSQLRQIERGCDLLVATPGRLVDLIERGRISLQNIKYLVLDEADRMLDMGFEPQIRRIVEGEDMPQVQDRQTLMFSATFPRDIQMLARDFLKDYIFLSVGRVGSTSENITQKVEYVEDVDKRSVLLDILHSHANGLTLIFVETKRMADSLSDFLINQNFPATSIHGDRTQRERERALEFFRNGRCPILVATAVAARGLDIPHVTHVINYDLPTDVDDYVHRIGRTGRAGNTGIATAFFNRGNRGIVRELMDLLKEANQEVPAFLETIARESSFGGGGRGGRSRGGGGRGGATRDFRKFGGGGFGGNNNGGGGGFNNAGSQGAGFSAGGGGGAGYGGGAGYGGGAGYGGGGYGNPSGPGAQSSWW

SEQ ID NO: 77432 - DNA, 1575 bp, Streptococcus pneumoniae
  CDS (1)..(1575): transl_table=11
gtgaaatttaatgaattaaacttgtctgctgatttgctagcagaaattgaaaaagctggttttgtagaagctagtcctatccaagaacaaactattcctttggcccttgaaggcaaggatgttatcggtcaagctcagactggtacaggaaaaactgcagcctttggcttgcctacccttgaaaaaatccgtacagaagaagcgactatccaagccttggtcatcgctccaactcgtgaactagctgtccaaagtcaagaagaactcttccgctttggtcgtagtaagggagtcaaagtccgttcagtatatggcggatcaagcattgaaaaacaaattaaggctcttaaatctggtgcccatattgtggtgggaactccaggtcgcctcttggacttgattaaacgcaaggccttgaaattacaagacattgaaacccttatccttgacgaagcggatgaaatgcttaacatgggcttccttgaagacatcgaagccattatttcccgtgtacctgagaaccgtcaaactttgcttttctcagcaactatgccagatgccatcaaacgtatcggtgttcagtttatgaaagcccctgaacatgtcaagattgcggctaaggaattgacaacagaattggttgaccagtactatatccgtgttaaggaacaagaaaaatttgacaccatgactcgtctcatggatgtggcacaaccagaactcgctattgtatttggtcgtaccaaacgccgtgtggatgaattgactcgtggtttgaaaattcgtggcttccgtgcagaaggaattcatggcgacctagaccaaaacaaacgtcttcgtgtccttcgtgactttaaaaatggcaatcttgatgttttggttgcgacagacgttgcagcgcgtggtttggatatttcaggtgtgacccatgtctacaactacgatattccacaagatcctgagagttatgttcaccgtatcggtcgtacaggtcgtgctggtaagtcaggtcaatctattacttttgttgctccaaacgaaatgggttaccttcaaatcattgaaaacttgactaagaaacgcatgaaaggtctcaaacctgcaagtgtagaagaatccttccaatcaaaaaaacaggtagctctcaagaaaatcgaacgtgattttgcagatgaaaccattcgtgccaactttgagaaatttggtaaggatgctcgcaaattggctgctgagtttactccagaagaattggcaatgtatatcttgagtctgacagtccaagacccagatagccttccagaagtggagattgcacgtgaaaaaccactaccgtttaaaccatcaggtaatggtttcggtggtaaagctaagggaggtcgtggaggccgtcgtggggacgaccgtcgagagcgtgatcgccgtggcaatggtcgccgtgatgagttcaaaaaaggaagtcgtggcaacgatcgttttgataaggaaaaacgttaccgtaaggataataaaaaaccacgcaatactttaagcgaaaagcaaacaggctttgttattcgtaacaaaggcgataaataa

SEQ ID NO: 77433 - protein, 524 aa, Streptococcus pneumoniae
MKFNELNLSADLLAEIEKAGFVEASPIQEQTIPLALEGKDVIGQAQTGTGKTAAFGLPTLEKIRTEEATIQALVIAPTRELAVQSQEELFRFGRSKGVKVRSVYGGSSIEKQIKALKSGAHIVVGTPGRLLDLIKRKALKLQDIETLILDEADEMLNMGFLEDIEAIISRVPENRQTLLFSATMPDAIKRIGVQFMKAPEHVKIAAKELTTELVDQYYIRVKEQEKFDTMTRLMDVAQPELAIVFGRTKRRVDELTRGLKIRGFRAEGIHGDLDQNKRLRVLRDFKNGNLDVLVATDVAARGLDISGVTHVYNYDIPQDPESYVHRIGRTGRAGKSGQSITFVAPNEMGYLQIIENLTKKRMKGLKPASVEESFQSKKQVALKKIERDFADETIRANFEKFGKDARKLAAEFTPEELAMYILSLTVQDPDSLPEVEIAREKPLPFKPSGNGFGGKAKGGRGGRRGDDRRERDRRGNGRRDEFKKGSRGNDRFDKEKRYRKDNKKPRNTLSEKQTGFVIRNKGDK

SEQ ID NO: 77434 - DNA, 1515 bp, Ashbya gossypii
  CDS (1)..(1515)
atgggcgctcaagagaccagggaggatgctagcggctcttccaagaagcggcaaaggcctgagtcggaagttgctgctgagagcgacgctgcggcaagctctactgcgcacgctgagaagttcgatgagctgaacctctctagccagacgctgaaggccatcgggaagatggggttcacaaagatgacgcaagttcaggcgagaacaattccgcctctaatggcaggtagggacgtattgggagcggccaagacagggtccggtaagacgttggctttcttgcttcctgcgattgaaatgctgcactcgttgaagttcaaaccaagaaacgggacaggtgtgattgtcatcacgccgacgagagaactggcgctccagattttcggtgttgcccgcgagctgatggaattccactctcagacattcggcatcgtgataggcggcgccaaccgcaggcaggaggctgagaagctcgccaagggagtcaatctattgattgccacgcccggtaggttgctggaccacttgcagaacaccaaagggtttgtgttcaaaaacctaaaagcacttgtcatagacgaggctgaccggattcttgagattgggttcgaagatgaaatgaaacagataatcaagatcctgccaaacgaggacagacagtcgatgttattctccgccacccagaccaccaaggtggaggatcttgcgcggatctctttgaggcccggtccactgttcatcaacgtggactctgagaaagaaacgtcaaccgccgacggtctggaacagggctacgtcgtctgcgatagtgacaagcgcttcctgttgctcttcacgtttttgaagaagttccagaataaaaagatcattgtcttcctgtcatcgtgcaactccgtcaagtactacgcggaactgctcaactacatcgacctacccgttctagagctccacggtaagcaaaagcagcagaagagaacgaacacgttcttcgagttctgcaacgccgagcgcggtatcttggtgtgcaccgacgtggccgcaagaggcctggacatccctgccgtcgactggatcattcagttcgatcccccagacgaccctagggattatatccatagagtaggcagaacggcaaaaggcaccaagggcaagggaaagtcgctgatgttcctgacgccacacgaacttggcttcctgcgctacctcaaagcagccaaagtgcctttgaacgagtacgagttcccggcaaacaaaattgccaacgtccagtcgcagctcgaaaaactcttgaagaccaactatgagctcaacaaaatcgccaaagacggctacaggtcctacctgcaggcctatgcatcccactcgctcaagaccgtctaccagatagacaagctcgacctggtcaaggttgccaagtcctacggcttccccgtcccgccaaaggtcaacatcaccatcggcgccagcggcaaggctcccgcggcccacaaaaagagaaagctggccagagactga

SEQ ID NO: 77435 - protein, 504 aa, Ashbya gossypii
MGAQETREDASGSSKKRQRPESEVAAESDAAASSTAHAEKFDELNLSSQTLKAIGKMGFTKMTQVQARTIPPLMAGRDVLGAAKTGSGKTLAFLLPAIEMLHSLKFKPRNGTGVIVITPTRELALQIFGVARELMEFHSQTFGIVIGGANRRQEAEKLAKGVNLLIATPGRLLDHLQNTKGFVFKNLKALVIDEADRILEIGFEDEMKQIIKILPNEDRQSMLFSATQTTKVEDLARISLRPGPLFINVDSEKETSTADGLEQGYVVCDSDKRFLLLFTFLKKFQNKKIIVFLSSCNSVKYYAELLNYIDLPVLELHGKQKQQKRTNTFFEFCNAERGILVCTDVAARGLDIPAVDWIIQFDPPDDPRDYIHRVGRTAKGTKGKGKSLMFLTPHELGFLRYLKAAKVPLNEYEFPANKIANVQSQLEKLLKTNYELNKIAKDGYRSYLQAYASHSLKTVYQIDKLDLVKVAKSYGFPVPPKVNITIGASGKAPAAHKKRKLARD

SEQ ID NO: 77436 - DNA, 1494 bp, Kluyveromyces lactis; identical to SEQ ID NO: 65818
  CDS (1)..(1494)

SEQ ID NO: 77437 - protein, 497 aa, Kluyveromyces lactis; identical to SEQ ID NO: 65819

SEQ ID NO: 77438 - DNA, 1518 bp, Saccharomyces cerevisiae; identical to SEQ ID NO: 65824
  CDS (1)..(1518)

SEQ ID NO: 77439 - protein, 505 aa, Saccharomyces cerevisiae; identical to SEQ ID NO: 65825

SEQ ID NO: 77440 - DNA, 1245 bp, Arabidopsis thaliana; identical to SEQ ID NO: 65832
  CDS (1)..(1245)

SEQ ID NO: 77441 - protein, 414 aa, Arabidopsis thaliana; identical to SEQ ID NO: 65833

SEQ ID NO: 77442 - DNA, 1242 bp, Nicotiana tabacum; identical to SEQ ID NO: 65836
  CDS (1)..(1242)

SEQ ID NO: 77443 - protein, 413 aa, Nicotiana tabacum; identical to SEQ ID NO: 65837

SEQ ID NO: 77444 - DNA, 2412 bp, Aspergillus oryzae; identical to SEQ ID NO: 65888
  CDS (1)..(2412)

SEQ ID NO: 77445 - protein, 803 aa, Aspergillus oryzae; identical to SEQ ID NO: 65889

SEQ ID NO: 77446 - DNA, 2454 bp, Coccidioides immitis
  CDS (1)..(2454)
atgttaactgagggcacctctgcgattcctcctccacagccccctctggagcctattgaacgtccgccaacccctcctccattgcctcctgacgaatccgcccttcctccgccaccaacggacccggctcctcctccacctccgccagattcccttgcaccgcccccgccgccggaagatgttcctaggtctacatatactgtaccggtggtggtaaagaagaagaaagtaggatggggaagctcaaagtcaactacacctttaagtgtcgaggagctattaaggaagaagaaggaagcggatgaagcagcttcaaggcctaaatttcttacaaaatcccaacgtgagaaacttgcactggagaaaagagcgaaagaaatcgagcatgagagacgaataagagctgcaagtacgaacggcagtatgatgtcagattctaatggcgggggtggcaattcgaatggccgtgcttcgccgaccacccgatatgataatgtaaatggaagctcgaggacctcaattcccactgcgccgcgtgcgctacgaggagaaatacccacggccccggctgccatgcgtagctctcaggcgaagaataatgacccgcggccaggaaataaagtaccgtccgattcggctgccacaggcgagaaacgaacggcacctgaagatgctcaggccctgctcaccagacagcgatatatgggcgccgaccaaacatctagcttctctgccaagaagaaaagaagacgtacaaccgaacgaaagttcaactttgaatggaatgcggatgaggacactagccctgattataacccgctgtaccagaatcggtctgagatgaacttctttggccgaggtcgattagctgggttctctgacgatgtagtcgatagcgcggcgaagagatatgcgaaagctcttgaggatagagacctggaggcaggtagcgcaagagcacgggaaattcttgaaatggaaagacgcaggagagaagaaggtggccgaaacgggttggatttgcattggagccagaaacggctggatcagatgcgtgaaagagattggagaattttcaaagaagacttcaatattagcacaaaaggaggcagcattccgaatcctatgcgatcgtggggcgaatccggtttaccgaaacgtttgcttgagatcattgataaggttgggtacaaagatccgtcacccatccagagagcagctatacctattgcattgcaaaatcgagaccttatcggagttgcggttactggttccggtaaaacggccgcttttctgcttccgcttctcgtctacatcgccgagttaccgcgtctcgacgagttcgagtggaggaaaagcgatggaccttacgctatcatattggcccctacgcgtgaactggcgcaacaaattgagaatgaagccaggaaattttgtaatccactaggattcaacgttgtcagtatcgttggtgggcactccctagaagagcagtccttcagtctcaggaacggggctgaaatcatcatcgctacccctggtcgtctggtggattgtatcgaacggcgtatccttgttctcagccagtgttgctacgtgatcatggacgaggctgatcgtatgattgatcttggttttgaggagcctgtcaacaaaatccttgatgctcttccggtttcaaacgagaagccggatacagaagaagcagaagacgcgcgcgctatgagccagcatcttggaggcaaagatcgctacaggcagacaatgatgtatactgcaaccatgccttccgccgtggaacgtatagcgagaaagtatcttcggaggccggcaattgtcaccattggtaatattggcgaagccgttgataccgtcgagcaacgagttgaattcatctctggtgaggataaacggaagaaaagactggcagatatccttgcgtcaggcgaattcagacctccaattattgtcttcgttaatattaaaagaaattgcgatgctgttgctcgtgatattaaacagatgggatattcttcagttactctgcatggtagcaagacccaggaacaaagagaagcagcgttggcgtccgttcgtaatgggaatacggacgtgcttgtcgctacagacctcgcaggacgtggtattgatgtgccagacgttagtttggtggttaacttcaacatggcgacaaatattgagagttacacacatcgtatcggacgaactgggcgtgctggaaagagtggtgtggcgatcacgttccttggaaacgaggatgcggatgtcatgtatgatcttaaacagatgcttatgaagtcctcgatatcgcgagttccggaggagctccgcaagcatgaggcggctcagtccaagcctaccaaggctggcggtggacagaagaggcttgacgagggcggcatgtctgcgcccaagactggttctgggtggtag

SEQ ID NO: 77447 - protein, 817 aa, Coccidioides immitis
MLTEGTSAIPPPQPPLEPIERPPTPPPLPPDESALPPPPTDPAPPPPPPDSLAPPPPPEDVPRSTYTVPVVVKKKKVGWGSSKSTTPLSVEELLRKKKEADEAASRPKFLTKSQREKLALEKRAKEIEHERRIRAASTNGSMMSDSNGGGGNSNGRASPTTRYDNVNGSSRTSIPTAPRALRGEIPTAPAAMRSSQAKNNDPRPGNKVPSDSAATGEKRTAPEDAQALLTRQRYMGADQTSSFSAKKKRRRTTERKFNFEWNADEDTSPDYNPLYQNRSEMNFFGRGRLAGFSDDVVDSAAKRYAKALEDRDLEAGSARAREILEMERRRREEGGRNGLDLHWSQKRLDQMRERDWRIFKEDFNISTKGGSIPNPMRSWGESGLPKRLLEIIDKVGYKDPSPIQRAAIPIALQNRDLIGVAVTGSGKTAAFLLPLLVYIAELPRLDEFEWRKSDGPYAIILAPTRELAQQIENEARKFCNPLGFNVVSIVGGHSLEEQSFSLRNGAEIIIATPGRLVDCIERRILVLSQCCYVIMDEADRMIDLGFEEPVNKILDALPVSNEKPDTEEAEDARAMSQHLGGKDRYRQTMMYTATMPSAVERIARKYLRRPAIVTIGNIGEAVDTVEQRVEFISGEDKRKKRLADILASGEFRPPIIVFVNIKRNCDAVARDIKQMGYSSVTLHGSKTQEQREAALASVRNGNTDVLVATDLAGRGIDVPDVSLVVNFNMATNIESYTHRIGRTGRAGKSGVAITFLGNEDADVMYDLKQMLMKSSISRVPEELRKHEAAQSKPTKAGGGQKRLDEGGMSAPKTGSGW

SEQ ID NO: 77448 - DNA, 1728 bp, Yarrowia lipolytica; identical to SEQ ID NO: 65896
  CDS (1)..(1728)

SEQ ID NO: 77449 - protein, 575 aa, Yarrowia lipolytica; identical to SEQ ID NO: 65897

SEQ ID NO: 77450 - DNA, 2925 bp, Yarrowia lipolytica
  CDS (1)..(2925)
atgccacgtgaccgtgagtatgaccaatggggctattctggcacccgcagagatggaggtggacggtacggataccgagatcgctcgagagacgagcgagatcggttccgggatgttagagacagagacagagacagagacagagacagagaaagagacagagggggttacagacaggacccgcgcgaccgacgttattcgagatcacgtgagcgggaacgtcgcggctctggttcacgggatcggtcacgggatcggtcacgggatcggtcacgggacgcacatcgacctcccccctcgggccgtccacaccagccttctgggcatgattctactaagtcatctaattccatgagtgaaacttcgagtactagccaggtgaccggcaccacgcccaatacgacaaatgcaaccccgtcgcaagcagaaatcgacgccaaaaaagctgccaagcttgccaaagtcgctgaatggaagcgcaaaaaggagctggagagaagtaagagcgccagcgcgagccctgctccttccaccgcccccgcttctccgaaagccggcttctccatgtccggattgagtggtttgcgtaaagctacagatcagggccaggtgaagagaaagatgttctttgggggagactcagatgaagaggacgccggtaggaagccggcaaaattgttgaaaaagttgggtgagaaggagggcagtggtaagagtgagggtaagggaagaggtggaagccaaagtgaggccaagaatgcctctgaaaagaacggtgctgcttctgagcctgccgaagtcgaccccctcgacgcctacatgtcttccctgacccttccaaccaccacatctgtctccatagccgactccactcctttggaaaatctcaatgtctgggagcaggtggatacgctggaaaagtcacaggatccgactctcgatctttctgcgctttcgaaacgaaaggagattgcgattgtggaccactccaaacaggtctatgaagacttccgacgccaattctacgtcgaatcgagcgaacttgccgacatgactgaagccgaaacgaatgagctgcgtctttcactcgacggaatcaaaatccgaggcaaagattgtcccaagccaatctccaaatggacacaactgggtcttccgggacctactatgggagttctgaacgacttgcgatacgataaacccacaagtatccaagcccaggcaattccagctgtcatgagcggccgagatgtgatttctgtagccaaaacaggttcaggaaagaccttagcgtttctattaccaatgctacgtcacatcaaacaccgtgttggggtcgaaacacataccaccactctttcgggggcctcctctcaccccttgggtgtcatcattacacccacaagagaactgtgtgtacaaatctaccgagacttgaggccgtttctggctgctctcgaactcacagctgtatgcgcttatggcggcagtcccatcaaagaccagattgctgctctcaaaaagggcacccatatcattgtctgtactcctggacgaatgatcgacttgttggctgccaaccaaggtagagtgctctcattatccagagtgaccttcctggtcattgacgaagccgatcgaatgttcgatatgggctttgagcctcaggttctcaagttgacccaatctatccgacctgaccggcaaactgtacttttttcagccacttttccgaagaaaatggaacagctggcgcgaagagtgctcagcaagcggtcgtctgactccctgggtcctattgaaatcattgtcggagcgcgctccgtggttgcttctgaaatcacgcagtttgtggaagtattccagaacgaaaagagcaagttcccgcgccttttagaggttctgggcaagtattttgctcagggattctttgacgagcaaagtgagggtcgtgtgggtaccggagagtcggcagctacccccattcccaaccccaagtgtctcatctttgtggagcgtcaggagagtgctgattctttgctcaaggagctcatccaatctggttacccgtgtctttctattcatggaggcaaggagcaggctgatcgagaccaggcgatcagcgatttcaaaagcgggcttgtttccgtgctcattgccacctctgtggctgctcgaggtctcgacgtcaaggggctcggtctagttgtcaactgggactcccccaaccacatggaagactacgtgcatcgggttgggcgaaccggacgggctggtcagaagggtacagcgttgacgttccttctgagtgaccaggagcgtctggcagctgaaatctcacgtgccatcaagtcgtctggaaacgcgccccctgcgcctgtgcagctcatgaccgagagattcgagttcaaggtgcggtctggaactgagaagagacacatgtacggcttctctggtaaaggtctggagcgtctacaggatgagagagatgcgaccagagaacatgagcgacgagcatatgagggagacgaggctggagaggctgagacggaaagcagtactccagctgccagtactgcaaacactgatatcattcccaagcctgtgattgtggttactcctccagacagcaaatcccccacaactgcttaccacacgacgctgcagatcaacgacttccctcagcaggctcgatacagagccagtagtaacacttctgtcagtcgtgttattgccaacactggttgcagtatcactgctaagggcgagtactatcctcctggtcgtattcccggacccaaggatgaacccaagctgtttattctcattgagggtaccagtgagcgggcggtgaaactggctcatcatgagttgtcggagcttctggtgagtggtttggttaagggcgctaggtatcaggtgtag

SEQ ID NO: 77451 - protein, 974 aa, Yarrowia lipolytica
MPRDREYDQWGYSGTRRDGGGRYGYRDRSRDERDRFRDVRDRDRDRDRDRERDRGGYRQDPRDRRYSRSRERERRGSGSRDRSRDRSRDRSRDAHRPPPSGRPHQPSGHDSTKSSNSMSETSSTSQVTGTTPNTTNATPSQAEIDAKKAAKLAKVAEWKRKKELERSKSASASPAPSTAPASPKAGFSMSGLSGLRKATDQGQVKRKMFFGGDSDEEDAGRKPAKLLKKLGEKEGSGKSEGKGRGGSQSEAKNASEKNGAASEPAEVDPLDAYMSSLTLPTTTSVSIADSTPLENLNVWEQVDTLEKSQDPTLDLSALSKRKEIAIVDHSKQVYEDFRRQFYVESSELADMTEAETNELRLSLDGIKIRGKDCPKPISKWTQLGLPGPTMGVLNDLRYDKPTSIQAQAIPAVMSGRDVISVAKTGSGKTLAFLLPMLRHIKHRVGVETHTTTLSGASSHPLGVIITPTRELCVQIYRDLRPFLAALELTAVCAYGGSPIKDQIAALKKGTHIIVCTPGRMIDLLAANQGRVLSLSRVTFLVIDEADRMFDMGFEPQVLKLTQSIRPDRQTVLFSATFPKKMEQLARRVLSKRSSDSLGPIEIIVGARSVVASEITQFVEVFQNEKSKFPRLLEVLGKYFAQGFFDEQSEGRVGTGESAATPIPNPKCLIFVERQESADSLLKELIQSGYPCLSIHGGKEQADRDQAISDFKSGLVSVLIATSVAARGLDVKGLGLVVNWDSPNHMEDYVHRVGRTGRAGQKGTALTFLLSDQERLAAEISRAIKSSGNAPPAPVQLMTERFEFKVRSGTEKRHMYGFSGKGLERLQDERDATREHERRAYEGDEAGEAETESSTPAASTANTDIIPKPVIVVTPPDSKSPTTAYHTTLQINDFPQQARYRASSNTSVSRVIANTGCSITAKGEYYPPGRIPGPKDEPKLFILIEGTSERAVKLAHHELSELLVSGLVKGARYQV

SEQ ID NO: 77452 - DNA, 1371 bp, Arabidopsis thaliana
  CDS (1)..(1371)
atggaggaagagaacgaagtagtgaagacgtttgcagagcttggtgtgcgtgaggagcttgttaaagcttgcgagagattgggatggaagaacccttccaaaattcaagccgaagcccttccttttgctcttgaagggaaagatgtaattggacttgcgcaaaccggttctggtaaaaccggagcttttgcaattcctatattgcaagcactacttgagtatgtttatgattctgagcctaagaaaggacgtagaccggatcctgctttcttcgcttgtgttttatctccaactcgagaacttgcaatccagattgctgaacagtttgaagctcttggtgctgatataagtcttaggtgtgctgtgcttgttggaggtatagacaggatgcaacaaactattgctcttgggaaacggcctcatgttattgttgcaacacctggtcgtctttgggatcatatgtctgatacaaaaggcttttctctgaaatcattgaaatatctggttcttgatgaagcagatagactgttgaatgaagattttgagaaatctcttaaccagattttggaagagatccctcttgagcggaaaacatttcttttttcagcgactatgactaaaaaggttcgaaaacttcaaagggcatgtttgaggaatcctgtgaagattgaagctgcctccaaatattccactgtcgatactcttaagcagcagtatcggtttgttgccgctaaatacaaggattgctatctggtatacattctgagtgaaatgcctgaatcaacatctatgattttcacccgaacatgtgatggtactcgctttctggctttggtgcttcggagccttggttttagagctattcctatcagtggtcaaatgactcagtcaaagagactgggagctttaaataagttcaaagcaggggaatgtaatatcttggtttgtaccgatgtggctagtagagggctcgatatcccatcagttgatgtggttatcaattatgatattcccacaaattcaaaggattacatccatagagtaggaagaaccgctcgtgctggacgttctggtgttgggatatcacttgtaaaccagtatgagctcgaatggtatatacaaatagaaaaactcattggcaagaaactacctgaatatcccgctgaggaagatgaagtcttgtcattgttggagagagttgcagaagcgaaaaagctatctgcaatgaatatgaaagaatcaggaggtaggaagagaaggggagaagatgatgaagaaagtgagaggttcttgggaggtaacaaggacagaggcaacaaggaaagaggtggtaacaaagacaagaagtcttctaagaagttcaaacgataa

SEQ ID NO: 77453 - protein, 456 aa, Arabidopsis thaliana
MEEENEVVKTFAELGVREELVKACERLGWKNPSKIQAEALPFALEGKDVIGLAQTGSGKTGAFAIPILQALLEYVYDSEPKKGRRPDPAFFACVLSPTRELAIQIAEQFEALGADISLRCAVLVGGIDRMQQTIALGKRPHVIVATPGRLWDHMSDTKGFSLKSLKYLVLDEADRLLNEDFEKSLNQILEEIPLERKTFLFSATMTKKVRKLQRACLRNPVKIEAASKYSTVDTLKQQYRFVAAKYKDCYLVYILSEMPESTSMIFTRTCDGTRFLALVLRSLGFRAIPISGQMTQSKRLGALNKFKAGECNILVCTDVASRGLDIPSVDVVINYDIPTNSKDYIHRVGRTARAGRSGVGISLVNQYELEWYIQIEKLIGKKLPEYPAEEDEVLSLLERVAEAKKLSAMNMKESGGRKRRGEDDEESERFLGGNKDRGNKERGGNKDKKSSKKFKR

SEQ ID NO: 77454 - DNA, 1782 bp, Arabidopsis thaliana
  CDS (1)..(1782)
atggattcatcggcgaacataaacaaagctctaacggagacgcgtttctccgacctcgaacctccactctccggagatatcattgaggctcttaatcagtctgatttcgagttctgcactccggttcaagccgcgacgatccctttactctgtagttacaaggatgttgccgtcgacgctgccactggttctggaaaaaccctagctttcgtcgttcccctcgtagaaatcctccgtcgatccacctcattccctccgaagcctcaccaggtcatgggggtgattatatcgccaacgagagagctatcaacgcagatatataatgtcgcacaaccatttgtttcgactttggcaaatgtgaactctgtgttgcttgttggaggccgagaggtgaaagctgacatgaagattattgaagaagaaggatgcaatgtcttgattggtacacctggaagactttctgatattatggaacgaatggagattctggattttcgaaatcttgagattcttattctagatgaggcagataggcttttggagatggggttccaaaggcaggtgaattacattatctcacgcttgccaaagcagaggaggactggcctcttttcagctacacaaacagagggcgttgaagagctcgccaaggctgggcttaggaaccctgtgagagttgaagttcgagctaagtcgaagtcggaatcatcccagcaattgacaaactcgaaaaccccttctggtcttcatcttgagtatatggaatgcgaagcagataaaaaatcatcacaactagttgatctcctcatcaagaacagtgataaaaagcttatagtattcttcatgacctgtgcttctgttgactactggggactcgtactttcaaaaattcctgccctgaagtccatatctttaattcctatccatggggatatgaagcagaatgcaagagacaaggcattagcttcgtttactaaagcatcaagtggtgcccttctgtgcacagacgttgctgcacgtggacttgatattccaggcattgattatgttgttcagtatgatcccccacaagacccaaatatgttcaaccacagggccggcagaactgcaagattaggaagacaagggagggccattgtgtttttactgcccaaggaagaagcctatgtagagtttatgcgcataagaagagtccctttggaagagagaaaatgctctgaggacgcatccgatgtcatcccgattatacgttcagctgccatgaaggaccgagcagtgatggagaagggattaaaggcatttgtttcctttgtccgtgcttataaggagcatcactgctctttcattttcagatggaaagaccttgagattggaaagttagccatgggatatggcctcttgtatcttccttcaatgtctgaagttaaacaacacagactttccagtgagggtttcacaccagttgaaggtgtcaagtttgaagaaataaaattcaaggacaaatatcgggagaaacaaagacagcaaaacttacaagtaaggaaagagaaacggcaagaagagaaaaaagagaaaggcaagagaaaaagggttgatgcttctgctagtaatgatcctaagaaagcgtcgagaaagttaacggggaaacaaagacaaactattcaaactgctgaagatgaagaagtgatggatcgagattataagttgatgataaaagtaaagaaagggttaattaaagaagatgaatatgaaagacttacaggagatgatgatttattctga

SEQ ID NO: 77455 - protein, 593 aa, Arabidopsis thaliana
MDSSANINKALTETRFSDLEPPLSGDIIEALNQSDFEFCTPVQAATIPLLCSYKDVAVDAATGSGKTLAFVVPLVEILRRSTSFPPKPHQVMGVIISPTRELSTQIYNVAQPFVSTLANVNSVLLVGGREVKADMKIIEEEGCNVLIGTPGRLSDIMERMEILDFRNLEILILDEADRLLEMGFQRQVNYIISRLPKQRRTGLFSATQTEGVEELAKAGLRNPVRVEVRAKSKSESSQQLTNSKTPSGLHLEYMECEADKKSSQLVDLLIKNSDKKLIVFFMTCASVDYWGLVLSKIPALKSISLIPIHGDMKQNARDKALASFTKASSGALLCTDVAARGLDIPGIDYVVQYDPPQDPNMFNHRAGRTARLGRQGRAIVFLLPKEEAYVEFMRIRRVPLEERKCSEDASDVIPIIRSAAMKDRAVMEKGLKAFVSFVRAYKEHHCSFIFRWKDLEIGKLAMGYGLLYLPSMSEVKQHRLSSEGFTPVEGVKFEEIKFKDKYREKQRQQNLQVRKEKRQEEKKEKGKRKRVDASASNDPKKASRKLTGKQRQTIQTAEDEEVMDRDYKLMIKVKKGLIKEDEYERLTGDDDLF

SEQ ID NO: 77456 - DNA, 2538 bp, Arabidopsis thaliana; identical to SEQ ID NO: 65922
  CDS (1)..(2538)

SEQ ID NO: 77457 - protein, 845 aa, Arabidopsis thaliana; identical to SEQ ID NO: 65923

SEQ ID NO: 77458 - DNA, 1776 bp, Arabidopsis thaliana; identical to SEQ ID NO: 65928
  CDS (1)..(1776)

SEQ ID NO: 77459 - protein, 591 aa, Arabidopsis thaliana; identical to SEQ ID NO: 65929

SEQ ID NO: 77460 - DNA, 3267 bp, Arabidopsis thaliana
  CDS (1)..(3267)
atggccacaacagaagatactccagcttctgctggtccaagatatgctccagaggacccaactcttccccaaccatggaagggacttattgatggaagcacaggaattctctattactggaatcctgaaaccaatgtcactcagtatgaaagaccttctgcgcctcctccccactctgccacaacaccgaagctagctcagattcctgtaccctcttcaggacaaggtcaccaagctcagcatgaacaagcaaaaccagttggtcatgtgtctcagcagcatggtttccaacaacagccacagcaatttccatcccaacatgtaagaccccaaatgatgcagcagcatccggcccagcaaatgcctcaacaatcaggtcaacagtttccccaacaacagagccaatcgatggtgccgcacccacatgggcatccttctgtacagacttatcagccaacgacgcagcagcagcagcaagggatgcagaatcagcattcacaaatgcctcagcagctgagccatcagtatgctcattcacaacaacattacatgggttttcggcctcacatgcaaacgcaaggacttcaaaattcacatcagacacctcagggtggtccccatggtcagcagtttccgagccagcaagagtacaactcattggctccgaagagggagggggatgagttccatgggggtaagaaaactgggttttctcaaccccatttaccaaattctgaacgttcaccatctcaaaatacccactttgaagccaatgcagcatcacaaaagacgaatgcaaacttggctatggctcagaaatgcaatggacctcaagcaaatgctgcagtcacacagtttcaacagccaggggcgaacctaattcaccagcaacttggacctagggcgccaaatcaaatggaccagacaatgttgcaccagaagtctcacgtttcccctttccaatcaaataatacttatgagaataatctacaatctaggcctggtaatgactcgtacgttaacatgagaatggaagtgccggttaggggtgcccaaccacttcatcctgcagcaatgcctaaggatataaggataagtggtggtccaccaacaaatgctgatcccgccatggggcaaacagggcatggaacatatggacacgctggtccagcttttccaaataaatccttggtgcggcctcattttgtcacatctcctgatgttccccatctctctcccgttgaaatataccgaaaacaacatgaagtcacaacaactggcgagaacattccagcaccatacatcacatttgaatctagtggtctcccacctgaaatccttagagagttgctttctgctggatttccatcgccaacaccgatccaggcccaaacatggccaattgctctgcaaagcagggatatagttgcaattgcaaaaactggttctggtaaaacattgggatacttgatccctgccttcattcttctaaggcactgtcgtaacgactcccgcaatggccccacagttttgatcctagctcctactcgggagctagccacacaaatacaagacgaagcactaaggtttggacggtcttccaggatatcatgcacttgtttgtatggtggagctccaaagggtcctcaattgaaagagttggaacgaggagctgatattgtggtggcaactcctgggcgtctaaatgatatactggagatgaagatgattgatttccagcaggtttcccttcttgtgcttgacgaggcagaccgaatgcttgacatgggttttgaaccccaaatccgtaagattgtgaatgaaatacctcctcggagacagactcttatgtacacagccacttggccaaaagaagtaagaaaaattgcaagcgatcttcttgtgaaccctgtccaagttaacataggcagggtagatgagttggctgctaacaaagcaataacgcagtatgttgaagtagtcccacaaatggagaaagagagacgtttggagcaaatccttaggtcacaagaacgaggttcaaaagttataatattttgctccacgaagaggctttgtgaccatcttgcacgtagtgtcggacgtcattttggcgctgttgtgatccatggagacaagactcaaggtgagagagattgggtgcttaaccagttccgaagcgggaagtcttgtgtactgatagctactgacgttgctgcccggggactcgacataaaagacatacgagttgtgatcaactacgattttccaactggagttgaagactatgtccaccgtattgggagaaccggtcgagctggtgcaactggagttgcattcactttctttacagagcaagattggaaatacgcacctgatttgatcaaagtcctggaaggagcgaaccagcaagtaccgcctcaagtaagagatattgcaatgcgtggtggtggtggtggtggtcccggttatagccaggatcgaagaggtatggttaaccggtttgactctggcggtggtggtacccgttgggattctggtggtgggtttggtgggcgtggtggtgggtttagtggccgtgagggtgggtttggaggccgtgagggtggatttgggggccgtgagggtggatttggaggccgtgggggaagatttggaatgagagatgactcatttggacgtggcgggaatcgtggtcggggttttactggtcctgatgctggtcatatgaatgtgggtggtagaggcggatttggtcggtttggcaataataataatatggagagccgaggctttggtcgtggtagtggtagaggctttggtcgtggtgttggacggtttgacaacagaagaggtagaagtcgcagcagaagtcctgatttggttcggccacggcgccgtagctcgagctatagccggagtcgaagccggagcgggagctatagtcgtagccgtagccgtagcaggagctggtcacgttcaaggagtcgcagccctagacatagccgtgaccgaggtggtcataacaggagcagaagctatagccgtagtcctagtccggtttatgaaagacgagatagagcgccacgtgtttctgggtttgatattaaaccaccagttgaatctgtagtgaacctggacatgaatgccgcggcagcgattgaaaacgtggttcctacatccttgtctgagagacaagggaatggggttgttgaatcggaggtagaagcggctttagtacgaccagtggttgatgaagaaccctaa

SEQ ID NO: 77461 - protein, 1088 aa, Arabidopsis thaliana
MATTEDTPASAGPRYAPEDPTLPQPWKGLIDGSTGILYYWNPETNVTQYERPSAPPPHSATTPKLAQIPVPSSGQGHQAQHEQAKPVGHVSQQHGFQQQPQQFPSQHVRPQMMQQHPAQQMPQQSGQQFPQQQSQSMVPHPHGHPSVQTYQPTTQQQQQGMQNQHSQMPQQLSHQYAHSQQHYMGFRPHMQTQGLQNSHQTPQGGPHGQQFPSQQEYNSLAPKREGDEFHGGKKTGFSQPHLPNSERSPSQNTHFEANAASQKTNANLAMAQKCNGPQANAAVTQFQQPGANLIHQQLGPRAPNQMDQTMLHQKSHVSPFQSNNTYENNLQSRPGNDSYVNMRMEVPVRGAQPLHPAAMPKDIRISGGPPTNADPAMGQTGHGTYGHAGPAFPNKSLVRPHFVTSPDVPHLSPVEIYRKQHEVTTTGENIPAPYITFESSGLPPEILRELLSAGFPSPTPIQAQTWPIALQSRDIVAIAKTGSGKTLGYLIPAFILLRHCRNDSRNGPTVLILAPTRELATQIQDEALRFGRSSRISCTCLYGGAPKGPQLKELERGADIVVATPGRLNDILEMKMIDFQQVSLLVLDEADRMLDMGFEPQIRKIVNEIPPRRQTLMYTATWPKEVRKIASDLLVNPVQVNIGRVDELAANKAITQYVEVVPQMEKERRLEQILRSQERGSKVIIFCSTKRLCDHLARSVGRHFGAVVIHGDKTQGERDWVLNQFRSGKSCVLIATDVAARGLDIKDIRVVINYDFPTGVEDYVHRIGRTGRAGATGVAFTFFTEQDWKYAPDLIKVLEGANQQVPPQVRDIAMRGGGGGGPGYSQDRRGMVNRFDSGGGGTRWDSGGGFGGRGGGFSGREGGFGGREGGFGGREGGFGGRGGRFGMRDDSFGRGGNRGRGFTGPDAGHMNVGGRGGFGRFGNNNNMESRGFGRGSGRGFGRGVGRFDNRRGRSRSRSPDLVRPRRRSSSYSRSRSRSGSYSRSRSRSRSWSRSRSRSPRHSRDRGGHNRSRSYSRSPSPVYERRDRAPRVSGFDIKPPVESVVNLDMNAAAAIENVVPTSLSERQGNGVVESEVEAALVRPVVDEEP

SEQ ID NO: 77462 - DNA, 2058 bp, Spinacia oleracea; identical to SEQ ID NO: 65970
  CDS (1)..(2058)

SEQ ID NO: 77463 - protein, 685 aa, Spinacia oleracea; identical to SEQ ID NO: 65971

SEQ ID NO: 77464 - DNA, 1833 bp, Arabidopsis thaliana; identical to SEQ ID NO: 65974
  CDS (1)..(1833)

SEQ ID NO: 77465 - protein, 610 aa, Arabidopsis thaliana; identical to SEQ ID NO: 65975

SEQ ID NO: 77466 - DNA, 1422 bp, Aspergillus clavatus
  CDS (1)..(1422)
atgtcagctgtcaagaagcgcaagatcgccaacaaggctccgcagtatgagagtgacgcagaatcatctagctcccacgagtccgtcgctagtaagcactctgataacgctgaggcgcaagatggaccggagtcctcagagacgaaacctgcacccaagtccttcaaggatctaggtatcattgatcagttatgtgaagcatgtgcgactatgggatacaaggctcctacgccaattcaagcggaatctattcccttggcgcttcaggaccgcgatttgatcggattagcagagactggaagtggaaagacagcagcgtttgctcttcctatcctgcaagccctcatggacaaaccacaatcgtttttcggtctcgtccttgctcccactcgagaattggcttttcagatctcccaatcgttcgaagcgctgggctcgacaatcaatgtccgatgcgccgtcattgtcggaggcatggatatggtgtcgcagtccatcgctctcggaaagaaaccacatatcatcgttgctactcccggtcgactgctggatcacctcgaaaacaccaagggcttctcgctacgaacgttgaaatacctggtcatggacgaggccgatcgtcttcttgacatggacttcggccccctcctcgataaaatcctcaagatcctccccagggagcggcgcacattccttttctccgcaaccatgagttccaaggtcgagtcgctgcagcgtgcctcgctctcaaacccgctgcgcgtgtccgtctcctccaacaaataccagaccgtgtcgactctcctgcagtcgtaccggtttatcccccacaagcacaaagacatctacctagtctacctcctgaacgaattcgtcggccagtccgccatcatcttcacccgcaccgtgcacgagacgcagcgcatcagcttcctcctgcgggcgctcggcttcggcgctatcccgctgcacggccagctctcccagtcctctcgtctgggcgctctcggaaaattccgctcccgcagccgggatatcctcgtcgcgacggatgtcgccgcccgtggtttggacatcccatccgtcgacgtggtgctgaacttcgatctgcccacggactcgaaaacatacgtccaccgcgtgggtcgtacagcgcgtgcgggaaagagcggtgttgcgattagtttcgtgacgcagtacgatgttgagatctggctgcgcatcgaaggggcgctggggaagaagctcgacgagtacgatctcgagaaggatgaggttatggttctggcggagcgggttggcgaggctcagcgccaggctatcatggagatgaagaactttgatgagaagaagggtacgcgggcgaagaagttcggtaaagggaaacggtcgcgggatgagatggatcaagaagagggttga

SEQ ID NO: 77467 - protein, 473 aa, Aspergillus clavatus
MSAVKKRKIANKAPQYESDAESSSSHESVASKHSDNAEAQDGPESSETKPAPKSFKDLGIIDQLCEACATMGYKAPTPIQAESIPLALQDRDLIGLAETGSGKTAAFALPILQALMDKPQSFFGLVLAPTRELAFQISQSFEALGSTINVRCAVIVGGMDMVSQSIALGKKPHIIVATPGRLLDHLENTKGFSLRTLKYLVMDEADRLLDMDFGPLLDKILKILPRERRTFLFSATMSSKVESLQRASLSNPLRVSVSSNKYQTVSTLLQSYRFIPHKHKDIYLVYLLNEFVGQSAIIFTRTVHETQRISFLLRALGFGAIPLHGQLSQSSRLGALGKFRSRSRDILVATDVAARGLDIPSVDVVLNFDLPTDSKTYVHRVGRTARAGKSGVAISFVTQYDVEIWLRIEGALGKKLDEYDLEKDEVMVLAERVGEAQRQAIMEMKNFDEKKGTRAKKFGKGKRSRDEMDQEEG

SEQ ID NO: 77468 - DNA, 1419 bp, Aspergillus oryzae; identical to SEQ ID NO: 65992
  CDS (1)..(1419)

SEQ ID NO: 77469 - protein, 472 aa, Aspergillus oryzae; identical to SEQ ID NO: 65993

SEQ ID NO: 77470 - DNA, 1482 bp, Chaetomium globosum
  CDS (1)..(1482)
atgtcggccaaacgtaggaaggtctcttccggcaatggggccataaaagaagcctcaattcagatccaaaaacccaaaacaaaacctcaacctgtaacagcaccggtcgaaccgtccgcggtaccaaactccgaggccgagtcagagactatagacgatgcgtcgggggaggagagcgaagagcctgccccaaaaacattccaggacttgggcatcgttgactccctctgcgacgcttgcaaagagcttggatggaagaaaccgacaccaatccagcaggaatcgattccacttgccttacaagaccgcgacattattggccttgcagagaccggtagcggtaaaacgggtgcgtttgcacttccgattctccaagcccttctcgacaagccacaacctctgttcgccctcgtgctcgccccaacaagagagctggcagcccaaattgcgcaatcctttgaggcgctgggctctctgatatcgcttcgatgtgctctgattctgggtggcttggacatggtacagcaggctattgcgctgggaaagaagccgcacgtggtggttgcgacgcccggtcggttgttggaccatttggagaagacgaagggattcagtctgcggaacctccgctacctggtcatggatgaggccgatcgtctcctcgacatggacttcggcccgattctggacaagatcctcaagtttcttcccagagaacgcaggaccttcctcttctccgctaccatgtcaagcaaagttgagagcctgcagcgcgcctgtttgcgcgaccccttgaaagtcagcatctcgtcatcgaagtaccagaccgtctcgactctcgttcagaactatgtcttcatcccgcacacccacaaggacacctacttgatctacctatgcaacgagtttgcgggccaaaccatcatcatcttcacccgcaccgtgatcgagacccagcggattgctatcctactacgcacgctcggcatgggtgccatcccgctgcacggtggcctctcgcagtcggcccgtctcggcgccctgaacaagttccgcgccggctcccgtgacatcctcgtggccaccgacgtcgccgcccgcggtctcgacatccccaacgtcgactgcgtcctcaacttggacctccccggggactccaagacctacgtgcatcgtgtgggtcgtacggcacgtgccggccggtcgggacacgcaatcagttttgtaacacaatatgacctcgaactctggctgcgcatcgaggcggcactgggcaccaaacttacggagtattccttggaaaaagacgacgtcatggtgttcagaccacgggtggaagaggcacagcggatagcgaagactgagatcaaggcgctgatggatgatcgtggaaagaagggctcggtgttgaagggcgggaaggggcggaagagagggccacccgggtcgagccgggatcatatggacgccgaggagggttga

SEQ ID NO: 77471 - protein, 493 aa, Chaetomium globosum
MSAKRRKVSSGNGAIKEASIQIQKPKTKPQPVTAPVEPSAVPNSEAESETIDDASGEESEEPAPKTFQDLGIVDSLCDACKELGWKKPTPIQQESIPLALQDRDIIGLAETGSGKTGAFALPILQALLDKPQPLFALVLAPTRELAAQIAQSFEALGSLISLRCALILGGLDMVQQAIALGKKPHVVVATPGRLLDHLEKTKGFSLRNLRYLVMDEADRLLDMDFGPILDKILKFLPRERRTFLFSATMSSKVESLQRACLRDPLKVSISSSKYQTVSTLVQNYVFIPHTHKDTYLIYLCNEFAGQTIIIFTRTVIETQRIAILLRTLGMGAIPLHGGLSQSARLGALNKFRAGSRDILVATDVAARGLDIPNVDCVLNLDLPGDSKTYVHRVGRTARAGRSGHAISFVTQYDLELWLRIEAALGTKLTEYSLEKDDVMVFRPRVEEAQRIAKTEIKALMDDRGKKGSVLKGGKGRKRGPPGSSRDHMDAEEG

SEQ ID NO: 77472 - DNA, 1398 bp, Emericella nidulans
  CDS (1)..(1398)
atgtcagccttgaaaaagcgcaagatcacggagaagcagccagagactaatagcgattctgaagccgagtccgtcagctctcgcggatctgccaaggatgaaacgcaaacctccggcgaagagccagctccagcaaagtccttcaaagagttaggaatcattgaccaactatgcgaggcttgcgagaacatgggctacaaggcaccgactccgattcaatcacaggcgattccgcttgcccttgagggccgtgatgtgattggcctcgcggaaacaggaagtggaaagacagccgctttcgccctcccaatgcttcaagctcttatggaggcgcctcaaacactctttggtctcgttctagcccccacccgagaactcgcataccagatatctcaagcttttgaaacgctcgggtcaacaatcggagttcgctgcgccgtcatcgtcggcggcatggacatggtagcgcaatccatcgcccttggcaaaaaacctcatattatagtcgcaaccccaggtcgattactagatcatctagagaacacaaagggcttctccctccgaaatctcaagtatctcgccatcgacgaagccgacagacttttggacatggactttggtgaatccctcgacaagatcattcgaatcctcccccgcacccgccacacctaccttttctccgcgacaatgagcaccaaagtcgaatccctccagcgtgcctctctttccaaccccgtccgcgtctctgtttccagcaaataccaaaccgtctcaacccttcaatcatcctatatctgtattccccacaagcacaagaatctctacctcgtctacctcctcaacgaatttgcgggtcagtccgcaatcatcttcacgacaactgttcacgaaactcagcgtgtcgcgtttatgctccgcgccttgggctttggcgccatccccctccacggccaattgtcccaatctgctcgtcttggtgccctaggcaagttccgctctcgcagtcgcgatattctcgttgccactgatgtcgctgctcgaggtcttgatatcccgtccgttgacgtcgtctttaactttgacctccccatggacagcaagacatatattcatcgtgttggacgtactgcacgtgcagggaagagtggagtagcaattagcttcgtcacacagtatgacgttgaagtttggcttcgtatcgagcatgcgctgtccaaaaaactgccggagtatcaggttgagaaggacgaggtcatggtcatgtcagagcgggttgcggaggcttcacggcaggctactattgagatgaagagctttgacgaaaagaagggggctagagggaagaagtttggcaaggggaagcgctcaagagatgatatggatcaggaagagggttaa

SEQ ID NO: 77473 - protein, 465 aa, Emericella nidulans
MSALKKRKITEKQPETNSDSEAESVSSRGSAKDETQTSGEEPAPAKSFKELGIIDQLCEACENMGYKAPTPIQSQAIPLALEGRDVIGLAETGSGKTAAFALPMLQALMEAPQTLFGLVLAPTRELAYQISQAFETLGSTIGVRCAVIVGGMDMVAQSIALGKKPHIIVATPGRLLDHLENTKGFSLRNLKYLAIDEADRLLDMDFGESLDKIIRILPRTRHTYLFSATMSTKVESLQRASLSNPVRVSVSSKYQTVSTLQSSYICIPHKHKNLYLVYLLNEFAGQSAIIFTTTVHETQRVAFMLRALGFGAIPLHGQLSQSARLGALGKFRSRSRDILVATDVAARGLDIPSVDVVFNFDLPMDSKTYIHRVGRTARAGKSGVAISFVTQYDVEVWLRIEHALSKKLPEYQVEKDEVMVMSERVAEASRQATIEMKSFDEKKGARGKKFGKGKRSRDDMDQEEG

SEQ ID NO: 77474 - DNA, 1641 bp, Phaeosphaeria nodorum
  CDS (1)..(1641)
atgtccgacttcaagaggagaaagcttgagggtggcaagtctgccattgacgctgctcgcgaacgaaaagcgctcaagaaagcgagtgcgccgctgaagaagtcacatgcgaagcctgcaccatcgaacaagccgaccgcaaagcgaccgcctccaccttctccaccgcaatcacagtcggaagaggacgaggatgagtttggaggtttctcaggcgaagaggaggaggatgtgtcacgtgccaagatgaccaatggctcaactgcaaaggcagacgctgaagccgagcagtcggatgaggaagcagaggcacaagcagctgctgctgtagaagcacccaagaagaccttcgccgaccttggtgtgcgagaagaactatgcgacgcttgcgagaacctgggatacaagacagcaacaccgattcagacagaatccataccacttgcgctcgcaggaaaggatatcattggactggcagagacaggttcgggaaagacagcagcattcgtcctgcctatattgcaggccctactcgacaagccgcaagcatactttggtctgatcatggcacccacgcgagaactggcatatcaaatctcgcaacaagtagacgcgctcggtagcatcatcaacgtcaagtgcgcaaccctcgtcggaggcatggacatggttccgcaggccatcgccctctcaaagcgaccacacatcatcgtggccagtcccggtcgtctgctcgaccatctagaaaacaccaagggtttctcactcaagcacctcaagtacctagtcttagacgaagccgaccgcctgctcgacctcgacttcggcgacagtctggataagatcttcaaagtcctgccccgagacgaccgccacacctacctcttctccgcaaccatgtcatctaaagtcgaatctctccaacgagccgccctcaagaaccctgtgcgcgtctccatctcctccagcagccaccaagttgtctccaccctgctccaaagctacatgctcatcccgcacaagtacaaagacctgtaccttatccacctcctcaacgacaacattgggcacgctacaatcctcttcacccgcaccgtcaacgaaactcagcgcctggcagtcctactgcgcacactaggcttccaagcgctccctctgcatgggcaactctctcaatccaaccgcctcggcgccctgaataaattcaaagcgaaggcccgcgacatcctcgtggccaccgacgtcgccgcgcgcggtctcgacatcccctccgtcgacctcgtcgtcaacttcgacctgccgcacgactcggagacatatgttcatcgcgtgggccgcacggcgcgcgcgggcaagagcggcaaggcggtgagctttgtaacgcagtacgatttggagatttttcagcgcatcgaacatgcgttggggaagcaggtgcctgaggagaaggttagtagggatgaggtcatggtttatgcggagcgtgtgggcgaagcgcagagggtggcggtgcgggagatgaaggatttgcatgatcagaggaagagtggacggggcggtaggggcgggggcagaggtggtggaaggggcgggagggggagaggtgggaggagagataatatggatatggatgagggatag

SEQ ID NO: 77475 - protein, 546 aa, Phaeosphaeria nodorum
MSDFKRRKLEGGKSAIDAARERKALKKASAPLKKSHAKPAPSNKPTAKRPPPPSPPQSQSEEDEDEFGGFSGEEEEDVSRAKMTNGSTAKADAEAEQSDEEAEAQAAAAVEAPKKTFADLGVREELCDACENLGYKTATPIQTESIPLALAGKDIIGLAETGSGKTAAFVLPILQALLDKPQAYFGLIMAPTRELAYQISQQVDALGSIINVKCATLVGGMDMVPQAIALSKRPHIIVASPGRLLDHLENTKGFSLKHLKYLVLDEADRLLDLDFGDSLDKIFKVLPRDDRHTYLFSATMSSKVESLQRAALKNPVRVSISSSSHQVVSTLLQSYMLIPHKYKDLYLIHLLNDNIGHATILFTRTVNETQRLAVLLRTLGFQALPLHGQLSQSNRLGALNKFKAKARDILVATDVAARGLDIPSVDLVVNFDLPHDSETYVHRVGRTARAGKSGKAVSFVTQYDLEIFQRIEHALGKQVPEEKVSRDEVMVYAERVGEAQRVAVREMKDLHDQRKSGRGGRGGGRGGGRGGRGRGGRRDNMDMDEG

SEQ ID NO: 77476 - DNA, 1656 bp, Ustilago maydis
  CDS (1)..(1656)
atgacggcttccacctctaatgtttcgtcatcaaattctaagcttaagaagagcaaagcatcgtcgccttccgcatctccggaggtatcaacaccaagcactagcaacagcaatgacgaccaagatggacatgtcagtgaggacatgagcgatgccgaggaaggcgaaagtcaagagcatagtgccagtggaagcgggatcagtgatcatgacgatgacgacgacccttctgccgacaaggactcaccagcagcagacgaggaacaggacgagaaaaaggtagctaccattgccgatgatggcaagaaggttgagttctctgatcttggcgttattccgcaaatcgtcgaagcgtgcaccaacatgggcttcaagcatcccactcccatccaggtcaaggcgatccctgaagcgctccaagcacgcgacgttatcggtctcgcccaaactggttccggaaagaccgccgccttcacgatccccatccttcaagcattgtgggacaatcccaagcctttcttcgcatgcgtgctggcacctacgcgtgagctggcttaccagatatcgcagcaggtcgaagcgctcggctcgacgattggcgtacgttccgccaccatcgtgggtggtatggatatgatgtcgcagtcaatcgcgctctccaagcgtccacatgtgatcgttgccactcctggtcgtctgcaagatcatttggaaaacacaaagggttttagcttgcgtggattgcagtacctcgtcatggacgaagctgatcgattgctcgacatggacttcggacccatcatcgataagctgcttcagtccatcccacgcgagaggaggaccatgctgttcagcgctaccatgaccaccaaagtcgccaaattgcagcgtgcttcgctcaagaatcctgtgcgcgtcgaagtcgacaccaaatacaccaccgtatccacgctcaagcagcactacatgttcatgccgtttgcccacaaagacacgtacctggtgcaccttgccaacgaacaagcaggacactcgatcatcgtcttcacacgtaccgtgcacgattcacagcgactctcgatcctgttgcgtctactcgggtttcctgctatcccgcttcatggtcagctaagccagcaggcgcgtctcggtgcgctcaacaagttcaagactggcggtcgatcgattctcgtcgcaaccgacgtggcttctcgaggtctcgatattcctgcggtcgacttggtcgtcaactacgacatccccaccaactcgaaagactacatccatcgtgtcggtcgtacagcgcgtgccggtcgatcaggtcgttcagtcaccttggtgactcagtacgacgttgagctgcttcaacgcatcgaggctgtcatcggactcaagatgacagagttccccggaggaaacgacaaagaagccgtgatgctactgagcgaacgtgtcgccgaagcacatcgtgcagcggtgagagagttgaaggacaagggcgtaggaagtgcaggtggctcgggcaagcgaaagagaaagatggatggcaagtacggtgacgacatggaccgagacgacgatcaggttcaagctgggttgcccgtctctggaaatggacgacatcagaaccagaacaggaagaagggtcgtcgctga

SEQ ID NO: 77477 - protein, 551 aa, Ustilago maydis
MTASTSNVSSSNSKLKKSKASSPSASPEVSTPSTSNSNDDQDGHVSEDMSDAEEGESQEHSASGSGISDHDDDDDPSADKDSPAADEEQDEKKVATIADDGKKVEFSDLGVIPQIVEACTNMGFKHPTPIQVKAIPEALQARDVIGLAQTGSGKTAAFTIPILQALWDNPKPFFACVLAPTRELAYQISQQVEALGSTIGVRSATIVGGMDMMSQSIALSKRPHVIVATPGRLQDHLENTKGFSLRGLQYLVMDEADRLLDMDFGPIIDKLLQSIPRERRTMLFSATMTTKVAKLQRASLKNPVRVEVDTKYTTVSTLKQHYMFMPFAHKDTYLVHLANEQAGHSIIVFTRTVHDSQRLSILLRLLGFPAIPLHGQLSQQARLGALNKFKTGGRSILVATDVASRGLDIPAVDLVVNYDIPTNSKDYIHRVGRTARAGRSGRSVTLVTQYDVELLQRIEAVIGLKMTEFPGGNDKEAVMLLSERVAEAHRAAVRELKDKGVGSAGGSGKRKRKMDGKYGDDMDRDDDQVQAGLPVSGNGRHQNQNRKKGRR

SEQ ID NO: 77478 - DNA, 1986 bp, Drosophila melanogaster
  CDS (1)..(1986)
atgtctgacgactgggatgatgagcccattgttgatactcgcggcgcccgcggtggagattggagcgatgatgaggacacggccaagagcttcagcggcgaagctgaaggcgatggtgttggagggagcggtggtgaaggcggcggctaccaaggaggaaatcgagatgtgttcggaaggatcggcggaggcagaggaggaggagctggaggttatcgaggaggaaatcgagatggagggggcttccacggtggacgtcgcgagggagaaagggacttccgcggtggagaaggcggcttccgcggtggacaaggcggctcccgcggtggacaaggcggctcccgcgggggacaaggcggcttccgtggtggagaaggcggcttccgcggtcggctgtacgaaaacgaggatggtgatgaacgtcgtggaagactagatcgggaggaacgcggcggtgaacgtcgtggaagactagatcgggaggaacgcggcggtgaacgtggtgaaagaggggacggtggttttgcgaggcgccgtcgaaatgaagatgatataaataataataataatatcgtcgaagatgtcgaaaggaagcgagagttttatattcctcccgagccgtccaacgatgcaattgagatattcagcagtggcatagcttccgggattcatttttcgaaatacaacaacataccggttaaggtgaccggcagcgatgttccacaacctatacaacattttacgagcgctgatttgagagatattattatagacaatgtaaacaaatctggatacaaaataccgacaccaattcaaaagtgttccataccagtaatatcctctggtcgagacctaatggcgtgtgcccagacgggttctggaaaaacggcagcttttttgttgcccattttgagcaagttgttggaggatccccatgaactggagcttggaagaccccaggtagtgattgtatccccaacaagggagctggcaattcagatctttaacgaggcgaggaagtttgctttcgagtcatatctaaagatcggtattgtttacggaggcacctcgttcagacatcaaaacgagtgcattaccagaggctgccatgtagtgatcgccactccgggacgacttctggatttcgtggatcggacctttatcacgtttgaagacactcgattcgttgtgctggatgaggccgatcgcatgctagatatgggtttctcagaagacatgcgaagaatcatgacgcatgtaactatgcgtccagaacatcagacattgatgttttccgccacgtttccagaagaaatccaaagaatggccggcgaattccttaaaaattacgttttcgtcgccattggcattgtaggcggagcttgctctgatgtgaagcagaccatatacgaagttaataagtacgccaagcgatccaagctaatagaaatcctttccgagcaagcagatggcaccattgtgtttgtggagacaaagcgtggcgccgactttttagcttccttcctgtcagaaaaggagtttccgacgacctccattcatggcgatcgtctccagagtcaacgcgagcaggccttgcgtgatttcaagaacggctctatgaaggttctcatagccacttcagtggcttctcgtggattagacattaaaaacatcaagcatgtgatcaactatgacatgcccagcaagatcgatgactacgtacatcgcattggacgtacaggtcgtgtaggcaataatggacgagccacaagcttctttgaccctgaaaaggatcgagctattgctgcggacttggtaaaaatcttggagggatctggccagactgttccggactttctacgcacctgtggtgccggcggtgatgggggttactccaatcaaaatttcggtggggtggatgtgcgtggcaggggaaattacgtcggcgatgccaccaatgtcgaggaagaagagcaatgggattga

SEQ ID NO: 77479 - protein, 661 aa, Drosophila melanogaster
MSDDWDDEPIVDTRGARGGDWSDDEDTAKSFSGEAEGDGVGGSGGEGGGYQGGNRDVFGRIGGGRGGGAGGYRGGNRDGGGFHGGRREGERDFRGGEGGFRGGQGGSRGGQGGSRGGQGGFRGGEGGFRGRLYENEDGDERRGRLDREERGGERRGRLDREERGGERGERGDGGFARRRRNEDDINNNNNIVEDVERKREFYIPPEPSNDAIEIFSSGIASGIHFSKYNNIPVKVTGSDVPQPIQHFTSADLRDIIIDNVNKSGYKIPTPIQKCSIPVISSGRDLMACAQTGSGKTAAFLLPILSKLLEDPHELELGRPQVVIVSPTRELAIQIFNEARKFAFESYLKIGIVYGGTSFRHQNECITRGCHVVIATPGRLLDFVDRTFITFEDTRFVVLDEADRMLDMGFSEDMRRIMTHVTMRPEHQTLMFSATFPEEIQRMAGEFLKNYVFVAIGIVGGACSDVKQTIYEVNKYAKRSKLIEILSEQADGTIVFVETKRGADFLASFLSEKEFPTTSIHGDRLQSQREQALRDFKNGSMKVLIATSVASRGLDIKNIKHVINYDMPSKIDDYVHRIGRTGRVGNNGRATSFFDPEKDRAIAADLVKILEGSGQTVPDFLRTCGAGGDGGYSNQNFGGVDVRGRGNYVGDATNVEEEEQWD

SEQ ID NO: 77480 - DNA, 1521 bp, Staphylococcus aureus; identical to SEQ ID NO: 66038
  CDS (1)..(1521): transl_table=11

SEQ ID NO: 77481 - protein, 506 aa, Staphylococcus aureus; identical to SEQ ID NO: 66039

SEQ ID NO: 77482 - DNA, 1587 bp, Bacillus cereus
  CDS (1)..(1587): transl_table=11
ttgacaacatttcgagaattaggattaagtgattctttactgcaatctgttgaaagtatgggctttgaagaggctacgccaattcaagctgaaacaattccacatgcattgcaaggtaaggatattattgggcaagcacaaacaggtacagggaaaacagcagcattcggattaccactattagataaagtggatacacataaagaatcggttcaaggtattgttatcgcgccaacgcgtgaattagcaattcaagttggagaagagctatacaaaattggtaaacataaacgcgttcgtatcttaccaatttacggtggtcaagatattaaccgccaaattcgtgctctaaaaaaacacccacacattattgttggtacgccgggtcgtattttagatcatattaaccgtaaaacacttcgcttacaaaacgtagagacagttgttcttgacgaagcggatgaaatgttaaacatgggcttcattgaagatattgaagcaattttaacagatgtgccagaaacacatcaaacattactattctcagcgacaatgccggacccaattcgtcgtattgctgagcgtttcatgactgagcctcaacacattaaagtaaaagcaaaagaagtaacaatgccaaacattcagcagttctatttagaagtgcaagaaaagaaaaagtttgacgtgctaacacgcttactagatattcaatctccagagcttgcgattgtgttcggtcgtacaaagcgtcgtgttgatgaattatcagaggcattaaacttacgtggttatgctgcagaaggtatccatggtgatttaactcaggcgaaacgtatgtctgtattacgtaaattcaaagaaggttctattgaagttcttgttgcaacagacgttgctgcacgtggtcttgatatttcaggcgtaacacacgtatataacttcgatattccgcaagacccagaatcatatgttcaccgtattggccgtactggtcgtgcaggtaaaaaaggtattgcaatgctatttgtaacaccacgtgaatctggacaattaaaaaatatcgagcgtacaacaaaacgtaaaatggaccgcatggatgcaccgacacttgacgaggcactagaaggtcaacaacgtttaatcgctgaaaaacttcaaagcacaattgaaaatgaaaacttagcatactacaagcgtattgcagaagaaatgttagaagagaacgactctgtaacagtagtagctgctgctttaaaaatgatgacaaaagagccggatacaactccaatcgctttaacatcagaaccaccagttgttgcaagaggtggcggttctaaaaaacgcggcggtaacggaggcggataccgtgatggtaaccgtaatcgtagtcgtgatggacgcggtggcgatggtcgtaaccgtgaccgtaatcgtgatggtcgcaatcgtgacggtaaccgtgatcgcaatcgtgaaggtagccgtgatggtaaccgtggtcgtcgtggcgaaggtcaaggacgcccaggatcttcaaacggacgcggcgaaagaaaacaccatagccgtaagccacaagcttaa

SEQ ID NO: 77483 - protein, 528 aa, Bacillus cereus
MTTFRELGLSDSLLQSVESMGFEEATPIQAETIPHALQGKDIIGQAQTGTGKTAAFGLPLLDKVDTHKESVQGIVIAPTRELAIQVGEELYKIGKHKRVRILPIYGGQDINRQIRALKKHPHIIVGTPGRILDHINRKTLRLQNVETVVLDEADEMLNMGFIEDIEAILTDVPETHQTLLFSATMPDPIRRIAERFMTEPQHIKVKAKEVTMPNIQQFYLEVQEKKKFDVLTRLLDIQSPELAIVFGRTKRRVDELSEALNLRGYAAEGIHGDLTQAKRMSVLRKFKEGSIEVLVATDVAARGLDISGVTHVYNFDIPQDPESYVHRIGRTGRAGKKGIAMLFVTPRESGQLKNIERTTKRKMDRMDAPTLDEALEGQQRLIAEKLQSTIENENLAYYKRIAEEMLEENDSVTVVAAALKMMTKEPDTTPIALTSEPPVVARGGGSKKRGGNGGGYRDGNRNRSRDGRGGDGRNRDRNRDGRNRDGNRDRNREGSRDGNRGRRGEGQGRPGSSNGRGERKHHSRKPQA

SEQ ID NO: 77484 - DNA, 1404 bp, Geobacillus kaustophilus
  CDS (1)..(1404): transl_table=11
ttgacgacatttcaagaattaggattaagccaagaagtgatgaaagcgatcgagcggatggggtttgaagagacgactccgattcaagcaaagacgattccgctcagtctgcaaaataaagacgtaatcggtcaagcgcaaaccggaacggggaaaacggcggcgtttggcattccgatcgttgagaaagtgaatgtgaaaaacagcgctgttcaagcgctcgttgtcgcgccgacgcgtgagctcgccatccaagtatcagaagagctgtacaaaatcggcgccgtcaagcgcgtgcgcgttttgccgatttacggcggtcaagatatcgagcggcaaatccgtgctttgaaaaaacatccgcacgtgatcgtcgggacgccgggccgtattatcgaccatatcaaccgcgggacgctccgccttgagcatgtgcatacggtcgttctcgatgaggcggatgaaatgctcaatatgggctttatcgaagatattgaggcgattttaagccatgtgccggccgagcggcagacgttgctgttctcggcgacgatgccggatccgattcgccgcattgccgagcgcttcatgaacgagccggaacttgtcaaagtgaaggcaaaggaaatgaccgtgccgaacattcaacagtactacttagaagtgcacgagaaaaagaaatttgacattttgacgcggcttcttgatattcaggcgccggagctcgcgatcgtgttcggccgcacgaagcgtcgtgtcgatgagctggcggaggcgctcaacttgcgaggctatgcagcggaaggcattcacggtgatttaagccaagcgaaacggctgtcggtgctgcgcaagtttaaggaaggtgcgattgaaattttagtggcgacggatgttgcggcgcgcggcttggatatttccggcgtaacgcacgtgtacaactttgatattccgcaagacccggaaagctatgtccaccggattgggcgcaccgggcgcgccggcaagacaggggtggcgatgacgtttgtcactccaagggagatcggccagcttcaccatattgagcggacgacgaagcggaaaatggagcggatgaagccgccgacacttgatgaggcgctcgaaggccaacagcgtatcgcgatcgaaaagcttctcaacgtcgtggagaccgaaaacctgtcattttacaaacgggcagcggaagaattgcttgaagagcacgattcggtaacgattgtcgctgcctgcttgaaaatgttgacgcgcgagccggatacgacgccggtgcaattgacggaagaaccgcctttagcggtcaagcgggagaaaaaacggggcggccgcccggacggctcagctcgcagccggacgaagaaacggcggattacggcgcattaa

SEQ ID NO: 77485 - protein, 467 aa, Geobacillus kaustophilus
MTTFQELGLSQEVMKAIERMGFEETTPIQAKTIPLSLQNKDVIGQAQTGTGKTAAFGIPIVEKVNVKNSAVQALVVAPTRELAIQVSEELYKIGAVKRVRVLPIYGGQDIERQIRALKKHPHVIVGTPGRIIDHINRGTLRLEHVHTVVLDEADEMLNMGFIEDIEAILSHVPAERQTLLFSATMPDPIRRIAERFMNEPELVKVKAKEMTVPNIQQYYLEVHEKKKFDILTRLLDIQAPELAIVFGRTKRRVDELAEALNLRGYAAEGIHGDLSQAKRLSVLRKFKEGAIEILVATDVAARGLDISGVTHVYNFDIPQDPESYVHRIGRTGRAGKTGVAMTFVTPREIGQLHHIERTTKRKMERMKPPTLDEALEGQQRIAIEKLLNVVETENLSFYKRAAEELLEEHDSVTIVAACLKMLTREPDTTPVQLTEEPPLAVKREKKRGGRPDGSARSRTKKRRITAH

SEQ ID NO: 77486 - DNA, 1530 bp, Oryza sativa
  CDS (1)..(1530)
atgtcgtcttcctcctcctcgttggcggcggcggcggcgcggaagcgcgcgctgacggagcagaggttctcggagctgtcgcccgcgctgtccccggaggtggtgaaggccctgaagggcggcgggttccggcggtgcacgccggtgcaggcggcggccatcccgctgctgctttcgcacaaggacgtggccgtcgacgccgccaccggctccggcaagacgctcgccttcgtcgtccccgtcgtcgagatcctccgccgccgcccctcgcctcccaagccccacgaggttcttggaatcatcatctccccgacgagagagctgtcttcgcagatatacaatgtggctcagcccttcttcgcgacgctgaagggcgtctcatccatgctactggttggtgggttcgacatcaaggcggagctaaagaaactggaagaagagggtgcaaacatactggtcggcaccccggggaagctgttcgacgtaatggagcgcttagacactctgaactacaagaatcttgagattttgatcctggatgaagctgataggctgttggatttaggattccagaagcagattacgtcgattatttcgaagttgccaaagctgaggagaacagggcttttttcggcaactcagacggaggctgttaaggagctggcgaaagcagggttgaggaatcctgtgagggttgaagttaagacagaggtgaagcccacaggtaaagatggtgctcaacaagagcttggtccatccaaaacaccgttgggtcttcgattggagtatatgatatgtgaagcatcaaataagtcatcgcaacttgttgatttccttgtgcagaacaatggaaagaaaataatggtgtacttcgcaacatgtgcttgtgtagattactgggctattgttctcccgctgttggactcacttaaaggttctccaataattccttatcatgggaagatgaagcagggccctcgtgagaaagctttggcatcattttcagctctctcaagtggtattctagtttgcactgatgttgcagcaaggggtcttgacataccacatgttgatctgattgtgcagtatgatccacctcaagatcccaatgtgttcatacatagagctggccgtactgcacgttatgatcaagaaggagatgctattgtattcctcttaccgaaggaagatacttatgttgagttcttgaagaggagaggtgtacccctcactgaaagggagtgttccacaaatgctgtagatattgtaccacagatcagaagtgctgcattggaagaccgaaatgtcatggagaaagggcttacagcttttgtttcgtttgttcgggcatacaaggagcaccactgttcttacattttcagttggaaagaccttgaaattggaaggttgggtatggagtacggcttactccaaattccatctatgccagaagttaagcaccattctctttcattggaagggtttactcctgttaaagatgtcgatgttacaaaaatcaagtacaagtaa

SEQ ID NO: 77487 - protein, 509 aa, Oryza sativa
MSSSSSSLAAAAARKRALTEQRFSELSPALSPEVVKALKGGGFRRCTPVQAAAIPLLLSHKDVAVDAATGSGKTLAFVVPVVEILRRRPSPPKPHEVLGIIISPTRELSSQIYNVAQPFFATLKGVSSMLLVGGFDIKAELKKLEEEGANILVGTPGKLFDVMERLDTLNYKNLEILILDEADRLLDLGFQKQITSIISKLPKLRRTGLFSATQTEAVKELAKAGLRNPVRVEVKTEVKPTGKDGAQQELGPSKTPLGLRLEYMICEASNKSSQLVDFLVQNNGKKIMVYFATCACVDYWAIVLPLLDSLKGSPIIPYHGKMKQGPREKALASFSALSSGILVCTDVAARGLDIPHVDLIVQYDPPQDPNVFIHRAGRTARYDQEGDAIVFLLPKEDTYVEFLKRRGVPLTERECSTNAVDIVPQIRSAALEDRNVMEKGLTAFVSFVRAYKEHHCSYIFSWKDLEIGRLGMEYGLLQIPSMPEVKHHSLSLEGFTPVKDVDVTKIKYK

SEQ ID NO: 77488 - DNA, 2280 bp, Oryza sativa
  CDS (1)..(2280)
atggcgtcggcggcggcggcggcggcgacggcgagggggccgcggtacgcgccgccagatccgacgctgcccaagccgtggagggggctcatcgacggcaacaccgggtacctctacttctggaacccggagaccaaggccgtgcagtacgaccgccccacggcgccgccgccctcctcccccccggcgcagcagcctccggagaggcctaggaacagcgatcctgctgagtcgcaggcgcaggctggagcgagccgaacgcagaatgctgctcctgctgatgatagggcaaggaatgatcatttgaatgatcatttcgagcggcgcacggaagcggcgggaagtcatgcgcagaacgtgcctttcactgagcaaaatactaggagcaacccttcttcgcagccgtgctctgcagctggagtataccctgcacagaatgtattttcagaggctgccagtggagaccgcacctcaccagaagcgtatcgtgctaagcacgagatcactattgtcggaaatgaggctccagctccattcatgacatttcagtccacaggtttccctccagagattctaagggaggtaagtgcacacaatttacatgactatttaatgcattttcttgtatccttctcgaaagaaattaggaggtcattgtgcgttcatactacgtatgtgataactacgctggatgttcatctcagcaggctcttcaagtcaacaatctatgtcaaggtacagcaagcgggattctctgcaccaactcctatccaagctcaatcatggccaattgctcttaggaatcgtgatattgtagctgtggcgaagacaggttccggaaaaacactgggttatctcattccagggtttatccttcttaagcgccttcaacataattcaagggatggtccaacggtattagtgctttctccaacaagggaattggcaacacaaatccaagatgaagcgaaaaagtttgggagatcgtcaagaatatcgtctgtttgtttatatggaggtgctcctaaaggtcctcagctaagagatctagagcgtggtgcagacattgtggttgcaactcctggaagattgaatgacattttagaaatgcgaagagtgagcctacatcaagtatcttatcttgttcttgatgaggctgaccgcatgcttgatatgggttttgagccacaaataagaaaaattgtgaaacaagtacaacccaaacgacagactcttatgttcactgccacttggccaaaagaggtgaggaaaatagcctcagatttgctgtccaatccagtccaagttaacattgggaacactgatcaactggttgccaataagtcaatcactcagtatgtggatgttatcacacctccggagaaatcgaggcggcttgatcaaatcctaaggtcacaggaacctggatcgaaaatcataatattttgctccacaaagaggatgtgtgatcagctggctcgaaacctagcacggcagtatggtgcttctgctattcatggtgataaatcacaagccgagagggattctgtgttgagtgaatttcgaagtggcagatgccctattcttgttgctactgatgtggctgcccgaggcttggacataaaggatatcagagttgtggtcaactacgatttcccaacaggtgttgaggattacgtccatagaattgggagaacaggacgggctggagcgactggagttgcctatacattcttctgtgatcaggattcaaagtatgcttcagatctcgtgaagattttggagggtgcaaaccagtctgtttcgcaacagttgagagatatggtctcccgtggagggtatggtggaaggtcacggcgctgggcatcttcagatgactcttatggtggtcgaggatatgattcaggctatacttcaaggtcgactgacaactataacagtggttatggcagtcagtctgggaatggttctagctttcatagtagcttccataacagcaacagtggcaatcagtttggcgatacttctggcttccaaaccagctttcataacagcagcagcaacaatcaaaccagtgacaatccaagctttcatgccagcagcaacaacgatcaacctggtgatggtctcagctttcatgccaggttctatagctcttctcgaggcagcgatcagagcagaacaaacaatgctggctttcgtgatagaagtaggagtcctccaagcaatcgcaaccatgaagatcctgggtccaaggctgttggtgtctccaactggtaa

SEQ ID NO: 77489 - protein, 759 aa, Oryza sativa
MASAAAAAATARGPRYAPPDPTLPKPWRGLIDGNTGYLYFWNPETKAVQYDRPTAPPPSSPPAQQPPERPRNSDPAESQAQAGASRTQNAAPADDRARNDHLNDHFERRTEAAGSHAQNVPFTEQNTRSNPSSQPCSAAGVYPAQNVFSEAASGDRTSPEAYRAKHEITIVGNEAPAPFMTFQSTGFPPEILREVSAHNLHDYLMHFLVSFSKEIRRSLCVHTTYVITTLDVHLSRLFKSTIYVKVQQAGFSAPTPIQAQSWPIALRNRDIVAVAKTGSGKTLGYLIPGFILLKRLQHNSRDGPTVLVLSPTRELATQIQDEAKKFGRSSRISSVCLYGGAPKGPQLRDLERGADIVVATPGRLNDILEMRRVSLHQVSYLVLDEADRMLDMGFEPQIRKIVKQVQPKRQTLMFTATWPKEVRKIASDLLSNPVQVNIGNTDQLVANKSITQYVDVITPPEKSRRLDQILRSQEPGSKIIIFCSTKRMCDQLARNLARQYGASAIHGDKSQAERDSVLSEFRSGRCPILVATDVAARGLDIKDIRVVVNYDFPTGVEDYVHRIGRTGRAGATGVAYTFFCDQDSKYASDLVKILEGANQSVSQQLRDMVSRGGYGGRSRRWASSDDSYGGRGYDSGYTSRSTDNYNSGYGSQSGNGSSFHSSFHNSNSGNQFGDTSGFQTSFHNSSSNNQTSDNPSFHASSNNDQPGDGLSFHARFYSSSRGSDQSRTNNAGFRDRSRSPPSNRNHEDPGSKAVGVSNW

SEQ ID NO: 77490 - DNA, 2277 bp, Oryza sativa
  CDS (1)..(2277)
atggcgtcggcggcggcggcggcggcgacggcgagggggccgcggtacgcgccgccagatccgacgctgcccaagccgtggagggggctcatcgacggcaacaccgggtacctctacttctggaacccggagaccaaggccgtgcagtacgaccgccccacggcgccgccgccctcctcccccccggcgcagcagcctccggagaggcctaggaacagcgatcctgctgagtcgcaggcgcaggctggagcgagccgaacgcagaatgctgctcctgctgatgatagggcaaggaatgatcatttgaatgatcatttcgagcggcgcacggaagcggcgggaagtcatgcgcagaacgtgcctttcactgagcaaaatactaggagcaacccttcttcgcagccgtgctctgcagctggagtataccctgcacagaatgtattttcagaggctgccagtggagaccgcacctcaccagaagcgtatcgtgctaagcacgagatcactattgtcggaaatgaggctccagctccattcatgacatttcagtccacaggtttccctccagagattctaagggaggtaagtgcacacaatttacatgactatttaatgcattttcttgtatccttctcgaaagaaattaggaggtcattgtgcgttcatactacgtatgtgataactacgctggatgttcatctcagcaggctcttcaagtcaacaatctatgtcaaggtacagcaagcgggattctctgcaccaactcctatccaagctcaatcatggccaattgctcttaggaatcgtgatattgtagctgtggcgaagacaggttccggaaaaacactgggttatctcattccagggtttatccttcttaagcgccttcaacataattcaagggatggtccaacggtattagtgctttctccaacaagggaattggcaacacaaatccaagatgaagcgaaaaagtttgggagatcgtcaagaatatcgtctgtttgtttatatggaggtgctcctaaaggtcctcagctaagagatctagagcgtggtgcagacattgtggttgcaactcctggaagattgaatgacattttagaaatgcgaagagtgagcctacatcaagtatcttatcttgttcttgatgaggctgaccgcatgcttgatatgggttttgagccacaaataagaaaaattgtgaaacaagtacaacccaaacgacagactcttatgttcactgccacttggccaaaagaggtgaggaaaatagcctcagatttgctgtccaatccagtccaagttaacattgggaacactgatcaactggttgccaataagtcaatcactcagtatgtggatgttatcacacctccggagaaatcgaggcggcttgatcaaatcctaaggtcacaggaacctggatcgaaaatcataatattttgctccacaaagaggatgtgtgatcagctggctcgaaacctagcacggcagtatggtgcttctgctattcatggtgataaatcacaagccgagagggattctgtgttgagtgaatttcgaagtggcagatgccctattcttgttgctactgatgtggctgcccgaggcttggacataaaggatatcagagttgtggtcaactacgatttcccaacaggtgttgaggattacgtccatagaattgggagaacaggacgggctggagcgactggagttgcctatacattcttctgtgatcaggattcaaagtatgcttcagatctcgtgaagattttggagggtgcaaaccagtctgtttcgcaacagttgagagatatggtctcccgtggagggtatggtggaaggtcacggcgctgggcatcttcagatgactcttatggtggtcgaggatatgattcaggctatacttcaaggtcgactgacaactataacagtggttatggcagtcagtctgggaatggttctagctttcatagtagcttccataacagcaacagtggcaatcagtttggcgatacttctggcttccaaaccagctttcataacagcagcagcaacaatcaaaccagtgacaatccaagctttcatgccagcaacaacgatcaacctggtgatggtctcagctttcatgccaggttctatagctcttctcgaggcagcgatcagagcagaacaaacaatgctggctttcgtgatagaagtaggagtcctccaagcaatcgcaaccatgaagatcctgggtccaaggctgttggtgtctccaactggtaa

SEQ ID NO: 77491 - protein, 758 aa, Oryza sativa
MASAAAAAATARGPRYAPPDPTLPKPWRGLIDGNTGYLYFWNPETKAVQYDRPTAPPPSSPPAQQPPERPRNSDPAESQAQAGASRTQNAAPADDRARNDHLNDHFERRTEAAGSHAQNVPFTEQNTRSNPSSQPCSAAGVYPAQNVFSEAASGDRTSPEAYRAKHEITIVGNEAPAPFMTFQSTGFPPEILREVSAHNLHDYLMHFLVSFSKEIRRSLCVHTTYVITTLDVHLSRLFKSTIYVKVQQAGFSAPTPIQAQSWPIALRNRDIVAVAKTGSGKTLGYLIPGFILLKRLQHNSRDGPTVLVLSPTRELATQIQDEAKKFGRSSRISSVCLYGGAPKGPQLRDLERGADIVVATPGRLNDILEMRRVSLHQVSYLVLDEADRMLDMGFEPQIRKIVKQVQPKRQTLMFTATWPKEVRKIASDLLSNPVQVNIGNTDQLVANKSITQYVDVITPPEKSRRLDQILRSQEPGSKIIIFCSTKRMCDQLARNLARQYGASAIHGDKSQAERDSVLSEFRSGRCPILVATDVAARGLDIKDIRVVVNYDFPTGVEDYVHRIGRTGRAGATGVAYTFFCDQDSKYASDLVKILEGANQSVSQQLRDMVSRGGYGGRSRRWASSDDSYGGRGYDSGYTSRSTDNYNSGYGSQSGNGSSFHSSFHNSNSGNQFGDTSGFQTSFHNSSSNNQTSDNPSFHASNNDQPGDGLSFHARFYSSSRGSDQSRTNNAGFRDRSRSPPSNRNHEDPGSKAVGVSNW

SEQ ID NO: 77492 - DNA, 2127 bp, Oryza sativa
  CDS (1)..(2127)
atggcgtcggcggcggcggcggcggcgacggcgagggggccgcggtacgcgccgccagatccgacgctgcccaagccgtggagggggctcatcgacggcaacaccgggtacctctacttctggaacccggagaccaaggccgtgcagtacgaccgccccacggcgccgccgccctcctcccccccggcgcagcagcctccggagaggcctaggaacagcgatcctgctgagtcgcaggcgcaggctggagcgagccgaacgcagaatgctgctcctgctgatgatagggcaaggaatgatcatttgaatgatcatttcgagcggcgcacggaagcggcgggaagtcatgcgcagaacgtgcctttcactgagcaaaatactaggagcaacccttcttcgcagccgtgctctgcagctggagtataccctgcacagaatgtattttcagaggctgccagtggagaccgcacctcaccagaagcgtatcgtgctaagcacgagatcactattgtcggaaatgaggctccagctccattcatgacatttcagtccacaggtttccctccagagattctaagggaggtacagcaagcgggattctctgcaccaactcctatccaagctcaatcatggccaattgctcttaggaatcgtgatattgtagctgtggcgaagacaggttccggaaaaacactgggttatctcattccagggtttatccttcttaagcgccttcaacataattcaagggatggtccaacggtattagtgctttctccaacaagggaattggcaacacaaatccaagatgaagcgaaaaagtttgggagatcgtcaagaatatcgtctgtttgtttatatggaggtgctcctaaaggtcctcagctaagagatctagagcgtggtgcagacattgtggttgcaactcctggaagattgaatgacattttagaaatgcgaagagtgagcctacatcaagtatcttatcttgttcttgatgaggctgaccgcatgcttgatatgggttttgagccacaaataagaaaaattgtgaaacaagtacaacccaaacgacagactcttatgttcactgccacttggccaaaagaggtgaggaaaatagcctcagatttgctgtccaatccagtccaagttaacattgggaacactgatcaactggttgccaataagtcaatcactcagtatgtggatgttatcacacctccggagaaatcgaggcggcttgatcaaatcctaaggtcacaggaacctggatcgaaaatcataatattttgctccacaaagaggatgtgtgatcagctggctcgaaacctagcacggcagtatggtgcttctgctattcatggtgataaatcacaagccgagagggattctgtgttgagtgaatttcgaagtggcagatgccctattcttgttgctactgatgtggctgcccgaggcttggacataaaggatatcagagttgtggtcaactacgatttcccaacaggtgttgaggattacgtccatagaattgggagaacaggacgggctggagcgactggagttgcctatacattcttctgtgatcaggattcaaagtatgcttcagatctcgtgaagattttggagggtgcaaaccagtctgtttcgcaacagttgagagatatggtctcccgtggagggtatggtggaaggtcacggcgctgggcatcttcagatgactcttatggtggtcgaggatatgattcaggctatacttcaaggtcgactgacaactataacagtggttatggcagtcagtctgggaatggttctagctttcatagtagcttccataacagcaacagtggcaatcagtttggcgatacttctggcttccaaaccagctttcataacagcagcagcaacaatcaaaccagtgacaatccaagctttcatgccagcagcaacaacgatcaacctggtgatggtctcagctttcatgccaggttctatagctcttctcgaggcagcgatcagagcagaacaaacaatgctggctttcgtgatagaagtaggagtcctccaagcaatcgcaaccatgaagatcctgggtccaaggctgttggtgtctccaactggtaa

SEQ ID NO: 77493 - protein, 708 aa, Oryza sativa
MASAAAAAATARGPRYAPPDPTLPKPWRGLIDGNTGYLYFWNPETKAVQYDRPTAPPPSSPPAQQPPERPRNSDPAESQAQAGASRTQNAAPADDRARNDHLNDHFERRTEAAGSHAQNVPFTEQNTRSNPSSQPCSAAGVYPAQNVFSEAASGDRTSPEAYRAKHEITIVGNEAPAPFMTFQSTGFPPEILREVQQAGFSAPTPIQAQSWPIALRNRDIVAVAKTGSGKTLGYLIPGFILLKRLQHNSRDGPTVLVLSPTRELATQIQDEAKKFGRSSRISSVCLYGGAPKGPQLRDLERGADIVVATPGRLNDILEMRRVSLHQVSYLVLDEADRMLDMGFEPQIRKIVKQVQPKRQTLMFTATWPKEVRKIASDLLSNPVQVNIGNTDQLVANKSITQYVDVITPPEKSRRLDQILRSQEPGSKIIIFCSTKRMCDQLARNLARQYGASAIHGDKSQAERDSVLSEFRSGRCPILVATDVAARGLDIKDIRVVVNYDFPTGVEDYVHRIGRTGRAGATGVAYTFFCDQDSKYASDLVKILEGANQSVSQQLRDMVSRGGYGGRSRRWASSDDSYGGRGYDSGYTSRSTDNYNSGYGSQSGNGSSFHSSFHNSNSGNQFGDTSGFQTSFHNSSSNNQTSDNPSFHASSNNDQPGDGLSFHARFYSSSRGSDQSRTNNAGFRDRSRSPPSNRNHEDPGSKAVGVSNW

SEQ ID NO: 77494 - DNA, 2379 bp, Oryza sativa; identical to SEQ ID NO: 65938
  CDS (1)..(2379)

SEQ ID NO: 77495 - protein, 792 aa, Oryza sativa; identical to SEQ ID NO: 65939

SEQ ID NO: 77496 - DNA, 1956 bp, Oryza sativa
  CDS (1)..(1956)
atgctgttagagccttttctacttcaccttgcgcatgcaagtcaacacatcttggatgcactttcttttatacaacgtgctggattctcaagtccaacgccaatccaagctcagtcatggccaattgccttgcagtgtcaagatgttgtagctattgcaaagacaggatctggaaaaactcttgggtatctacttcctggatttatgcatattaaacgcttgcaaaacaacccaaggtctggtccaacagtgctagttttggcaccgacaagggagcttgcaactcagattttggaagaagctgtgaaatttggcagatcatcaagaatttcttccacgtgtctatatggtggtgctccaaaaggcccccagctaagagatttggatagaggggtcgatgtcgttgttgctacaccaggaaggttgaatgacatcctagaaatgcgaaggataagccttaagcaagtgtcgtaccttgttctagatgaagctgaccgtatgttggacatgggatttgaaccacaaattcggaagatagtgaaagaaattcctcctcgtcggcaaaccctcatgtacactgctacttggcctaaggaagtccgacgaattgcagaggatcttcttgttcaccctgtccaggtgaccattggaagtgttgatgagcttgttgctaatagtgctattactcagaatgtggagctgatcacaccgtccgaaaagcttcgccgtctggagcaaattttgcgatcccaggattcaggttcgaaggtactaatattctgtaccactaagagaatgtgcgaccaacttgcaaggacacttactaggcaatttggagcttctgccattcatggtgataagtcccaaagtgaaagagagaaggtcctgagccattttagatctgggcgatctcctattttggttgcaacagatgttgctgcacgaggcttagacatcaaagatatcagggttgtgatcaattatgatttccccactggcattgaagattatgttcaccggattggcaggactggaagggctggtgccactggtgtggcctatacgtttttctgtgaccaggattcaaaatatgctgctgatcttattaaaattctggaaggcgcaaaccaacgtgtgcctcgtgacttggcggacatggcctctcggggtgggcgtggtggtaggaagcgtaaccggtgggcaacccgctctgataggggtggttcgcattctgaactggattctaggtatggtggaagagatggtctgtcagggtcttctggcagattggatagtagtcgcagtagtcgcaggcatgactatggtgatgatggacggtctcgcaggtctgggagaggtcgcagtaggagccgtagcagaagtgacagtgataggtatagccgaagtcctaagaggtcacgccgtcatagccgtagcaggaccaggagtcggagccgaagcaggagcaggagctacactaggaaccgtcgtgctagccgcagcaggagccgtagccctggtgctagccgtaggcatgaaagaagcgctactggctctgggtctgcactgccagactctgggcacggtgagcgcaaaagaacaccagaagctgacccatcaagaaaccatacaaaccactcagacccgaaagatgaccgacacccagaggatgggaaggtgggaaaggttgatctcgatcggtcgcctactccacaagacaagtctggcccatatagtcctgcttacaatggaaaaaccagtcgctcagtgagccctggtaatcaggtggaaggaaacaacaaagctgcggaggtttctaagaatcctgatccttcatcgccaccccatcatggtaagaccagggaggacgaagaggaaggtatgatagatgaagatggagagatagctgatgatcctcgggcaaatgcaaccgtgcagaatggcggtgataattga

SEQ ID NO: 77497 - protein, 651 aa, Oryza sativa
MLLEPFLLHLAHASQHILDALSFIQRAGFSSPTPIQAQSWPIALQCQDVVAIAKTGSGKTLGYLLPGFMHIKRLQNNPRSGPTVLVLAPTRELATQILEEAVKFGRSSRISSTCLYGGAPKGPQLRDLDRGVDVVVATPGRLNDILEMRRISLKQVSYLVLDEADRMLDMGFEPQIRKIVKEIPPRRQTLMYTATWPKEVRRIAEDLLVHPVQVTIGSVDELVANSAITQNVELITPSEKLRRLEQILRSQDSGSKVLIFCTTKRMCDQLARTLTRQFGASAIHGDKSQSEREKVLSHFRSGRSPILVATDVAARGLDIKDIRVVINYDFPTGIEDYVHRIGRTGRAGATGVAYTFFCDQDSKYAADLIKILEGANQRVPRDLADMASRGGRGGRKRNRWATRSDRGGSHSELDSRYGGRDGLSGSSGRLDSSRSSRRHDYGDDGRSRRSGRGRSRSRSRSDSDRYSRSPKRSRRHSRSRTRSRSRSRSRSYTRNRRASRSRSRSPGASRRHERSATGSGSALPDSGHGERKRTPEADPSRNHTNHSDPKDDRHPEDGKVGKVDLDRSPTPQDKSGPYSPAYNGKTSRSVSPGNQVEGNNKAAEVSKNPDPSSPPHHGKTREDEEEGMIDEDGEIADDPRANATVQNGGDN

SEQ ID NO: 77498 - DNA, 1785 bp, Oryza sativa; identical to SEQ ID NO: 65918
  CDS (1)..(1785)

SEQ ID NO: 77499 - protein, 594 aa, Oryza sativa; identical to SEQ ID NO: 65919

SEQ ID NO: 77500 - DNA, 1611 bp, Oryza sativa
  CDS (1)..(1611)
atgatgtctggcggccccagcgacgcgacccaccggaagcggcggcggaggcgggggccgaagggctcgggggtcgacgggccctcgatccccagggcggtcacgaccaacggagcaggtcccgaagaggaggaggtggtggaagggaaggctatggagttggatgcggggatgagcgctgccgaggtgggaggcgtggttggctcgcatctcagcgagacacgatttgatcaatgtcctgtttctccgttgtcattgaaagcaatcaaagatgctggatatgaaaagatgacccaggtgcaggaggcaactctgccaataatccttcaaggtgaagatgttcttgcaaaagcaaagacagggacaggaaaaactgttgcctttttgcttccagccattgaacttctctctacattacctcgttctccatctataaatttgcttgtgatatgccccacaagggagctagcaaaccaagtggctgctgaggccaggaagcttctcaagtatcatcgctcactgggtgtgcaggttgtaattggcggcacaaaattacctcaagaacaacgaagcatgcaatctaatccttgtcagattcttgttgctacaccgggaaggcttaaggatcatcttgagaatacacctggtttttccaaccgaattaaaggggtgaaagttcttgttcttgatgaagctgaccgcctattggatatgggatttagaagagacattgagaaaattattgctttcattcctaaagaacgacagacacttcttttttctgctactgttccagaagaggttcgtcaaatttcgcacattgcaatgaagaggggttacaagttcattaatactgttaaagagggtgatgaggagacacattcacaggtaagtcagatgtacatggttgcaccacttgacctgcacttctctatattgtacaatgtactgaagaagcatatcgcagaagatgcagactacaaagtgattgtattctgtactactgcaatggtcaccaaacttgttgctgaagttctttcccagctgaaactgaatataagagagatccattcgagaaagtcgcaatcagcaagaactaaggtctcagatgaatttaggaaatcaaagggtctgatattagtgagttctgatgtatctgctcgtggtgttgattatcctgatgtcacccttgtcatacaggttgggctgccagctgatagagaacagtatatacatagacttggtagaactggacggaaaggcaaagatgggctaggtctcttactgttggctccctgggaaacatactttctgaatagcgttcaggatttgtctgtatcacaagctgtggtacctacaattgattcgagcattcagacaggagtcaaagatgcactcggaagagtggagacaaagagcaaggaatcagcctaccaggcatggctagggtactacaactcaaacaaggctattagtcgagacaaatccagacttgttaggctcgcagaagagttcagccagagcatgggtcttgcaattccgcctgccatacccaaactcattcttcgaaaaatgggccttaacaatgttcctgggctgcgatctgtgtaa

SEQ ID NO: 77501 - protein, 536 aa, Oryza sativa
MMSGGPSDATHRKRRRRRGPKGSGVDGPSIPRAVTTNGAGPEEEEVVEGKAMELDAGMSAAEVGGVVGSHLSETRFDQCPVSPLSLKAIKDAGYEKMTQVQEATLPIILQGEDVLAKAKTGTGKTVAFLLPAIELLSTLPRSPSINLLVICPTRELANQVAAEARKLLKYHRSLGVQVVIGGTKLPQEQRSMQSNPCQILVATPGRLKDHLENTPGFSNRIKGVKVLVLDEADRLLDMGFRRDIEKIIAFIPKERQTLLFSATVPEEVRQISHIAMKRGYKFINTVKEGDEETHSQVSQMYMVAPLDLHFSILYNVLKKHIAEDADYKVIVFCTTAMVTKLVAEVLSQLKLNIREIHSRKSQSARTKVSDEFRKSKGLILVSSDVSARGVDYPDVTLVIQVGLPADREQYIHRLGRTGRKGKDGLGLLLLAPWETYFLNSVQDLSVSQAVVPTIDSSIQTGVKDALGRVETKSKESAYQAWLGYYNSNKAISRDKSRLVRLAEEFSQSMGLAIPPAIPKLILRKMGLNNVPGLRSV

SEQ ID NO: 77502 - DNA, 2001 bp, Oryza sativa
  CDS (1)..(2001)
atgcgtacgagccgcgtcgcgtctccccccccctcccccaaggaccatgacacgtgggccatagcaaccgacctagcccggccccacacgcttcgcatccttacccatcaaaaccaaaccacgggcctcctcaccccgccgcacgccgccttcctcccagatccaaacctccctcgtcgtctccccttcccctcctcctcctcgacccccacggcggcggcgccaccggactccggcgaaccctcgcgcgcgcgcgcacgcaccgagacgtaccgtaccggcgacatgaatccctacgacctccgctacgccgacccttcctcctaccgcgacaggcgcagcgaccttgccggggctcccgtgctcgccgcgtcggcccccgcggccgccaacccctacgccgccgcgtacgcgcccgcgccggctgctcccgtggcccccgctggtggcgacttctcgcgcttcggcgggagaggccgtggtggaggcgcgggcggcggtgggtggggtagaggtggtggtggtggtggtggcgctggcggataccgaggcggcggtgggagaggaggtggaagggacgcgctggactcgctctccttgccgaagcctgacttccggagccttatacccttcgagaagaacttctatgtggagtgccccgccgtgcaggccatgtcagacatggatgtgtcgcagtatcgtcgccagcgtgatatcactgttgaaggccacgacgtgcccaagccggttcgctacttccaggaggccaacttcccagattactgtatgcaagcaatagccaagagtggattcgtagagcccacgcctattcagtcacaaggttggccaatggctttgaagggcagggacatgatcggtatcgcacaaactggctctgggaaaacactatcttaccttctccctgggttggttcatgttggtgcacagcctcgactagaacaaggtgatggcccaattgttctgatccttgctcctacaagagaactggctgttcaaatacaacaagaatctggcaaatttggatcatactcaagaactagaagcacttgtatctatggtggagcacctaagggaccacaaatacgtgaccttaggagaggggttgagattgtcattgcaacacctggtcggttgatcgatatgctggaaggtggtcacactaacctgcgaagagtaacatacctcgtcctggatgaggctgaccgcatgcttgacatgggttttgagccccagattcgtaaaatagtggcacagatccggccagacaggcaaaccttgtattggagtgccacttggccaagagaagtagaatccttggctagacaatttctgcagaacccatacaaggtaatcataggatcacctgatctgaaagctaatcattccatacagcaaattattgaggtcatatctgaacacgaaaagtatcccagactcagtaaacttttatctgatctaatggatggaagcagaatcttgatatttttccaaactaaaaaggactgtgacaaggtcactcgtcaacttagaatggatggatggccagcattatctattcatggtgacaaagctcaagcagaaagggactatgttctggcagagttcaagagtgggaaaagtcctataatggctgccacagatgtagcggcacgtggtcttgatgtcaaggatattaagtgtgtgataaattttgattttccaacaactcttgaagattatattcacagaataggtcgaactggccgcgctggtgctagtggaactgcattcacctttttcacactctccaatgcaaaattctccaggaatcttgttaagatcttgagggaagctggccaggttgtgaatccagcgctagaatctatggctaaatctgccagttctatgggaggaggcaatttccggtcaagggggcgtggtgggtttggtaacagatctggctcaaatagcattcccataagaggaagaaggccatactga

SEQ ID NO: 77503 - protein, 666 aa, Oryza sativa
MRTSRVASPPPSPKDHDTWAIATDLARPHTLRILTHQNQTTGLLTPPHAAFLPDPNLPRRLPFPSSSSTPTAAAPPDSGEPSRARARTETYRTGDMNPYDLRYADPSSYRDRRSDLAGAPVLAASAPAAANPYAAAYAPAPAAPVAPAGGDFSRFGGRGRGGGAGGGGWGRGGGGGGGAGGYRGGGGRGGGRDALDSLSLPKPDFRSLIPFEKNFYVECPAVQAMSDMDVSQYRRQRDITVEGHDVPKPVRYFQEANFPDYCMQAIAKSGFVEPTPIQSQGWPMALKGRDMIGIAQTGSGKTLSYLLPGLVHVGAQPRLEQGDGPIVLILAPTRELAVQIQQESGKFGSYSRTRSTCIYGGAPKGPQIRDLRRGVEIVIATPGRLIDMLEGGHTNLRRVTYLVLDEADRMLDMGFEPQIRKIVAQIRPDRQTLYWSATWPREVESLARQFLQNPYKVIIGSPDLKANHSIQQIIEVISEHEKYPRLSKLLSDLMDGSRILIFFQTKKDCDKVTRQLRMDGWPALSIHGDKAQAERDYVLAEFKSGKSPIMAATDVAARGLDVKDIKCVINFDFPTTLEDYIHRIGRTGRAGASGTAFTFFTLSNAKFSRNLVKILREAGQVVNPALESMAKSASSMGGGNFRSRGRGGFGNRSGSNSIPIRGRRPY

SEQ ID NO: 77504 - DNA, 1884 bp, Oryza sativa
  CDS (1)..(1884)
atggccgccgccacggcctcctcgccggcgaccgccgccgccgccaactccgatgacgaagacaactacgaggagtacatccccgtcgccaagcgccgggccatggaggccgaccgcctccgccgcctccgcctctccaagcccgcgcccccatcctcctccgccgcggaggccgcctcggatctcccgcctccccctcccccaccgccgaaccagccctcagccggcggtggcggtggcggcctcgaagcctccgcgaagcccagcctcctcgtcaaggcgacgcagctcaagcgggccgcgccggaggtgacccacacggagcagctcatcatgcaggagaaggagatgatcgagcacctctccgaccgcaagacgctcatgtcggtgcgcgagctcgccaaggggatcacctactccgacccgctcaagacggggtggaagccgccgctccgcctccgccgcatgccgcgcgccaaggccgacgagctccgccgcaagtggcacatcctcgtggacggggacgacgtgccgccgcccgctcgggacttccgcgacctccgcctgcccgagcccatgctgcgcaagctccgcgagaagggcatcgtccagcccactcccatccaggtgcagggattgcccgtggtgctctccgggcgcgacatgattggcattgccttcacagggtccgggaagacgttggtgtttgtgctgccgctcatcatggtggcattacaggaggagatgatgatgccaatcgtgccgggtgaagggccatttgggatgatcatctgtccatcgcgagagctggccaagcaaacgtacgatgtcattgagcagttccttgttccacttaaggaggctgggtacccggagatacgcccgttgctttgcattgggggtgtcgatatgagggcgcagctggatgtggtcaagaagggagtacatattgtggtggctacacctggccgactcaaggatttacttgccaagaaaaagatgaacctcgacaattgcaggtacttgaccttggatgaagctgataggcttgtcgatcttgggtttgaggatgatatccgtgaggtttttgaccatttcaaggcacaaaggcagacacttctattttctgccactatgccgaagaagattcaaaactttgcgaagagtgcccttgtgaaacctgttattgtgaatgttggtagagctggtgcggcaaatctggatgtcatccaagaagttgagtatgtcaaggaggatgccagaattatatatctcctggaatgcctccagaagactccacctccagttcttgtcttttgtgaaaacaaagctgatgtcgactatatccatgagtatcttcttctgaagggtgtagaggctgttgcaatccatggaggaaaggatcaagaggaaagagagaatgcaatcgagttcttcaagaatggaaagaaggatgttttggtggctactgatgttgcctcgaaaggtcttgatttccctgatatccagcatgtgattaactatgatatgcctgctgaaatagaaaactatgttcaccggattggtcgaactggtcgatgtgggaaaactggaatagcaacaaccttcataaacaagaatcaaacggagactacccttcttgaccttaagcacttgcttaaggaagctaagcaaagaataccgccagtgttggctgagctcaatgacccattggaagatgaggaaaccatggccaaggagagcggtgttaagggatgtgcatactgtggtggtcttggccatcgtgttaccgactgtccaaagctggagcaccagaagtccatggcgatcgcgggctctagaagagattactatggcggtggaggctacagaggagaaatatga

SEQ ID NO: 77505 - protein, 627 aa, Oryza sativa
MAAATASSPATAAAANSDDEDNYEEYIPVAKRRAMEADRLRRLRLSKPAPPSSSAAEAASDLPPPPPPPPNQPSAGGGGGGLEASAKPSLLVKATQLKRAAPEVTHTEQLIMQEKEMIEHLSDRKTLMSVRELAKGITYSDPLKTGWKPPLRLRRMPRAKADELRRKWHILVDGDDVPPPARDFRDLRLPEPMLRKLREKGIVQPTPIQVQGLPVVLSGRDMIGIAFTGSGKTLVFVLPLIMVALQEEMMMPIVPGEGPFGMIICPSRELAKQTYDVIEQFLVPLKEAGYPEIRPLLCIGGVDMRAQLDVVKKGVHIVVATPGRLKDLLAKKKMNLDNCRYLTLDEADRLVDLGFEDDIREVFDHFKAQRQTLLFSATMPKKIQNFAKSALVKPVIVNVGRAGAANLDVIQEVEYVKEDARIIYLLECLQKTPPPVLVFCENKADVDYIHEYLLLKGVEAVAIHGGKDQEERENAIEFFKNGKKDVLVATDVASKGLDFPDIQHVINYDMPAEIENYVHRIGRTGRCGKTGIATTFINKNQTETTLLDLKHLLKEAKQRIPPVLAELNDPLEDEETMAKESGVKGCAYCGGLGHRVTDCPKLEHQKSMAIAGSRRDYYGGGGYRGEI

SEQ ID NO: 77506 - DNA, 2313 bp, Oryza sativa
  CDS (1)..(2313)
atgtcgaagcggcccaagctcgggggattcagcatccctcgccccacttcctacagcttcgagcgctcccagcctccccagcgcctctacgtccccgccgacgaccccgacctcgacgacatcgccttctccgacgacgcggcggccccgtcggacgcgccccccgcggggggaggcggggcggcgggggatgaggaggagatcgacccgctcgacgccttcatggccgagatccaggaggagattcgcgcgccgccgccggcgcccaagcccgaggcgctccggcgcgcggactccgacgacgaggacgaccccgtggagagcttcctccgggccaagaaggattccgggctcgcgctcgccgccgacgccatgcacgccgggtacgactccgacgaggaggtctacgctgcggccaaggccgtggacgccggcatgatggagtacgactccgacgacaaccccatagtggtggacaagaagaagatcgagcctattccgccgctcgaccattccaccatcgagtatgaacccttcaacaaggatttctacgaggagaagccctcggtttcagggatgagtgagcaagaggtggctgattatatgaaaagtttggcaattcgagtttcaggttttgatgtgccaagaccaatcaaaagctttgcagattgtgggtttcctgtacaactaatgaatgccattgccaagcagggttatgaaaaaccaactacaatccagtgccaggctttaccaattgtactttcaggcagagatatcattggtattgctaaaactggttctggcaaaactgcagcttttgtactccccatgattgttcacattatggatcagcctgagcttgagaaagaagaagggccaataggtgtggtatgtgctccaacaagagaattggcacatcagatataccttgaagctaagaagtttgccaaaccttacaatcttcgagttgctgctgtatatggtggggtttccaaatttgatcaattcaaagaactgaaggcaggctgtgaaatagtcattgctaccccagggagattaatagacttgcttaagatgaaggcattgaagatgtttagggcaacttatttggttcttgatgaagctgatcgcatgttcgatcttggatttgagcctcagataagatccatcgttggtcaaattagaccagaccgacaaaccttgcttttctcagcaacaatgccatacaaagtggaacgtttggctagagaaattttgactgaccctattagagttacagtaggtcaggttggcagtgctaatgaagacattaagcaagttgtaaatgtactcccttctgatgctgagaagatgccttggcttctggaaaaacttcctgggatgattgatgatggagacgttcttgtatttgcagctaagaaggccagagttgatgagattgagagccagttaaatcagagaggtttcagaattgcagcacttcatggtgacaaggatcaagcttctcgcatggagacattgcagaagttcaaatccggggtttatcacgtcctagtagcaactgatgttgctgcacgtggtctggacattaagtcgattaaaacagttgttaatttcgatattgcaaaagaaatggatatgcatattcaccggataggaagaactggccgtgctggtgataaagatggaactgcatatactctgattacacagaaggaggtgcgctttgcaggtgaattggttcattgtttgattgctgcaggacaggatgtgccaaatgaactaatggatctggcaatgaaggatggaagattcagagcaaaccgggattcaagaaaaggtgggaagaaaagtggcaaaggaaaaggtggaggaggcgggggtggcggcggtagcggtgcccgtggtcgtgggcgtggtgtacgtggggttgactttggccttggcatagggtacaatgctgaatcaggatcggtgcctgctccaagatctgctgcattaaattcattgaagacagggatgatgcaaaattttaagagcagctttgtctctgcctcttcatcaaatacaccaagcaacagcgcaccttcaagaggtgctccttcctcctttgtgagaccggcactccgtggttttgtttctggtggcaccataggaggagacgcaaaccaagcacgggcagtactgcctgcgccctcctttgtccctgcttccagacctgcagaaaacactgttgaaaatgcgaacccaaaccctgaaagctcgagggatcgcacgagggagagaaagcggccgtcggggtgggatcgctag

SEQ ID NO: 77507 - protein, 770 aa, Oryza sativa
MSKRPKLGGFSIPRPTSYSFERSQPPQRLYVPADDPDLDDIAFSDDAAAPSDAPPAGGGGAAGDEEEIDPLDAFMAEIQEEIRAPPPAPKPEALRRADSDDEDDPVESFLRAKKDSGLALAADAMHAGYDSDEEVYAAAKAVDAGMMEYDSDDNPIVVDKKKIEPIPPLDHSTIEYEPFNKDFYEEKPSVSGMSEQEVADYMKSLAIRVSGFDVPRPIKSFADCGFPVQLMNAIAKQGYEKPTTIQCQALPIVLSGRDIIGIAKTGSGKTAAFVLPMIVHIMDQPELEKEEGPIGVVCAPTRELAHQIYLEAKKFAKPYNLRVAAVYGGVSKFDQFKELKAGCEIVIATPGRLIDLLKMKALKMFRATYLVLDEADRMFDLGFEPQIRSIVGQIRPDRQTLLFSATMPYKVERLAREILTDPIRVTVGQVGSANEDIKQVVNVLPSDAEKMPWLLEKLPGMIDDGDVLVFAAKKARVDEIESQLNQRGFRIAALHGDKDQASRMETLQKFKSGVYHVLVATDVAARGLDIKSIKTVVNFDIAKEMDMHIHRIGRTGRAGDKDGTAYTLITQKEVRFAGELVHCLIAAGQDVPNELMDLAMKDGRFRANRDSRKGGKKSGKGKGGGGGGGGGSGARGRGRGVRGVDFGLGIGYNAESGSVPAPRSAALNSLKTGMMQNFKSSFVSASSSNTPSNSAPSRGAPSSFVRPALRGFVSGGTIGGDANQARAVLPAPSFVPASRPAENTVENANPNPESSRDRTRERKRPSGWDR

SEQ ID NO: 77508 - DNA, 1419 bp, Oryza sativa; identical to SEQ ID NO: 65902
  CDS (1)..(1419)

SEQ ID NO: 77509 - protein, 472 aa, Oryza sativa; identical to SEQ ID NO: 65903

SEQ ID NO: 77510 - DNA, 2211 bp, Oryza sativa
  CDS (1)..(2211)
atgaagcgcgccgccgacgggatggagaagcccaagttcctcacgcgggaggagcgggagaagctggcgctcgagcgccgccaggccgccgtcaccgaccagcgccgctccgccctcgacctgctccagtcgctcccccgcccccctccgccgccgccgcctcccctttccaacccccctcgcgactcctcctcctcccaccaccgcgactcctccgaccgtgaccgtgaccgtgaccgggaccgggatcgggacagggaccgggaccgtgaccgggagcgccgccgcgacgacgactcccgccgcgaccgagatcgggatcgggaccgcgaccgaggcgactcctcccgccgcgaccgcgacagggagcgcggtgaccgcgaccgcgaccgtgaccgggagcgcggggacagggacagggagcgaggggacagggagaaagatcggctggagaagatggcggagagggagcgggagaaggagctggacgcgatcaaggagcagtacctgggttccaagaagcccaagaagcgggtcatcaagccgtctgagaagttccgcttctcgttcgactgggagaacacggaggacaccagccgcgacatgaactcgctctaccagtcgccccacgaggcccgcctgctctacggccggggattcctggctggcattgatcgccgcgagcagaagaaggtggccgccgcgcatgagaaggagacccgtgccgagcagcggcgcaaggccggtctggatgaccgccctgaggacgacgcagttgataagaaggaggctgatgctgcagcgaagtatgatgccttcgacatgcgcgtggacaggcactggactcagaagtctcttgatgagatgacggagcgggattggcgtatattccgtgaggacttcaatatatcctataagggttctaaggtaccccgtcccatgcggaagtggtctgagagcaagcttggtactgagctgcttcgtgctgtcgagaaagctgggtacaaggaaccttcgccgattcagatggcttccattccacttggtctccagcagcgtgatgttattggtattgctgaaacaggctctggcaagactgctgcttttgtgctccctatgctttcgtacattacccgcctcccacccataagtgaggaaaatgaggctgagggtccttatgctgttgttatggcacctactcgtgagcttgctcaacagattgaggaagagactgtgaaatttgcgacctatcttggcattaaggttgtgtctatcgttggtggtcaatccattgaagagcagggttttaagattaggcagggctgtgaggttgttattgcaactcctggtcggcttcttgattgcttggagaggaggtatgctgtgctcaaccagtgcaactatgtggttctggatgaggctgataggatgattgatatgggcttcgagccgcaggttgttggagtccttgatgctatgccatcgagtaacttgaaacctgagaatgaggatgaggagcttgatgcaaaaacgatctataggactacctatatgttcagcgccactatgccacctgctgtggagcggcttgctaggaagtacctgcggaacccagtcgttgtcacaattggtacagctggcaaggccacagatctcatcacacagaacgtgatcatgacgaaggagtcagagaagatgtcaaggctccagaagatactcacagatcttggggataagccagccattgtgttctgcaacacaaagaaatcagcagatgctcgtgcgaaggatctagacaaggcaggcttccgcgtcacaacactacatggtgggaagtcacaggagcagagagagacgagccttgatggatttagaaaccggcggttcactgttcttgtggcaactgatgttgccgggcgtggtattgatattcccgatgttgctcatgtcatcaactatgagatgcctagttcaatcgatacatacacacatcgtattggaagaactggacgtgcaggaaagaagggattggcaacttcgtttttaactctggagaacactgacattttctttgatctgaaacagatgcttatacagagcaacagtcctgtgccacctgaacttgcaaggcatgaagcatccaaatttaagccaggctcagttcctgatagacctccaagacgaaatgacacagtctatgcaactcactga

SEQ ID NO: 77511 - protein, 736 aa, Oryza sativa
MKRAADGMEKPKFLTREEREKLALERRQAAVTDQRRSALDLLQSLPRPPPPPPPPLSNPPRDSSSSHHRDSSDRDRDRDRDRDRDRDRDRDRERRRDDDSRRDRDRDRDRDRGDSSRRDRDRERGDRDRDRDRERGDRDRERGDREKDRLEKMAEREREKELDAIKEQYLGSKKPKKRVIKPSEKFRFSFDWENTEDTSRDMNSLYQSPHEARLLYGRGFLAGIDRREQKKVAAAHEKETRAEQRRKAGLDDRPEDDAVDKKEADAAAKYDAFDMRVDRHWTQKSLDEMTERDWRIFREDFNISYKGSKVPRPMRKWSESKLGTELLRAVEKAGYKEPSPIQMASIPLGLQQRDVIGIAETGSGKTAAFVLPMLSYITRLPPISEENEAEGPYAVVMAPTRELAQQIEEETVKFATYLGIKVVSIVGGQSIEEQGFKIRQGCEVVIATPGRLLDCLERRYAVLNQCNYVVLDEADRMIDMGFEPQVVGVLDAMPSSNLKPENEDEELDAKTIYRTTYMFSATMPPAVERLARKYLRNPVVVTIGTAGKATDLITQNVIMTKESEKMSRLQKILTDLGDKPAIVFCNTKKSADARAKDLDKAGFRVTTLHGGKSQEQRETSLDGFRNRRFTVLVATDVAGRGIDIPDVAHVINYEMPSSIDTYTHRIGRTGRAGKKGLATSFLTLENTDIFFDLKQMLIQSNSPVPPELARHEASKFKPGSVPDRPPRRNDTVYATH

SEQ ID NO: 77512 - DNA, 1914 bp, Oryza sativa
  CDS (1)..(1914)
atgcgatcttcatgggctgattcagttgcgaacgccgaggaatcggcgcccgcgactggtgctgctcccacccctgttgctaatcaccagaactcacgccccactcgcagcgcatacgtgcctcctcacctccgtggccaggcaccaaccacaactgcagctccagctccagctccaggaccagctgctgtccagccctcagcttctgtacagccttctggttacgcagctattgttggtggctctcgctgggctggccctgccagtggtgatggtactggcgctgtaggtggcccacgccagagcgttggtggtcgtggtgggggtgggggtgggggtgggggttggaactcccgccctgggtgggaccggagagaccgtgaacctaacccttttgccaatagcgaggcagaggaagccacagaggttgattttgatacggcaaacactggcatcaactttgatgcctatgaggacattcctgtggaaacaagtggccatgatgtgccaccgccagtcaatactttcgcagagattgatttgggtgatgcgctgaatgagaacatacggaggtgcaaatatgtgaaacctacgccagtgcagcggtatgccattccaatctccattgcagggcgggatctcatggcttgtgctcagacagggtctggaaagacagccgccttttgtttccctatcattagtgggattatgagctctaggccaccacagaggccaaggggatcgaggactgcataccctcttgcattgattttatcccccactcgcgaattatcagtccaaattcatgaagaagcaaggaaattcgcataccagactggtgttagggtggttgttgcgtatggtggagcaccaatacatcaacagttgagggaattggaaaggggcgttgaaatccttgtggcaactcctggtcggttgatggatctgctggagagggctagagtatcactgcaaatggtgaagtacttagctcttgatgaagctgatcgaatgcttgacatggggttcgagccgcaaattcgtaaaattgttgagcagatggacatgccccctcgcggtgtgaggcagacaatgttgtttagtgctacttttccaaaagaaatacagcgcatggcttcagatttccttgcggactacatcttccttgctgtaggaagagttggttcaagtactgacttgattgctcaaagggtagagtttgtccttgaagcggataaaagaagttacctcatggatctcctccatgcccaaaaagcgaatggtactcatgggaagcaagcgcttactctggtctttgtggagacaaagaggggagctgatgctttggagaactggctttacacaaacgggttccctgcaacaagtattcatggcgaccgaacacaacaggaaagagagtacgcgcttagatcattcaagagtggagcaacacccatccttgttgcgactgatgtagctgcccgtggacttgacatacctcatgttgcccatgtcatcaattttgacctcccaaatgacatagatgactatgttcatcgtatcggacgaacaggacgagcagggaagtctggcttggcaactgcatttttcaacgagggcaatctatccctggcgaggccgttatgtgagctaatgcaggaagcaaaccaggaggttcctcaatggcttgaacgatactcggcccgttcttcgttcggaggtggtggtggcagaaaccgccgatcaggcggtgcccgttttggtggccgtgacttccgccgcgacaataggggtggaggcggcggcggttatggtggtggcggtggtggctatggaggcggcggttatggagggggcggtggatatggcggtggctatggtggtggtcaaggctcaactagttcgtgggactga

SEQ ID NO: 77513 - protein, 637 aa, Oryza sativa
MRSSWADSVANAEESAPATGAAPTPVANHQNSRPTRSAYVPPHLRGQAPTTTAAPAPAPGPAAVQPSASVQPSGYAAIVGGSRWAGPASGDGTGAVGGPRQSVGGRGGGGGGGGGWNSRPGWDRRDREPNPFANSEAEEATEVDFDTANTGINFDAYEDIPVETSGHDVPPPVNTFAEIDLGDALNENIRRCKYVKPTPVQRYAIPISIAGRDLMACAQTGSGKTAAFCFPIISGIMSSRPPQRPRGSRTAYPLALILSPTRELSVQIHEEARKFAYQTGVRVVVAYGGAPIHQQLRELERGVEILVATPGRLMDLLERARVSLQMVKYLALDEADRMLDMGFEPQIRKIVEQMDMPPRGVRQTMLFSATFPKEIQRMASDFLADYIFLAVGRVGSSTDLIAQRVEFVLEADKRSYLMDLLHAQKANGTHGKQALTLVFVETKRGADALENWLYTNGFPATSIHGDRTQQEREYALRSFKSGATPILVATDVAARGLDIPHVAHVINFDLPNDIDDYVHRIGRTGRAGKSGLATAFFNEGNLSLARPLCELMQEANQEVPQWLERYSARSSFGGGGGRNRRSGGARFGGRDFRRDNRGGGGGGYGGGGGGYGGGGYGGGGGYGGGYGGGQGSTSSWD

SEQ ID NO: 77514 - DNA, 1917 bp, Oryza sativa; identical to SEQ ID NO: 65956
  CDS (1)..(1917)

SEQ ID NO: 77515 - protein, 638 aa, Oryza sativa; identical to SEQ ID NO: 65957

SEQ ID NO: 77516 - DNA, 1539 bp, Oryza sativa
  CDS (1)..(1539)
atgggtcgcagtatgcttcccgagcagcaggaggacgtatcgaggaagagcaagaaggagaagaagagcaagaaagacaagaagcggaagctggaggcggaggccgaggtggtggtggtggaggcggctgcggccacgtccacggatgaagcgacgaagagcagcaagaagaagagggccaagggcgatctgggccaaggagaggaggcggagaacggcggtgggaaggtcgtggccgtgaccgggaagggctccgcggacgccaagtacgccccgctgtcatccttcgccgccaccgcgcttcctccccaggtgctcgactgctgcaaggggttcgagcgtccgtcgcccatccaagcgtacgcctggccttacctcctcgacggtcgtgacttcatcggcatcgccgccaccggatctgggaagacgattgcgtttggtgtgccggctctgatgcacgttaggaggaaaatgggggagaaatctgctaagaagggggtgccacgggtcctcgtgctatcgccaacgagagagcttgctcagcagatcgcagatgtactttgtgaagctggtgcaccatgtgggataagttcagtgtgcctttatggtggaacttccaaaggaccacaaatttctgcccttaaatctggagtggatattgtcatagggacacctggtcgtatgaaagaccttattgaaatgggtatttgtcgtcttaatgatgtttcttttgtggttctagatgaagctgatcgaatgctggatatgggttttgaacctgaagtcagagcaattttaagccaaactgcatctgtacgtcagacggttatgttcagtgctacatggcctcctgctgtccaccagctagcccaagagtttatggatccaaatccaataaaggttgttattggatcagaagatcttgctgctaaccatgatgtgatgcaaattgttgaagtattggatgacaggtcaagggattcaagattagttgctttgctcgataaataccataaagcacagagaaacagggtgttggtttttgtgttgtacaagagagaagctacgcgagtagaaacaatgttacaaagaaggggttggagtgctgtttctgttcatggagataaggcacagcatgacaggacgaaagctttatctttatttaaagaagggtcatgtcctttgatgattgccactgatgtcgcatcccgtggacttgatattccagatgtcgaagttgtcattaactatagctatcctttgactacagaggattatgtccacaggattgggaggaccggtcgtgctggcaagaaaggtgttgcacataccttcttcactcaagagaacaagggacttgctggtgaacttgtcaatgttttgcgggaggctggtcaggtcgttcctcctgcacttacaaaatttggcacacacgtcaagaaaaaggaatcgcaaatatatggatctcatttcaaagaaatcaaagcagatgctcctaaatcaacaaagattacgtttggtgattctgatgaggactag

SEQ ID NO: 77517 - protein, 512 aa, Oryza sativa
MGRSMLPEQQEDVSRKSKKEKKSKKDKKRKLEAEAEVVVVEAAAATSTDEATKSSKKKRAKGDLGQGEEAENGGGKVVAVTGKGSADAKYAPLSSFAATALPPQVLDCCKGFERPSPIQAYAWPYLLDGRDFIGIAATGSGKTIAFGVPALMHVRRKMGEKSAKKGVPRVLVLSPTRELAQQIADVLCEAGAPCGISSVCLYGGTSKGPQISALKSGVDIVIGTPGRMKDLIEMGICRLNDVSFVVLDEADRMLDMGFEPEVRAILSQTASVRQTVMFSATWPPAVHQLAQEFMDPNPIKVVIGSEDLAANHDVMQIVEVLDDRSRDSRLVALLDKYHKAQRNRVLVFVLYKREATRVETMLQRRGWSAVSVHGDKAQHDRTKALSLFKEGSCPLMIATDVASRGLDIPDVEVVINYSYPLTTEDYVHRIGRTGRAGKKGVAHTFFTQENKGLAGELVNVLREAGQVVPPALTKFGTHVKKKESQIYGSHFKEIKADAPKSTKITFGDSDED

SEQ ID NO: 77518 - DNA, 1872 bp, Oryza sativa
  CDS (1)..(1872)
atggcgaccccctcccgcacctcctgggccgacgtcgccgacgccgaccccgccccggcccccgcccccgccgccaacggccccgcccgccccgaccggagctcctacgtgcccccccacctccgcaaccgcggggcttcgtcgggtgggggcgcggcggcgcctccgccctcatcatcctcctcctccgcgccgccccctcgcgccgcccctggcctcctcgccccccgccccgccgccgccggcatggggaggatgggcggcggcggtggcggcggaggattcggtgggccaaggaggtgggaccgggagccgaacccgttcgggaacgacggcgacgccgcggcgggggcgggggacgagccggaggtgttcgacgcgcaccagaacaccgggatcaacttcgacgcgtacgaggacatccccgtggagacgagcgggagggaggtgccgccgccggtgggcacgttcgccgagatcgacctgggccaggcgctcaacgacaacatccgccggtgcaagtacgtgcgccccacgcccgtgcagcggtacgccatcccgatctcgctcgcggggagggacctcatggcgtgcgcgcagaccgggtccgggaagacggccgccttctgcttccccatcatcagcggcatcatgcgcggcccgcccgcgcaaaggccccagcgcggcgggatgaggaccgcctgccccctcgcgctcatcctctcccccaccagggagctctccatgcagattcatgaggaggcgagaaaattttcctatcagaccggtgtcagggtggttgttgcatatggaggagcacctattaatcagcagttgagagatcttgagaggggtgttgacattcttgtggctactcctggccgtttggttgatttattggagagggcaagagtatctttgcaatctatcagatatcttgcccttgatgaggcagatagaatgcttgatatgggttttgaaccgcaagttaggagaattgttgagcaaatggacatgcctccgccaggtgccaggcagacaatgttgttcagcgccacgttcccaaaagaaatccagagaatggcatctgacttcctggagaactacatattcctggctgttggaagagttgggtcaagtacagatttgattgtacagagagttgagtttgtgcaggaggcagacaaaagaagccacttgatggatctgcttcatgcacaaagagacagtgctactccaggaaagccaactcttacacttgtctttgtggaaaccaaaaggggtgctgattcgttggagcactggttgtgtatgaatggatttccagctacttctattcacggtgatagaaaccagcaggaaagagagtatgctttgagatccttcaaaagtggacatactcctattctagttgcaactgatgtggcagcccggggccttgacattcctcatgttgctcatgttgtgaactttgatcttcccaatgatatagatgattacgtccacaggattgggaggacagggagggcaggaaaaagtggtcttgcaactgctttcttcaatgagaataactcttccatggcaaggtctttggctgagctaatgcaagaatctaatcaagaggtacctgcgtggttgtctcgctatgctgctcgcccatcttatggtgggggtggtgggaggaacagaaggtccggtggtgggagccgcttcggtggccgtgacttccgcagggattcttcctctggaagaggtggcggtgactactatggtggaggcagcagcggtggagctggtggatatggtggttcctctgcatatgggggtggcggctatggtggcggcgcgggtgctccaagtgcctgggattaa

SEQ ID NO: 77519 - protein, 623 aa, Oryza sativa
MATPSRTSWADVADADPAPAPAPAANGPARPDRSSYVPPHLRNRGASSGGGAAAPPPSSSSSSAPPPRAAPGLLAPRPAAAGMGRMGGGGGGGGFGGPRRWDREPNPFGNDGDAAAGAGDEPEVFDAHQNTGINFDAYEDIPVETSGREVPPPVGTFAEIDLGQALNDNIRRCKYVRPTPVQRYAIPISLAGRDLMACAQTGSGKTAAFCFPIISGIMRGPPAQRPQRGGMRTACPLALILSPTRELSMQIHEEARKFSYQTGVRVVVAYGGAPINQQLRDLERGVDILVATPGRLVDLLERARVSLQSIRYLALDEADRMLDMGFEPQVRRIVEQMDMPPPGARQTMLFSATFPKEIQRMASDFLENYIFLAVGRVGSSTDLIVQRVEFVQEADKRSHLMDLLHAQRDSATPGKPTLTLVFVETKRGADSLEHWLCMNGFPATSIHGDRNQQEREYALRSFKSGHTPILVATDVAARGLDIPHVAHVVNFDLPNDIDDYVHRIGRTGRAGKSGLATAFFNENNSSMARSLAELMQESNQEVPAWLSRYAARPSYGGGGGRNRRSGGGSRFGGRDFRRDSSSGRGGGDYYGGGSSGGAGGYGGSSAYGGGGYGGGAGAPSAWD

SEQ ID NO: 77520 - DNA, 1245 bp, Oryza sativa; identical to SEQ ID NO: 66046
  CDS (1)..(1245)

SEQ ID NO: 77521 - protein, 414 aa, Oryza sativa; identical to SEQ ID NO: 66047

SEQ ID NO: 77522 - DNA, 1239 bp, Brassica napus
  CDS (1)..(1239)
atggcaggatcagcacctgaaggcacccagttcgatactcgtcagtttgaccagaggctcaatgaagtccttgagggacaggatgagttcttcacctcctatgatgaggtccatgagagctttgatgccatgggtttgcaagagaaccttcttaggggtatctatgcctatggttttgaaaagccttctgctattcagcaaagaggaatcgttcccttctgcaagggtcttgatgtgatccagcaggctcagtctggtactggcaaaaccgccactttctgctctggtgtcttgcagcagcttgacttctccctcgtccagtgccaggctctcgtcttggctcccaccagagagcttgctcagcagatcgagaaggtcatgcgtgctctcggagactaccttggcgtcaaggtccatgcttgtgttggtggaaccagtgtccgtgaggatcagcgcattctccaggccggtgttcacgttgtggttggaactcccggtcgtgtctttgacatgctccgaagacagtctcttcgctctgactccatcaagatgtttgtccttgacgaagctgatgagatgctctcccgtggtttcaaggatcagatctacgacatcttccagcttctcccaccaaagattcaggtcggagtgttctcagctacgatgccaccagaggctctcgagatcacgaggaagttcatgagcaaaccggtgagaatcctggtgaagcgcgacgagctcacgcttgagggtatcaagcagttctacgtgaacgtggagaaggaagagtggaagctcgaaactctctgcgacctctacgagaccttagccatcactcagagcgtcatcttcgtcaacactcgccgcaaggtggactggctcactgacaaaatgaggagccgtgaccacacggtgtcagccactcacggagacatggaccagaacacgagagacatcatcatgagagagttcaggtctggttcctcccgtgtcctcatcacgacggatctcttggctcgtggtatcgatgtgcagcaagtgtctctggtcatcaactttgacctcccgactcagccggagaattaccttcaccgtatcggaagaagtggaaggtttgggaggaaaggtgtggcaattaactttgtgacgaaggatgatgagagaatgctttttgatattcagaaattctacaatgttgttgttgaggagcttccctcaaacgtcgccgacctgctttga

SEQ ID NO: 77523 - protein, 412 aa, Brassica napus
MAGSAPEGTQFDTRQFDQRLNEVLEGQDEFFTSYDEVHESFDAMGLQENLLRGIYAYGFEKPSAIQQRGIVPFCKGLDVIQQAQSGTGKTATFCSGVLQQLDFSLVQCQALVLAPTRELAQQIEKVMRALGDYLGVKVHACVGGTSVREDQRILQAGVHVVVGTPGRVFDMLRRQSLRSDSIKMFVLDEADEMLSRGFKDQIYDIFQLLPPKIQVGVFSATMPPEALEITRKFMSKPVRILVKRDELTLEGIKQFYVNVEKEEWKLETLCDLYETLAITQSVIFVNTRRKVDWLTDKMRSRDHTVSATHGDMDQNTRDIIMREFRSGSSRVLITTDLLARGIDVQQVSLVINFDLPTQPENYLHRIGRSGRFGRKGVAINFVTKDDERMLFDIQKFYNVVVEELPSNVADLL

SEQ ID NO: 77524 - DNA, 1242 bp, Glycine max; identical to SEQ ID NO: 66154
  CDS (1)..(1242)

SEQ ID NO: 77525 - protein, 413 aa, Glycine max; identical to SEQ ID NO: 66155

SEQ ID NO: 77526 - DNA, 1242 bp, Glycine max
  CDS (1)..(1242)
atggcaggacttgcacccgagggatcacagtttgatgctcgtcaatatgataccaagatgaatgagttgcttacatctgatggacaggattttttcacatcttatgatgaggtttatgacagttttgatgctatgggcttgcaggagaatctcctgagaggcatttatgcatatggttttgagaagccatcagctattcagcagagaggaatagttcctttctgcaagggacttgatgttatacaacaggcccagtctggaactgggaagacagcaactttctgctctggaattctgcagcaacttgactatagtgtgactgaatgccaagccttggttttagcaccaactagggagcttgctcagcaaattgaaaaggttatgcgagcacttggagattatcttggtgtgaaggtgcacgcatgtgtgggaggtaccagtgttcgtgaagaccaacgcattctatcgagtggtgttcatgttgttgttggtactcctggtcgtgtatttgatatgctgcgcagacagtcacttcggccagactacatcaagatgtttgtattggatgaggctgatgaaatgctttcccgtggttttaaagatcagatctatgatatattccagttgcttccatctaagattcaagtgggagttttctctgctacaatgcctcctgaggcacttgagatcacaaggaagttcatgaacaaacctgtgaggatccttgtgaagcgtgatgagctcaccttggagggtatcaagcaatttcatgtcaatgttgagaaagaggaatggaagcttgacacactatgtgatctttatgagacattggcaattactcagagtgtcatttttgtgaacaccagaagaaaggttgattggctgactgacaagatgcgaagccgagaccacacagtctcagcaacccatggagacatggaccaaaataccagggacattattatgcgtgaattccgttctgggtcatcccgtgttttaataactactgatcttttggcccgtggtattgatgtccagcaagtgtctctagttataaattatgatctcccaacacagcccgagaactatctccatcgtattggtcgtagtggaaggtttggtaggaaaggtgttgccattaactttgtcacaagggatgatgaaaaaatgctgtttgacatccagaagttttacaatgtgattattgaggagctgccttcaaatgttgctgaactcctttga

SEQ ID NO: 77527 - protein, 413 aa, Glycine max
MAGLAPEGSQFDARQYDTKMNELLTSDGQDFFTSYDEVYDSFDAMGLQENLLRGIYAYGFEKPSAIQQRGIVPFCKGLDVIQQAQSGTGKTATFCSGILQQLDYSVTECQALVLAPTRELAQQIEKVMRALGDYLGVKVHACVGGTSVREDQRILSSGVHVVVGTPGRVFDMLRRQSLRPDYIKMFVLDEADEMLSRGFKDQIYDIFQLLPSKIQVGVFSATMPPEALEITRKFMNKPVRILVKRDELTLEGIKQFHVNVEKEEWKLDTLCDLYETLAITQSVIFVNTRRKVDWLTDKMRSRDHTVSATHGDMDQNTRDIIMREFRSGSSRVLITTDLLARGIDVQQVSLVINYDLPTQPENYLHRIGRSGRFGRKGVAINFVTRDDEKMLFDIQKFYNVIIEELPSNVAELL

SEQ ID NO: 77528 - DNA, 1227 bp, Brassica napus
  CDS (1)..(1227)
atggcggaagcgaatcctagccgtggaggcggaaggagaggcggcgggccgatggataacgacaagttagtcttcgagaccaccgaagggatcgagcccatcaccaatttcaacgatatgggtattaaggaagacgtgcttcgcggcgtctacgagtacggcttcgagaaaccatccgcgattcagcagagagctgtcatgccgattctccaagggcgagatgttattgctcaagctcagtccggtactggaaaaacctccatgattgctctctccgtctgccaaatcgttgacacttcgtctagagaagttcaggccttgatattgtccccaacaagagagctagcttcacaaacagagaagactattcaagctattggattacacgcaaacattcaggcgcatgcttgcattggtgggaagagcgttggagaagacatcaggaagctggagaatggtgtccatgttgtctctgggacacctggccgtgtctgtgacatgattaagaggaaaagtctacgcaccagagctattaagcttctgattcttgatgagtctgatgagatgctgagcagagggttcaaggaccaaatctatgatgtttacagatatcttccacctgatcttcaggtttgcttggtttctgcaactcttcctcacgagattttggagatgacgtccaagtttatgacggaaccggtgaagatacttgtgaagcgtgatgagttgactcttgaaggcattaaacaatttttcgttgctgttgagaaagaggagtggaaatttgatacgctctgtgatctttatgacactcttacaatcactcaagctgttatcttctgcaacactaaacgaaaggtggattggctaagtgagaaaatgaggactaacaacttcacagtctcatcaatgcacggtgacatgcctcagaaggagagagacgagatcatgaatcagtttcggtcaggggacagtcgtgttttgatcacgacagatgtatgggcacgtgggattgatgtgcagcaagtttctcttgtgatcaattatgatctccccaacaaccgtgagctctacatccatcgtattggacgatctggtcgtttcggccgtaagggtgttgcgatcaactttgttaaaagcgacgacatcaagatcctccgggacattgagcagtactacagtactcagattgacgagatgccaatgaatgtagctgatcttatctaa

SEQ ID NO: 77529 - protein, 408 aa, Brassica napus
MAEANPSRGGGRRGGGPMDNDKLVFETTEGIEPITNFNDMGIKEDVLRGVYEYGFEKPSAIQQRAVMPILQGRDVIAQAQSGTGKTSMIALSVCQIVDTSSREVQALILSPTRELASQTEKTIQAIGLHANIQAHACIGGKSVGEDIRKLENGVHVVSGTPGRVCDMIKRKSLRTRAIKLLILDESDEMLSRGFKDQIYDVYRYLPPDLQVCLVSATLPHEILEMTSKFMTEPVKILVKRDELTLEGIKQFFVAVEKEEWKFDTLCDLYDTLTITQAVIFCNTKRKVDWLSEKMRTNNFTVSSMHGDMPQKERDEIMNQFRSGDSRVLITTDVWARGIDVQQVSLVINYDLPNNRELYIHRIGRSGRFGRKGVAINFVKSDDIKILRDIEQYYSTQIDEMPMNVADLI

SEQ ID NO: 77530 - DNA, 1284 bp, Brassica napus
  CDS (1)..(1284)
atgggagacgttagggacaacgaagcatatgaggaggagctcctagactatgaggaagaggacgagaaggtcttggattctgggaataaagttaacggcgatgccgtgaagaaaggttacgtggggatacacagttctggattcagagacttccttttgaaacctgagcttctccgagctattgttgactctggttttgaacatccatccgaagtgcaacacgaatgtatccctcaagctatcttggggatggatgttatctgccaagctaaatctggtatggggaagactgctgtctttgttctttcgactctgcaacagatcgagccagctcctggccaggtgtctgcgcttatactgtgccatacaagagagttagcttatcagatctgcaatgagttcgtgcgtttcagtacctatctgcctgatactaaggtttcagtgttctatggaggagtcaacaacaaaattcacaaagacttgctgaagaacgaatgtcctcacattgttgttggaacacctggtcgtgtgcttggactcgccagggacaaagatctctcgttgaagaatgttaggcattttattcttgacgagtgcgataaaatgctggagtctctcgacatgcggagggatgtgcaggagattttcaagatgactcctcacgagaaacaagttatgatgttctcagcaactctcagcaaggagatacgcccagtctgcaagaaatttatgcaagatccaatggaaatatatgttgatgatgaagccaagttgactcttcatgggcttgtccagcattacatcaaactgggcgagatggagaaaaaccgcaagttgaatgaccttcttgacgcactggacttcaatcaagttgtcatatttgtgaagagcgttagcagagctcgggagctgaacaagctgcttatcgaatgcaatttcccctcaatatgcattcactctggcatgtctcaggaagagaggctgactcactacaaaagtttcaaggaagggcacaagagaatactggtggcgacagacttggtagggagaggcattgacattgagcgtgtcaacattgtcatcaactatgacatgccagactctgctgatacatatcttcacagggttgggagagctggtaggtttggaacaaagggtctagcaatcacatttgtggcatctgcttcggactcggaagttcttaatcaggtgcaagccaggttcgaggttgatataaagcaacttcctgagaatattgatacttctacttacatgccgtcctaa

SEQ ID NO: 77531 - protein, 427 aa, Brassica napus
MGDVRDNEAYEEELLDYEEEDEKVLDSGNKVNGDAVKKGYVGIHSSGFRDFLLKPELLRAIVDSGFEHPSEVQHECIPQAILGMDVICQAKSGMGKTAVFVLSTLQQIEPAPGQVSALILCHTRELAYQICNEFVRFSTYLPDTKVSVFYGGVNNKIHKDLLKNECPHIVVGTPGRVLGLARDKDLSLKNVRHFILDECDKMLESLDMRRDVQEIFKMTPHEKQVMMFSATLSKEIRPVCKKFMQDPMEIYVDDEAKLTLHGLVQHYIKLGEMEKNRKLNDLLDALDFNQVVIFVKSVSRARELNKLLIECNFPSICIHSGMSQEERLTHYKSFKEGHKRILVATDLVGRGIDIERVNIVINYDMPDSADTYLHRVGRAGRFGTKGLAITFVASASDSEVLNQVQARFEVDIKQLPENIDTSTYMPS

SEQ ID NO: 77532 - DNA, 1785 bp, Brassica napus; identical to SEQ ID NO: 66058
  CDS (1)..(1785)

SEQ ID NO: 77533 - protein, 594 aa, Brassica napus; identical to SEQ ID NO: 66059

SEQ ID NO: 77534 - DNA, 1365 bp, Brassica napus
  CDS (1)..(1365)
atggaggaagagaacgaagtggtgaagacgtttgaagagcttggtgtgcgtgaggagcttgtgaaagcttgcgagaggctgggatggaagaaccctactaagattcaaactgaagctcttccttatgctcttgaagggaaagatgtaattggacttgcgcagaccggctctggtaaaaccggagcctttgcgttgccgatattgcaagctcttcttcagtatgttaatgatgctgagcctaagaaaggacgtagacctgatcctgccttcttcgcctgtgttttgtctccaactagagagctagcaatccagattgctgagcagtttgaagctctaggatctgatataagtcttagatgtgctgtgcttgttggaggtattgacaggatgcagcaaactattgctcttggaaaacggcctcatgttattgttgcgacacctggtcgtctatgggatcacatgtctgacactaaaggcttttctctcaagacgttgaaatttctggttcttgatgaagcagatagactgctgaatgaagattttgagaaatctcttaatcagattttggaagagatccctcgtgaccgtaaaacgtatctcttttcagcaactatgactaaaaaggttcggaaacttcagagagcatgcttaaggaatcctgtgaagattgaggctgcctccaaatactccacagttgatactctaaaacagcagtatcggtttgttcctgctaaatacaaggactgctaccttgtgtacattctgaccgaaatgcctgactcaacatcgatgatattcacccgaacttgtgacggtactcgttttatggctttgatgcttcggagccttggttttagagccattcctatcagtggtcagatgactcagtcaaagagattaagagcgttgaataagttcaaagcaggggaatgtaacatcttggtttgcactgatgtggctagcagagggctcgatatcccatctgttgatatggttattaattacgacattcccacaaattcaaaggattacatccatagagttggaagaacagctcgtgctggacgttctggtgttgggatatcacttgtaaaccagtatgaactcgaatggtacttgcaaattgaaaaactcataggcaagaagctgcctgagtatccagctgaggaggacgaagtcttgtcattgttggagagagtctcagaagccaaaaagttatccgcaatgaatatgaaagaatcaggaggtaggaagaagagaagaggagaagatgatgaagagagtgagaggttcttggatggtaacaaaggtggtaacaaaggaggtaacagggacaagaaatcttccaagaagttcaaacgataa

SEQ ID NO: 77535 - protein, 454 aa, Brassica napus
MEEENEVVKTFEELGVREELVKACERLGWKNPTKIQTEALPYALEGKDVIGLAQTGSGKTGAFALPILQALLQYVNDAEPKKGRRPDPAFFACVLSPTRELAIQIAEQFEALGSDISLRCAVLVGGIDRMQQTIALGKRPHVIVATPGRLWDHMSDTKGFSLKTLKFLVLDEADRLLNEDFEKSLNQILEEIPRDRKTYLFSATMTKKVRKLQRACLRNPVKIEAASKYSTVDTLKQQYRFVPAKYKDCYLVYILTEMPDSTSMIFTRTCDGTRFMALMLRSLGFRAIPISGQMTQSKRLRALNKFKAGECNILVCTDVASRGLDIPSVDMVINYDIPTNSKDYIHRVGRTARAGRSGVGISLVNQYELEWYLQIEKLIGKKLPEYPAEEDEVLSLLERVSEAKKLSAMNMKESGGRKKRRGEDDEESERFLDGNKGGNKGGNRDKKSSKKFKR

SEQ ID NO: 77536 - DNA, 1239 bp, Brassica napus
  CDS (1)..(1239)
atggcaggatccgcaccagaaggcactcagtttgatgctcgtcagttcgaccagaagttgaacgaagttcttgaaggacaggatgagttcttcacctcttacgatgaatcccacgacagctttgacgccatgggtctccaagagaatctcctcaggggtatctacgcttacggtttcgagaagccttctgctatccagcaaagaggaatcgttcccttttgcaaaggcctcgacgtgatccagcaggcccagtccggtaccggcaaaaccgccactttctgctccggcgtcctccagcagctagactactccctcgtccagtgccaagccctcgtcctcgccccgaccagagagctcgcccagcagatcgagaaggtcatgagagccctcggcgactacctcggcgtcaaggtccacgcctgcgtcggcgggaccagcgtccgcgaggaccagcgcatcctccaggccggcgtccacgtcgtcgtcggcaccccggggcgcgtgttcgacatgctgaagcgccagtccctccgcgccgaccacatcaagatgtttgtccttgatgaggccgacgagatgctctcacgcgggttcaaggaccagatctacgacatcttccagctcctccccccgaagatccaggtgggagtgttctctgccaccatgccgccggaggctctcgagatcacgaggaagttcatgagcaagccggtgaggattcttgtgaagcgcgacgagcttactttagaaggtatcaagcagttttacgtcaacgttgagaaggaagactggaagctcgagacgctctgcgacctctacgagacgctggccatcactcagagcgtcatctttgtcaacactaggcggaaggttgactggctcactgataaaatgagggggcgtgaccatacagtctctgcgactcacggagacatggaccagaacactagagacattatcatgagagagttcaggtctggctcatctcgtgtgttgatcacgactgatctcttggctcgtggtatcgatgttcagcaggtgtctctggtgatcaactacgatctgccgactcagcctgagaactaccttcaccgtattggaagaagtgggaggtttgggaggaaaggagtggcgatcaactttgtgaccaaggatgatgagaggatgctgtttgatattcagaagttttacaacgtggttgttgaggagctgccttcgaacgttgctgatctgctgtga

SEQ ID NO: 77537 - protein, 412 aa, Brassica napus
MAGSAPEGTQFDARQFDQKLNEVLEGQDEFFTSYDESHDSFDAMGLQENLLRGIYAYGFEKPSAIQQRGIVPFCKGLDVIQQAQSGTGKTATFCSGVLQQLDYSLVQCQALVLAPTRELAQQIEKVMRALGDYLGVKVHACVGGTSVREDQRILQAGVHVVVGTPGRVFDMLKRQSLRADHIKMFVLDEADEMLSRGFKDQIYDIFQLLPPKIQVGVFSATMPPEALEITRKFMSKPVRILVKRDELTLEGIKQFYVNVEKEDWKLETLCDLYETLAITQSVIFVNTRRKVDWLTDKMRGRDHTVSATHGDMDQNTRDIIMREFRSGSSRVLITTDLLARGIDVQQVSLVINYDLPTQPENYLHRIGRSGRFGRKGVAINFVTKDDERMLFDIQKFYNVVVEELPSNVADLL

SEQ ID NO: 77538 - DNA, 1287 bp, Zea mays
  CDS (1)..(1287)
atgggagaggccaaggagaacgacgtttatgaggaggagctcctggactacgaggaggacgacgacaagacggtcgatggctccgctgctaagcccaccggagaggtcgcaaagaagggctacgtcgggatccacagttccggtttcagagacttcctgctcaagccagagctgctccgtgctatccaggattgtggttttgagcatccttccgaagtgcaacacgagtgtatccctcaagccattcttggaatggatgtcatctgtcaagctaaatctgggatggggaaaactgctgtttttgtcctttcatccctccaacaaattgaccctgttgcgggtcaggtagcagcacttgtactgtgccacacaagggaactggcttatcagatatgccacgaatttgagaggttcagcaaatatcttactgaagttaaagttgctgtcttctatggaggtgttcacatcaggaagcataaagatttgttgaagaatgaatgccctcatattgtggttggcacgcctggtaggatacttgctcttgccagggataaggatctctccttgaagaatgtgaggcacttcattcttgatgaatgtgacaaaatgctggaatcacttgacatgcggagagatgttcaggagatcttcaaaatgactcctcatgataagcaagtcatgatgttttcagcaacgctcagcaaggagatccgtcctgtatgcaagaaatttatgcaagatccgatggaaatatatgttgatgatgaggcaaagttgaccctccatggtcttgtacagcactatataaaacttagcgaggcagagaagaaccggaaactgaatgatctcttggacgctcttgatttcaaccaagttgtgatattcgtgaagagtgttagcagagctgccgaactgaataagttactttgtgaatgcaacttcccatcaatctgcattcattctggaatgactcaggaagaaaggctaacaagatataagaacttcaaggaaggccacaagagaattcttgtggctacagatttagttggcaggggcattgacattgagcgtgtcaacattgtgataaactatgacatgccagactcagctgatacttatttgcacagggttggaagggctggacgttttggcacgaagggacttgcaattacctttgtttcctctgcttcggattctgatgttcttaaccaggtgcaagaaaggtttgaggtagacataaaggaactgcctgagcaaattgacacctcgacctacatgccatcataa

SEQ ID NO: 77539 - protein, 428 aa, Zea mays
MGEAKENDVYEEELLDYEEDDDKTVDGSAAKPTGEVAKKGYVGIHSSGFRDFLLKPELLRAIQDCGFEHPSEVQHECIPQAILGMDVICQAKSGMGKTAVFVLSSLQQIDPVAGQVAALVLCHTRELAYQICHEFERFSKYLTEVKVAVFYGGVHIRKHKDLLKNECPHIVVGTPGRILALARDKDLSLKNVRHFILDECDKMLESLDMRRDVQEIFKMTPHDKQVMMFSATLSKEIRPVCKKFMQDPMEIYVDDEAKLTLHGLVQHYIKLSEAEKNRKLNDLLDALDFNQVVIFVKSVSRAAELNKLLCECNFPSICIHSGMTQEERLTRYKNFKEGHKRILVATDLVGRGIDIERVNIVINYDMPDSADTYLHRVGRAGRFGTKGLAITFVSSASDSDVLNQVQERFEVDIKELPEQIDTSTYMPS

SEQ ID NO: 77540 - DNA, 2196 bp, Glycine max; identical to SEQ ID NO: 66062
  CDS (1)..(2196)

SEQ ID NO: 77541 - protein, 731 aa, Glycine max; identical to SEQ ID NO: 66063

SEQ ID NO: 77542 - DNA, 1788 bp, Glycine max
  CDS (1)..(1788)
atgttaaccgcagtcctcagaagaaccagttccaccctctcaaggcgcggtttccccgccgccttaatctctgcctccaccgccaccgccaccgccaccgccggcaaccacttccggctactctccgctgccgtcaattccagaaccttccactccaaccctggccccttgaatttccgcgcctcttcatgtcaccgcgcggaatacgccgtggacgatttcccttacgaagaagggtccaaaggaaacgccgacgaaggcctcgagatcgcgaagctcggaatttcgcaggatattgtctccgctttggccaagaaaggcatcaccaagctcttccccattcagagggctgtgttggaacctgctatgcaaggtcgtgatatgattggtcgagctagaactggaactgggaagactcttgcttttgggatacccatcatggataaggtcattcagtttaatgctaagcatgggcgggggagggatcctttggctttggtgttggctccgaccagagagcttgcgcgacaggttgaatcagagttctgtgagtcggcacctaatttggatacaatttgtgtttatgggggtacacccatttctcagcagatgaggcagcttgattatggggttgatattgctgtggggacgcctggtcggattattgaccttctcaacagaggtgcgctaaatttgaaggatgttcagtttgttgttcttgatgaagctgatcagatgcttcaggtgggctttcaggaagacgtggagaagatcttggagaggttgcccccaaaacgtcagactcttatgttctctgcaacaatgccatcttggataaagcagatttcgcgcaattacttgaataatcccctaaccattgatcttgttggagattctgatcagaaattggcagatggaatttcactgtactccattgcaactgatttgtatgttaaagcgggaattcttgcacctctaataacagaacatgcaaaaggaggaaagtgtattgttttcactcaaacaaaacgtgatgctgatcgattatcgtatgccatggcaagaagtgttaaatgtgaggctttgcatggagacatatcacaagctcaaagggagaaaactcttgctggcttcagaaatggccattttaatgttttagtggcaactgatgttgcctcacgtgggcttgatatacctaatgttgatcttgtaatacattatgatcttcccaacaattcagagatatttgttcatcgttctggacgaacaggtcgtgctggtaagaaaggaactgcaattcttgtgtatacagaagatcaatcgagggctgttaagcttatagagcgtgatgtaggcagtagattttcagagctgccacggattgctgttgatagtgcatcagcggtcatggttgatagcatgggtggcgggcgatttggttcttttggaggtaacagggatcgtcgatacggtgatatgggttttggatctggccattctgggggttacagtaaccctggttctggccgctctagctttggaaattccggtgaaaggtttggtggacagaattataatcgttttggctcatctggtggctttggttctggtcaatcaggaagtagatctggtggatcatccagcaggtctaggtttagtcgctcagatgattttgggggatttggtggttcagatcgttcgggtggttttggagattttggctcaggtcagtctagtggcttcggtggttctcgtggtagtaagcagaacaatagaagacctttttaa

SEQ ID NO: 77543 - protein, 595 aa, Glycine max
MLTAVLRRTSSTLSRRGFPAALISASTATATATAGNHFRLLSAAVNSRTFHSNPGPLNFRASSCHRAEYAVDDFPYEEGSKGNADEGLEIAKLGISQDIVSALAKKGITKLFPIQRAVLEPAMQGRDMIGRARTGTGKTLAFGIPIMDKVIQFNAKHGRGRDPLALVLAPTRELARQVESEFCESAPNLDTICVYGGTPISQQMRQLDYGVDIAVGTPGRIIDLLNRGALNLKDVQFVVLDEADQMLQVGFQEDVEKILERLPPKRQTLMFSATMPSWIKQISRNYLNNPLTIDLVGDSDQKLADGISLYSIATDLYVKAGILAPLITEHAKGGKCIVFTQTKRDADRLSYAMARSVKCEALHGDISQAQREKTLAGFRNGHFNVLVATDVASRGLDIPNVDLVIHYDLPNNSEIFVHRSGRTGRAGKKGTAILVYTEDQSRAVKLIERDVGSRFSELPRIAVDSASAVMVDSMGGGRFGSFGGNRDRRYGDMGFGSGHSGGYSNPGSGRSSFGNSGERFGGQNYNRFGSSGGFGSGQSGSRSGGSSSRSRFSRSDDFGGFGGSDRSGGFGDFGSGQSSGFGGSRGSKQNNRRPF

SEQ ID NO: 77544 - DNA, 1593 bp, Glycine max; identical to SEQ ID NO: 66064
  CDS (1)..(1593)

SEQ ID NO: 77545 - protein, 530 aa, Glycine max; identical to SEQ ID NO: 66065

SEQ ID NO: 77546 - DNA, 2121 bp, Glycine max
  CDS (1)..(2121)
atgaaacgctcaaacgacgacgtcgctgcccccgtccccgcctcaacctccaagccagtgttcctaaccaaagcccaacgcgagcaattggctctccagcgccgccaggaagaagtcgccgaccagaagcgccgccaggagcagctcctctcccgcaaccactcctccgatcccaaaccctcctccgaccgcgacagagacagagaaagagaccgagaccaccaccgagaccgggaccgcgatcgtgacagagacagagaacgcgagcgcgagagggcccgcgatcgggatcgcgaagccgaacggcgcaacagagagagggagcgcgaagaggagagccgggcccgcgaacgcgcccggttggagaaactcgcggagcgtgagcgcgagaaggagcttgagtccatcaaggagcagtacctgggctcgaaaaagccgaagaagcgcgtcatcaagcccagcgagaagttccgtttctccttcgactgggagaacaccgaggacacctcgcgcgacatgaactccctttaccagaacccgcacgaggcccagctcctcttcggccgcgggttccgcgcgggcatggaccgccgcgagcagaagaagctcgccgccaagaacgagaaggacatgcgagaccaaatccggaagaaagacggcctggaggagaggcccgaggaggccgacgcccagcgccgcaaggaggctgccgccgacctatacgacaccttcgacatgcgtgttgaccggcactggagcgagaagaagctggaagagatgacagagagggattggcgtatcttcagagaagactataacatctcctacaagggttccaagattcctcgtcctatgaggagctggaatgagagcaaattgaccaacgagcttctgaaggcggttgagaaggctagctataaaaccccttctcctattcagatggctgccattccacttggtttgcagcagcgtgatgtcattggcattgccgagaccggttccggtaaaaccgccgcctttgtgcttcccatgctgagttacatcacccgccttcctcccataagcgaagacaacgaggctgagggtccctatgctgttgtcatggcccccactcgcgagctcgcgcagcagattgaggatgagactgtcaagtttgctcagtatttgggcatcaaggtcgtctccattgttggtggacagtccattgaggagcaagggtttaagattaggcagggctgtgagattgtcattgccactcctggacgtttgattgattgtttggagcgccgctatgctgtgctcaaccagtgcaactatgttgttcttgatgaggccgatcgtatgattgacatggggtttgagccccaggtgatgggtgtcctcgatgccatgccttccagcaatctcaaaccggagaatgaggatgaggagcttgacgagaagaagatttaccgcaccacctatatgttcagcgccaccatgccacctgctgtggagaggcttgctaggaaatatttgaggaaccctgttgtggtcaccattggcactgctggaaaggcaactgatttgatcagccagcatgtgatcatgatgaaggaggccgagaagttttccaagcttcataggttgcttgatgagcttaacgacaagactgcgattgtgtttgttaacaccaagaagaatgcggatcatgttgccaagaatttggataaggatgggtatcgcgtgactactttgcacggagggaagtcgcaggagcagagggagatcagtcttgaagggtttaggaccaagagatataatgttcttgttgctactgatgttgctggacgtgggattgacatacctgatgtggctcatgtcatcaactatgatatgcctgggaatattgaaatgtacactcaccggattgggcgtactggtcgtgcaggaaagacgggtgtggctaccacattcttgactcttcacgactctgatgtcttctatgacctcaagcagatgcttattcaaagtaacagtcctgttccacctgaactggcaaggcacgaagcttcaaaattcaagccaggaactattccagacagaccacctagacgaaatgacactgtttttgcgcattag

SEQ ID NO: 77547 - protein, 706 aa, Glycine max
MKRSNDDVAAPVPASTSKPVFLTKAQREQLALQRRQEEVADQKRRQEQLLSRNHSSDPKPSSDRDRDRERDRDHHRDRDRDRDRDRERERERARDRDREAERRNREREREEESRARERARLEKLAEREREKELESIKEQYLGSKKPKKRVIKPSEKFRFSFDWENTEDTSRDMNSLYQNPHEAQLLFGRGFRAGMDRREQKKLAAKNEKDMRDQIRKKDGLEERPEEADAQRRKEAAADLYDTFDMRVDRHWSEKKLEEMTERDWRIFREDYNISYKGSKIPRPMRSWNESKLTNELLKAVEKASYKTPSPIQMAAIPLGLQQRDVIGIAETGSGKTAAFVLPMLSYITRLPPISEDNEAEGPYAVVMAPTRELAQQIEDETVKFAQYLGIKVVSIVGGQSIEEQGFKIRQGCEIVIATPGRLIDCLERRYAVLNQCNYVVLDEADRMIDMGFEPQVMGVLDAMPSSNLKPENEDEELDEKKIYRTTYMFSATMPPAVERLARKYLRNPVVVTIGTAGKATDLISQHVIMMKEAEKFSKLHRLLDELNDKTAIVFVNTKKNADHVAKNLDKDGYRVTTLHGGKSQEQREISLEGFRTKRYNVLVATDVAGRGIDIPDVAHVINYDMPGNIEMYTHRIGRTGRAGKTGVATTFLTLHDSDVFYDLKQMLIQSNSPVPPELARHEASKFKPGTIPDRPPRRNDTVFAH

SEQ ID NO: 77548 - DNA, 1239 bp, Triticum aestivum
  CDS (1)..(1239)
atggcggcggcgggcggcgcgacgacctccaccaggcgcgggccgggcggcgggggccggccgatggacgacgagaacctgaccttcgagacctcggcgggggtggaggtcgtcggcagcttcgacgccatggggatccgggaggacctcctccgcggcatctacggctacggcttcgagaagccctccgccatccagcagcgggccgtcatccccatcatcactggccgcgacgtcatcgcccaggcccagtccggcaccggcaagacctccatgatctccctctccgtctgccaggtcatcgagaccaacgtccacgaggtgcaggcgctgatactgtcgccaactagggaacttgcgacacaaacagagagggtgatgcaggctgttggtaacttcatgagcgtctctgtgcacgcctgtgttggtggcaaaagtatcggcgaggacattaggaagctcgagtctggagtgcatgttgtttcaggaacccccggcagagtatgcgatatgatcaagagaaggaccttgcgcacaagagccatcaagctcctagtcctggacgaagccgatgagatgttgagcagaggtttcaaggatcagatatatgatgtctacagatatcttcccccagaacttcaggttgttttgatctctgcaactctgccccatgacatcttggagataactagcaagttcatgactgatccagtcaggatccttgtaaaacgtgatgagttgaccctagagggcatcaaacaattctttgttgctgttgagaaagaggaatggaagtttgatacactatgtgatctttatgatacactgaccatcacccaagcagtcattttctgcaacactaagagaaaggtggattggcttactgaaaggatgcgcaccaacaacttcacggtgtcagctatgcacggtgacatgcctcagaaggaaagggatgcgatcatgagtgagttcaggggtggcacgacccgtgttctgatcacaaccgatgtttgggctcgagggctggatgtccagcaggtctctcttgtcattaattacgatctccccaacaaccgtgagctttacatccatcgtattggtcgctctgggcgttttgggcgcaagggtgtggccatcaactttgtgcgcaaggacgacatccgtatccttcgggacatcgagcagtactacagcacgcagaccgacgagatgcccatgaacgtcgctgatcttatctga

SEQ ID NO: 77549 - protein, 412 aa, Triticum aestivum
MAAAGGATTSTRRGPGGGGRPMDDENLTFETSAGVEVVGSFDAMGIREDLLRGIYGYGFEKPSAIQQRAVIPIITGRDVIAQAQSGTGKTSMISLSVCQVIETNVHEVQALILSPTRELATQTERVMQAVGNFMSVSVHACVGGKSIGEDIRKLESGVHVVSGTPGRVCDMIKRRTLRTRAIKLLVLDEADEMLSRGFKDQIYDVYRYLPPELQVVLISATLPHDILEITSKFMTDPVRILVKRDELTLEGIKQFFVAVEKEEWKFDTLCDLYDTLTITQAVIFCNTKRKVDWLTERMRTNNFTVSAMHGDMPQKERDAIMSEFRGGTTRVLITTDVWARGLDVQQVSLVINYDLPNNRELYIHRIGRSGRFGRKGVAINFVRKDDIRILRDIEQYYSTQTDEMPMNVADLI

SEQ ID NO: 77550 - DNA, 1242 bp, Linum usitatissimum
  CDS (1)..(1242)
atggcaggactagcacccgagggatcccagtttgatgctaagcagtacgatgccaagatgagtgaactgatttcagctgatggtcaggactacttcgcttcctatgacgaggttcatgaaaccttcgactctatgggtttgcaggagaatcttctcagaggaatttatgcatatggttttgagaagccgtctgcaatccagcagagggggattgttcccttttgcaagggactagatgttattcaacaggctcaatctggaactggaaagactgctactttctgttctggtatcctgcaacaacttaattatggtctagttgaatgccaagcactggtcttggcacccactagggagctggctcagcagattgaaaaggttatgcgagcccttggtgattatcttggagtcaaggtgcatgcatgtgttggtggaactagtgttcgtgaagaccaacgtatcctctcaagtggagtccatgttgttgttggtactcctggtcgtgtgttcgatatgctccgcagacagtcccttcgagctgattcgatcaagatgtttgtgttggatgaagctgatgagatgctctctcgtggatttaaggatcaaatctacgacatcttccagcttttgccaccaaacatccaagttggcgttttctctgcaacaatgccacctgaggctcttgatattacaaggaaattcatgaacaaaccagttaggattctggtgaagcgtgaggagctaaccttggagggtatcaaacagttccatgtgaatgtggacaaagaagaatggaagttggagacactgtgtgatctttatgagaccttagccattactcagagtgttatctttgtgaacaccaggcgcaaggtggactggctgactgacaagatgaggagcagagaccacacagtgtcagctactcatggtgacatggaccagaacactagggacatcatcatgagggagttcaggtctggctcatcccgtgtcctgatcactaccgacctattggcccgtggtattgatgtccagcaggtttcgcttgtgatcaactatgatctgccaacccaaccggagaactacctgcataggattggacgtggtggacgttttgggaggaaaggtgtggctatcaactttgtgaccaccgatgatgagaggatgcttttcgacatccagaagttctacaatgtggtgattgaggagctcccagccaatgttgctgatcttctgtga

SEQ ID NO: 77551 - protein, 413 aa, Linum usitatissimum; identical to SEQ ID NO: 65229

SEQ ID NO: 77552 - DNA, 1284 bp, Linum usitatissimum; identical to SEQ ID NO: 66066
  CDS (1)..(1284)

SEQ ID NO: 77553 - protein, 427 aa, Linum usitatissimum; identical to SEQ ID NO: 66067

SEQ ID NO: 77554 - DNA, 1245 bp, Hordeum vulgare
  CDS (1)..(1245)
atggcaggaatggcaccagagggttcccagtttgatgctaagcactatgacagtaagatgactgagttactgaaccaaggtgacactgaggagtttttcacctcatatgatgaggtgcatgaaagttttgatgacatgggcctccaagagaaccttcttagaggcatctatgcttatggttttgagaagccatcagccattcagcaaagaggaattgttcccttctgcaagggtcttgatgtgattcaacaagctcagtctggtacaggaaaaactgccaccttctgttctggaatcttgcagcagcttgactatggattggttgagtgccaggcattggtccttgctccgacccgtgagcttgcacagcagattgagaaggtcatgcgtgctcttggtgactacttaggcgtcaaggtgcatgcatgtgttggtggaacttctgtccgtgaggatcagaggattcttgccagtggtgtgcatgttgttgtcggcacacctggtcgtgtgttcgatatgttgcgcaggcaatccctccgcccagataacatcaagatgtttgtgttggatgaagctgatgagatgctatcacgtggtttcaaggatcagatctatgatatcttccagcttcttccatcaaagattcaggttggggtgttctctgctaccatgcctcctgaggctcttgagataacccgcaagttcatgaacaagcccgtgaggattcttgtcaagagagatgagcttacccttgagggtatcaagcaattctatgtcaatgttgagaaggaagagtggaagctggacacactctgtgacctgtacgagaccttggcaattacccagagtgtcatctttgtgaacacccgccgcaaggtggactggctcaccgacaagatgaggggaagggaccacactgtctctgcaacacacggagacatggaccagaacactagggacatcatcatgagggagttcagatctggctcttctcgtgtgctcatcaccaccgacctgctggcccgtggtattgatgtgcagcaagtctcccttgtcatcaactacgacctgccgacccagcctgagaactacctccatcgcattggtcgtagtggtcggttcgggaggaagggagttgccatcaacttcgtcacccgtgaagatgagaggatgctgttcgacatccagaagttctacaacgtggtcattgaggagctcccggccaatgtcgccgaccttctctag

SEQ ID NO: 77555 - protein, 414 aa, Hordeum vulgare
MAGMAPEGSQFDAKHYDSKMTELLNQGDTEEFFTSYDEVHESFDDMGLQENLLRGIYAYGFEKPSAIQQRGIVPFCKGLDVIQQAQSGTGKTATFCSGILQQLDYGLVECQALVLAPTRELAQQIEKVMRALGDYLGVKVHACVGGTSVREDQRILASGVHVVVGTPGRVFDMLRRQSLRPDNIKMFVLDEADEMLSRGFKDQIYDIFQLLPSKIQVGVFSATMPPEALEITRKFMNKPVRILVKRDELTLEGIKQFYVNVEKEEWKLDTLCDLYETLAITQSVIFVNTRRKVDWLTDKMRGRDHTVSATHGDMDQNTRDIIMREFRSGSSRVLITTDLLARGIDVQQVSLVINYDLPTQPENYLHRIGRSGRFGRKGVAINFVTREDERMLFDIQKFYNVVIEELPANVADLL

SEQ ID NO: 77556 - DNA, 1581 bp, Hordeum vulgare
  CDS (1)..(1581)
atgcaccacccgagggcccggtacccgcccggctacgactacggcggcggcggcggcggtggccgcggcggtaacggcggcggcggtggaggtggtggcggcgggaaccaaaactactacagcggccgaaacccccacccccagcaacacgattaccatcaccagcagcagcaacacgcgccgaggaactcgttcccgcagcagcagcagcagcagcagcacgcgcagaggaactcgttctcgcagcaacagcagcagcagcagcagcaacaacagcatcagcagtggctgcggcgggaccaggccgcggcccagtcgtcaggagagggagcggcgaggacggtggcgcgactcgacgcggtggacacgagctctcaagattggaaggcacagttgaatattccagctccagatactcgttttaggacagaggatgttactgcaacgaaaggcaatgagtttgaagattattttttgaaacgtgagctacttatgggaatatatgagaagggatttgaaagaccatctcctattcaagaagaaagcattcctattgctctaactggaagtgatattcttgcaagagcgaaaaacggcactgggaagaccgctgcattttgcattccagcgcttgaaaagattgacccagagaaaaatgccatacaagttgttatattggtacctacaagggaactagctctgcagacttcacaagtttgcaaagagcttgggaaatacctgaatattgaagttatggttagtactggaggaaccagcttgaaggatgacattatgcgtttgtaccaacctgttcatttactcgccgggacacctggccgtatactggatcttaccaagaagggcatttgtatgctgaacgaatgttcaatgctcatcatggatgaggcagacaagctgttagctcctgagtttcagccttctgtggagcaactcattcgttaccttccagctagtcggcaactattgctgttttctgcaacctttcctgtaactgtcaaggattttaagcagaaatacctaccaagaccttatgttattaatctgatggatgaactaacgctgaaaggaattacacaatactatgccttcgtagaagaaaggcaaaaggttcattgtctgaacacgcttttttcaaagcttcaaataaaccagtctattatattctgcaactctgttaatagagttgagctactggcaaagaaaatcactgagctcggctattcgtgcttctacattcacgctaaaatgttgcaagaccaccgaaaccgggtttttcatgatttccgcaatggcgcttgcagaaaccttgtttgcacagatctttttaccagaggaattgacattcaagctgttaatgttgtcattaattttgacttccccaagactgctgaaacatatttgcatagggttgggcgttctggaagatttggacaccttggtttggctgtgaacttaatcacttatgaggaccgtttcaacatgtataggattgagcaagaactcgggacagaaataaaaacaatacctccacagattgacctggcggagtattgccaatga

SEQ ID NO: 77557 - protein, 526 aa, Hordeum vulgare
MHHPRARYPPGYDYGGGGGGGRGGNGGGGGGGGGGNQNYYSGRNPHPQQHDYHHQQQQHAPRNSFPQQQQQQQHAQRNSFSQQQQQQQQQQQHQQWLRRDQAAAQSSGEGAARTVARLDAVDTSSQDWKAQLNIPAPDTRFRTEDVTATKGNEFEDYFLKRELLMGIYEKGFERPSPIQEESIPIALTGSDILARAKNGTGKTAAFCIPALEKIDPEKNAIQVVILVPTRELALQTSQVCKELGKYLNIEVMVSTGGTSLKDDIMRLYQPVHLLAGTPGRILDLTKKGICMLNECSMLIMDEADKLLAPEFQPSVEQLIRYLPASRQLLLFSATFPVTVKDFKQKYLPRPYVINLMDELTLKGITQYYAFVEERQKVHCLNTLFSKLQINQSIIFCNSVNRVELLAKKITELGYSCFYIHAKMLQDHRNRVFHDFRNGACRNLVCTDLFTRGIDIQAVNVVINFDFPKTAETYLHRVGRSGRFGHLGLAVNLITYEDRFNMYRIEQELGTEIKTIPPQIDLAEYCQ

SEQ ID NO: 77558 - DNA, 1227 bp, Helianthus annuus; identical to SEQ ID NO: 66068
  CDS (1)..(1227)

SEQ ID NO: 77559 - protein, 408 aa, Helianthus annuus; identical to SEQ ID NO: 66069

SEQ ID NO: 77560 - DNA, 1320 bp, Helianthus annuus; identical to SEQ ID NO: 66070
  CDS (1)..(1320)

SEQ ID NO: 77561 - protein, 439 aa, Helianthus annuus; identical to SEQ ID NO: 66071

SEQ ID NO: 77562 - DNA, 1233 bp, Helianthus annuus
  CDS (1)..(1233)
atggcttccgaaggtaatcagtttgatgctggccagtttgattcgaaaatgaacgagctgctttcatccgatggacaggatttttttacatcatatgacgaggtttatgatagtttcgacgccatgggtttgcaagaaaacctattgaggggcatttatgcatacggtttcgagaaaccatccgcaattcaacaaaggggaattgtccccttcaccaagggtctagacgtaattcaacaagctcaatccggaaccggaaaaaccgcaaccttttgctccggtatacttcaacaactcgactacaaaaccgtcgaatgccaggccttagttctagccccgactcgtgaacttgcacaacaaattgaaaaagttatgcgagcccttggtgactacctcggtgttaaggtacatgcttgtgttggtggcaccagtgttcgtgaggaccaacgtatactctcagctggggtccacgttgttgttggtacacctggacgtgtgttcgacatgcttaggagacagtcgttacgttccgactacattaaaatgtttgtgttggatgaggctgatgaaatgctttcaagaggtttcaaggatcagatttacgatatcttccagctattgccatcaaaggttcaggtcggagtattttccgcaacaatgccacccgaggcactcgagatcacaagaaaattcatgaacaaacccgtaagaattctcgtaaagcgtgatgaactcacgttagaaggtatcaaacaattctacgttaatgtcgaaaaagaggagtggaaactcgaaaccctctgcgacctttacgaaaccctagcaatcacccaaagcgtgatcttcgtcaacacccgccggaaagttgactggttgaccgacaaaatgagaagccgtgaccacaccgtgtcagctacacacggtgacatggaccagaacacacgtgacatcatcatgcgtgagtttcggtctgggtcatcgcgtgtgttgatcacaaccgatcttttggcgcgtggaattgacgtacagcaagtttcgcttgttatcaattatgatttaccgactcagccggaaaactaccttcacagaattgggcgtagtggtcggtttggtagaaaaggtgtagcgattaattttgtgacgttggatgatgagcgaatgcttgcggatattcagaagttttataatgtggtcgttgaggaactgccgtcaaatgtcgctgatcttatataa

SEQ ID NO: 77563 - protein, 410 aa, Helianthus annuus
MASEGNQFDAGQFDSKMNELLSSDGQDFFTSYDEVYDSFDAMGLQENLLRGIYAYGFEKPSAIQQRGIVPFTKGLDVIQQAQSGTGKTATFCSGILQQLDYKTVECQALVLAPTRELAQQIEKVMRALGDYLGVKVHACVGGTSVREDQRILSAGVHVVVGTPGRVFDMLRRQSLRSDYIKMFVLDEADEMLSRGFKDQIYDIFQLLPSKVQVGVFSATMPPEALEITRKFMNKPVRILVKRDELTLEGIKQFYVNVEKEEWKLETLCDLYETLAITQSVIFVNTRRKVDWLTDKMRSRDHTVSATHGDMDQNTRDIIMREFRSGSSRVLITTDLLARGIDVQQVSLVINYDLPTQPENYLHRIGRSGRFGRKGVAINFVTLDDERMLADIQKFYNVVVEELPSNVADLI

SEQ ID NO: 77564 - DNA, 1500 bp, Brassica napus; identical to SEQ ID NO: 66072
  CDS (1)..(1500)

SEQ ID NO: 77565 - protein, 499 aa, Brassica napus; identical to SEQ ID NO: 66073

SEQ ID NO: 77566 - DNA, 1239 bp, Brassica napus
  CDS (1)..(1239)
atggcaggatccgcaccagaaggcactcagtttgatgctcgtcagttcgaccagaagttgaacgaagttcttgagggacaggatgagttcttcacctcttacgatgaatcccacgacagctttgacgccatgggtctccaagagaatctcctcaggggtatctacgcttacggtttcgagaagccttctgctatccagcaaagaggaatcgttcccttttgcaaaggcctcgacgtgatccagcaggcccagtccggtaccggcaaaaccgccactttctgctccggcgtcctccagcagctagactactccctcgtccagtgccaagccctcgtcctcgccccgaccagagagctcgcccagcagatcgagaaggtcatgagagccctcggcgactacctcggcgtcaaggtccacgcctgcgtcggcgggaccagcgtccgcgaggaccagcgcatcctccaggccggcgtccacgtcgtcgtcggcaccccggggcgcgtgttcgacatgctgaagcgccagtccctccgcgccgacaacatcaagatgttcgtcctggacgaggccgacgagatgctctcccgcgggttcaaggaccagatctacgacatcttccagctcctcccgccgaagatccaggtgggagtcttctcggcgaccatgccgccggaggctctcgagatcacgaggaagttcatgagcaagccggtgaggatcctggtgaagcgcgacgagctgaccttggaaggtatcaagcagttttacgtcaacgttgagaaggaagactggaagctcgagacgctctgcgacctctacgagacgctggccatcactcagagcgtcatcttcgtgaacactaggcggaaggttgactggctcactgataaaatgagggggcgtgaccacacggtctcggcgactcacggagacatggaccagaacactagagacattatcatgagagagttcaggtctggctcttcgcgtgtgctgatcaccactgatctcttggctcgtggtatcgatgttcagcaggtgtctttggtgatcaactacgatctgccgactcagcctgagaactaccttcaccgtattggaagaagtgggaggtttgggaggaaaggtgtggcgatcaactttgtgaccaaggatgatgagaggatgctgtttgatattcagaagttttacaacgtggttgttgaggagctgccttccaacgttgctgatctgctgtga

SEQ ID NO: 77567 - protein, 412 aa, Brassica napus
MAGSAPEGTQFDARQFDQKLNEVLEGQDEFFTSYDESHDSFDAMGLQENLLRGIYAYGFEKPSAIQQRGIVPFCKGLDVIQQAQSGTGKTATFCSGVLQQLDYSLVQCQALVLAPTRELAQQIEKVMRALGDYLGVKVHACVGGTSVREDQRILQAGVHVVVGTPGRVFDMLKRQSLRADNIKMFVLDEADEMLSRGFKDQIYDIFQLLPPKIQVGVFSATMPPEALEITRKFMSKPVRILVKRDELTLEGIKQFYVNVEKEDWKLETLCDLYETLAITQSVIFVNTRRKVDWLTDKMRGRDHTVSATHGDMDQNTRDIIMREFRSGSSRVLITTDLLARGIDVQQVSLVINYDLPTQPENYLHRIGRSGRFGRKGVAINFVTKDDERMLFDIQKFYNVVVEELPSNVADLL

SEQ ID NO: 77568 - DNA, 1365 bp, Brassica napus; identical to SEQ ID NO: 66074
  CDS (1)..(1365)

SEQ ID NO: 77569 - protein, 454 aa, Brassica napus; identical to SEQ ID NO: 66075

SEQ ID NO: 77570 - DNA, 1227 bp, Brassica napus
  CDS (1)..(1227)
atggcggaagcgaatcctggccgtggaggtggaagaagaagcggcggaccaatggacgacgacaaattggtcttcgagacgacggaagggatcgagcccatcacgaatttcaacgacatggggatcaaggaggacgttctccgcggcgtctacgagtacggtttcgagaagccctccgcgattcagcagagagcggtcatgccgattctccaaggccgagatgtgatcgctcaggctcagtccggtaccggaaagacctcaatgattgctctctccgtctgccaaatcgttgacacttcgtctagagaagttcaggcgttgatattgtcgccaacgagggagctggcttcacagacggagaagactattcaagctattgggttgcacgctaatattcaggcgcatgcgtgtattggtgggaagagcgttggagaggatatcaggaagctggagaatggtgtccatgttgtgtctgggacgcctgggcgtgtttgtgatatgattaagaggaggagtctgcgtaccagagctattaagcttttgattcttgatgaatctgatgagatgctgagcagagggttcaaggaccaaatatatgatgtttacagatatcttccacctgatcttcaggtttgcttggtttctgcaactcttcctcacgagattttggagatgacatcaaagtttatgacggaaccagtgaagatacttgtgaagcgtgatgagttgactcttgaaggcattaaacaatttttcgttgctgttgagaaagaggaatggaaatttgatacactctgtgatctttatgacacgcttactatcactcaagctgttatcttctgcaacactaaacgaaaggtggattggctaagtgagaaaatgaggactaacaacttcacagtctcatcaatgcacggtgacatgcctcagaaggaaagagacgaaatcatgaatcagttccggtcaggcgacagtcgtgttttgatcacgacagatgtatgggcacgtgggattgacgtgcaacaagtttctctcgtcatcaattatgatctccccaacaaccgtgagctctacatccatcgtattggacgatctggtcgtttcggccgtaagggtgttgcgatcaactttgttaaaagcgacgacatcaagatcctccgggacattgagcagtactacagtactcagattgacgagatgccaatgaatgtagctgatcttatctaa

SEQ ID NO: 77571 - protein, 408 aa, Brassica napus
MAEANPGRGGGRRSGGPMDDDKLVFETTEGIEPITNFNDMGIKEDVLRGVYEYGFEKPSAIQQRAVMPILQGRDVIAQAQSGTGKTSMIALSVCQIVDTSSREVQALILSPTRELASQTEKTIQAIGLHANIQAHACIGGKSVGEDIRKLENGVHVVSGTPGRVCDMIKRRSLRTRAIKLLILDESDEMLSRGFKDQIYDVYRYLPPDLQVCLVSATLPHEILEMTSKFMTEPVKILVKRDELTLEGIKQFFVAVEKEEWKFDTLCDLYDTLTITQAVIFCNTKRKVDWLSEKMRTNNFTVSSMHGDMPQKERDEIMNQFRSGDSRVLITTDVWARGIDVQQVSLVINYDLPNNRELYIHRIGRSGRFGRKGVAINFVKSDDIKILRDIEQYYSTQIDEMPMNVADLI

SEQ ID NO: 77572 - DNA, 1233 bp, Brassica napus; identical to SEQ ID NO: 66076
  CDS (1)..(1233)

SEQ ID NO: 77573 - protein, 410 aa, Brassica napus; identical to SEQ ID NO: 66077

SEQ ID NO: 77574 - DNA, 1284 bp, Brassica napus
  CDS (1)..(1284)
atgggagacgctagggacaacgaagcctatgaggaggagctccttgattatgaggaagaggacgagaaggttctcgattctgggaataaagttaacggcgacgctgtgaagaaaggttacgttgggatacacagttcaggattcagagacttccttttgaagccggagcttctccgagctattgttgactctggatttgagcatccatctgaagtgcaacatgaatgtatccctcaagctatcttgggcatggatgttatctgccaagctaagtctggtatggggaagactgctgtgtttgtgctttccactctgcaacagatcgagcctactcctggccaggtgtctgcacttatcctctgccatacaagagagttagcttaccagatctgcaatgagtttgtgcgattcagtacctacctgcctgatacaaaggtttcagtgttctatggaggagtcaacaacaaaattcacaaagaactgctgaagaatgaatgtcctcacattgttgttggaacacctggtcgagttcttggactcgccagggacaaagatctctctttgaagaatgtgaggcattttattcttgatgagtgtgataaaatgctcgagtcactagacatgcggagggatgtgcaggagattttcaagatgactccccacgacaaacaagttatgatgttctcagcaacgctcagcaaagagatacgcccagtctgcaagaaatttatgcaagatccaatggaaatatatgttgatgatgaagccaaattgactcttcatgggcttgtccagcactacatcaaactgagcgagatggagaaaaaccgcaagttgaatgaccttctcgacgcattggacttcaatcaagttgtcatatttgtgaagagcgttagcagagctggggagctgaacaagttgcttatcgaatgcaatttcccctcaatatgcattcactctggcatgtctcaggaagagaggctgactcactacaaaagtttcaaggaagggcacaagagaattctggtggcgacagacttggtagggagaggaattgacattgagcgtgtcaacattgtcatcaactacgacatgccagattctgctgatacatatcttcacagggttgggagagctggaaggtttggaacaaagggtcttgcaatcacatttgtggcatcagcttcggactcggaagttcttaatcaggtacaagacaggtttgaggttgatataaaggaacttcctgagcagattgatacttccacatacatgccgtcttaa

SEQ ID NO: 77575 - protein, 427 aa, Brassica napus
MGDARDNEAYEEELLDYEEEDEKVLDSGNKVNGDAVKKGYVGIHSSGFRDFLLKPELLRAIVDSGFEHPSEVQHECIPQAILGMDVICQAKSGMGKTAVFVLSTLQQIEPTPGQVSALILCHTRELAYQICNEFVRFSTYLPDTKVSVFYGGVNNKIHKELLKNECPHIVVGTPGRVLGLARDKDLSLKNVRHFILDECDKMLESLDMRRDVQEIFKMTPHDKQVMMFSATLSKEIRPVCKKFMQDPMEIYVDDEAKLTLHGLVQHYIKLSEMEKNRKLNDLLDALDFNQVVIFVKSVSRAGELNKLLIECNFPSICIHSGMSQEERLTHYKSFKEGHKRILVATDLVGRGIDIERVNIVINYDMPDSADTYLHRVGRAGRFGTKGLAITFVASASDSEVLNQVQDRFEVDIKELPEQIDTSTYMPS

SEQ ID NO: 77576 - DNA, 1476 bp, Brassica napus; identical to SEQ ID NO: 66078
  CDS (1)..(1476)

SEQ ID NO: 77577 - protein, 491 aa, Brassica napus; identical to SEQ ID NO: 66079

SEQ ID NO: 77578 - DNA, 1239 bp, Brassica napus
  CDS (1)..(1239)
atggcaggatccgcaccagaaggcacacagtttgatgctcgtcagttcgaccagaagcttaacgaagttctcgagggacaagatgagttcttcacctcttacgacgaggttcacgacagcttcgacgtcatgggtctccaagagaatctcctcaggggcatttacgcttatggttttgagaagccatctgctatccagcaaagaggaatcgtcccgttctgcaaaggcctcgacgtgatccaacaagcccaatccggaaccggcaaaaccgccaccttctgctccggcgtcctccagcagctggacttcgccatcgtccagtgccaagccctcgtcctcgctccaaccagagagctcgcccagcagatcgagaaggtcatgagggcactcggtgactacctcggcgtcaaggtccacgcctgcgtcggcgggaccagcgtccgcgaggaccagcgcatcctccagaccggcgtccacgtcgtcgtcggcaccccggggcgtgtcttcgacatgctgaagcgccagtccctccgcgccgacaacatcaagatgtttgttcttgacgaggccgacgagatgctctcccgcgggttcaaggaccagatctacgacatcttccagcttctcccaccaaagatccaagtcggcgtcttctcggcgaccatgcccccggaggctctcgagatcacgaggaagttcatgagcaagccggtgaggatcctggtcaagcgcgacgagctgaccttggaaggtatcaagcagttttacgtcaacgttgagaaggaggagtggaagctcgagacgctctgcgacctctacgagacgctcgccatcactcagagcgtcatcttcgtgaacacgaggaggaaggtggactggctcaccgacaagatgagggggcgtgaccacacggtctcggcgactcacggagacatggaccagaacacgagagacatcatcatgagggagtttaggtccgggtcctcgcgtgtgctcatcaccactgatctcttggctcgtggtatcgatgttcagcaggtgtctttggttatcaactacgatctgccgactcagcctgagaactaccttcaccgtatcggaagaagtgggaggtttgggaggaaaggtgtggcgatcaactttgtgaccaaggatgatgagaggatgctgtttgatatccagaagttttacaacgtggttgttgaggagcttccttccaacgttgctgatctgctttga

SEQ ID NO: 77579 - protein, 412 aa, Brassica napus
MAGSAPEGTQFDARQFDQKLNEVLEGQDEFFTSYDEVHDSFDVMGLQENLLRGIYAYGFEKPSAIQQRGIVPFCKGLDVIQQAQSGTGKTATFCSGVLQQLDFAIVQCQALVLAPTRELAQQIEKVMRALGDYLGVKVHACVGGTSVREDQRILQTGVHVVVGTPGRVFDMLKRQSLRADNIKMFVLDEADEMLSRGFKDQIYDIFQLLPPKIQVGVFSATMPPEALEITRKFMSKPVRILVKRDELTLEGIKQFYVNVEKEEWKLETLCDLYETLAITQSVIFVNTRRKVDWLTDKMRGRDHTVSATHGDMDQNTRDIIMREFRSGSSRVLITTDLLARGIDVQQVSLVINYDLPTQPENYLHRIGRSGRFGRKGVAINFVTKDDERMLFDIQKFYNVVVEELPSNVADLL

SEQ ID NO: 77580 - DNA, 1500 bp, Brassica napus
  CDS (1)..(1500)
atgagtcgctacgatagccggaccggcgactccacctcctaccgtgaccgtcgaagtgactcagggtttggtggagcttcagcatacggaagctcagctagtaaaagggagagtagtagtgttggcgatgagtctccaaagaagcctgatttggatggtttgactcctttcgagaagaatttttatgttgagtctccctctgtggcggctatgacggaggcggaagtggaggagtatcgaaagaagagggagattactgttgaaggtcgtgatattcctaaacctgtcaaaagctttcgtgatgttggctttcctgattatgttttggaagaggttaagaaggctggttttactgaacctacacctatacaatcacaagggtggccaatggcgttgaagggacgtgatctcattggcattgctgaaactggctctggaaagactctttcttacttgctacctgccatagtccatgtgaatgctcaaccaattttagctcctggagacggcccaatagtcttggttcttgctcctacacgtgaactggctgtgcagatacagcaagaagcgtctaagtttggttcatcgtcaaagattaagagcacttgcatttacggtggtgttccaaaagggcctcaagtgcgtgatctccagaaaggtgtggagattgttatagctactcctgggaggttaatagacatgatggaatcgaacaacacaaacttgcggagggttacgtatcttgttttggatgaggctgatcgaatgctggatatggggtttgaccctcagatccggaaaattgtctcacatattcggccagaccgtcaaactttgtactggagtgctacttggccaaaggaggtggaacaactctctaagaagtttctttataacccatacaaagtgataataggttcttcagatttaaaagctaaccgtgcaatccgtcagattgttgatgtcatctccgaaagtcaaaagtacaacaagttggtgaagttgcttgaagacataatggatggaagcaggattcttgtcttccttgacaccaaaaaaggctgcgaccaaatcactcgtcagcttcgcatggatggttggcctgctttgtcaatacatggtgataaaagtcaagccgagagagattgggttctctcggagtttagatcaggcaaaagccctataatgactgctactgacgttgcagctcgtggactagatgttaaggatgtgaagtatgtgataaactatgacttccctggatcactggaggattatgttcacaggattggacgaactggtagagctggggccaaaggaacagcttacagtttcttcacagctgcaaatgcgagattcgccaaagagcttatcagcatactagaagaagctggacagaaagtgagccacgaattagcttcaatgggtcgcagcactgctcctcctcctccagggcttggaggatttagagaccgtggaagcagaagagcttggagctga

SEQ ID NO: 77581 - protein, 499 aa, Brassica napus
MSRYDSRTGDSTSYRDRRSDSGFGGASAYGSSASKRESSSVGDESPKKPDLDGLTPFEKNFYVESPSVAAMTEAEVEEYRKKREITVEGRDIPKPVKSFRDVGFPDYVLEEVKKAGFTEPTPIQSQGWPMALKGRDLIGIAETGSGKTLSYLLPAIVHVNAQPILAPGDGPIVLVLAPTRELAVQIQQEASKFGSSSKIKSTCIYGGVPKGPQVRDLQKGVEIVIATPGRLIDMMESNNTNLRRVTYLVLDEADRMLDMGFDPQIRKIVSHIRPDRQTLYWSATWPKEVEQLSKKFLYNPYKVIIGSSDLKANRAIRQIVDVISESQKYNKLVKLLEDIMDGSRILVFLDTKKGCDQITRQLRMDGWPALSIHGDKSQAERDWVLSEFRSGKSPIMTATDVAARGLDVKDVKYVINYDFPGSLEDYVHRIGRTGRAGAKGTAYSFFTAANARFAKELISILEEAGQKVSHELASMGRSTAPPPPGLGGFRDRGSRRAWS

SEQ ID NO: 77582 - DNA, 1530 bp, Brassica napus; identical to SEQ ID NO: 66080
  CDS (1)..(1530)

SEQ ID NO: 77583 - protein, 509 aa, Brassica napus; identical to SEQ ID NO: 66081

SEQ ID NO: 77584 - DNA, 1284 bp, Brassica napus; identical to SEQ ID NO: 66082
  CDS (1)..(1284)

SEQ ID NO: 77585 - protein, 427 aa, Brassica napus; identical to SEQ ID NO: 66083

SEQ ID NO: 77586 - DNA, 1239 bp, Brassica napus; identical to SEQ ID NO: 66084
  CDS (1)..(1239)

SEQ ID NO: 77587 - protein, 412 aa, Brassica napus; identical to SEQ ID NO: 66085

SEQ ID NO: 77588 - DNA, 1239 bp, Brassica napus; identical to SEQ ID NO: 66086
  CDS (1)..(1239)

SEQ ID NO: 77589 - protein, 412 aa, Brassica napus; identical to SEQ ID NO: 66087

SEQ ID NO: 77590 - DNA, 1227 bp, Brassica napus; identical to SEQ ID NO: 66088
  CDS (1)..(1227)

SEQ ID NO: 77591 - protein, 408 aa, Brassica napus; identical to SEQ ID NO: 66089

SEQ ID NO: 77592 - DNA, 1245 bp, Zea mays
  CDS (1)..(1245)
atggcaggaatggcacccgagggttctcagtttgatgctaagcactatgattctaaaatgcaggagctgctgagcactggtgagactgaggagttcttcacttcatatgatgaagtttttgaaagttttgatgacatgggccttcaagagaatcttctgagaggcatttatgcatatggttttgagaaaccatctgcaattcagcagagaggaattgttcccttctgcaaggggcttgatgtcattcagcaagcacaatctggtacaggaaagacagcaaccttctgttctgggatcttgcagcagcttgactatggtctggttgaatgccaggccctggtccttgctcccacccgtgagcttgcacagcaaatcgagaaagtcatgcgcgcgcttggtgactaccttggtgttaaggtccatgcatgtgtgggaggaacatccgtccgtgaggaccaaaggattctcgccagtggtgtgcatgttgttgttggtacacctggtcgtgtgtttgacatgctgcgtagacagtccctccgccctgataacatcaagatgtttgttcttgatgaagctgatgaaatgctttctcgtggtttcaaggatcagatttatgacatcttccagcttctgccatccaagattcaggttggagtcttctctgctaccatgccacctgaggcccttgagattacccgcaagttcatgaacaaaccagtgagaattcttgtgaagagagatgagctgacccttgagggtatcaagcagttctatgtgaatgtggacaaggaagactggaagctggacacactgtgtgacctgtatgagaccctggccattacccagagtgtcatctttgtcaacacccgccgcaaggtggactggctcactgacaagatgaggagcagggaccacaccgtttctgccactcatggtgacatggaccagaacactagagacatcatcatgagggagttccggtctggctcctcccgtgtgctcatcaccaccgacctgcttgctcgtggtattgatgttcagcaggtgtccctggtcatcaactatgatctccccacccagccagagaattacctgcatcgcattggtcgtagtggtcgtttcggtaggaagggtgttgccatcaactttgtgacccgcgacgacgagcggatgctgttcgacatccagaagttctacaacgtgttgattgaggagctgcctgccaacgtcgctgaccttctgtga

SEQ ID NO: 77593 - protein, 414 aa, Zea mays; identical to SEQ ID NO: 65227

SEQ ID NO: 77594 - DNA, 1626 bp, Zea mays; identical to SEQ ID NO: 66090
  CDS (1)..(1626)

SEQ ID NO: 77595 - protein, 541 aa, Zea mays; identical to SEQ ID NO: 66091

SEQ ID NO: 77596 - DNA, 1284 bp, Zea mays
  CDS (1)..(1284)
atgggtgaggcgaaggacaacgaggtgtacgaggaggacctagtcgactatgaggaggaggtggagaatgtcattgatggcgcccccaccaacggctcctcagatgtcgtcaagaaggggtacgtagggatccacagctcggggttcagagacttcctgctcaagccagagcttcttcgcgccattcaggattgcgggtttgagcatccttctgaagtgcaacatgagtgcatccctcaagctattcttggaatggatgtcatctgtcaagcaaaatctggaatgggtaagactgcagtttttgtcctgtcaactcttcagcagattgatcctgttgctggccaagtagctgcacttgtgttgtgccacacaagagaattagcttaccagatttgccatgaatttgagaggtttagcaaatacctgcctgaattaagagtagctgttttctatggtggtgttcacataaaaaaccacaaggatctgctgaagaatgaatgcccccatattgtggttggcacgcctggcaggatactagctctagctagagataaggaccttcccttgaagaatgtgcggcatttcattcttgatgaatgtgacaagatgctcgaatcacttgacatgcgcagagatgtccaggagatcttcaaaatgactccgcatgataagcaagtgatgatgttttcagcaacactcagcaaggagattcgacctgtttgcaagaggttcatgcaagatcctatggaaatttatgttgatgatgaggctaaactgacccttcatggtctagttcagcactatatcaaattaagtgaggcagagaagaaccgaaagttgaacgatcttttagatgcactcgacttcaaccaagttgtgatatttgttaaaagtgttagtagagctgcagaactcaacaaattgctctgcgagtgcaatttcccctcaatctgtatacattctggaatgacacaggaagagaggttgacacggtacaagaacttcaaggaaggacacaagaggattcttgtggctactgatttggttggtaggggaatcgacattgaacgtgtcaacattgtcgtaaactatgatatgcctgattccgctgatacatacctgcatagggttggtcgggctggacgttttggtaccaagggacttgcaataacatttgtttcttcatctgattctgatgttctcaatcaagtgcaggagaggtttgaggttgacataaaggagctgcctgagcagattgacacgtcgacatacatgccatcttga

SEQ ID NO: 77597 - protein, 427 aa, Zea mays
MGEAKDNEVYEEDLVDYEEEVENVIDGAPTNGSSDVVKKGYVGIHSSGFRDFLLKPELLRAIQDCGFEHPSEVQHECIPQAILGMDVICQAKSGMGKTAVFVLSTLQQIDPVAGQVAALVLCHTRELAYQICHEFERFSKYLPELRVAVFYGGVHIKNHKDLLKNECPHIVVGTPGRILALARDKDLPLKNVRHFILDECDKMLESLDMRRDVQEIFKMTPHDKQVMMFSATLSKEIRPVCKRFMQDPMEIYVDDEAKLTLHGLVQHYIKLSEAEKNRKLNDLLDALDFNQVVIFVKSVSRAAELNKLLCECNFPSICIHSGMTQEERLTRYKNFKEGHKRILVATDLVGRGIDIERVNIVVNYDMPDSADTYLHRVGRAGRFGTKGLAITFVSSSDSDVLNQVQERFEVDIKELPEQIDTSTYMPS

SEQ ID NO: 77598 - DNA, 2409 bp, Zea mays; identical to SEQ ID NO: 66092
  CDS (1)..(2409)

SEQ ID NO: 77599 - protein, 802 aa, Zea mays; identical to SEQ ID NO: 66093

SEQ ID NO: 77600 - DNA, 1500 bp, Zea mays
  CDS (1)..(1500)
atgcaccagcctagagctcgctacccacccggctatggctccggcggtggaggcggagccggacgtggcggtggaggcggaaatggaggaggtggcggaaaccacaactactacggccgaaacccgcagcaacaccactaccaccagcagcagcagtcgcagcactctcataggaactcttcgtaccagcaacagtggctgcggcgagaccaggcccccgccgttgcgggggcagcgtccggaaacgctgtggccaagacggcgtctcagcttgacgccgtaggctcgagctcccaagactggaaggctcaactaaatataccagctccagatacacgctacaggacagaggatgtcactgcaacaaaaggcaatgagtttgaagattatttcttgaaacgtgaactgcttatgggaatctacgaaaagggatttgaaagaccatctcctattcaagaagaaagcattcctattgcgctgactggaagtgatattcttgcaagggcaaaaaatggcactggaaagactgctgccttttgcattccggcacttgaaaaaattgatcctgaaaataatgcaattcaagttgttatactagtaccaacaagggaactggctctgcaaacttcacaagtgtgtaaagagcttgggaaatacctaaacattgaagttatggttagcactggaggaaccagcttgaaggatgacatcatgcgtttataccaacctgttcatctactcgttgggactcctggccgaatacttgatcttaccaggaagggcatttgtgtgctgaaagattgttcaatgcttgtcatggatgaggcagacaagctattagctccagagttccagccttctgtggaggcacttattcatttccttccacctagtcggcagctgttgatgttttcagcaacctttcctgtaactgtcaaggaattcaaagagaaatatctgcctagaccttatgtgattaatctaatggacgaactgaccctgaaaggaatcacacaatattatgcttttgttgaagaaaggcagaaagttcattgcctgaatacacttttctcaaagcttcaaattaatcaatccattatattctgcaactctgttaatagagttgagctgctggctaaaaaaataactgaactcggttattcatgcttctacattcatgctaagatgttgcaagaccacagaaatcgagtatttcatgattttcgtaatggtgcttgcagaaaccttgtgtgcacagatctgtttaccagaggaattgatatccaggctgttaatgtggtcattaattttgacttccctaagacatctgagacatacttacacagggttggccgttctgggagatatggacaccttggtttggcagtgaacttgatcacttatgaagaccgtttcaacttatataggattgagcaagaacttggaacggaaattaagacaatacccccacagattgacctgtccatatactgccaatga

SEQ ID NO: 77601 - protein, 499 aa, Zea mays
MHQPRARYPPGYGSGGGGGAGRGGGGGNGGGGGNHNYYGRNPQQHHYHQQQQSQHSHRNSSYQQQWLRRDQAPAVAGAASGNAVAKTASQLDAVGSSSQDWKAQLNIPAPDTRYRTEDVTATKGNEFEDYFLKRELLMGIYEKGFERPSPIQEESIPIALTGSDILARAKNGTGKTAAFCIPALEKIDPENNAIQVVILVPTRELALQTSQVCKELGKYLNIEVMVSTGGTSLKDDIMRLYQPVHLLVGTPGRILDLTRKGICVLKDCSMLVMDEADKLLAPEFQPSVEALIHFLPPSRQLLMFSATFPVTVKEFKEKYLPRPYVINLMDELTLKGITQYYAFVEERQKVHCLNTLFSKLQINQSIIFCNSVNRVELLAKKITELGYSCFYIHAKMLQDHRNRVFHDFRNGACRNLVCTDLFTRGIDIQAVNVVINFDFPKTSETYLHRVGRSGRYGHLGLAVNLITYEDRFNLYRIEQELGTEIKTIPPQIDLSIYCQ

SEQ ID NO: 77602 - DNA, 1242 bp, Glycine max
  CDS (1)..(1242)
atggcaggtttggctccagaaggatcgcagtttgatgctcggcaatatgattctaagatgaatgaattgctttccgccgatggacaagaatttttcacttcatatgacgaagtctatgatagttttgatgcaatgggccttcaagaaaatcttctgagaggcatatatgcttatggttttgagaggccttctgcaatccagcagaggggaattgttcctttctgcaagggtctggatgtgattcagcaggctcagtctggaactggaaagacagcaacgttctgttcaggaattttgcagcagcttgactatggattggtacagtgtcaggctttggttttggcaccaacaagggagcttgcacaacagattgagaaggttatgcgagctctaggtgattaccttggtgtcaaggttcatgcttgtgttggtgggaccagtgttcgtgaggatcagcgcattctccaagctggtgtccatactgttgttggcactcctgggcgagtgtttgacatgctgcggaggcagtctcttcgcccagattgcataaagatgtttgttttggatgaggctgatgaaatgctttcacgtggtttcaaggatcagatctatgacatcttccagctgctgccatccaaaattcaggttggagtgttctctgctacaatgccgccagaagcccttgaaattacaaggaagttcatgaataagccagtgagaatcctggtaaagcgtgatgaactgaccctggagggtataaagcagttttatgtcaatgttgacaaggaagagtggaagctggagacattatgtgacctttatgagactctggctatcactcagagtgtcatttttgtgaataccaggcgcaaggtggactggctcactgacaagatgcgaagcaatgaccacacagtctctgccacccatggtgacatggaccaaaacacacgtgatattatcatgcgtgaattccggtccggctcttctcgagttctcattaccacggaccttctggcccgtggtatcgatgtgcagcaagtgtctctggtcataaactatgatctgccaacccaacctgaaaactatctccaccgcataggacgtagtggtcgatttggaagaaaaggagttgctataaactttgtcacgacagatgattccaggatgctgtctgatattcagaagttctacaatgtgactgtagaggagctgccatcaaatgttgctgatttactctga

SEQ ID NO: 77603 - protein, 413 aa, Glycine max
MAGLAPEGSQFDARQYDSKMNELLSADGQEFFTSYDEVYDSFDAMGLQENLLRGIYAYGFERPSAIQQRGIVPFCKGLDVIQQAQSGTGKTATFCSGILQQLDYGLVQCQALVLAPTRELAQQIEKVMRALGDYLGVKVHACVGGTSVREDQRILQAGVHTVVGTPGRVFDMLRRQSLRPDCIKMFVLDEADEMLSRGFKDQIYDIFQLLPSKIQVGVFSATMPPEALEITRKFMNKPVRILVKRDELTLEGIKQFYVNVDKEEWKLETLCDLYETLAITQSVIFVNTRRKVDWLTDKMRSNDHTVSATHGDMDQNTRDIIMREFRSGSSRVLITTDLLARGIDVQQVSLVINYDLPTQPENYLHRIGRSGRFGRKGVAINFVTTDDSRMLSDIQKFYNVTVEELPSNVADLL

SEQ ID NO: 77604 - DNA, 1242 bp, Glycine max; identical to SEQ ID NO: 66096
  CDS (1)..(1242)

SEQ ID NO: 77605 - protein, 413 aa, Glycine max; identical to SEQ ID NO: 66097

SEQ ID NO: 77606 - DNA, 1242 bp, Glycine max; identical to SEQ ID NO: 66098
  CDS (1)..(1242)

SEQ ID NO: 77607 - protein, 413 aa, Glycine max; identical to SEQ ID NO: 66099

SEQ ID NO: 77608 - DNA, 1770 bp, Glycine max; identical to SEQ ID NO: 66100
  CDS (1)..(1770)

SEQ ID NO: 77609 - protein, 589 aa, Glycine max; identical to SEQ ID NO: 66101

SEQ ID NO: 77610 - DNA, 1242 bp, Glycine max
  CDS (1)..(1242)
atggctgggttggcgccagaaggatcacaatttgatgctcgtcaatatgatgctaagatgaatgagttacttggaactgatgggcaagatttttttacttcttatgacgaagtttgtgaaagctttgatgctatgggattgcaggagaaccttctgaggggtatttatgcatatggttttgagaagccctctgcaattcaacaaagggggattgttcctttctgcaaggggcttgatgttattcagcaagcacaatctggaactggaaaaactgctaccttttgttctggagttttgcagcagcttgattacagcttagtagaatgccaggcactggttcttgctcccactcgtgaacttgcacaacaaattgaaaaggtcatgcgagcactaggggactatcttggtgtcaaggttcatgcttgtgttggtgggaccagtgttcgtgaagatcaacgcatcctctcaagtggggttcatgttgttgttggtactcctggacgtgtatttgacatgctgcgcaggcaatcattgcgctctgataacatcaggatgtttgtattggatgaggcagatgagatgctctctcgaggtttcaaggatcagatctatgatatttttcagctgctgccacctaagatccaggttggggttttctctgccacaatgcctcctgaagccctggaaatcacaaggaagtttatgaacaaacctgtgaggattctagtaaaacgtgatgagcttaccttggaggggatcaagcaattttttgtcaatgtagacaaggaggactggaagctcgagacactatgtgatctttatgaaactttggcaatcacccagagtgttatctttgtgaacaccagacgcaaggtagattggctgacagacaaaatgcggagtcgtgatcacacagtttcagccactcatggagatatggaccaaaacacaagggatatcatcatgcgggaattccgttctgggtcctcccgtgttcttattaccacagatcttttggcccgtggtattgatgtccaacaagtctcacttgttataaattatgatctgccaactcagccagagaactatctccatcgaattggtcgtagtggacggtttgggagaaagggtgttgctatcaattttgtgactggggatgatgaaaggatgctgtttgacatccaaaagttttataatgtgcagattgaggagctgccagccaatgtagccgatctcatttga

SEQ ID NO: 77611 - protein, 413 aa, Glycine max
MAGLAPEGSQFDARQYDAKMNELLGTDGQDFFTSYDEVCESFDAMGLQENLLRGIYAYGFEKPSAIQQRGIVPFCKGLDVIQQAQSGTGKTATFCSGVLQQLDYSLVECQALVLAPTRELAQQIEKVMRALGDYLGVKVHACVGGTSVREDQRILSSGVHVVVGTPGRVFDMLRRQSLRSDNIRMFVLDEADEMLSRGFKDQIYDIFQLLPPKIQVGVFSATMPPEALEITRKFMNKPVRILVKRDELTLEGIKQFFVNVDKEDWKLETLCDLYETLAITQSVIFVNTRRKVDWLTDKMRSRDHTVSATHGDMDQNTRDIIMREFRSGSSRVLITTDLLARGIDVQQVSLVINYDLPTQPENYLHRIGRSGRFGRKGVAINFVTGDDERMLFDIQKFYNVQIEELPANVADLI

SEQ ID NO: 77612 - DNA, 1242 bp, Glycine max
  CDS (1)..(1242)
atggcaggtttggctccagaaggatcgcagtttgatgctcggcaatatgactctaagatgaatgaattgctttccgctgatggacaagaatttttcacttcatatgatgaagtctatgatagttttgatgcaatgggccttcaagaaaatcttctcagaggcatatatgcttatggttttgagaggccttctgcaatacagcaaaggggaattgttcctttctgcaagggtctggatgtgattcagcaggctcagtctggaactggaaagacagcaacattctgttcggggattttgcaacagcttgactatggattggtacagtgtcaggctttggttttggcaccaacaagggagcttgcacaacagattgagaaggttatgcgagctctaggtgattaccttggtgtcaaggttcatgcttgtgttggtgggaccagtgttcgtgaggatcagcgcattctccaagctggtgtccatactgttgttggcactcctggacgtgtgtttgacatgctacgaagacaatctcttcgcccagatcacataaaaatgtttgttttggatgaggctgatgaaatgctttcacgtggtttcaaggaccagatctatgacatcttccagctactgccaggtcaaattcaggttggagtgttctctgctacaatgccacctgaggccctggagattacaaggaagttcatgaataagccagtgagaatcctggtaaagcgtgatgaattgacgcttgagggtatcaagcagttttatgtgaatgttgataaggaagattggaaactggagacattatgcgacctttatgagactttggctatcactcagagtgtcatctttgtgaacaccaggcgcaaggtggactggctcactgacaagatgcgaagcaatgaccatacagtctcagccacccatggagacatggaccaaaacactcgcgatatcatcatgcgtgaatttcgctctggctcttctcgagttctaattaccactgacctcttggctcgtggtatagatgtacagcaagtgtctttggttataaactatgatcttcctacccaacctgaaaattatcttcatcgcataggacgaagtgggcgttttggaagaaaaggtgttgccataaactttgtgactttggatgatgcaagaatgctgtctgatattcagaagttctacaatgtgactgtagaggagttgccatcaaatgtggctgatctgctctga

SEQ ID NO: 77613 - protein, 413 aa, Glycine max
MAGLAPEGSQFDARQYDSKMNELLSADGQEFFTSYDEVYDSFDAMGLQENLLRGIYAYGFERPSAIQQRGIVPFCKGLDVIQQAQSGTGKTATFCSGILQQLDYGLVQCQALVLAPTRELAQQIEKVMRALGDYLGVKVHACVGGTSVREDQRILQAGVHTVVGTPGRVFDMLRRQSLRPDHIKMFVLDEADEMLSRGFKDQIYDIFQLLPGQIQVGVFSATMPPEALEITRKFMNKPVRILVKRDELTLEGIKQFYVNVDKEDWKLETLCDLYETLAITQSVIFVNTRRKVDWLTDKMRSNDHTVSATHGDMDQNTRDIIMREFRSGSSRVLITTDLLARGIDVQQVSLVINYDLPTQPENYLHRIGRSGRFGRKGVAINFVTLDDARMLSDIQKFYNVTVEELPSNVADLL

SEQ ID NO: 77614 - DNA, 1284 bp, Glycine max
  CDS (1)..(1284)
atgggagaaacaaaggacgaagcatacgaggaagagcttctcgattacgaggaggaagacgaaaaggcccccgactccgccggagctaaagtcaacggcgaagctaccaagaagggctatgttggaattcacagttcgggattcagggacttccttctgaagccagagcttcttcgggctattgtggactcgggatttgagcatccatctgaagtgcaacatgagtgcataccacaagcaattctcgggatggatgtaatttgtcaagcaaaatctggaatgggaaagactgctgtttttgttctgtcgactctgcagcagattgatcctgttcctggccaagtttctgcacttgttctttgtcatacaagagaattagcataccagatatgccatgagttcgagaggtttagcacctacttgccagatctcaaggttgctgtcttttatggtggggtcaacatcaaagttcacaaggatctgctgaaaaatgagtgccctcatattgttgttggaacaccgggaagaatactggcattgaccagggataaggacctttctttaaagaatgttagacatttcatattggatgaatgcgacaagatgctggaatcattggatatgaggaaagatgttcaagacattttcaagatgactccccatgataagcaagttatgatgttctcagcaacactcagcaaggaaattcgcccagtctgcaagaaatttatgcaagatcctatggaaatttatgttgatgatgaggccaagttgacacttcacgggcttgtgcagcactacatcaaattgaaagaggaggaaaagaatcggaagttgaatgatcttcttgatgcactggactttaatcaagttgtgatcttcgtgaaaagtgttagcagagcagctgagctggacaaactacttgtggagtgcaactttccatctatatgcattcactctggcatgtcccaggaagaaaggttaaagcgctataaaggtttcaaggaggggcatacaaggattcttgttgcaacagatttggttggaagagggattgatattgaacgtgtcaacattgttataaactatgacatgcctgattccgcagacacatacttgcacagggttggtcgagctggaagatttggcaccaaaggccttgcaatcacatttgtttcttgttctactgatgtcgatgttctcaacaatgttcagtctaggtttgaggtggatataaagcagcttcctgagcagattgatacctctacctatatgccatcgtag

SEQ ID NO: 77615 - protein, 427 aa, Glycine max; identical to SEQ ID NO: 66127

SEQ ID NO: 77616 - DNA, 1743 bp, Glycine max; identical to SEQ ID NO: 66104
  CDS (1)..(1743)

SEQ ID NO: 77617 - protein, 580 aa, Glycine max; identical to SEQ ID NO: 66105

SEQ ID NO: 77618 - DNA, 1242 bp, Glycine max
  CDS (1)..(1242)
atggcaggaattgcacccgagggatcacagtttgatgctcgtcaatatgataccaagatgaatgagctgcttacgtccgatggtcaggatttcttcacatcctacgatgaggtttatgacagttttgatgctatgggcttgcaagagaatctcctgagaggcatttatgcatatggttttgagaagccatcagctattcagcaaaggggaatagttccattctgcaagggacttgacgttatacaacaggcccagtctggaactgggaaaacagcaactttctgctctggaattctgcagcaacttgactatagtgtgactgaatgccaagccttggttttagcaccaactagggagcttgctcagcaaattgaaaaggttatgcgggcactcggagattatcttggtgtgaaggtgcacgcatgtgtgggaggtaccagtgttcgtgaagaccaacgcattctatcaagtggtgttcatgttgttgttggtactcctggtcgtgtatttgatatgctgcgcagacagtcacttcggccagactacatcaagatgtttgtattggatgaggctgatgaaatgctttcccgtggttttaaagatcagatctatgatatattccagttgcttccatctaagattcaagtgggagttttctctgctacaatgcctcctgaggcacttgagatcacaaggaagttcatgaacaaacctgtgaggatccttgtgaagcgtgatgagctcaccttggagggtatcaagcaatttcatgtcaatgttgagaaagaggaatggaagcttgacacactatgtgatctttatgagacattggcaattactcagagtgtcatttttgtgaacaccagaagaaaggttgattggctgactgacaagatgcgaagccgagaccacacagtctcagcaacccatggagacatggaccaaaataccagggacattattatgcgtgaattccgttctgggtcatcccgtgttttaataactactgatcttttggcccgtggtattgatgtccagcaagtgtctctagttataaattatgatctcccaacacagcctgagaactatctccatcgtattggtcgtagtggaaggtttggtaggaaaggtgttgccattaactttgtcacaagggatgatgaaaaaatgctgtttgacatccagaagttttacaatgtgattattgaggagctgccttcaaatgttgctgaactcctttga

SEQ ID NO: 77619 - protein, 413 aa, Glycine max
MAGIAPEGSQFDARQYDTKMNELLTSDGQDFFTSYDEVYDSFDAMGLQENLLRGIYAYGFEKPSAIQQRGIVPFCKGLDVIQQAQSGTGKTATFCSGILQQLDYSVTECQALVLAPTRELAQQIEKVMRALGDYLGVKVHACVGGTSVREDQRILSSGVHVVVGTPGRVFDMLRRQSLRPDYIKMFVLDEADEMLSRGFKDQIYDIFQLLPSKIQVGVFSATMPPEALEITRKFMNKPVRILVKRDELTLEGIKQFHVNVEKEEWKLDTLCDLYETLAITQSVIFVNTRRKVDWLTDKMRSRDHTVSATHGDMDQNTRDIIMREFRSGSSRVLITTDLLARGIDVQQVSLVINYDLPTQPENYLHRIGRSGRFGRKGVAINFVTRDDEKMLFDIQKFYNVIIEELPSNVAELL

SEQ ID NO: 77620 - DNA, 1614 bp, Glycine max; identical to SEQ ID NO: 66106
  CDS (1)..(1614)

SEQ ID NO: 77621 - protein, 537 aa, Glycine max; identical to SEQ ID NO: 66107

SEQ ID NO: 77622 - DNA, 1872 bp, Glycine max; identical to SEQ ID NO: 66108
  CDS (1)..(1872)

SEQ ID NO: 77623 - protein, 623 aa, Glycine max; identical to SEQ ID NO: 66109

SEQ ID NO: 77624 - DNA, 1149 bp, Glycine max
  CDS (1)..(1149)
atggctgggttggcgccagaaggatcacaatttgatgctatgggattgcaggagaaccttctgaggggtatttatgcatatggttttgagaagccctctgcaattcaacaaagggggattgttcctttctgcaaggggcttgatgttattcagcaagcacaatctggaactggaaaaactgccaccttttgttctggagttttgcagcagcttgattacagcttagtagaatgccaggcactggttcttgctcccactcgtgaacttgcacaacaaattgaaaaggtcatgcgagcactgggggactatcttggtgtcaaggtccatgtttgtgttggtgggaccattgttcgtgaagatcaacgcatcctctcaagtggggttcatgttgttgttggtactcctggtcgtgtatttgacatgctgtgcagacaatctttgcgccctgataacatcaggatgtttgtattggatgaggcagatgagatgctctctcgaggtttcaaggatcagatctatgatatttttcagctgctgccacctaagatccaggttggggttttctctgccacaatgcctcctgaagccctggaaatcacaaggaagtttatgaacaaacctgtgaggattcttgtaaaacgtgatgagcttaccttggaggggatcaagcaattttttgtcaatgtagacaaggaggattggaagctggagacactatgtgatctttatgaaacattggcaatcacccagagcgttatctttgtgaacaccagacgcaaagtagattggctgacagacaaaatgcggagtcgtgatcacacagtttcagccactcatggagatatggaccaaaacacaagggatatcatcatgcgggaattccgttctgggtcgtcccgtgttcttattaccacagatcttttggcccgtggtattgatgtccagcaagtctcacttgttataaattatgacctgccaactcagccagagaactatctccatcgaattggtcgtagtggacggtttgggagaaagggtgttgctatcaattttgtgacaggagatgatgaaaggatgctatttgacatccaaaagttttataatgtgcagattgaggagttgccagccaatgtagctgatctcatttga

SEQ ID NO: 77625 - protein, 382 aa, Glycine max
MAGLAPEGSQFDAMGLQENLLRGIYAYGFEKPSAIQQRGIVPFCKGLDVIQQAQSGTGKTATFCSGVLQQLDYSLVECQALVLAPTRELAQQIEKVMRALGDYLGVKVHVCVGGTIVREDQRILSSGVHVVVGTPGRVFDMLCRQSLRPDNIRMFVLDEADEMLSRGFKDQIYDIFQLLPPKIQVGVFSATMPPEALEITRKFMNKPVRILVKRDELTLEGIKQFFVNVDKEDWKLETLCDLYETLAITQSVIFVNTRRKVDWLTDKMRSRDHTVSATHGDMDQNTRDIIMREFRSGSSRVLITTDLLARGIDVQQVSLVINYDLPTQPENYLHRIGRSGRFGRKGVAINFVTGDDERMLFDIQKFYNVQIEELPANVADLI

SEQ ID NO: 77626 - DNA, 1467 bp, Glycine max; identical to SEQ ID NO: 66110
  CDS (1)..(1467)

SEQ ID NO: 77627 - protein, 488 aa, Glycine max; identical to SEQ ID NO: 66111

SEQ ID NO: 77628 - DNA, 1221 bp, Glycine max
  CDS (1)..(1221)
atggcaacgacgtcggtggtgccggcgaaccggcgtcgcgcggcgaaccccgcggaggagatggacttcgagacgacggagggcgtgaaggccatcgcaagcttcgaggagatggggatcaaggacgatctgctccgcggaatctaccagtacggcttcgagaagccctccgccattcagcagcgggccgtcacgcccatcattcagggccgtgacgtcatcgctcaggcccaatccggaacggggaaaacgtccatgattgctctcaccgtttgccaggtcgtcgatacctccgtcagagaggttcaggcattgatattgtcaccaacgagggaactggcctcacagactgagaaagttatattggctattggggatttcattaatatacaagctcatgcatgcgttggtggtaaaagtgtgggagaagatataaggaaacttgagtatggagttcatgtggtgtctggaactcctggccgagtttgtgacatgatcaaaaggagaacattgcgcacgagagctatcaagatgctagttcttgatgaatctgatgaaatgttgagcagagggtttaaagatcaaatttatgatgtgtatagatatctcccacccgaccttcaggtttgcttgatttctgctacccttcctcatgaaatactggagatgacaaacaaattcatgacagatccagtaaggatccttgtaaaacgtgatgaattgacattggagggcatcaaacaattttttgttgccgttgaaagggaggaatggaagtttgataccctgtgtgatctttatgataccctcactatcactcaagctgttatattctgtaacactaagcgaaaggtggactggttaactgaaaaaatgcgtaacaataatttcactgtctcatcaatgcatggtgacatgcctcagaaagaaagagatgctattatgggagaatttcgtgctggaacaacccgtgtactaataacaactgatgtttgggcccgtggtcttgatgtacagcaggtttctctagttatcaattatgaccttccaaataatcgtgagctttacattcatcgaattggccgttctggacgttttggaagaaagggtgttgcgataaattttgtgaagagcgatgacatcaagatcttgagagacattgaacaatactacagtactcagattgatgaaatgccaatgaatgttgctgatcttatataa

SEQ ID NO: 77629 - protein, 406 aa, Glycine max
MATTSVVPANRRRAANPAEEMDFETTEGVKAIASFEEMGIKDDLLRGIYQYGFEKPSAIQQRAVTPIIQGRDVIAQAQSGTGKTSMIALTVCQVVDTSVREVQALILSPTRELASQTEKVILAIGDFINIQAHACVGGKSVGEDIRKLEYGVHVVSGTPGRVCDMIKRRTLRTRAIKMLVLDESDEMLSRGFKDQIYDVYRYLPPDLQVCLISATLPHEILEMTNKFMTDPVRILVKRDELTLEGIKQFFVAVEREEWKFDTLCDLYDTLTITQAVIFCNTKRKVDWLTEKMRNNNFTVSSMHGDMPQKERDAIMGEFRAGTTRVLITTDVWARGLDVQQVSLVINYDLPNNRELYIHRIGRSGRFGRKGVAINFVKSDDIKILRDIEQYYSTQIDEMPMNVADLI

SEQ ID NO: 77630 - DNA, 1500 bp, Glycine max; identical to SEQ ID NO: 66112
  CDS (1)..(1500)

SEQ ID NO: 77631 - protein, 499 aa, Glycine max; identical to SEQ ID NO: 66113

SEQ ID NO: 77632 - DNA, 1242 bp, Glycine max; identical to SEQ ID NO: 66114
  CDS (1)..(1242)

SEQ ID NO: 77633 - protein, 413 aa, Glycine max; identical to SEQ ID NO: 66115

SEQ ID NO: 77634 - DNA, 2277 bp, Glycine max; identical to SEQ ID NO: 66116
  CDS (1)..(2277)

SEQ ID NO: 77635 - protein, 758 aa, Glycine max; identical to SEQ ID NO: 66117

SEQ ID NO: 77636 - DNA, 1242 bp, Glycine max; identical to SEQ ID NO: 66094
  CDS (1)..(1242)

SEQ ID NO: 77637 - protein, 413 aa, Glycine max; identical to SEQ ID NO: 66095

SEQ ID NO: 77638 - DNA, 1524 bp, Glycine max
  CDS (1)..(1524)
atgagccgctacgacagccgctccggcgacccaacttcctatcgtgatcggaggagtgattctgggctaggtgcacctacagggtttggtggttctgtacaacactcttcatcaaacaggagggattatgatgatggtgggtcaccaaagaggaacctcagtttggatggtttacctcattttgagaaaaacttctacattgagtcaccagctgtaagggcaatgacagatgctgaagttaatgagtatcggcagcagagggaaataactgttgaagggcgagatatcccgaaacctgtcaagacctttcacgatgctggttttccagaatatgtactgcaagaaattacaaaagctggctttactgaacctacacccattcaatctcaaggttggcccatggctttgaaggggcgtgatctgataggaattgcagaaacaggatcagggaagacacttgcttacttgttgcctgccattgtgcatgttaatgctcagccaatactaaatcctggagatggaccaattgtgctagttttggctccaactcgtgaacttgctgtccaaatacaacaagagactactaaatttggtgcatcatctaggattaagagtacatgcatctatggtggggttcctaagggacctcaggtgcgtgatctccagaaaggtgtcgaaattgtaattgccactccaggaaggttaattgatatgcttgagtcaaatcataccaacttgcagagggtcacataccttgtattggatgaagctgataggatgttggatatggggtttgatcctcagctacggaagattgtctcccagattcgtccagatcgtcaaactttgtattggagtgctacctggccaaaggaggtcgaacaattggcaaggaagttcctttataacccatacaaagtaattataggctcttctgatttaaaagctaaccatgcaatacggcaatatgttgacattgtttcggaaaagcagaaatatgataaattggtaaagttgctagaagacatcatggatggcagccgaatactgatatttatggataccaaaaaaggatgtgatcaaatcactaggcaactccgcatggatggatggcctgcactttcaattcatggagataaaagtcaagcagaaagagattgggtgctctcagaatttaaatcaggaaaaagtcctattatgacggcaacagatgttgcagcccgtggtctagatgtgaaggatgtgaaatatgttgtaaattatgacttcccggggtcacttgaggattatgttcatcgcattgggcggacagggagagctggtgcaaaaggaactgcatacacatacttcacagctgctaatgccagatttgcaaaggaacttatagccatactcgaggaagctggacagaaagtgagtcctgaattagcagcaatggggcgtggtgcaccacctccaccttcaggtccccgaggtttccaagaccgtgggaggggttatggcagttctcgtccatggagctga

SEQ ID NO: 77639 - protein, 507 aa, Glycine max
MSRYDSRSGDPTSYRDRRSDSGLGAPTGFGGSVQHSSSNRRDYDDGGSPKRNLSLDGLPHFEKNFYIESPAVRAMTDAEVNEYRQQREITVEGRDIPKPVKTFHDAGFPEYVLQEITKAGFTEPTPIQSQGWPMALKGRDLIGIAETGSGKTLAYLLPAIVHVNAQPILNPGDGPIVLVLAPTRELAVQIQQETTKFGASSRIKSTCIYGGVPKGPQVRDLQKGVEIVIATPGRLIDMLESNHTNLQRVTYLVLDEADRMLDMGFDPQLRKIVSQIRPDRQTLYWSATWPKEVEQLARKFLYNPYKVIIGSSDLKANHAIRQYVDIVSEKQKYDKLVKLLEDIMDGSRILIFMDTKKGCDQITRQLRMDGWPALSIHGDKSQAERDWVLSEFKSGKSPIMTATDVAARGLDVKDVKYVVNYDFPGSLEDYVHRIGRTGRAGAKGTAYTYFTAANARFAKELIAILEEAGQKVSPELAAMGRGAPPPPSGPRGFQDRGRGYGSSRPWS

SEQ ID NO: 77640 - DNA, 1707 bp, Glycine max
  CDS (1)..(1707)
atgtcgtatgtgcctccgcacctcagaaaccccacctccaccaccgtcgccaccgccagaaccccctccgtaaccctagacaacaacaacaacaaccaccaccaccaccacaagctcgcattcccctccaacaccaccaccaccaattgctctccctctctctccttccacaacaatgcctctcgccggagctccgccgcgcctccctcgccgcggattcttgccacccccgacgccgtcttcccccaatggcaaccctccgaacgcgtttctcgcatgactcccgagcagattgaagaaatccgatccaggcttaatcttgatgttgctgtcgcatctgactctcctcctgcacctgctccaatagaatcgtttactgatatgtgtttgcatccgagtatcatgaaggacattgcttaccatgaatacaccaggccaacttcgatccaggcacaggccatgccaattgctctcagtggaagggatctattgggttgtgctgaaaccggtagtggaaagactgcagctttcacaattcctatgatacagcattgcttggcccaacatcccattcggcgcaatgatggtcccctggcattagttttggctcctacgagagaacttgctcaacaaatagaaaaagaggttaaagcttttagcagatctcttgagtcattaaaaactgccatagttgtgggcggaaccaacattgaaaagcagaggtctgaactaagagctggagttgaaatagcagttgccacccctggaagattcattgatcatttacaacaaggcaacacttccctctccagaatttcttttgttgttctagatgaggcagatagaatgcttgatatgggttttgaaccacagataagagaggtaatgagaaatcttccagagaagcatcaaacactgctgtttagtgcgactatgcctgtggagattgaagaattatcaaaagagtacttagctaacccagtgcaagtgaaggtggggaaagtgagtagcccaacaactaatgtttcacaaactcttgtgaaaatttctgaaaatgagaagattgatcggcttctagatttgcttgtagaggaggcatcacaggctgaaaaatgtggtcatccatttccattaacaattgtgtttgttgagaggaagacaaggtgtgatgaagttgctgaagcattggtagctcaaggattatctgcagtttctcttcatggtggtcgcagtcagagtgaaagagaagctgccttgcatgattttcggagtggctccaccaacattttggttgccactgatgtcgcgtctcgtggcttggatgtcacaggagtgtcacatgtcattaatctagatcttccaaagaccatggaagattatgtacaccggattggaaggacagggcgtgcgggatcaactggcttagctacttcattttacactgatcgcgacatgttcctcgtggcaaatataaggaaagcaatagctgatgcagaatctgggaacacactgacatttgcaaccggaaaggttgctagaaggaaggagaaagaagcagcagctgcacaaaaagaggcaaatattgctttatccaaacagttaggattgggagctgcttcaatgaacattgaagataaatataaattcatgattactgccacaaacactaaaaaagagggagcagcagatagtgcctgggatgattaa

SEQ ID NO: 77641 - protein, 568 aa, Glycine max
MSYVPPHLRNPTSTTVATARTPSVTLDNNNNNHHHHHKLAFPSNTTTTNCSPSLSFHNNASRRSSAAPPSPRILATPDAVFPQWQPSERVSRMTPEQIEEIRSRLNLDVAVASDSPPAPAPIESFTDMCLHPSIMKDIAYHEYTRPTSIQAQAMPIALSGRDLLGCAETGSGKTAAFTIPMIQHCLAQHPIRRNDGPLALVLAPTRELAQQIEKEVKAFSRSLESLKTAIVVGGTNIEKQRSELRAGVEIAVATPGRFIDHLQQGNTSLSRISFVVLDEADRMLDMGFEPQIREVMRNLPEKHQTLLFSATMPVEIEELSKEYLANPVQVKVGKVSSPTTNVSQTLVKISENEKIDRLLDLLVEEASQAEKCGHPFPLTIVFVERKTRCDEVAEALVAQGLSAVSLHGGRSQSEREAALHDFRSGSTNILVATDVASRGLDVTGVSHVINLDLPKTMEDYVHRIGRTGRAGSTGLATSFYTDRDMFLVANIRKAIADAESGNTLTFATGKVARRKEKEAAAAQKEANIALSKQLGLGAASMNIEDKYKFMITATNTKKEGAADSAWDD

SEQ ID NO: 77642 - DNA, 1242 bp, Glycine max; identical to SEQ ID NO: 66120
  CDS (1)..(1242)

SEQ ID NO: 77643 - protein, 413 aa, Glycine max; identical to SEQ ID NO: 66121

SEQ ID NO: 77644 - DNA, 1512 bp, Glycine max
  CDS (1)..(1512)
atgaatcacaacaacagcaacaacaatagagcgaggtaccctcctgggatgggacttgggcgcgggggtttcaatccgaacctgagccagaacccgaaccagaaccagaatcatcacgcgttccaggctcggccgccgtaccaccaacagcaacaggcgcaatatgtgcagaggcatttgttgcagcagcagcagcagcagcagcaacagcagcaacagcagcagcagcagtggctgagaagggatgccaacgccgtcgacgaggttgagaagaccgtgcagtctgaagccgtggattcgagttcccaagattggaaagcaagactaaagattccacctgctgatactcgctataagacagaggatgtaacggcaactaaaggaaatgagtttgaggattactttttgaagcgtgagctgctaatgggaatatatgagaagggttttgaaaggccttctcccatccaagaagaaagcattccaattgctcttactggtagtgacattcttgctagggctaaaaatggaactggcaaaacagctgcattttgcattcctgcattggaaaaaattgatcaggacaataatgttattcaagttgttatactggtcccaacccgagaattggcattgcaaacttctcaagtgtgcaaagagcttggaaagcacttgaaaattcaagttatggttacaacaggtggtaccagcctgaaagatgatatactgcgcttatatcaaccggttcatttactagttggaactccaggaagaatattagatcttgccaagaaaggtgtttgtattctgaaagattgcgctatgcttgttatggatgaggccgataagcttctgtccccagagtttcaaccatctatagagcagctgattcattgtcttcctacaacccgtcaaatcttgatgttttcagccacatttcctgttactgtaaaggatttcaaagataggtatcttcaaaagccttatgtcatcaaccttatggatgagctaactctgaagggtattacacaattttatgcattcgtggaagagagacagaaagtccactgcctaaatactctattttctaagctgcaaataaaccagtctatcatcttctgcaattcagtgaatcgggttgaactacttgccaagaaaatcacggaacttgggtattcatgtttctacattcatgcaaagatgttgcaagaccatcgtaacagagtgtttcatgacttccgcaatggtgcatgtcgaaatcttgtttgtactgatctttttactagaggaatagacattcaagcagttaatgttgttattaattttgattttccaaagaatgcagagacttatttgcacagggttggtcgttcagggaggtttgggcaccttggtttagcagtgaacttgattacctatgaggatcgctttaatttatataggattgaacaagaacttggaactgaaataaagcagattcccccacaaattgatcaggcaatttattgtcggtga

SEQ ID NO: 77645 - protein, 503 aa, Glycine max
MNHNNSNNNRARYPPGMGLGRGGFNPNLSQNPNQNQNHHAFQARPPYHQQQQAQYVQRHLLQQQQQQQQQQQQQQQQWLRRDANAVDEVEKTVQSEAVDSSSQDWKARLKIPPADTRYKTEDVTATKGNEFEDYFLKRELLMGIYEKGFERPSPIQEESIPIALTGSDILARAKNGTGKTAAFCIPALEKIDQDNNVIQVVILVPTRELALQTSQVCKELGKHLKIQVMVTTGGTSLKDDILRLYQPVHLLVGTPGRILDLAKKGVCILKDCAMLVMDEADKLLSPEFQPSIEQLIHCLPTTRQILMFSATFPVTVKDFKDRYLQKPYVINLMDELTLKGITQFYAFVEERQKVHCLNTLFSKLQINQSIIFCNSVNRVELLAKKITELGYSCFYIHAKMLQDHRNRVFHDFRNGACRNLVCTDLFTRGIDIQAVNVVINFDFPKNAETYLHRVGRSGRFGHLGLAVNLITYEDRFNLYRIEQELGTEIKQIPPQIDQAIYCR

SEQ ID NO: 77646 - DNA, 1242 bp, Glycine max; identical to SEQ ID NO: 66138
  CDS (1)..(1242)

SEQ ID NO: 77647 - protein, 413 aa, Glycine max; identical to SEQ ID NO: 66139

SEQ ID NO: 77648 - DNA, 2331 bp, Glycine max; identical to SEQ ID NO: 66122
  CDS (1)..(2331)

SEQ ID NO: 77649 - protein, 776 aa, Glycine max; identical to SEQ ID NO: 66123

SEQ ID NO: 77650 - DNA, 1242 bp, Glycine max
  CDS (1)..(1242)
atggcaggtttggctccagaaggaacacaatttgatggtcgccaatatgatgctaagatgagtgaattgctttccactgatgggcaagaattcttcacctcatatgacgaagtctatgacagctttgatgccatgggattgcaagagaatcttctgcgaggcatatatgcttatggttttgagaggccttctgcaatccagcaaaggggaattgttcctttctgcaaaggtctggatgtgattcaacaggctcagtctggaacaggaaagacagcaacattttgttctggaattttgcagcagcttgattatggattggttcagtgccaggctttggttttggcaccaacaagggagctagcacagcagattgagaaagttatgcgagctcttggtgattacctgggagttaaggttcatgcttgtgttggtgggacaagtgttcgtgaggatcagcgcattctccaagctggtgtccatactgttgttggcactcctgggcgtgtgtttgacatgctgcggaggcagtctcttcgcccagattgcataaagatgtttgttttggatgaggctgatgaaatgctttcacgtggttttaaggatcagatctatgacatctttcagctgctgccatccaaaattcaggttggagtgttctctgctacaatgccaccagaagcccttgagattacaagaaagttcatgaataagccagtgagaatcctggtaaagcgtgatgaactgaccctggagggtatcaagcagttttatgtcaatgttgacaaggaagagtggaagctggagacattatgcgacctttatgagactctggctatcacccagagtgtcatttttgtgaataccaggcgcaaggtggactggctcactgacaagatgcgaagcaatgatcacacagtctctgccacccacggtgacatggaccaaaatacccgtgatatcatcatgcgtgaattccggtccggctcttcccgagttctcattaccactgaccttcttgcccgtggaattgatgtacagcaggtgtctctggtcataaattatgatctgccaacccaacctgaaaactatctccaccgcatagggcgtagtggtcggtttggaagaaaaggagtttctataaactttgtcacgacggatgatgccagaatgctgtctgatattcagaagttctacaatgtgactgtagaggagctgccatcaaatgttgctgatttactctga

SEQ ID NO: 77651 - protein, 413 aa, Glycine max
MAGLAPEGTQFDGRQYDAKMSELLSTDGQEFFTSYDEVYDSFDAMGLQENLLRGIYAYGFERPSAIQQRGIVPFCKGLDVIQQAQSGTGKTATFCSGILQQLDYGLVQCQALVLAPTRELAQQIEKVMRALGDYLGVKVHACVGGTSVREDQRILQAGVHTVVGTPGRVFDMLRRQSLRPDCIKMFVLDEADEMLSRGFKDQIYDIFQLLPSKIQVGVFSATMPPEALEITRKFMNKPVRILVKRDELTLEGIKQFYVNVDKEEWKLETLCDLYETLAITQSVIFVNTRRKVDWLTDKMRSNDHTVSATHGDMDQNTRDIIMREFRSGSSRVLITTDLLARGIDVQQVSLVINYDLPTQPENYLHRIGRSGRFGRKGVSINFVTTDDARMLSDIQKFYNVTVEELPSNVADLL

SEQ ID NO: 77652 - DNA, 1524 bp, Glycine max; identical to SEQ ID NO: 66128
  CDS (1)..(1524)

SEQ ID NO: 77653 - protein, 507 aa, Glycine max; identical to SEQ ID NO: 66129

SEQ ID NO: 77654 - DNA, 1788 bp, Glycine max; identical to SEQ ID NO: 66130
  CDS (1)..(1788)

SEQ ID NO: 77655 - protein, 595 aa, Glycine max; identical to SEQ ID NO: 66131

SEQ ID NO: 77656 - DNA, 2121 bp, Glycine max; identical to SEQ ID NO: 66132
  CDS (1)..(2121)

SEQ ID NO: 77657 - protein, 706 aa, Glycine max; identical to SEQ ID NO: 66133

SEQ ID NO: 77658 - DNA, 1698 bp, Glycine max; identical to SEQ ID NO: 66134
  CDS (1)..(1698)

SEQ ID NO: 77659 - protein, 565 aa, Glycine max; identical to SEQ ID NO: 66135

SEQ ID NO: 77660 - DNA, 1224 bp, Glycine max; identical to SEQ ID NO: 66136
  CDS (1)..(1224)

SEQ ID NO: 77661 - protein, 407 aa, Glycine max; identical to SEQ ID NO: 66137

SEQ ID NO: 77662 - DNA, 1281 bp, Glycine max
  CDS (1)..(1281)
atgggagaattgaaagacactgaggcttacgaggaagagctcatcgactacgaagaggaagaagaaaaagctcccgattctgctaaacccgttgctgaatctggcaagaagggttatgttggcatccatagttcgggatttcgagacttcctgttgaaaccagagcttcttcgagccattgtggattcaggatttgagcatccttcagaagtgcaacatgaatgcatccctcaagcaatcttaggaatggatgtcatttgccaagcgaaatctgggatgggaaagactgctgtttttgttttgtctacacttcagcaagttgatcctgttcctggtcaagttgcagctcttgttctttgccacacaagagaactggcttatcagatttgccacgaatttgagaggttcagcacatatcttcctgatataaaggctgctgttttctatggtggtgtcaacatcaaggttcacaaagaattgctcaagaatgaatgcccacacattgttgttggaacacctgggaggattcttgctctggctagagataaggaccttggtttaaagaacgtgaggcattttatacttgatgagtgtgacaagatgctcgaatcacttgatatgagaagagatgtgcaagagatcttcaaactgactccccatgataagcaagtgatgatgttttcagctacactcagtaaagagatccgaccagtttgcaagaaatttatgcaagatcccatggaaatttatgtcgacgatgaggccaaattgactcttcatggtcttgtccagcactatatcaaattgcaagagacagaaaagaatcgtaagctgaatgatcttcttgatgctctggatttcaaccaagtagttatttttgtcaaaagtgtcagcagagctgccgagttgaacaagttgcttgtggagtgtaacttcccatctatctgcatacattctgcaatgtcacaggaagagagattgaaacggtacaagggcttcaaagaagggaagcaaaggattctcgtggcaacagatttagttggaagggggattgacatagaacgtgttaatatagttattaactatgacatgcctgattctgctgatacttacttgcacagggtgggaagagctggcagatttggcacgaagggacttgcaattactttcgtgtcctctactgctgactctgaggttcttaatcaggtgcaatctaggtttgaggttgacataaaggagcttcctgaacaaattgacacttcaacatatatgccaaactga

SEQ ID NO: 77663 - protein, 426 aa, Glycine max
MGELKDTEAYEEELIDYEEEEEKAPDSAKPVAESGKKGYVGIHSSGFRDFLLKPELLRAIVDSGFEHPSEVQHECIPQAILGMDVICQAKSGMGKTAVFVLSTLQQVDPVPGQVAALVLCHTRELAYQICHEFERFSTYLPDIKAAVFYGGVNIKVHKELLKNECPHIVVGTPGRILALARDKDLGLKNVRHFILDECDKMLESLDMRRDVQEIFKLTPHDKQVMMFSATLSKEIRPVCKKFMQDPMEIYVDDEAKLTLHGLVQHYIKLQETEKNRKLNDLLDALDFNQVVIFVKSVSRAAELNKLLVECNFPSICIHSAMSQEERLKRYKGFKEGKQRILVATDLVGRGIDIERVNIVINYDMPDSADTYLHRVGRAGRFGTKGLAITFVSSTADSEVLNQVQSRFEVDIKELPEQIDTSTYMPN

SEQ ID NO: 77664 - DNA, 1281 bp, Glycine max; identical to SEQ ID NO: 66140
  CDS (1)..(1281)

SEQ ID NO: 77665 - protein, 426 aa, Glycine max; identical to SEQ ID NO: 66141

SEQ ID NO: 77666 - DNA, 1290 bp, Helianthus annuus; identical to SEQ ID NO: 66144
  CDS (1)..(1290)

SEQ ID NO: 77667 - protein, 429 aa, Helianthus annuus; identical to SEQ ID NO: 66145

SEQ ID NO: 77668 - DNA, 1593 bp, Hordeum vulgare; identical to SEQ ID NO: 66146
  CDS (1)..(1593)

SEQ ID NO: 77669 - protein, 530 aa, Hordeum vulgare; identical to SEQ ID NO: 66147

SEQ ID NO: 77670 - DNA, 1239 bp, Hordeum vulgare
  CDS (1)..(1239)
atggcggcggcggcgggcggggcgacgacctcgacgaggcgcgggccgggcggcggccggccgatggacgacgagaacctgaccttcgagacctcggcgggggtcgaggtcgtcggcagcttcgacgccatggggatccgcgaggacctcctccgcggcatctacgactacggcttcgagaagccctccgccatccagcagcgggccgtcatccccatcatcaccggccgcgacgtcatcgcccaggcccagtccggcaccggcaagacctccatgatctccctctccgtatgccaggtcatcgagaccaacgtccacgaggtgcaggcgctgatactgtcgccaactagggagcttgccacacaaacagagagggtcatgcaggctgttggtagcttcatgagcgtctctgtgcacgcctgtgttggtggcaagagtattggggaggatattaggaagctcgagtctggagtgcatgttgtgtcgggaaccccgggcagggtatgtgatatgatcaagagaaggacgttgcgcacaagagccatcaagctcctagtcctggacgaagccgatgagatgttgagcagaggtttcaaggatcagatttatgatgtctacagatatcttcccccagaacttcaggttgttttgatctctgcaactctgccccatgacatcttggagataactagcaagttcatgactgatccagtcaggatccttgtaaaacgtgatgagttgaccctagagggcatcaaacaattttttgttgctgttgagaaagaggaatggaagtttgatacactgtgcgatctttatgatacacttaccattacccaagctgtcattttctgcaacactaagagaaaggtggattggcttactgaaaggatgcgcaccaacaacttcacggtgtcagctatgcatggtgacatgcctcaaaaggaaagggatgcaattatgaatgagttcaggggtggcacgactcgcgtcctgatcacaaccgatgtttgggctcgagggctggatgtccagcaggtctcccttgtcattaattacgatctcccgaacaaccgtgagctttacatccatcgtattggtcgctctgggcgttttgggcgcaagggtgtggcgatcaactttgtgcgcaaggacgacatccgtatccttcgggacattgagcagtactacagcacgcagatcgacgagatgcccatgaacgtcgccgatctcatctga

SEQ ID NO: 77671 - protein, 412 aa, Hordeum vulgare
MAAAAGGATTSTRRGPGGGRPMDDENLTFETSAGVEVVGSFDAMGIREDLLRGIYDYGFEKPSAIQQRAVIPIITGRDVIAQAQSGTGKTSMISLSVCQVIETNVHEVQALILSPTRELATQTERVMQAVGSFMSVSVHACVGGKSIGEDIRKLESGVHVVSGTPGRVCDMIKRRTLRTRAIKLLVLDEADEMLSRGFKDQIYDVYRYLPPELQVVLISATLPHDILEITSKFMTDPVRILVKRDELTLEGIKQFFVAVEKEEWKFDTLCDLYDTLTITQAVIFCNTKRKVDWLTERMRTNNFTVSAMHGDMPQKERDAIMNEFRGGTTRVLITTDVWARGLDVQQVSLVINYDLPNNRELYIHRIGRSGRFGRKGVAINFVRKDDIRILRDIEQYYSTQIDEMPMNVADLI

SEQ ID NO: 77672 - DNA, 1731 bp, Hordeum vulgare; identical to SEQ ID NO: 66148
  CDS (1)..(1731)

SEQ ID NO: 77673 - protein, 576 aa, Hordeum vulgare; identical to SEQ ID NO: 66149

SEQ ID NO: 77674 - DNA, 1287 bp, Hordeum vulgare; identical to SEQ ID NO: 66150
  CDS (1)..(1287)

SEQ ID NO: 77675 - protein, 428 aa, Hordeum vulgare; identical to SEQ ID NO: 66151

SEQ ID NO: 77676 - DNA, 1245 bp, Hordeum vulgare
  CDS (1)..(1245)
atggcaggaatggcaccggaaggttcccagtttgatgcaaagaactatgattctaagatgcaggagctgctgagccaaggtgagaccgaggagttcttcacctcatatgatgaagttcatgagagctttgatgacatgggtctccaagagaacctcctcaggggaatttatgcttatggttttgagaagccttctgccatccagcaaagggggattgttcctttctgcaaggggcttgatgttatccagcaggcacaatctggaacaggaaagactgctactttctgttctggaatcctccagcagcttgactatggtttggttgagtgccaggccttggtccttgctcccacccgtgagcttgcgcagcaaattgagaaggtcatgcgtgcccttggtgactacttgggtgtgaaggttcatgcatgtgttggagggacgtcagttcgtgaggaccagaggattcttgcaagtggagtgcatgtcgttgttggtactcctggtcgtgtgtttgacatgctccgtaggcagtctctgcgccctgacaacatcaagatgtttgtccttgatgaagctgatgagatgctttcccgtggattcaaggatcagatttatgacatcttccagctgctcccagggaagattcaagttggtgtcttctctgctaccatgcccccggaagcccttgagattacccgcaagttcatgaacaagcctgtgaggatccttgtcaagagggatgagctcacccttgagggtatcaagcagttctatgtcaatgtggagaaggaagagtggaagcttgacacactgtgtgacctgtacgagactcttgccatcacccagagtgtcatcttcgtgaacacccgccgcaaggtggactggctcaccgacaagatgaggggcagggaccacaccgtctccgctactcatggagacatggaccagaacactagggacatcatcatgagggagttcagatcaggttcttcacgtgtgctcatcaccactgacctgcttgctcgtggtattgatgtccagcaagtgtccctggtcatcaactatgacctcccgacccagccagagaactacctgcatcgcattggtcgtagtggtcggtttggaaggaagggtgtggccatcaactttgttacgcgtgaagatgagaggatgctgtttgacatccagaagttctacaacgtggtgattgaagagctcccagccaacgttgccgaccttctgtga

SEQ ID NO: 77677 - protein, 414 aa, Hordeum vulgare
MAGMAPEGSQFDAKNYDSKMQELLSQGETEEFFTSYDEVHESFDDMGLQENLLRGIYAYGFEKPSAIQQRGIVPFCKGLDVIQQAQSGTGKTATFCSGILQQLDYGLVECQALVLAPTRELAQQIEKVMRALGDYLGVKVHACVGGTSVREDQRILASGVHVVVGTPGRVFDMLRRQSLRPDNIKMFVLDEADEMLSRGFKDQIYDIFQLLPGKIQVGVFSATMPPEALEITRKFMNKPVRILVKRDELTLEGIKQFYVNVEKEEWKLDTLCDLYETLAITQSVIFVNTRRKVDWLTDKMRGRDHTVSATHGDMDQNTRDIIMREFRSGSSRVLITTDLLARGIDVQQVSLVINYDLPTQPENYLHRIGRSGRFGRKGVAINFVTREDERMLFDIQKFYNVVIEELPANVADLL

SEQ ID NO: 77678 - DNA, 1293 bp, Hordeum vulgare; identical to SEQ ID NO: 66152
  CDS (1)..(1293)

SEQ ID NO: 77679 - protein, 430 aa, Hordeum vulgare; identical to SEQ ID NO: 66153

SEQ ID NO: 77680 - DNA, 1485 bp, Zea mays; identical to SEQ ID NO: 66156
  CDS (1)..(1485)

SEQ ID NO: 77681 - protein, 494 aa, Zea mays; identical to SEQ ID NO: 66157

SEQ ID NO: 77682 - DNA, 1224 bp, Zea mays
  CDS (1)..(1224)
atggcggcgcccaccacctcccgccgcggccccggcggcgcgcgcaacatggacgacgagaacctaaccttcgagacctccccgggggtcgaggtcgtcagcagcttcgaccagatgggcatcaaggacgacctcctccgcggcatctacggctacggtttcgagaagccctccgccatccagcagcgcgccgtgctccccatcatcaacggccgcgacgtcatcgcgcaggcccagtccggtaccggcaagacgtccatgatctccctcaccgtctgccagatcgtcgacaccgccgtgcgcgaggtgcaggctttgattctctcgcctactagggagcttgcttcccaaacagagagagttatgctggctattggggaccacctcaacgtccaagtgcacgcttgcattggtggaaagagtattggtgaggacatcaggaggctcgagaatggggtgcatgtcgtctctggaactccaggcagagtctgtgatatgatcaagaggaggacactgcggaccagagccatcaagcttctagttctggatgaagctgatgagatgttgagtagaggctttaaggatcagatttacgatgtctacagatatctccctccagaacttcaggtggttttgatctctgcaactcttcctcatgagatcttggagatgactagtaagttcatgaccgaaccggttaggatccttgtgaagcgtgatgagctgaccctggagggcatcaaacaattctttgttgctgttgagaaagaggagtggaagtttgatacactttgtgatctttatgatacactcaccatcacccaagctgttattttctgcaatactaagagaaaggtggattggctcactgaaaaaatgcgtacaaataacttcaccgtatcagctatgcacggtgacatgccccaacaagaaagggatgccattatgggtgagttcaggtctggcgcaactcgtgtgctaataactacagatgtttgggctcgaggactggacgttcagcaggtttcacttgtcataaattatgatctcccaaataatcgtgagctttacatccatcgcattggtcgttctggtcgttttgggcgcaagggtgtggcgatcaatttcgtgcgcaaggatgacatccgtatactgagagatatagagcagtactacagcacacaaattgacgagatgccaatgaatgttgctgatcttatttga

SEQ ID NO: 77683 - protein, 407 aa, Zea mays
MAAPTTSRRGPGGARNMDDENLTFETSPGVEVVSSFDQMGIKDDLLRGIYGYGFEKPSAIQQRAVLPIINGRDVIAQAQSGTGKTSMISLTVCQIVDTAVREVQALILSPTRELASQTERVMLAIGDHLNVQVHACIGGKSIGEDIRRLENGVHVVSGTPGRVCDMIKRRTLRTRAIKLLVLDEADEMLSRGFKDQIYDVYRYLPPELQVVLISATLPHEILEMTSKFMTEPVRILVKRDELTLEGIKQFFVAVEKEEWKFDTLCDLYDTLTITQAVIFCNTKRKVDWLTEKMRTNNFTVSAMHGDMPQQERDAIMGEFRSGATRVLITTDVWARGLDVQQVSLVINYDLPNNRELYIHRIGRSGRFGRKGVAINFVRKDDIRILRDIEQYYSTQIDEMPMNVADLI

SEQ ID NO: 77684 - DNA, 1845 bp, Triticum aestivum; identical to SEQ ID NO: 66158
  CDS (1)..(1845)

SEQ ID NO: 77685 - protein, 614 aa, Triticum aestivum; identical to SEQ ID NO: 66159

SEQ ID NO: 77686 - DNA, 1578 bp, Triticum aestivum; identical to SEQ ID NO: 66160
  CDS (1)..(1578)

SEQ ID NO: 77687 - protein, 525 aa, Triticum aestivum; identical to SEQ ID NO: 66161

SEQ ID NO: 77688 - DNA, 1608 bp, Triticum aestivum; identical to SEQ ID NO: 66164
  CDS (1)..(1608)

SEQ ID NO: 77689 - protein, 535 aa, Triticum aestivum; identical to SEQ ID NO: 66165

SEQ ID NO: 77690 - DNA, 1911 bp, Triticum aestivum; identical to SEQ ID NO: 66166
  CDS (1)..(1911)

SEQ ID NO: 77691 - protein, 636 aa, Triticum aestivum; identical to SEQ ID NO: 66167

SEQ ID NO: 77692 - DNA, 1239 bp, Triticum aestivum; identical to SEQ ID NO: 66168
  CDS (1)..(1239)

SEQ ID NO: 77693 - protein, 412 aa, Triticum aestivum; identical to SEQ ID NO: 66169

SEQ ID NO: 77694 - DNA, 1245 bp, Triticum aestivum; identical to SEQ ID NO: 66170
  CDS (1)..(1245)

SEQ ID NO: 77695 - protein, 414 aa, Triticum aestivum; identical to SEQ ID NO: 66171

SEQ ID NO: 77696 - DNA, 1305 bp, Triticum aestivum; identical to SEQ ID NO: 66172
  CDS (1)..(1305)

SEQ ID NO: 77697 - protein, 434 aa, Triticum aestivum; identical to SEQ ID NO: 66173

SEQ ID NO: 77698 - DNA, 1242 bp, Glycine max
  CDS (1)..(1242)
atggctggacttgcacctgaggggtcacagttcgatgctcgtcaatatgattctaaaatgagtgacttactttcatctgatggacaggacttcttcacatcctatgacgaggtttatgatagttttgacgctatgggtttgcaggaaaatcttctcaggggaatttacgcatatggttttgagaagccatctgccattcagcaaagggggatagttcccttctgcaagggacttgatgttattcagcaggctcagtctggaactgggaagacggctactttctgctctggtattctgcagcaacttgactatagcttgacgcaatgccaggccttggttttagcaccaactcgtgagcttgctcagcagattgagaaggttatgcgagcacttggagattatctaggtgtgaaggttcatgcttgtgtgggaggtaccagtgtgcgtgaggaccagcgcattctatctagtggtgttcatgttgtggttggtacccctggtcgtgtgtttgatatgctgcgccgacagtcacttcagccagaccacatcaagatgtttgtattggatgaggctgatgaaatgctttcccgaggtttcaaggatcagatctacgatatatttcagctgcttccatctaagattcaagtgggagttttctctgccacaatgcctcctgaggcccttgagatcaccaggaagtttatgaacaaacctgtgaggatccttgtgaagcgtgatgagctcaccttggagggtattaagcaattttatgtcaatgttgaaaaggaggaatggaagctggacacactctgcgatctttatgagacattagctatcactcagagtgtcatttttgttaacaccagaaggaaagttgattggttgactgacaagatgagaagccgtgaccacacagtctcagcaacccacggagacatggaccagaataccagggacattattatgcgtgaattccgttctgggtcttcccgtgtcttgataaccactgatcttttggctcgtggtattgatgtccaacaagtgtctctagttataaattttgatctcccaacacagcctgagaactatctccatcgtattggtcgtagtgggaggttcggaaggaagggtgttgcgatcaactttgtcacaaaggatgacgagaaaatgctgtttgacatccagaagttttacaacgtgcaagttgaggagctgccttcaaatgttgctgagctcctttga

SEQ ID NO: 77699 - protein, 413 aa, Glycine max
MAGLAPEGSQFDARQYDSKMSDLLSSDGQDFFTSYDEVYDSFDAMGLQENLLRGIYAYGFEKPSAIQQRGIVPFCKGLDVIQQAQSGTGKTATFCSGILQQLDYSLTQCQALVLAPTRELAQQIEKVMRALGDYLGVKVHACVGGTSVREDQRILSSGVHVVVGTPGRVFDMLRRQSLQPDHIKMFVLDEADEMLSRGFKDQIYDIFQLLPSKIQVGVFSATMPPEALEITRKFMNKPVRILVKRDELTLEGIKQFYVNVEKEEWKLDTLCDLYETLAITQSVIFVNTRRKVDWLTDKMRSRDHTVSATHGDMDQNTRDIIMREFRSGSSRVLITTDLLARGIDVQQVSLVINFDLPTQPENYLHRIGRSGRFGRKGVAINFVTKDDEKMLFDIQKFYNVQVEELPSNVAELL

SEQ ID NO: 77700 - DNA, 1578 bp, Zea mays
  CDS (1)..(1578)
atggatccacgcgccaggtatccttcgggcatgggcaacggccgcggtgggaacctcaactactacggccgcggcccaccgccgcaacagccgcatcagcaccacaaccaccagcagacgtcgggggcgcaccaccaccagcagacgtcgggggcgcaccaccaccagcagtacgcgcagaggcagcaccagcaccagcaccacggccacaatcgccatcagcaacagcagcagcaccacatttaccagcagcaacagcagcagtggctgcggcggagccagattgcccgcgagacctcgggcgcagccgtgaccagcgagccgaagtccctggcgccatccacggccgccgatggcgtcgattcgagttcacaagattggaaggcccaattgaagctgccgcctccagatacacgctacaggacagaggatgttacagctaccaagggaaatgagtttgaagactattttctcaagcgtgaactcctaatgggtatatacgagaagggatttgaaagaccgtctcctatccaagaggaaagcattcctattgctttaactggtagtgacattcttgcaagagcgaagaacggaactggcaagactgctgcattttgtattcctgcactggaaaagattgatcaagaaaaaaatgctattcaagttgttatattggttcccacaagggaattggctctgcaaacatcacaagtttgcaaggagcttggtaagcatttgaagatccaggttatggtcaccactggtggaaccagtttgaaggatgatattgttcgtctgtaccaacctgtgcacttactcgttggaacacctgggcgtattttggatcttacaaagaaaggtgtttgcattttgaacgactgttcaatgcttattatggatgaggcagacaagcttctctctcctgagtttcaaccttccatagaacagttgattcgctacctccctgctagtcgacagattttgatgttttcagcgacattccctgtgactgttaaggagtttaaggacaaatatctgcctaaaccttatgtgattaaccttatggacgaacttacactgaagggaattacacagttctatgcttttgtggaagaaagacagaaagttcactgtctcaacactctcttttccaagcttcaaatcaaccagtcaataatattttgtaactctgtaaatcgtgttgaactattggcgaaaaagatcacagagcttggctattcttgcttctatattcatgcaaagatgctacaggaccaccgtaatagagttttccatgatttccgtaatggagcatgcaggaaccttgtttgcactgatctttttacaaggggaatagatattcaagctgtgaatgttgttatcaattttgatttccccaagaactctgaaacatatctccacagggttggtagatctgggagatttggtcaccttggtctggccgttaatttgatcacctatgaggatcggtttaacttgtataggattgaacaagagcttgggactgaaataaaatcaattcctcctcagatagaccaggctatatactgccaataa

SEQ ID NO: 77701 - protein, 525 aa, Zea mays
MDPRARYPSGMGNGRGGNLNYYGRGPPPQQPHQHHNHQQTSGAHHHQQTSGAHHHQQYAQRQHQHQHHGHNRHQQQQQHHIYQQQQQQWLRRSQIARETSGAAVTSEPKSLAPSTAADGVDSSSQDWKAQLKLPPPDTRYRTEDVTATKGNEFEDYFLKRELLMGIYEKGFERPSPIQEESIPIALTGSDILARAKNGTGKTAAFCIPALEKIDQEKNAIQVVILVPTRELALQTSQVCKELGKHLKIQVMVTTGGTSLKDDIVRLYQPVHLLVGTPGRILDLTKKGVCILNDCSMLIMDEADKLLSPEFQPSIEQLIRYLPASRQILMFSATFPVTVKEFKDKYLPKPYVINLMDELTLKGITQFYAFVEERQKVHCLNTLFSKLQINQSIIFCNSVNRVELLAKKITELGYSCFYIHAKMLQDHRNRVFHDFRNGACRNLVCTDLFTRGIDIQAVNVVINFDFPKNSETYLHRVGRSGRFGHLGLAVNLITYEDRFNLYRIEQELGTEIKSIPPQIDQAIYCQ

SEQ ID NO: 77702 - DNA, 2301 bp, Zea mays
  CDS (1)..(2301)
atgtcgaagcggccgaagctcgagggtttcagcatcccgcggcccacctcctacaacttcgagcgctcgcagtccgtgcagcggctctaccgtccgaccgatgacccagacctcgacgacatcgccttctccgacgacgccccctcagatgcccaagccagcaccgcggtagaaggaaaggccgagaatgaggaggagatggacccgctcgacgccttcatggccgagatccaggaggagatccgtgcgccgcccccgccgcccaagcccgaggcgcttcgccgcacggattccgacgatgacgaggatgaccccgtcgagagcttcctgcgggccaagaaggacgctggcctcacgctggccgccgacgtcatgcgcgctggttacgactccgatgaggaggtctacgccgctgccaaggccgtcgacgccggcatgatggaatacgactctgatgacaaccccatagtcatcgacaagaagaaaatagagcccataccagcactcgatcactcgaccattgagtatgacgccttcacaaaagatttctacgaggagaagccatcgatttcaggtatgagtgaccaagaggtaacagattatatgaaaagtttgtcaattcgtgtttctggttttgatgtgccgaggccaataaaaaactttgaggattgtgggtttcatgtacctctaatgaatgctattgccaaacaagcttatgaaaaaccaactacaattcagtgccaggctttacctattgtactttcagggagagatatcattggtattgcaaaaactggctctggtaaaactgcagcttttgtgctccctatgattgttcatattatggatcagcctgagcttgagaaagaagaaggtccaataggagtcatttgtgctccaacaagagaattggcacatcagatatatctcgaagctaagaagtttgcaaagccttacaaccttcgagttgctgctatatatggtggtgtttccaaatttgaccagtttaaagaactgaaagcaggttgtgaaatagtcattgcaactccagggagattaatagacttgctgaagatgaaggcattgaagatgttcagggcaacttatctggttcttgatgaagctgatcgaatgttcgatcttggatttgagccacaaatacgatccattgttggtcaaattagaccagatcgacaaactttacttttttctgcaacaatgccatacaaagtagagcgtttggcaagagaaatattaactgatcctattagagttacagttggtcaagttggcggtgctaatgaagacattaaacaagttgttaatgtactcccttctgatgttgagaaaatgccttggcttttggagaaattgcctggaatgattgatgatggagatgttcttgtattcgcatctaaaaaggctagagtggacgagatagagaaagagttgaatcagagaggattcagaattgctgcgcttcatggcgacaaggatcaagcttctcgtatggagaccctgcagaagttcaaatctgggacatttcatgttctggttgcaactgatgttgctgcacgaggtcttgacatcaaatcgattaaaacagttgtcaactttgatattgcaaaagagatggatatgcatattcaccgaattggaagaactggtcgtgctggcgataaagatggcactgcatatactctgattacacagaaggaggcacattttgctggtgaactggttcacagtttgattgctgctggccaggatgtacccaatgaactcatggatctggctatgaaggatggaagattcagagcaaaacgagactccaggaaaggtgggaagaaaggtggcaaaggaaaaggtggtgttggcggtgctgggcgcgggcgcggtgtgcgtggagttgattttggcctcggcataggttacaatgccgaatctggttcacaagtgcctgctgcaagatctgctgctgtaaattctctgaagacagggatgttgcaacgatttaagagcagctttgtctctggatcttcaaatacaccaagcagcagtgcaccttcctttgtaagaccagcactccgtggctttgtgtctggcggcaccattggaggagacacacggcctgcacaggcagcccccactttcatccctgcatcccggcctgcacagcctgcccccgcggtccctgcatcccagcctgcaggaaataacaacgaaaatgggaacccgaatccagaaagttcacgggatcagttcagggagagaaaacgaccatcaggttgggatcgctag

SEQ ID NO: 77703 - protein, 766 aa, Zea mays
MSKRPKLEGFSIPRPTSYNFERSQSVQRLYRPTDDPDLDDIAFSDDAPSDAQASTAVEGKAENEEEMDPLDAFMAEIQEEIRAPPPPPKPEALRRTDSDDDEDDPVESFLRAKKDAGLTLAADVMRAGYDSDEEVYAAAKAVDAGMMEYDSDDNPIVIDKKKIEPIPALDHSTIEYDAFTKDFYEEKPSISGMSDQEVTDYMKSLSIRVSGFDVPRPIKNFEDCGFHVPLMNAIAKQAYEKPTTIQCQALPIVLSGRDIIGIAKTGSGKTAAFVLPMIVHIMDQPELEKEEGPIGVICAPTRELAHQIYLEAKKFAKPYNLRVAAIYGGVSKFDQFKELKAGCEIVIATPGRLIDLLKMKALKMFRATYLVLDEADRMFDLGFEPQIRSIVGQIRPDRQTLLFSATMPYKVERLAREILTDPIRVTVGQVGGANEDIKQVVNVLPSDVEKMPWLLEKLPGMIDDGDVLVFASKKARVDEIEKELNQRGFRIAALHGDKDQASRMETLQKFKSGTFHVLVATDVAARGLDIKSIKTVVNFDIAKEMDMHIHRIGRTGRAGDKDGTAYTLITQKEAHFAGELVHSLIAAGQDVPNELMDLAMKDGRFRAKRDSRKGGKKGGKGKGGVGGAGRGRGVRGVDFGLGIGYNAESGSQVPAARSAAVNSLKTGMLQRFKSSFVSGSSNTPSSSAPSFVRPALRGFVSGGTIGGDTRPAQAAPTFIPASRPAQPAPAVPASQPAGNNNENGNPNPESSRDQFRERKRPSGWDR

SEQ ID NO: 77704 - DNA, 1506 bp, Zea mays; identical to SEQ ID NO: 66174
  CDS (1)..(1506)

SEQ ID NO: 77705 - protein, 501 aa, Zea mays; identical to SEQ ID NO: 66175

SEQ ID NO: 77706 - DNA, 1857 bp, Zea mays; identical to SEQ ID NO: 66176
  CDS (1)..(1857)

SEQ ID NO: 77707 - protein, 618 aa, Zea mays; identical to SEQ ID NO: 66177

SEQ ID NO: 77708 - DNA, 2127 bp, Zea mays
  CDS (1)..(2127)
atgtctcccgcccttgccgctggcgtggagcccatggccgtcgacgattccgcctccaagaaggccaagcgcaagcagctcaaggccgccgccgccgccgcggaggcagaggcggaggccgcttcggtcaagaagaaagagaagaaagagaagaagcgaaaggtgaaggagccgtcccctccgctcccatcggccgcgtcctctgatgaggaagagaaaagcagcaccagctccgaggagacagcacccgcggcgaaaaaagcgaagaaggagaagacgaagaagaatgttgatgtctcgtcttcagcctcagatgacgatggcgagatcacagccagcagcgatgaggaccccgcggacccgaacgcgctgacgaacttcaggatatcggagtcgctgaggcagagcctcaggtccaaggggatcaagtcactgttccccattcaggccaccactttcgatctcgtactcgatggcagcgacttggttggccgagcgcgcaccggtcagggaaaaactttggcttttgtcttgcccatattggagtctttggttaatggggcaaacaaggcatctagacggactgaacatggcaggaccccaagtgttctcgttctactaccaacaagagagctggccaatcaggtgcacgctgactttgagttttatggtgcaacatttgggctctctgcatgttgtgtgtatgggggatcaccttatcgtcctcaagaaatggcattgagaagaggtgtggatattgttgttggaactcctggtcgtgtcaaggatttcattgttaaaggaactctcaatttgaaatgcttgaaattccgtgtccttgatgaagctgatgagatgctaaacatgggttttgttgatgatgtcgagctcattcttggcaaggtagaagatgctaccaaagtacagacacttctgttcagtgccactctgccagattgggtgaataagctctctatgaggtttctgaaagttgacaggaaaacagttgatcttgtcggtaacgagaaactgaaggccagtgcatctgttaagcaccttgctcttccttgtaacaaggcagcaagggcacaacttattccagatattatccgatgttacagccatggaggccgaaccattatcttcactgagacgaaggattctgcatcagagctttctggtttgattcctggatcccgtgccttgcatggagatgttgtgcaagctcagcgtgaagtcattcttgctggatttcgtagcgggaagttccaggttttggttgctacaaatgtggcggctcgtggtctggatattaatgatgtgcagcttatcattcagtgtgaacctccccgggacgttgaagcttacatacaccggtcaggtcggacagggagagcaggtaatactggtgttgctgtcatgctttatgagcccagatataagcacagtgtcagcagactagaaagggagtctggggttaaatttgagcatatctctgcgccacaacccactgatgtagcacaatctgctggcagtgaagctgcagatgcaattgcgagtgtgtcagacagtgttattcctatcttcaggcagcaagcagagcagttgctaagctcttccagtctgtctgcagctgacttgcttgccaaagcacttgcaaaggcagttggttacacggacataaagaaaagatcattgttatcttccttggaggattacagtacactacatcttcaaactggcagaccgatgtggtcacctgggtttgcttttactatattgaaaaggttcatgccagaagataaacttgcagatgtaaagggtgccaccctcaccgctgatggaacaggagttgtatttgatgttcctgcagcagatgttgaagattacattcaagcttcggagagtgccgcacaggtgacaattgatgaagtcaagcaactgccacccttgcaagagaaggaccagtcgagaggcaactctgggggaggaagatttggccatggaggtggccggagattttctggtggtggtggcggcggcagagggttttctggccggggaggtggcggcagagggttttctggcagaggaggcggcggcagtagatttaacaggaggaattag

SEQ ID NO: 77709 - protein, 708 aa, Zea mays
MSPALAAGVEPMAVDDSASKKAKRKQLKAAAAAAEAEAEAASVKKKEKKEKKRKVKEPSPPLPSAASSDEEEKSSTSSEETAPAAKKAKKEKTKKNVDVSSSASDDDGEITASSDEDPADPNALTNFRISESLRQSLRSKGIKSLFPIQATTFDLVLDGSDLVGRARTGQGKTLAFVLPILESLVNGANKASRRTEHGRTPSVLVLLPTRELANQVHADFEFYGATFGLSACCVYGGSPYRPQEMALRRGVDIVVGTPGRVKDFIVKGTLNLKCLKFRVLDEADEMLNMGFVDDVELILGKVEDATKVQTLLFSATLPDWVNKLSMRFLKVDRKTVDLVGNEKLKASASVKHLALPCNKAARAQLIPDIIRCYSHGGRTIIFTETKDSASELSGLIPGSRALHGDVVQAQREVILAGFRSGKFQVLVATNVAARGLDINDVQLIIQCEPPRDVEAYIHRSGRTGRAGNTGVAVMLYEPRYKHSVSRLERESGVKFEHISAPQPTDVAQSAGSEAADAIASVSDSVIPIFRQQAEQLLSSSSLSAADLLAKALAKAVGYTDIKKRSLLSSLEDYSTLHLQTGRPMWSPGFAFTILKRFMPEDKLADVKGATLTADGTGVVFDVPAADVEDYIQASESAAQVTIDEVKQLPPLQEKDQSRGNSGGGRFGHGGGRRFSGGGGGGRGFSGRGGGGRGFSGRGGGGSRFNRRN

SEQ ID NO: 77710 - DNA, 1554 bp, Zea mays
  CDS (1)..(1554)
atggatccacgcgccaggtatccttcgggcatgggcaacggccgcggtgggacccctaactactacggccgcggcccaccgccgcaacagccgcatcagcaccaccaccagcagcagcagcagacatcgggggcgcatcaccaccagcagtacgcgcagaggcagcagcaacagcaccgccacagccacaaccaccagcagcaacagcagcagcaccagagtcagcagcagcagcagcagtggctgcggcggaatcagattgcccgcgaggccgcgggcgcagccgtgaccagcgagccgaaggccctggcgccatccacggccgccgacggcgtcaattcgagttcgcaagattggaagacccaattgaagcttccgcctcctgatacacgctacaggacagaggatgttacagccaccaagggaaatgagtttgaagactattttctcaagcgtgaactcctaatgggtatttacgaaaagggatttgaaagaccctctcctattcaagaggaaagcattcctattgctttaactggtagtgacattcttgcaagagcgaagaatggaactggcaagactgctgcattttgtattcctgcactggaaaagattgatcaagaaaaaaatgctattcaagttgttatattggttcccacaagggaattggctctacaaacatcacaagtttgtaaggagcttggtaaacatttgaagatccaagttatggtcaccactggtggaaccagcttgaaggatgatattgttcgtctgtaccaacctgtgcacttaattgttggaacacctggccgtattttggatcttacaaagaaaggtgtttgcattttgaaggactgttcaatgcttattatggatgaggcagacaagcttctctctcctgagtttcaaccttccatagaacagttgattcgctacctccctgctagtcgacagattttgatgttctcagcgacattccctgtgactgttaaggagttcaaggacaaatatcttcctaaaccttatgtgattaaccttatggatgaacttacactgaagggaattacgcagttctatgcttttgttgaagaacgacagaaagttcactgtctcaacaccctcttttccaagcttcaaatcaatcagtcaataatattctgtaactctgtaaatcgtgttgaactattggcgaagaagatcacagagcttggttattcttgcttctatattcatgcaaagatgctacaggaccaccgcaatagagttttccatgatttccgtaatggagcgtgcaggaatcttgtttgtactgatctttttacaaggggaatagatattcaagctgtgaatgttgttatcaattttgatttccccaagaactctgaaacatatctccacagggttggtagatctgggagatttggccaccttggtctggccgttaatttgatcacctatgaggatcgatttaacttgtataggattgaacaagagcttgggactgaaataaaaccaattcctcctcagatagaccaggctatatattgccaatga

SEQ ID NO: 77711 - protein, 517 aa, Zea mays
MDPRARYPSGMGNGRGGTPNYYGRGPPPQQPHQHHHQQQQQTSGAHHHQQYAQRQQQQHRHSHNHQQQQQQHQSQQQQQQWLRRNQIAREAAGAAVTSEPKALAPSTAADGVNSSSQDWKTQLKLPPPDTRYRTEDVTATKGNEFEDYFLKRELLMGIYEKGFERPSPIQEESIPIALTGSDILARAKNGTGKTAAFCIPALEKIDQEKNAIQVVILVPTRELALQTSQVCKELGKHLKIQVMVTTGGTSLKDDIVRLYQPVHLIVGTPGRILDLTKKGVCILKDCSMLIMDEADKLLSPEFQPSIEQLIRYLPASRQILMFSATFPVTVKEFKDKYLPKPYVINLMDELTLKGITQFYAFVEERQKVHCLNTLFSKLQINQSIIFCNSVNRVELLAKKITELGYSCFYIHAKMLQDHRNRVFHDFRNGACRNLVCTDLFTRGIDIQAVNVVINFDFPKNSETYLHRVGRSGRFGHLGLAVNLITYEDRFNLYRIEQELGTEIKPIPPQIDQAIYCQ

SEQ ID NO: 77712 - DNA, 1926 bp, Zea mays; identical to SEQ ID NO: 66182
  CDS (1)..(1926)

SEQ ID NO: 77713 - protein, 641 aa, Zea mays; identical to SEQ ID NO: 66183

SEQ ID NO: 77714 - DNA, 1233 bp, Zea mays
  CDS (1)..(1233)
atggcaggattggcaccagaagggtcgcaatttgatgacaagcagtatgacaagaaaatgcaggagatattaactgaagacttcttcacttcatatgatgatgtttgtgaaagttttgacagcatgggactgcaagagaaccttctgagaggcatctatgcctatggttttgagaagccatcggctattcagcaaaggggaatagttcccttctgcaaggggcttgacgtgattcagcaagctcagtctggaactggaaaaacagctaccttctgttctggaatcttgcagcaacttgattatggattggttgaatgccaggcattggttcttgctccaacccgtgagcttgctcagcaaattgagaaggttatgcgtgctcttggggactatttgggtgtcaaagtgcatgcctgtgttggtggaacatctgttcgtgaggaccaaaggattcttgccagtggtgtgcatgttgttgtgggcacaccaggacgtgtgtttgatatgttgcgcaggcagtctctccgtcccgacaacatcaagatgtttgtgttggatgaggctgatgagatgctctcccgtggattcaaggatcagatctatgatatcttccagcttcttccatccaagattcaggtcggtgtcttctcagctaccatgccccctgaggcccttgagatcacgcgcaagttcatgaacaaacctgtgaggattctcgtcaagagagatgagctcacccttgagggtatcaagcaattctatgtcaatatcgacaaggaagattggaagctcgacactctgtgtgacctgtatgagaccctggcaatcacccagagtgtcatctttgtgaacacacgccgcaaggtggactggctcacggacaagatgaggagcagggaccacaccgtgtcagctacacacggtgatatggaccagaacaccagggacatcatcatgagggagttcaggtccgggtcctctcgtgtgctcatcaccaccgacctgctcgcccgtggtatcgacgtccagcaggtctcacttgtcatcaactacgacctgccgacccagccagagaactacctccaccgcatcggccgtagtggtcggtttggaaggaagggtgttgccatcaacttcgtcacccgcgacgacgagcgaatgctgtttgacatccagaggttctacaacgtgaccgttgaggagctgccggccaatgtcgccgaccttctctag

SEQ ID NO: 77715 - protein, 410 aa, Zea mays
MAGLAPEGSQFDDKQYDKKMQEILTEDFFTSYDDVCESFDSMGLQENLLRGIYAYGFEKPSAIQQRGIVPFCKGLDVIQQAQSGTGKTATFCSGILQQLDYGLVECQALVLAPTRELAQQIEKVMRALGDYLGVKVHACVGGTSVREDQRILASGVHVVVGTPGRVFDMLRRQSLRPDNIKMFVLDEADEMLSRGFKDQIYDIFQLLPSKIQVGVFSATMPPEALEITRKFMNKPVRILVKRDELTLEGIKQFYVNIDKEDWKLDTLCDLYETLAITQSVIFVNTRRKVDWLTDKMRSRDHTVSATHGDMDQNTRDIIMREFRSGSSRVLITTDLLARGIDVQQVSLVINYDLPTQPENYLHRIGRSGRFGRKGVAINFVTRDDERMLFDIQRFYNVTVEELPANVADLL

SEQ ID NO: 77716 - DNA, 1224 bp, Zea mays; identical to SEQ ID NO: 66184
  CDS (1)..(1224)

SEQ ID NO: 77717 - protein, 407 aa, Zea mays; identical to SEQ ID NO: 66185

SEQ ID NO: 77718 - DNA, 1554 bp, Zea mays; identical to SEQ ID NO: 66186
  CDS (1)..(1554)

SEQ ID NO: 77719 - protein, 517 aa, Zea mays; identical to SEQ ID NO: 66187

SEQ ID NO: 77720 - DNA, 1500 bp, Zea mays
  CDS (1)..(1500)
atgcaccagcctagagctcgctacccacccggctatggctccggcggtggaggcggagccggacgtggcggtggaggcggaaatggaggaggtggcggaaaccacaactactacggccgaaacccgcagcaacaccactaccaccagcagcagcagtcgcagcactctcataggaactcttcgtaccagcaacagtggctgcggcgagaccaggcccccgccgttgcgggggcagcgtccggaaacgctgtggccaagacggcgtctcagcttgacgccgtaggctcgagctcccaagactggaaggctcaactaaatataccagctccagatacacgctacaggacagaggatgtcactgcaacaaaaggcaatgagtttgaagattatttcttgaaacgtgaactgcttatgggaatctacgaaaagggatttgaaagaccatctcctattcaagaagaaagcattcctattgcgctgactggaagtgatattcttgcaagggcaaaaaatggcactggaaagactgctgccttttgcattccggcacttgaaaaaattgatcctgaaaaaaatgctattcaagttgttatactagtaccaacaagggaactggctctgcaaacttcacaagtgtgtaaagagcttgggaaatacctaaacattgaagttatggttagcactggaggaaccagcttgaaggatgacatcatgcgtttataccaacctgttcatctactcgttgggactcctggccgaatacttgatcttaccaggaagggcatttgtgtgctgaaagattgttcaatgcttgtcatggatgaggcagacaagctattagctccagagtttcagccttctgtggaggcacttattcatttccttccacctagtcgacaactgttgatgttttcagcaacctttcctgtaactgtcaaggaattcaaagagaaatatctgcctagaccttatgtgattaatctaatggacgaactgaccctgaaaggaatcacacaatattatgcttttgttgaagaaaggcagaaagttcattgcctgaatacacttttctcaaagcttcaaattaatcaatccattatattctgcaactctgttaatagagttgagctgctggctaaaaaaataactgaactcggttattcatgcttctacattcatgctaagatgttgcaagaccacagaaatcgagtatttcatgattttcgtaatggtgcttgcagaaaccttgtgtgcacagatctgtttaccagaggaattgatattcaggctgttaatgtggttattaattttgacttccctaagacatctgagacatatttacacagggttggccgttctgggagatatggacaccttggtttagcagtgaacttgatcacttatgaggaccgtttcaacttgtataggattgagcaagagcttggaacagaaattaagacaatacccccgcagatcgacctggccgtatactgccaatga

SEQ ID NO: 77721 - protein, 499 aa, Zea mays
MHQPRARYPPGYGSGGGGGAGRGGGGGNGGGGGNHNYYGRNPQQHHYHQQQQSQHSHRNSSYQQQWLRRDQAPAVAGAASGNAVAKTASQLDAVGSSSQDWKAQLNIPAPDTRYRTEDVTATKGNEFEDYFLKRELLMGIYEKGFERPSPIQEESIPIALTGSDILARAKNGTGKTAAFCIPALEKIDPEKNAIQVVILVPTRELALQTSQVCKELGKYLNIEVMVSTGGTSLKDDIMRLYQPVHLLVGTPGRILDLTRKGICVLKDCSMLVMDEADKLLAPEFQPSVEALIHFLPPSRQLLMFSATFPVTVKEFKEKYLPRPYVINLMDELTLKGITQYYAFVEERQKVHCLNTLFSKLQINQSIIFCNSVNRVELLAKKITELGYSCFYIHAKMLQDHRNRVFHDFRNGACRNLVCTDLFTRGIDIQAVNVVINFDFPKTSETYLHRVGRSGRYGHLGLAVNLITYEDRFNLYRIEQELGTEIKTIPPQIDLAVYCQ

SEQ ID NO: 77722 - DNA, 1290 bp, Zea mays; identical to SEQ ID NO: 66198
  CDS (1)..(1290)

SEQ ID NO: 77723 - protein, 429 aa, Zea mays; identical to SEQ ID NO: 66199

SEQ ID NO: 77724 - DNA, 2301 bp, Zea mays; identical to SEQ ID NO: 66188
  CDS (1)..(2301)

SEQ ID NO: 77725 - protein, 766 aa, Zea mays; identical to SEQ ID NO: 66189

SEQ ID NO: 77726 - DNA, 2019 bp, Zea mays; identical to SEQ ID NO: 66190
  CDS (1)..(2019)

SEQ ID NO: 77727 - protein, 672 aa, Zea mays; identical to SEQ ID NO: 66191

SEQ ID NO: 77728 - DNA, 1224 bp, Zea mays
  CDS (1)..(1224)
atggcggcgcccaccacctcccgccgcggccccggcggcgcgcgcaacatggacgatgaaaacctcaccttcgagacctccccgggggtcgaggtcgtcagcagcttcgaccagatgggcatcaaggacgacctcctccgcggcatctacggctacggcttcgaaaagccctccgccatccagcagcgcgccgtcctccccatcatcaacggccgcgacgtcatcgcgcaggcccagtccggcaccggcaagacatccatgatctccctcaccgtatgccagatcgtcgacaccgccgtgcgcgaggtgcaggctttgattctctcgcctactagggagcttgcttcccaaacagagagagttatgctggctattggtgaccacctcaacgtccaagtacatgcttgcattggtggaaaaagtatcggtgaggatatcaggaggctcgagaatggggtgcatgttgtctcgggaactccaggcagagtctgtgatatgatcaagaggaggaccttgcgaacaagagccatcaagcttctagttctggatgaagctgatgagatgttgagtagaggttttaaggatcagatttatgatgtctacagatatctcccgccagaacttcaggtggttttgatctctgcaactcttcctcatgagatcttggagatgactagcaagttcatgacggaaccagttagaatccttgtaaagcgtgatgagctgaccctggagggcatcaaacaattttttgttgctgttgagaaagaggaatggaagtttgatactctttgtgatctttatgatacactcaccatcacacaagctgttattttctgcaatactaagagaaaggtggattggcttactgaaaaaatgcgcagcaataacttcacagtatcggctatgcacggtgacatgccccaacaagaaagggatgccattatgggcgagttcaggtccggcgcaactcgtgtgctaataactacggatgtttgggctcgaggactggacgtccagcaggtttcacttgtcataaattatgatctcccaaataatcgagagctttacatccatcgcattggtcgctctggtcgttttggacgcaagggtgtggcgatcaatttcgtgcgcaaggatgacatccgtatcctgagagatatagagcagtactacagcacgcaaattgatgagatgccaatgaatgttgctgatcttatttga

SEQ ID NO: 77729 - protein, 407 aa, Zea mays
MAAPTTSRRGPGGARNMDDENLTFETSPGVEVVSSFDQMGIKDDLLRGIYGYGFEKPSAIQQRAVLPIINGRDVIAQAQSGTGKTSMISLTVCQIVDTAVREVQALILSPTRELASQTERVMLAIGDHLNVQVHACIGGKSIGEDIRRLENGVHVVSGTPGRVCDMIKRRTLRTRAIKLLVLDEADEMLSRGFKDQIYDVYRYLPPELQVVLISATLPHEILEMTSKFMTEPVRILVKRDELTLEGIKQFFVAVEKEEWKFDTLCDLYDTLTITQAVIFCNTKRKVDWLTEKMRSNNFTVSAMHGDMPQQERDAIMGEFRSGATRVLITTDVWARGLDVQQVSLVINYDLPNNRELYIHRIGRSGRFGRKGVAINFVRKDDIRILRDIEQYYSTQIDEMPMNVADLI

SEQ ID NO: 77730 - DNA, 2241 bp, Zea mays; identical to SEQ ID NO: 66194
  CDS (1)..(2241)

SEQ ID NO: 77731 - protein, 746 aa, Zea mays; identical to SEQ ID NO: 66195

SEQ ID NO: 77732 - DNA, 1842 bp, Zea mays; identical to SEQ ID NO: 66196
  CDS (1)..(1842)

SEQ ID NO: 77733 - protein, 613 aa, Zea mays; identical to SEQ ID NO: 66197
